United States Patent Application Publication US 2014/0057251 A1 - sequence listing, part 95

SEQ ID NO: 171276 - DNA, 635 bp, Cannabis sativa
atacaccacaaaacttatcaaaagatctatattttagcatttggaggaaatttttatcgggcaaaacaattagagagttaaacttaatgaggtgcattttggacaaaaaaaactatgaacaaaattattgagaattggttaactcaataaattcttgttggcaaaagaggtgcattttattattattttttttacaatgcttacggtaaacaagagggttttagggccaatttagcataattgtacggtagggaaaaacaattatagttgtattgtgtaaaaaaataactgtagctgtgttgtaagaaaaaaaaaataactgtataagaattgtaaaaaaaaaaacagaattgaatgtttgataattacaaatttaaaagtgttgtgagtagttaagattttattatattaataatgataataatattatctagttcattagaatcacaaatatataaaaaaaaattatattatataaaatttttattttctatatagtgttaattattttttctcatagcataaatttacatgtatttgatcaaaataatttataatatttttaaattgtatttttatcacttgtaaaagaaattgtaatttataaaaaattctaagttgatgtagtttgttaa

SEQ ID NO: 171277 - DNA, 698 bp, Cannabis sativa
ttaaaactcttactcattccagtacttgacgatgtttgccacatatccttcctctaattactctttttacgattcaaactttcagcccccttagtagtgagagttaagtccacaatcttagggtaggtcttcacaacccctgattgcttgactgccataatcacatctctagcaatatactcttgaaggcctctgatgaacttagcctttcttgcagcttcattggccacttcatcagaagcaaacttagtcagctggtcaaacttggtagcatattcagtcacagtcatgctaccctgaactaattgtgcaaactcttcagcttgagcagcacgaatggattcattataatacttctcttaaaatagtgccttgaatgcatcccaagtcatatatattatgaccttgagaagaaatctcccaccatattcgggcatcattctgtaacatatagatagcgtatcgtactcagtcattatcttcgactcgcataaagtcaaagataaaagtaatcatactcatccactgttatactttcagtgggtctgggccgcccttaaatataggtgggttttgtttcctgaactgctgatatattggctccatacgatcccccatattttatggcacaggtgctactataggtgcagaacaagcctgttgctctctcaggtctcgaatctgctccccttgctgcc

SEQ ID NO: 171278 - DNA, 540 bp, Cannabis sativa
tttttttttttttttgagtcaaatgtaaattaagtttttaaaactcatatttaatgtttttataattttaagcagtttcatagggtaatttttaataattttttgagcacctctgttttattgtaatggattacttcatcttttattgtgttttgtgtttttttttaattataaattttacttttatataatcaaaactaatttcttgataaaaaaattagcttcttgataaaaaaatcaattttttgatgaaggatctttgataattgattttgatcgcatgagaaactaaacaattagaatcacaggagagagaaaaaaaaatttgtgtagctagaaagagtgtgatcctattttgaaaaattaattatcttttttaatgtttttttatgacattttctatttaaatacccatatatttaattagtttaattataaaataccatagtggcattaattttatatgtcatatatatcaaaatttttatttattttcttatatttttataaatatacctaatatatgtatatatatatata

SEQ ID NO: 171279 - DNA, 824 bp, Cannabis sativa
cagacccagacacagacccgaaccctgaaactaaattaaaatcaaaactgcgattaggatccaaacaacatgaccagaccgggacctaggacccagaccaagatggtggacatggacatgggcctcagaacccagacccagatcgaacacgggtatcagaattaggtccgagacccaagacctgacccggacccagacattgacctagaactcagaccgggacctgggacccaaagtggaactagactgggacccgagactgtgaaccatatttggactcagggcttagacctgacccatagttagtgttatgatctgggaccaataccttgactaaaacccagacctagactcggacccagaccctgacctagacccagatccgtaccccaaacctgggtctgagtccgagaattggaatctgacccagacctagacccaagccgaaacacggacctgaatcaaatctcaaatcgagactcaagatacaaacccagacacaaacttggacccaaacctggacccaggacccggaatgagattggagactcagaccaaaccaaagacaaaatcctagattggggacccaaactaaaaattagaaccagaataaggacctaggactgcgactgggacccaagacccgaccccggtctcggtcccaaacctagactcggacataggcacggacctagaccctggatccgaatcagaatgagaccaggacccatgattgggattcgaatcttgaccaacgacccgttacttggacccaacctgtagtcagtgtctagatctttgaatcataccaagacccgaacttg

SEQ ID NO: 171280 - DNA, 547 bp, Cannabis sativa
tctagtaagtcaacttggtactttgtgtataagacaaaataaagtggtagctcatttataataatgaatattgattagtaacttttttcaattagtaattccagaccaattaaatattttttgtcctaaatttaatttttttatttttgtttcgtggtaaaatttctttaagtttatttttttttttttttttgtaaatttaaggtgtcagttggatatcaccgttaaatatcaactaaattactattgtatcgacttcgagattttattgttacacatacataggtgtatacagtggtaatccagttaatatttaacgataatatctaacaggcgtgtcaaatttgcaaaaaaaaataaatttaaagagattttgccaaaaaaatatatatatatataagaaagttaagtgtataaaaattaaaacataaaggagtttcgttacaaattgctcataaaaaaaatattaaattgtaggacgaaaaatatttaattggtatggcattactaattgaaaaaagttactaataaaacaaaaatatctcta

SEQ ID NO: 171281 - DNA, 832 bp, Cannabis sativa
atctcttggtcctcctcaaagtagaaagttgtctctcattctagtagtactgagtaccgtgctcttgcaaatggggcttcttaagtgttttggattgaatctctccttgttgaactcaacatcaccttaaattttgctccaaccatgtactgtgacaatgtcagcactctctaatccaaatctccatgcccacaccaaacacgttgagcttgactatcgttttgttcgtgaacatgtactcaacctgccaagggtctcctgcatatatatgctccttctactgatcagattgtggattgttcaatgtaaccaccggttacttcttgctttcacgagctccgtaccaaactcaccgttctacttagtctgctgagtttgcgaggggatgttcaaccataattaatgaactgttttaatttgtattcaaattttggctttttctatcttttgctatgtacttcacacgtataccctggtcccctcttctctttaactatttagcttgtaccaatctgattatttaatgaatatatacaacattattttacccattccttctgacaatatgcatgtattatctcaaaaaataaattaaaaaattaaaaaaaaaatagttgatatgggctataccctcatttgaaaaaaaaaaaaagaaaaataaaaaagcaaacataaaaagtttatgtagagctctttcaatacatcgtattgtattgtattgtattaagttggattgtaatatattgtattagtattatttaatacaatattatcactacaagaaatgtcacttttaatgtgctggcaaaagttggtattgcgctagtaaaat

SEQ ID NO: 171282 - DNA, 718 bp, Cannabis sativa
atattcattagctatatcaaatattcattcatagaattcagttagggtttaattataagacatcctaagctcattaaatttagtttgaagcataataaatctagagcgcttaacattagagcttccttcaaactcatctcccaaccttccttagcagattcacaatatgatataagtttaatataaccttcacctacaccattaaatatagcatgcaacgctttgctattgtaggtagaaagtttatcatcttcaatagaccatttcagttcagattttattttagaactacctgaggaatctgtctcaactggagaagaccaacctgatagaaccatcctccaagctttcttatcctgagattttatgaaggccctcattctaactttccaataaggataattagaatcattaagcaaaggtggtctggaaatcaaactttcttttgcaaaaaatgacattttccacaaaaatgttaaaaggaccaccgtaagagtttagtgtcccgctctgatactaattgaaaaactgagtttttgcaaatgtcaataatatataaaaaaaaaataaaattgtatacgtctgcagaaacagaatgtaattctgttactgcagaaaccagttttacaacgacagaacagacaaatataaaaataattgcagaaaattaaatcacttgacacaagagatttgtacgtggtatcagtgttctttcgaa

SEQ ID NO: 171283 - DNA, 769 bp, Cannabis sativa
tactaagttgttaatttcttttgtttaagtcgtgaattattaatatttatgtggtttgcttgttatgcatccaatatcttttcttctatcttagtaatgtaactttatcctttcttcttattattcttttatctaaatatatttttttattatttaatttattttttaaaaaataattcttattattgaattgggttgccgtaataaaaaaaaggattagggtcgttgtcgttgaggtatcctttaggaatcaaactaaaaaaaaatcaaatagatgaggagtactactgtcaactttcgcacccgaaaacacatgccaaaatattttctttttcaatttttttatggcgatgtttgttatagttataatattaagcttgtgaatttttaaatttttttgaatagtttacattattggctacaaagttcctaatattctaatttaccaactgtattcaaaaaacttaaaacctatttttggcactgtaaactattcaaaaatttacagagatgatattatagtaccattacaaataaaaaaaattgtgacatctattttcaggtgtggaggttgactaagaaattgtaataggagattataattagcacttaagtaaattttgaaaattcatttattttgttgaccgttggacccaaaagtagtatgttttacatttatcaactcacaagcgcacgaatctttattgtagtgtagagattatgaagaacgaagtcaaattcatgggaattgcgtgagatggaagaaaat

SEQ ID NO: 171284 - DNA, 1062 bp, Cannabis sativa
  modified_base (439)..(445): a, c, t, g, unknown or other
  modified_base (737)..(739): a, c, t, g, unknown or other
ccactcctcatatacagttcataacagcaagaccttaaggcatgtatttcatgtttatttgttttattatcaagcaatttgggtaaaggccatatatggttgtgttaacacagattttcgttcattgtattaaagcctaaatcgtgatggatttgcacagaaaataaacgcagtaaaggaaaaaataagaatacaaagcttttttacgtggttttgcagtaagaattctgcataattcacgagtctatcttattagatatttctgatacaattcaagggctttttctcttaaggattttccctccctttttcagtgtaacctgcttttatttatagttacatacgagagcagttaattacaaatcgaactgacatcttacaacaataatcccctgaaattgtgggatttgattacgtcccacgtaaaataaatgcggtnnnnnnntgaaaatcacacagctgtgattggtccgcttttactgggtcaatgcatacgtgtattatgtattaaatttaaatacgttgtaaagcggtaaagcgtatcgctctgggacatctcgctaggagcatagcaacaataaccctggtagcgagccagagcttttctcatgtctttccgaggttgataatgtaaatctcgtcgtttatgctattgaagacataacgctccatctgacaatcgcagttcttggtgacaaagtgaacttcaccagtcaacatcatttgaatgtcagctnnnatctgagagagctgactcgacggagctgtggatctcattgaaagatttctggagctgattagtgaaggtaccatgagtgtgccttcgtatagcgagatggatgcttccctattcgtagttttggattcgttttgctgttatgcttagtttgtataatgtgtattagacgctaagtgtcttaacagtcatcatgtctcgtctatgtctcttcatgcgtagcgaggttgatgcctcgtcttgcactacttatgttgtatggtttcttattaacgcaggagacaacagttcgtatatctttacctcgcttaagatcttacagtcag

SEQ ID NO: 171285 - DNA, 670 bp, Cannabis sativa
attgatctaatcaaatagttcaaaataaactttgaaaactacaacctaataaatattttgtttatttataattaattttaaactctatttattatattcaagtaacaaaaatttctaacctaatttttattttatttacttatttgattttatgactaactaaaattttatttttttatttaattttgaatatataagataatatttttttatttaatttctttttcaaaataataattatacctaaaaaatacaacttttattaacttatgtttctctatataattttataataataaatacaattaataaaataattatagtataattagtaagtattcctatcttaatgatgaaagggcatgagttcaatccttggcaatagcatgttttttttataaatttttatatatgcatatatattttaagtatgacaatatagaatttaattattaatctaaactaaatcaaaataataattaatttgactggatgttggatgtattgaatttttggacatctcatccaacattctatccgattcaattgaatattcaaaaataacacccatatattctgatccaatcacaattagatattcaatgtttggcggtagattgtaattggatcggtcagttgtaattgaattggattaatttatgcacacccc

SEQ ID NO: 171286 - DNA, 500 bp, Cannabis sativa
gccaaaaaagatgacagatctctattggtatctggcaagctcatacactattgcggtcaaaatccacacaatagggctccggacatcagtccgtagctatatccaacgccctgaccttaggcctgcctaccaacatccaatggctaatgggacgcactccttacacaagagtgggaaaaggtccgcaacaagagacctgtgggactcaatttcccagccactaaaaatatggcaagtccattgcgctgctttacagtcttgctactcaggctacaggtcaatcctgatttattatttacggtaagtgtcaaaatacacaagtcaagcaaacacgcactttttgtgataggtagctcagaaataagacagctggaaaaacacctatttgccattagcatggtaattccaaatgccatctagccaaaacccgaagatgacataccatgggaatattatccgctagagtatctccaacgactagaagaagatatgaatcatta

SEQ ID NO: 171287 - DNA, 608 bp, Cannabis sativa
cttacatcaactataaggtcataacttcaatatatatttttttatttttaatttaagtttttaaattaatttaataatttaatttttttaaaataataatttaaatttcttcaatatttttttattattaatatggaacacttctcatactatgacaatttaaagtttgtaattattatagtgggaagtctttaatttttctttatttatatatattgatcacattattacatatattataaaattgaacaacaaaataacacatgcaataattataaaaaataaaaagttatgattatataaaatttaataataaattttgtcaaaaaaataataattttaaaaaatatctcaatggtctcatctaaatttgatataatgtatgataattttggataattatgagaagctttaaacgtactaaacgattgaatttctacccttgtaaagatgtaatttatttaattctatttatttttaatttaatttttagattaatttaataatttaattttcttaaaaaataataatatatggaacaattcttatactataaaaatttaaagtttgaaattatcatggtgagtattaagagttagtcccacatt

SEQ ID NO: 171288 - DNA, 702 bp, Cannabis sativa
aaaaataaatagtcaaattatattatatggcaacaaacagaagaaagagataaagaaaagattatatattgagcaccagtgctcctttatattttaattaaaaaaaaaatgtaattggctaaaaatcaaaagtgtctaaagtgggttcattgcgcaactattttttcgttgacctaatcggaattgataaataataaaaaaaaaaacataggtagctaatattaaattgccaattaatttaatactgttacactcgctttaagatatctctattattatagattgtaattaagaagaaaccttttacattaattcattttagtatccaattatttgtagttgtgtgaaaatgattagaccagctcccacagtagatgtaaaaaaatttatatgtttggcaaaataatattttgtaatatatttgtatcgacttttagtattatactcgatcgtaattatgtaaaatttaaacttttcataaaagtatataaaaaaaaattataactttatcattaatattattatttttatattatgtaaaataataaaaaaaaaattaaataatccatcattaataatataactaaatatattaatgaaataataatgtgccataaaatttaataataaaattatatatttatggtgatataaattttagggtgattctacagtgcacccccttaaaagggatatactgat

SEQ ID NO: 171289 - DNA, 991 bp, Cannabis sativa
tatatatatatttatataatcaatccgtgagaataaggaagaattttatttatttatttatttatttttcaaaatgtcaacttttctttttcttttttaaaaatatttgcgaatatatatcatttttgaaagaacaaatatatttaaaggcattatttttcatacaaatatagtacgtactatatatattccataggttcagaattaaccattaattaacaatcataatatctaaaaaaaccttactttaagttaccataaaaaatgagtaaaaagtaaaaaaaaatgtgattagaaatatttattattaaatttaggcgtatgttatcatatatcattaattttaataattaaattattaattacaaaacttacaattgcaactaaatataattttagctataataattactgtaactaaaactaaatttactaaacatcagtctagctcgtgttaatgatagcacattgatccctaccaagaataaataaactaattagattaacttataatatctcctctaaaagtgtaataaatataaagttgagatattctctttcacatattatgtcttttaaagtataattaaactatataaacttattactttggactaatttaagtgacgtttggtaatatttttttaattttaaaatcagaaaattaaaaatatttttcaaaaacatattctataaaactgtaccacttttcaattttttaattgagaatcaaatttttttttttaaaaaaagttactttcaatatttttttaaatagttttttttcttaatcaatattttggactccaatcagacccggacccaaatccccccacgaccctggcgctgaaccctacccctaacctgaacccgaatccgaccctggacttagacctgacttatataaaattaaaaaataaaaataaaaataaactttacagaatacacttttgtcttctgtttttaaaattgaaaaacaaaagtggttaca

SEQ ID NO: 171290 - DNA, 748 bp, Cannabis sativa
gtgaaattccatatttatagtggactataatggaattaataaactgaattctattgaagagttcaataataatcgagtgttcattggagcttcaaaatataatattcttcacgaaactataatacttagttaaatataatattcttcttaaataatattaaaaagagagaaatatattattttagtaaaaataatatttatttcaatattaataaaataaaatattaatgagaattaataaactattatttgttgtaaaataaatattatatcttatttgtgacaaaattgagaaattaattttggactttaaaatatgggccacatgtgtagggtttagccccacacgtgtaggtaacatataaaggcacactttatttttgtttgattattttatttataaaataaattaaattagaaatgataactatcttttattatttaaattaaatatattataaaataatgtatttaaatgaaaagagaatataaaataaaaggatataactgaattttgttattcatgatatttattttgaattttaaattaaaataatattatcctttttattttgtaggattaaaagggttttatttatcaatatatatatatataaatatgattcagataaagtgggcttatagatttaacaggatgaataaattttctattacaggataagggttgttgtcgagcaaaattcgcaacaccaagaatatataataatactaataataagaagaaatt

SEQ ID NO: 171291 - DNA, 854 bp, Cannabis sativa
  modified_base (391)..(392): a, c, t, g, unknown or other
  modified_base (793)..(793): a, c, t, g, unknown or other
aatgccaaatctaatacgaccattaaatctagaatggtcaaaaacgacataagagacctcgtcctcaagttcagaagccttggaagtatcaaaaatgagatcccgggaactcagaagtaagtacccaacgcccaggttgataaaagacctagtgcgttgggttctgcttatccgattatgatgtcgttttgacaattcgtttgatttttcataataacaaagatccatgaagtcaaagacatcaaattcaaaactttgcatttctcatttacaactcactcagagatgaagagtttcgagtctctcatttccgcaaaatagcaacatctcccaaaactagtgaccaacttttccaaaatacaaaaacaggctaagtgatgtcaaaatatcnnttaggcatcttaaagtacatcccttggatgtttatacactcacccagtgtccaagttgacgtcacatgtcaacctaggtgttgggatgtcaacttgggcgctggatgtcagctagggtgctacgtcatgaattgcctttagtaaaatagccataactcactcaattttgatttgattgacggaattcaactttcattttgaaatcttcaattgtaattctaaagctattgtcatcaaaattcaccccaaagagagttacgaaaataagttctaggttactcgtagcgggacccatcgggctctaaaaaatagccatcaccactaagagctaattttcactgttagatcatcatcaacggttaaaaacatcttatttgtatttttctcctatttttgtgggnctccttcacctataaaatgagagctccataaactcattttttacattcaaaaaacttgttg

SEQ ID NO: 171292 - DNA, 895 bp, Cannabis sativa
aaaatgttcagctcaatgagcttgaattcattcattccttttatagatttacaagatcattctagaaatattacacctcagcaatttactaacaataaagggaatattctgtaaaaagggcaataacagaaacgtgcagaaaatcatgaggcaatgatggatccaatgatgagctgtcagattgagaaagaggcagagtaggaccacaacagctagtagagaaatagcagaggaaatggttactggttactggtgtttactagtcactggtttgtgcatttttctcaacacctcctctcaaactaagtggggattcaaccacacctagtttgtcaattaaaaaatggaaacgagaaccagtgaggcttttggtgagacaatctgccgtttgatcatgtgagggaatatatcgaatttccagctgcttgtttaggactttatcacgcacgaaatgaacatccaattctatgtgtttggttcgtgcgtgatagacaggatttgtggcaagggcactagctcctaagttatcacaccatgttattggtgttgctggaagggggaattttaattcttgtagcagtgattgaatccaagttaattctgcagacacttgtgccaaagctctatattccgactctgtacttgagcgggaaacgactgcttgtttcttcgaggaccaagacaccaatgagtctccaagatacacacaataaccggctgttgatcttctgtcgtctgggcaacttgcccagtctgcatctgagaatccaaccaagctaagtctgtcacacactttaatgtgtaagccgtgaaacaatgttccttttaggtaccttagaattcttttagcagctgaccagtgggctgttgttggtgccttaaggaactgacttaa

SEQ ID NO: 171293 - DNA, 693 bp, Cannabis sativa
agagcattgttatgcctaacagtaccaataggggttattagtagttctctataatctttatataagtaaaatatgtaaaacccgatattaaattacaccaatagcgatattacatattacaaccggtgctaggcaataggcactataagtgcaccctttagcatttcttatatatatatatacatatatatatatatatatgcgaattttcatgcctatggacccctaataataagagcattaatattgaatactaatagtgcctaacacattttagacatatgttgtcttgtgattggttagcgatacaacttaaaagttattacattaaattatataaaaatattaattacaccaattacaatatttacacgtaaaagggtactagacactactaccactaataccttttaataatatttatttgataacaatgagtaaatagtagataagatatgataagatgatctttctatcataaatattattaatgtcttgtttagataaaatagacaaaatcaattcaccacccatcacctcatttattacgagtatatacctaattaaagaacctagtagtattggtgttattataaatagaatgcttgtagaactcatcatacacatataatagtttacacaataagttagtgagattatatatacgaatatggcacagatgaagatgagtag

SEQ ID NO: 171294 - DNA, 514 bp, Cannabis sativa
tccgacctagtttggtgaatggataacagagtacatatatatgtatatatgcgcaaaaatatatatacatatacagtgctgtaaattcgtctgtagcgcatatttttgttgtgctttttataatataagttgtgttgtattttttttgtgtcctatcataccctaaaacaatatagattatgtcgtaacgtgttaataatttttttaaatagtaaacctaatatttttatgccgtgcttggagtcgcgccgtactttacgtacttgtacttacctctttttcttaaacaagcccaagctctttttatatttcggcttgaatttgtactttattttttctttacaactaataagttaactactaaattatatgtatattttataattttaactatatttatataatttttcaacagtatttttagaaagtgatataaaaatataattaaaattattataatatttaaatatttatttataaatattaaaatttgtatatcacactctataaataa

SEQ ID NO: 171295 - DNA, 656 bp, Cannabis sativa
tggattgccactccctttctttttaaaattataaatgtcatttttactttctttttactattttttttttaattaaagaatttttttaaaaatatcccaaaaagaactttaacaaagagtatttttgtaagttaaaataatttactctgattctaaataatgtaaacagatcaatgagaatatttcttattctaattcttatttgtagtagtcaatttttctttaaaaaaaattatcttgctagataatcttcgtttattgtttgatatgactcgctaggatactgttacatattttagttagaaattgaaaatgttagcttgcagatgctaagtgtgaatattatacatatacatttattatggatattccattgggccattacaccacaaaaaataatggctcttatatatacaagtatgtcaatttggctgcttcatttaatgacgacgaccctacaaaccaacacgagtgtttccaacatgttttgtcctcattcgcacgcttcttggaaaaacttcccaggaggtcattcatcctaaaattaccccaggtcaagcacgctgaaccgtggaattctttcatgatgggctaccaaaaaacaagatgcaccttgttgatataagtagtaccaatcaatccatttaagctctctt

SEQ ID NO: 171296 - DNA, 1046 bp, Cannabis sativa
  modified_base (557)..(560): a, c, t, g, unknown or other
gtattaatataaatattattatttatttaatagcatatgataatagtatacaaatgatgtacactttatttatttataattggaatttaactttttttttaataaatagttacacttattgacacaatcggtataacaattacaggataggttgtccacttcgtacacaaataataagataaatgttatgagtgatcggtggattctttacgtgaaagcaaaagcggagcgacaacattcatgtacgtatccaaaaggcttgtatgttacaattctttcgaattgttcatactgaaagcgcatagatgacatgaattattgttgctggtgatgagctggatcaattatgatggtgtaattctgccatgataatttaggagatatatttgacaacaatgcaaatttatatatagttgtaaatctttgtaacatgtgtgtgagattcaaaccacatttgctttagtgaaaatcgtgattgtgtaaggtagagtctaaactagagagagaaacttcttctcgtaatctttgagaagtttgtaaagattcttgtaaccttnnnnacactgatatcaataaagatatgggtgttgctgttccaattgagatgtagagcattgtacaagtctcgaactcgttaaacctagtgttgttctcttctattttactgcttaattcattatcttgaattcttgtgatctaattactattttgattcttgtttgtattgtgtgtttgttggtactgtaaattatattgtaagtcattaattgttctgtttcacacaacaaatataataatcattacaatgtaatggattacaaaatttagataaataataaaaaaaaagcaaacaaagtaatgagaattttaattaccattatcaaacatcccctaagattatgttccacttcaatatattccacgaatacgtatttgaaattccgtatttcaatattcccagtttgattattaagttaagtgattaattaaatgcgaaataatgaaactggtactgtaaacagtttttccgtagttatagaatacaa

SEQ ID NO: 171297 - DNA, 560 bp, Cannabis sativa
gaattggtactcaactagccaactagtgattcttataaattttttctcctatccctatttcttttctactggtttggggcaagaacaccaacaaaaagcaatagattttgaagtatcccttttgaaaaaaaaagaatctatggattttgggggtgtatatcatgttattttttgtttatccactggaatgggttgttttcgggtgttcgataggggcaagacaaggtattttgggaaaaatcatagcaccatctgatggcaaggcagtggctctctttcaacttgttctgtacaccaagagagcaaatattagttggctttttgatcgaggtagactcgttgagcagtggcgtctttctcatgactcgaacaccttgcatttgttggcttggttctttgacaaggggcgattacgggttgcacctactatgttacaagttgaactccaacaccttgaggacaaggtaatttttcgacgactggtattgataggcattgggatattaaataaaaagggcataagtgtaattgtaataggggtattgttattatatatagga

SEQ ID NO: 171298 - DNA, 539 bp, Cannabis sativa
tttcttcccaagcagctggtcatcatcaaaaggatgagccacaaccacatatcccttctaaaaaaatgactaatcacttagggtaaaaagactaaaatgcccttacttccttgctaagttatcttgtaacccctaagggtaaaatggtccaattctattattttgttaaactctaatattctaagatatccaataatatttccctgtaaaatacttgatacaaatttatatccatgtgactaaaattttcatccgacctatttatactgttatcgagcataaaaatatgaaaatatgaaagttcatatatagcatgcatatcacacctataacttaataaaatctctagaatcgattaataataattataacacatactttcatgaaaataagatctataaagcataaaatgcataaataatcacataattagattaattagtgctaagtgtcccattatccccccgttattaagatttcatccccaaaatctaacctaaataactctgaatattgagtcctcatttaagactgtaatt

SEQ ID NO: 171299 - DNA, 601 bp, Cannabis sativa
tgacttttgctcgttctcaagtaagttgataataaaatgaatgatacttaaacaaattggtctttatgaaaaataattttagtttaaaaaattatacatccatttataattccaagaaaaatccaaactcttcaatcattagaatttcaattcaagataataacttttcaaactcaatttttttgtgtggtcaatcaactcatcatattcttaacatttaaatcaattcatgcatgccaacaatcagtgttcatatcaaaacaaatgtgtatttgaatgaaattcactccatattatcaaactattatctgctaatataattacacacaatctaaaaattaatagggctttataggcttacagtgtaaggttagggcaaaaagtagatgagaaagttattttaggctcaaatctcagcatagcatacatatacaacattatctcaaataattccattttgtctttcttgataaattccctcaacaattaagtcttatatctttttttttacaactcttactatttttccacacttagattgttgcaagtattcatacatacatatatatatactaggtgattgttacgtgccaagccacgt

SEQ ID NO: 171300 - DNA, 999 bp, Cannabis sativa
  modified_base (940)..(960): a, c, t, g, unknown or other
aatatttgttttaattatatttaactaaaatgagatattttgtttggtttgtatttgatattcaaattttaaatttaaaaacacttttaattatttaagataaaaattgtgttaacttaaattaaataataaaatgagttttattatttaattaaaaataattaaaataaaataatatgaaaattatcctaaataaatttttttattttaggataatttaattaaattttttaattaatttatgggcttaccgaatagtgtcttaaatatttttttttatttaagaataaactaattaaaagtgttttaactagtttatgggtttgaagtgaccctaaaaaattacaaaattacccatcgagtgaataaagaagatggagcatgattttgtaatttatttctaaatttttcaaagattgtaaaattagaaatacccgatcggtacgctgtttatcattattatttatttatttcttagattaatattcattaacagttgattaataacatgatcataaattagtgaattatatatgccatacatagaaatctcacacagttttaattaccatgcacctcttcatagaaacatgatatttttggagtatcctacgtgtttatgtctttattatttttgaaactgaaagcatgtaaatgaattaactaaaattaattttagaattaacttggtaaatttaaaataaacctataaatttaatagatttttaaattattatttgataattatggcaggtgatttatttaaaatttaaggcttttattataaataaattaatcataattcttaaaagagttaatatgtattaattctcagaactaataactaaatacattactctcaaaatagtgagtgggagaaggagtacatgtcaatgtaacgtacggtctccatgttggggattattttaccatgatctannnnnnnnnnnnnnnnnnnnntttaacatcctaaatatgaatttcgaaaataatggaatt

SEQ ID NO: 171301 - DNA, 788 bp, Cannabis sativa
  modified_base (247)..(275): a, c, t, g, unknown or other
agagtactagttctgtatagctgctttcgtcgtaggcatcgtacttatcgaagtttccttcatattggtcgtcgtgggttccttctccttcctgagagcccacgtttgctcttgaggccacatcctcatcgtctctgagtcttgagcgtcttgaggaggacggggttgacgtgtgttgcgagtctccaccattgttattttgtaatgttactgtcttacttggagacgcttccttcagctctcaatnnnnnnnnnnnnnnnnnnnnnnnnnnnnncggcaaccaatataataatatatataagagagctgtaagaagttaatgcacaagatttttacgtggttggggcattaataagccttagtccacgagtctttgttatttatgagagtatttgttacagagaatgttcttggtggtttttctctctggttcttatgaaatccaaaattctcgacccctgctttaatgagtttggggggtatttatagtgtttttgtagggtgatccccagaaccgaggtacatgtctttctgtattattcagtaaaggcacacattcccaacgagtacatcataggaaatgcatcgtctaatccctaggctttttaggggttagatggatataatccattatcctttcttgactgatgtgatttctcataaagtacccgtcactaggctcattaatcatagctcagtagctgcagatggggggttacgccgtcagactttaatacttatggcagtttctatacgccttctcccatgcggcattaaatgcgaggtg

SEQ ID NO: 171302 - DNA, 670 bp, Cannabis sativa
  modified_base (401)..(402): a, c, t, g, unknown or other
tactaggggcaaaatccagatatctccctttagaaaacctcgcgttatgcctaatccatgcgtctcgtaaactacggccatacttctaggctcatcccataaaagtgttaaccgatcagtccttgagacaagttttatcaaaaccagatgcttctgaaagattgataaaatggttgattgaactggggcagtttgacataacataacatcctcgaacatctatcaagggccaagctttaactgacttcttgatagaaggtataactccagaagaaattccacttgatcagcaagacgcagaatcctggaagttatacgtggatggtgcatccaacgaacagggttcgggtgcaggggtaatattaatatcgtcgagaggctttaagtttcactatgctctnnggttccaatttgacgcatccaataacgaggctgaatatgaagccttgattgaggcttaaagatagcacaggcgttgaatgtcaaaaatctcatttgtcatagtgattcgcagttgatcgtgaactaggtcctcggtgaataccaggccaaaggtttaaaaatatcaaagtatttaaggaaagttcggaagaacttggaaagattcgatcactttaaaattgaacaaattctgagagaacaaaactccaatgtcgatgccttagcaaaa

SEQ ID NO: 171303 - DNA, 654 bp, Cannabis sativa
gcaacttataacgtgtataatataacaatgctcattgctaaaaattgtgttgtgtcaatgtaattatgctaaatttaatacatatttagggcgtgtttgaaaagtcatccgagaattagaattggaaagtcatctgagaattagaattgaatataattgaaagtaattatacagtttagcgtgtttgttaaggcacgtaattacactataattgtataattgaaagtaattgggaaagtctcagtcactctcttcagttctcataccccatgaaaatcgagtgtaattacactgtgtaattatatactcaaaataattttaattcacaaaaaggtctcatttattgttaacgaaattctgagttaaaaattaatgctttcattaagcccttttttaaaaattaagactttgaaaaaatgcatctccccacaaggaaaaactcaaatattttcccaccatggaaaataatttacagaatgttaatattgaataatgagagacggtgcatcgccctaggaaagagcctcaagggactcaacctcaagaaggccaaaatggaagaagacgtcctactaaatgggatttcaaaagagaggtaaatgagaaagagattccagaaaggagaagttctgatgcttatgaccccactagata

SEQ ID NO: 171304 - DNA, 500 bp, Cannabis sativa
caaaagttagtataccatgtcttaaacataactgtttcacttagggtggaaatcgagttttattgggctttagaaaaaataatttttttaaaggtcttattataagaatatatggtgttaaatgtcaaaatattatatatttaatagtgtaacaatacaaggttatttaaattttaaataatattttcatggaatgtaatgtatatatttgtatgttgaaaatattttatttaaatttaattgtatctttatttataaataactaattagtatttatagcataattgaggaaaagaaataaaaagataaaaaatgcaattttttaattaaaaaaattacaaattaaatagattttaaaataaatattttcattgatttaatgtgatatattttacgttgaaaatattttgtttggatttaattgtatttgttattgattgagaaaaatagcatttatgaaaagaaaagaatgaaatgaaaaaaatgataaaaatatggcc

SEQ ID NO: 171305 - DNA, 1172 bp, Cannabis sativa
tcaaatataatatctgaaaaacattataaatcagcaaaagaagaattaattgcagttgaaactctcaatgcatcggtttcaatatgtgtgatagagagctgtaactgagacacccaatcgagagcatggaaaagtactttcgcttccatttcatctgagcgaaaagttccttgcacattttttgaaagtgcagctaaaaccataccattatggtcccgaagtatggcccctatgcccagaattttctgatctatattcgtagctgcatcaacattcaatttaaactcattaaatctaggcacagaccaaggaacctgctccttttgtcgactacaggatgctgcacgatctgtagaaggtgaggttgtagctgtactggtgctttgattttttgctctgttataatcctggtggaaaccggttgcataagcaacaattgaagaactgacccgtgcctgaccaccatggaagatcttgttgcgatctgtccagataccccacataatacaaaccaacaattcaaaatcctccttggaataaatggaagataaaagctggagataatcaccattctgcattgttttggctgattggaagtcaatgaaaaactttgattcttgccaaattcttctagcatgcttacaagcaaatagtgcatgcccaactgattcccatttagaagtacatagagaacaagctgctgaatcaattattttccgcttgtggagtgcagcagcagtaggaattatgttgtggtaaaccttccaagcaaaaattcttatttttggtggtaagttcaagttccagaagaatttccaccaagcaagatttggatctgaggcagaacatgtatcttgttcctccaaagatgaggctaaatggaacccaaatttaacattgtaggaacccgatgttgaatgatgccaaataagtcgatcatgagaggcaaaaaaactcaaaggtattgtcaaaatcctatcaacatcaatcggttggaagaagctgtgtaacaattcaagattccataccctttcttcagtaatgaggcttgaaaccgacatgttgggtggaccatgatagctcaccggcttaaaattcgtatggcttggaatccaaggatccgtatcagaagctatgcgatgaccatcaccaaccttgaatctcataccctt

SEQ ID NO: 171306 - DNA, 683 bp, Cannabis sativa
ggaatagcagaaaaagaaaaaaaattcaaatcgtgcaactagaataaaagaaacctacattataatgaagcaaacaacactgatgcttattctaaatcagaaaaaggacatttctgccctcagcttaccggggtttcaggcggagaatttttctcggatttagcagactttccctcttcatcatttcccatagtccattaccgacctggattgttgcaaatacaaaaatttcttgatagatgaatcacactattatacagatattttaaagcccaacctagcttcctacatcaaatggtacacatgtcaaattgtaaccagaaaaacaactcgaacaactttttctaaaagagcaagacccttttcttcttgatgttttcttaaatgaaagaggttatgaaaaaagaataaaacaaaagataacatgaccaaaacccctaaataaataaggtaattatcaaaatactactttacacaaaattagataaacaacttcacaaaatctagagaaaaataaaattgtctcttacctccttgaagaccaaatcaaccaacttcacagaaccagaaagcagaagctcacaaaggggatgcaaagataaggaagagagagagagagcttaacaaacctgatatcaaaaggatctttaactgagttctttcaattcaaaaaaaaaaaaaaa

SEQ ID NO: 171307 - DNA, 511 bp, Cannabis sativa
atttctaatcgtatcaacgtttataagtttattttctataatcgttctgcgaactctttagctcagaaatttgctaagaattgctttgtcttttaattttgcaagagtgtggtggccgagcttaccggatgttctttgagtccttagacctggtttgagtttttgtcttttaatgagaatcccattttattaaaagaaaaaaaattttgaaagagtattttaataaataaaaactttagatcgtaaaattattaataagacatgaaaaagagtattttttgaaaattttttaataattaaattatttgcttcaataacaatatgacactttaagtgatgctaattaatctcatatatataataataatatatgtgttcatatggaaactatagcgagctagcccaaaaaattggggaactataaagaatcaaaaattaatttttagggctgagatgcaaaacggtcctaaacttggaaactaagttagtaaatgtccattttttaaaaaaa

SEQ ID NO: 171308 - DNA, 527 bp, Cannabis sativa
tctgcaacaagaattgaaaggcacgggttcagagagtgaagcttccgacttttggaaagttttatggtccttgaagttgcctccaaaaatcaaaaatctgatgtggagggctggttccaactgcctcccgacgctctctcagcttgcatccaagcgtgttccagtcaatactcgctgccctttgtgcgaggagatggatgaaacaatttcacacattctccttacctgtagagtggtcaaattggcttgggaaagagtaggcatcagcaccatggttgttgcagcaggtagtgtttttatggactggtgtaggcttgttttcacgcccttgacagcagaaaaacaagaattggctgctgccctttgttgggcagtttggggagcgagaaatgatgttgtttggcaagggaaaccgtttattatttcagctatagttgtctctgcgaaaagctatctttatcaatggaaatacgctcaaaaaactcaaattgagtcattatggtctaatcttcaagactgtgatggga

SEQ ID NO: 171309 - DNA, 938 bp, Cannabis sativa
aaaaattgcgataaacccataaaactgttgtagattgccctcccgagtgttcaaaaatgttgggaaaaccaatttttttttttttggcaatttaaaacagtcacttaatattattagcgacggtctccgaaaaaaaattatttttgagactgtcgtgaattctagcttttgtagtagtgataactgttataggataaaaataaagagtagttgggtagttattagatattattccatgtgcatataaaaaaaacgtgaggaatgtccacgtttcatgagcagttgtaagtgaatatatcccaataaaaataactgttaatctatacacatataaataggggtaaaatccatagaaaaatggacgacaaaaattgagagaaaatacattatttatctttattgagaagtagggaactaatccgcgcttcgcgcgggttcgacccaactttaataatattttaatttatttttgtaccacttgagttatataatttataatataatattttgatgtgtatattataaataaaatatcaactttaaaattagaaacataatttgctattttcaaatatgtaaaaaagatggtaaactatgttaaattacttaaattataatatattagtaattacataagttacatattgttaattgttggtatagtaacggtttgaaaataataaatatataatatatataattaagtaattacataggtttaattacttaaattatataatatataattaaaaaattgagaaaaaagaataatatagaactcaacatataaacttattcatgtttgttccgtgagaaactacttgcaacatgtaactcaatgactaaaagtatattttcataattgaatatatatatatataaacataaaaatggagattaaatgatatattaagaagaaaattaaaaaaaaataaaaa

SEQ ID NO: 171310 - DNA, 520 bp, Cannabis sativa
atgccatattcctctgactcaatctcacgatcatagggattgtctttgtgcctggacttcacgagatcattctaaagtacttaagtcctgataagtagttcagagagccagatttatgcctgcttggatgatctgcccttcaccttgttcgtataattaagaattatacatgtagatgtacaatatgaagtctgttcaggacattcatctctgcctagatgcatggaatgtaggacatgtgtcacttgtgtattttgccacatcattcttcaaaaaataggataacattttcctcccaagtctgagcgggaccttcttggtcgcacgtggacttcactcaatctggatccttgtctgaacgggtgcaacgtgttcgaagtgtcggttgatgatccgatgtgactctgaccaagggtctcttcaatttttggctcattaatgctgactaacatgtacctcgatccaagcctttgaattagcatgttttgatggttattcttcagataattgagtgcataac

SEQ ID NO: 171311 - DNA, 520 bp, Cannabis sativa
ggaaggggcttgggctctgacctgatcagggccagagccacgggagctgctcaagccgagacgggatgcaacggtaagagaagtggcgtaacggtggtaattatgaagaaatgggttgttttggaggagagagtgacaaaaaaagagatgggctttggaggagaagagaggggagagtgatggggaagaagacaagttgagggaagacgccatagccattgcttgctgccgtgtttgctgccaagccttactaagcgccaaactgtattaactgattaaagctctctttcagtttcttaagttattacaattaatttagatgagtaaagcatttgtccaaacaaaataattgagtatagcttttttctttctgtttgttaggttagtttgtgtaatagaattatcctctttttttttttcaagtttcaacactttagaatgtataaattggtaaaatttgaaaaaactatctataaaatagataaaattttgggtaattagtaatttttcccccgaactt

SEQ ID NO: 171312 - DNA, 1075 bp, Cannabis sativa
atgtcggcccaatcattctagatctaaaatcacgctacagccactctgagtcaatcatgcacgcctacgagtaatgctctttaatttgagtataactcaacttaaagagcaagggacaaactgtagtggccaaaaattgctctaagccaacgaaaaaggcccaacgatcgaagtacttacaaagcccacttataagtcagaaataagaaacccgtaagcccaatggctcacatgggccacgcccaatccatgcctttcgggtcatacccatattcgaaggtccaacccacaataaatcttcatcttaaagtgtaatattagggttgacacgtggaggaagaagaacgttaagttcccaactaacccacgaccatagcgatcctccctagcatagcggagcgagaatatcaaccctctaagtgatgcgttgatgtgaggacgctcatccaggaacaaacctaaaagatgacgctcatccctggagaagtggaggaagatcgtttctctagggatggaccacgtttcaagaggtagccgttttcctaagataataattaggcccacgctgggactgagggggagattgaaggatatacgaatattcactctctttctatagtttttcgactaaacttatcatttctctacgatctgacgtactctttctcattccggtgagcaaggtttgaccgccaatcatcgcacataggaagtatttgtttacatttcttattatcttttctacttcgcactataaatttactgatttgaccgtcggagtgtcttcggccggcaccaccccggtgtcccaaagtttcacggtcatcctttgtctttgttccgcaggttgtcggtgcccacaaacgctcattccgatcattgtagattttagcctctacaactgtaaatacgtatgtattgtactagttcaatctatattattcgtgctttttaaaatacaagtcgtatcgtactgagtcataggggtgtacatcaaaccgctcaaactgcccgcaccgcaaaaaaatacagtttgaaattcttcgcggtgcggtgcggtttgcgtttttgaatt

SEQ ID NO: 171313 - DNA, 506 bp, Cannabis sativa
aaattacaggaaaattttataatataccttcttaaaattagtgtactaatgcacctttatctgtttcagtattttaaaaaaaatatctagtcttaattttttatagtcatatatgttgatgttatttaaaatatctgataaaattttgaaaaattaaattcgaaaataaagtaaagattttgttgcacgagtgatttttttattttatatacgtgcaaatagacggtttgaacattgatttctatattataaattactctaatttttttaaaattttacaaaatatcttaaataactataatattacattttttttaaatactaaaataattaaaaataacatccatgcacccattttaatagaataaattataaaaacaccctatattattttgcaaattttgcaacacatgttaaaattatttatttatttcgcagaaaacatgttaaaattatttgatgtaagaaaaagtgtaattatctaaaaaaaactgaatcaaatccaa

SEQ ID NO: 171314 - DNA, 600 bp, Cannabis sativa
agttagtactaagtaagacatgtggggttaactcggttcaaagttaattaaatctattagggctcgtttggtacgttgtataagggtcgtattgtattaaataataaataacaatatgtttggataaaacaatgtattgtattaattattacgaccaaaatttataatacaatgtatgctgtattatttaatacataacaaatggtccattttagcttgtattataatatttacgaaggattcggggtcaacaccaatctctgacctgaacccaaacccgagacctggacctgaactcgagacccagactcggacttgggacccggacccagacccaaactcggacctagacccgggaccaggacctaggacccagacccgaactcgaacccggacccggacctaggcccgaacttgggacccaatcctaaacccgaaccagtactcgcgacccagtatacgggacccgaaccccgactcggacccagactcgagactcgagacttggactaaaactcggatccaaacccaagacccaaacccagacccgagactcagacccgggacccggacctgaactcgtagttggtgttggggtcg

SEQ ID NO: 171315 - DNA, 762 bp, Cannabis sativa
  modified_base (320)..(327): a, c, t, g, unknown or other
gtaaggcaattcaaaaaatatactttttttcttcgaactatatggcaactcaggattaacaattgtctttctaaatttaatttggtagccttctaatttatctagtatcattgaaccacttaatggtattggagtcaatcttttctcttttgtaccgtcgaaagattttttatcatttcttaatgagtggttattttctaaccaacgacgatgacccatataacaatgctttttgctatgcttcaaccacaaagaataagtgtcttgatgacaagacggacattcatattttcctttagtgctccatcctgataagtttnnnnnnnntggaaaatcactaatagtccataatagtgatgctcataacacaaagtttttttttgtagactcattcaaagcttcaactccaacttcccataaagtttttaattcttcaatctgtgtctccaaatatatatcaatattatttcctggtgcttcttgatcaggtatgagcaaggacataataaagttaggttctttcatacacaaccatggaaggagattatatggtatcataataactagtcatgtgctatgacttaaacttaatgtcttaaaacgtttcattccattaaaagctaatctaagtctaacattttgaggatctaccgcaaaatccttatgtttgtgatcaaaatcatccatgctgaagaatctcttggatgtctcttagaaccatcattcacataatctttttgatgatgccaagtcataaaatca

SEQ ID NO: 171316 - DNA, 598 bp, Cannabis sativa
gaatcaacaaagttaaaattaatggcttaattaaccttaagtggccggccatattatgggccccacgaattttaattttgccatttatttaacttatatttcttttcataaatactatattttaattctaactctatgtcaattctatctatttaatgattataattaactattaaataaaattatcatttaacttatttattaataagacttttcaaagtctctcaattaataaataaactctaaatccacttttcctctcaaataagctcttgcttagtgaaaaaattacaaacaatgcatagtcttgtttagaattctaattgactaattaaaatcaattaattaagactataaaaaaatattatcccagttagtatggggagcatgaccctacataatcaagctcccaataagtagatccaaaatttaaatttcctaacttattaattcatcctaactccactacagattcggaattgcactcttaattacatagaatactctattaccaaaaataaatgcgatttgaattacccaattatttcattctaaataatcaaagatactctacagatgatctacatcgagtagggac

SEQ ID NO: 171317 - DNA, 1017 bp, Cannabis sativa
cttaaacattattaaaatagtaaattaagaataaacaaaccatactatttaacaatgccatatgtacaaattttatattaaatgtcatcaattattgttttatattttacgtagtggatacatgtctctctcgtttgtctaattttaaaaatatcatctatatatatttatttatatatatatatataattgaaaaataaaggataaaatagtggtctaaaaataattttaaagtactcttttttttttcattttttctaattttttattaatttcatttcaatattattatatagctaaaaataattaaactaaaatatctttactacatagattttcattactttataaaaatatatctataattagataatattttaaaacaataattatacttatagaaaattataacatgttcaacttataataatcaatataaacaatgtagttaatgtaagaaaataattttaccacttacactatgattatattgttgattgtattgattattttaggattaaataatttgaatattttgtactcttttagctataattattgttgagtggaaaataaaattaatatataaatttaaaattaaaaaataattattaaaattataaaaaaaaatataaggtaaataagtaagaaaaattataggtttggagttagctttggagtattgttagttggatccaaattaatatttaaaattagttataaataaaaaaatattaattatggtgtaattttcaagagttaatttaaattatctgattaaatcaatagctataaatcaatattatacctatcaataggtaaaaattacaataccaattgtattagctcccatataatatatcaagaaaccaattaactaaaaaaacattaatatctttctaactatcaataaaatatatcatcctatacaaaatgatcaaaacaaataaaaatcttacctaaaattataaaccattcctaattcacataaaaatatatttttaattaaattaataa

SEQ ID NO: 171318 - DNA, 601 bp, Cannabis sativa
aacacaatacactgttaagctctcgaactcatagctgatcacaaacagacttaccctttcctacacaacagagcacccaatgagccaagcccagcaagacagtataaataacagtatacactacaatttaaagatcacttaattattgatgtcactgcatctattgtctatttgacatagatctacgtgttacgcttacatgtctatttatgtctatattgcatagacccacgtgttacgctcacacgtctatttatgttaatatggcatagacccatgtgttacgctcacacatctatttacaataaggctttagaacggtttatctcagttctacatactgagtctaacctagttatgccttaactgtataactctttatatcatcatatataatacattattgcattcataatcacatatattctagagtaatgactctagaccacataatcttgattttctgcataattattcaaataatatacatgagcgcaactgcgctaaactttatgtgctagtttactgtcttacctggtaatctaagtatatggagattccaaattctcgagtgtttctgagcaagcgtcggtaatcttag

SEQ ID NO: 171319 - DNA, 597 bp, Cannabis sativa
aagtgccaccaaacccacatttgttaaaaggagcatagagtaaaaaatgggaaaatatgggtgcgatttttcgacacaacatgaaattgggatgagctcggaagatacgagcatgactagctaggcacagaaaaatataggtttggatataggacactatatgatgctacaaattagcccaatacggtacgaaaaatatgtccttaagcacgacacgcggtatgaaaaacacgaaaggtaccacatataagcacggataaactagcaagaaaagcataacacacaataagccaaaaaaacatgacactacatattaaaaaaccttataatttattcataataataataagatatgaatttatcaattataaataagtataaaataataataaaacttataatattgaatactataattctataattaagactattaaaacacgaaaattagaattatatattaatttatttataaggtgtgatataaaaatttgagtatttacaataaatattttaattcattaataattttttatatgattatctaaaaaatattattcgaaagttatatacatataattaaaactttgaaatata

SEQ ID NO: 171320 - DNA, 556 bp, Cannabis sativa
aaaatttacataagattgtagcccatactttgtgcaagagtaactgttatacctgatgtgtcctacaaaaggaatataaattaacttaaagaatataataattaaattgtattattaaatacaatttaattaactcgttccaattaattaaagttgatagaaatattcaaactcgttgacaacgtaagcatatgcgagataagaataataactattaacagatataattgatgaggcaatatgtccacctcaggataaacagagtatataatatgaacatacaagacgagacatcaaggagcttgcagctcattgacccacatacttgagagtaaaagcttgcaacttattgacccacatatttgtacatggagaagataactacattcattcatctcgccctgtacataatggagtagccaccacgaaaataactctacgatataaaaaatactgtgataagaagaatatctatacttagcgttttttccttcaaagatggagaagaaggaaaactcacattcagcaaaacataaccttcttagttagcataatc

SEQ ID NO: 171321 - DNA, 544 bp, Cannabis sativa
gttcaatggatttaccacagaggatgaaaaatcatatttgttgaattagtccacgaggagaatcccatcattattcatgagtttttttgtctcagcttcctcttatttttgggatgggtattggagaaagcacccactcaaaaaaatacacactgaagtggctctactgaagcacatttatccatattggagtttggtatactcaagtttaggtctttctcttcttgaattggtctccggagcatctttctatggggcgacattagctttctttccacttactctgcataccaaaggaggaattaccaacttgctcagctggttctttgatcgcggtagactcgctgagaggtggcgtctctctcatagcttgaacaccttgcatttgttggcttggttcttcgacagaggacgcccaagagccacgattagttgaagatttcatgtttttcaccttgaggacaaggtgaatttcgggcggccggtaatgttaggccttgggattagtatggtgggctagcatatattaaataaaagggtaatt

SEQ ID NO: 171322 - DNA, 910 bp, Cannabis sativa
tgagcttgcattggatttgaaagtagcatttccagttgcttgttgatcattggaggaattaggaagcacaacaatcttttgataaaaagcatacaagctagtcatcatatttttaacttttttaatcattatttcagctgtaattgcatcatagagatacctaataagtaattaaatagaaacattaaacaatgtatatagaaaaagctaaatagtaatatgaatatgtaatatgtaatatgtgaaaataaataaaagagaataaatgagaaaaaagtcaaaaccatacctgaaaccattccgaaccacatcaagtttgagtcttggatccaaaatagacgcaatatactgcaacaagttaaccttctcaacattgccacaatacttgttaactttaattgcatgctctccaccattttgcgaatcaactcatctttactagcctttatatcattgagctcaacttgaacttgcaaaatctcttgaaagaaaagatttgatgttacgtacaatgacccactgaacttcaaagtggataaagagagttgagaaatttaacaaatacttcagcattgctccaatcactagcttctggtgggctgtcaaatttttccccattaactctttcttttcaaaatacttagtgtagtatgcatccccttccatatacttaaaactactcttgtactttaatgttgcttcaagcatcatgtatgtggagtttcattttgtcaccacatctaaacatagcaaggcttttgacatttgcttccttacaagcttctctaaactgcttcaaccgacctagagaagatctaaaataccttaccgcattctttatgctagatatggcataagacatatcttttaaaccatcattaacaaccaagttcaagatatgcgcacaaca

SEQ ID NO: 171323 - DNA, 922 bp, Cannabis sativa
gtgtattaatgttcacaagtcggcccttaccttctctgctaatgttgaccctagcctcaagtcagagcttaaggaagccttaggtttccgggacatgtgtggagatgacaggtttcttggcaaccccatcctcctctcgggtagcagggtaaaagattttaactttctcactgagaaactggctaggagaatcgaagggtggaaatctaagcttctttctcaggcgggtcgtttgactctgttgcaatctgtggcctcaagcactccggtctacactatgtccaccttcttaatcccgaagaccattagtcatgccctggataagatgtgtcggtccttttggtggacgggggagacggataagtctcattttcttgctctagctagctgggattctatatgcctgccaaaggagcggggaggtttaaatctgaagaaattcgaagatttcaacttggccttaattgctaaactcgggtggaggcttgcttcggggtctgagtcgccttggtgctccttgtttcgtgccaaatactttaagcacaatcaatcccttctggtctgccccttccccgaagtactatgtccttttggtgctagaggaatcatggcctccagggacctcattcgtaatgaggcttgttttcttgtcggtagtggtcgtaatgtggatatttggcattccccttgggtgtcgtggctctcttgggaggagtatgtagcttccttcaatccaagaatccaggaacgtggtgttacggttagctctcttctcttatcggattcatcttggtcgatggaggagatgggtagaatgtttcgtccgagcctgagtaccatgatgggggctatccccaacctttcttctagctctcctgacgaattgatttggaaagcatccaaggatggttccttctcggtt

SEQ ID NO: 171324 - DNA, 586 bp, Cannabis sativa
gaagacgaagtctactctaaacccctgagtgttattacatgggacaaagatgggtcctcgacaaaaacacgattaaaggaagcaattcaaaagcaaaaagggaggaatctaatgcgtagtatagaaactcaaaacaaaaaattcccagaaacgcaacattcaacccagaaaaagtggatgaatagtaaaagcatgccatgtaaacaaataatgaactaaagcacaaaatgcgaaggacttacataaagcttgggaattgggcgttggtgttgatcgacggtaaagagttgattggcaacgacgaaggaaaagaagtaagaaatctatggtgtttaaaggtttctgtttctctctggaaaacttgagaaaattttgtgaaatgctgaaagtaaccaaataaagggagaaggttggcttttataggccaaggcatgcgagagacagctgtgatcagccacaatcaaacggctggggaagcaatctgttcgcattctatagatccaacggtcagatgggatcgtcgtcaaggcggtagaaacgcttgagtacccgtctgacacccattaatgcgccgtatcaataaatg

SEQ ID NO: 171325 - DNA, 1202 bp, Cannabis sativa
ttttttggacgtaatggttgctagaggctcggttgaccacttggtgaagtaatcaaccgcaactactgcatactgcacgccaccttttcccttgggtagttgtctgatcagctcaattgcccaaatggcgaaaggccaaggactttgcatctgagttaactcgttgggcggtgctggaggtatcttcaaaaatctctggcatttatcacattttttaacataggccttagaatcttcgatcattgtcgatcagaaataaccttgccttagaattttcttagataaactctgcccgaaagcatggtttccacaaaatcaatcatgtacttcaaacagaagttgtgcagcttcttcttgagtaacacatctgagcaatggcattcagaatcctcgtttgtacataattccctctactatgatgtaccgtgcagccttccttctcatctttcgaacttcatttctataatctgggagttccctagtattaaggtaggttgctattggcgtcatccagtttggggatgcatccatcatttcgatctcttctatgccagtgatgttaggttcttcaagaaactgaataggaaccagattcgctctatcactgacattacaacacgcaagtcgagctaatgcgtcagcagttgtgttttcttcccttagaatttgcctgagagcataacttttgaactgtgcgagcagatcgtgtattttgctcagataagctatcatcttttccctcgagcctcgtattctccagatacgtggcttaccaccagttgtgaatcactgcagatttcagtatgttcggccttcatctcctaggctagttttagaccaacaatcaaagcttcatattcggcctcattattggatgctttaagcccaaacttgactgcagtgtgcaggtgttgccccccaggtgtgacaagggcgattcctatgctggataattgatctgtagtagacccgtccacatgtactttccaagccggcttgtcttcattgttacttggctgaggtatttgtactggcttggggttgttttctgatacgctttcttccttgcctatgcattttactacaaagtctgctaagtcctggcccttaattgctgttcggggttggaagataatctcgtattggcccaactccactgcccatttgagcaacagtctagaggcatccggtttttgcaatat

SEQ ID NO: 171326 - DNA, 1343 bp, Cannabis sativa
  modified_base (348)..(368): a, c, t, g, unknown or other
  modified_base (1300)..(1302): a, c, t, g, unknown or other
ttggttttgagtatgggtgttcatataatccaattcgtaatttcaaaccccaatcaatcctgaccaaaccatttgagatcggaccaaatgaatctagtataaatagtttggtcaatccagaccgtttactattctctggttcggtcacggttttagaaatttcggtagctattcaaacaaaaccaattcatataattattttatatatacttaatataattttttttggacagaatattgatatttgggaacaactttatagaatatttatattgactcaatattgttaagagaatatttttttattgttatttatgtattacatattgggattttatgccctaaatnnnnnnnnnnnnnnnnnnnnnagatttactaattaataaaaaattaaaaaatattttatgttgcattcttcacataattgtatgtttaatatataaattctattaaattccgagcatatagttattcatgattatagtattgtctacacaataaaagataatcatgaatatatgctttaaactatttagtctcacgatttatcagtgtcctagatttacatagatgtggtattcaacgatatatttctagtagactcatccctaaagatgactatctagaattgagtttacaaatataaaataatggtagaagctcataaaataagaataaccttgaccctcacctaaacgagacaacttcaaatttatattttgatcgaataaaaggttgctaaaatagtgttcagtttagatgagttgactactctattcaactaattatgtctttgactctcgcctaaacgggacattgtatatcgatgttgaaaaccttagataatactcaagtgttaacacagattttcgttaactaaatatatagctttttacgtaataaatttactgtagaatttaataataataataataataaggctaaattgcggcataaatacctaatgtttccaattttatacacttaaatacctaatatttattttttgtggcaaaaatacccaatgttacaattctcttacaccgtactaccacttcctttattaactcataaatattgacacgtggagggcccaaatacattacatttatttattttattttaaaatttaatactcttaatataaaaaactaaatattatttgtttttttaaaaaaaataagagagatacaatactaaattaccatagttgagtgaaccagtatagtatatggaacatgattatcaaatttaagtgccacatgtgaaaattgttaatgagaacaagtttttttttttnnnttgaaacaagtagcatttagtttctgatattaagaatatta

SEQ ID NO: 171327 - DNA, 1077 bp, Cannabis sativa
  modified_base (581)..(590): a, c, t, g, unknown or other
tcgtcgatgttcttgattccttgtgttattaggatgggtttgattgtccattgggacatcccttgtatctctaaattattcaacctgggtgttttggagatttccctagatagtctcttgcctcctggtgtttctacgattccggtgttgatttgtccgtccccaaccaggaaggatacgccattttgtgcctttttactattcacagtatgaaagtaaacatattgggcctagaacaacatgaaagaaaaaaaacaggcttggacattaaaaaagaaagtattgtcgtgtcccaatattattgtaaagattggggaaaaaagcagtatttttgtaagttttcctaataaattaagctttgcattggatttggagcccatgtctcttttctattagaataattaataatttcaggaaaattatagtacatagtcccaaattatagaattatgttagtaagtgtccttatttcaaaatttgtagcaaaatgacccttttatattatttattatttatattgtcttttgccacataaaaaacatcattcatttttttatatatttttttagaattagaagcannnnnnnnnnagattatgatatatctatattagttttgttaaatctttttcatttgaaagttatgtcgattttttaaattttttatgagttgtgggttattggtatataaattttactgtacagtatatttctgtttgttgtatgatatattattattccttgatgatatttattatatattttactatatataatagtggtatataattttgttagcataatacaaatattttaatttatgtatataattttattggcatgctacatatatttaattactatttttatatattttaattatataatatattatttattttaagtaatatttaattagatctattttattatatataagatagtatataatttagttagtatagtatacacatatattagtaatactagcaaaaattacgtgcgaggcacgtatactaaattttatgttagtttttttctatgttatttgaaagtgatataattaaaaattaaagaa

SEQ ID NO: 171328 - DNA, 744 bp, Cannabis sativa
aagtgctatagaatctaagtccatataataatgtctgagattataattataacattcttaaaatatattataccattaaaatatttttagaagtaaaagtactaaaaatgatgggaaagaaagataaaataaaatattatatctttagatgatatgaaaatatatagcacctttaaagaatattattattggagactgatggggtttgcacattgaagtggactgtggtgatggggtttgcacattgaagtggtcttgccatacatgcaatgtgatttaatttttaagaccaattagtgttgctcaatatagatatgtcccttgaagtggtcttgccatacatacaatgttgtccataagactaattagtgttgctcaatttttaagacaaattttgagaatatagatattgagtattgcccaaaaaaaagaaatttattttttcaagaaaaaaattatactaagaaatttaatatttgaaatgttgggattttctaccgtagggaatacaatttttaactcattctatagggaaagaaattgggccaatcaaaaattaaagacaattgattacaaaaattttatttgacataatgtagggattatttcatatttttttgtttatgatgatttttttattattaaacgtttagctgatgtatatatattaaaaagattttatgttcacgggcgatacagttaattttttttttgaaaaaactgatgattttattattttttttt

SEQ ID NO: 171329 - DNA, 631 bp, Cannabis sativa
aacgtggacgtggtcgaggacaacaaagagaaggaaggggtggttataataacaataatttcaataatggagaacgaagtcaaaattcacaagcaccaagagggcgcggaagaggcaactcattgtcaaggagtgacaaatctcacatcaagtgctaaaattgtaacaagtacggtcattatgcctccaaatgtagatcaaggagggtcaaagaaagagccaattttgtcgaagacaaaggtggagaagaaggaactttgttgctttcctggaaagacaaagatgaagcttaagaaaattaatggtatcttgacaccggtgctagcaatcacatgtgcggagaaagaagaatatttgtggagctcaatcaaatggtaaaagggaatgtgtcttttggagttgaattaaaaatacctgtggaaggcaaaggtgagattcttatacgcttgaaaaatagaggttgtcaattcatctcaaatgtttactatgtgcccaacctgaaaaataatattttaagtttgggtaaattactagcgaaaggttatgattcacttacaagaaaataaccttttcttaagagatgataaaagtaatttgatcgccaaagtttccatgacaaagaatagaatgt

SEQ ID NO: 171330 - DNA, 1288 bp, Cannabis sativa
tcctctctatatgtttattcctcttggggtctagattctttactatttggcaactatatctgtgttagtcaggaagtaacactagtagttaatccatcactagaataacgataaaaattatatagaactttccataggctgaataattatctagtagccttcctgacactttaacattcagtctcactggtagagttagagacttcagataggtttttacacttctccaaaaaaatctctgctccaccctagagtaatgaccatctcgcaagtagaatttttagcattaaaacaagtctagaaaccttatttgatgtagtttaaaagtattaaaataccacccttatcgactaacatatagttcatctttttgatcttaagatttatttgattgtcttcaaatattcctttcctggattaaactgatacctactcataactcccactcaacaacatgtgtctggtctaatgcataccgaagcatacatgagacctctcactattgatgcttaaggaattcctttcatgacttttatcttttctgaaatatttgaaactcttctttagataaataaactatatgtctaggagtcaaaagacttcctttagaattagccattagaaaaatactcaagaatcttactaaagtaagttgcttgcactagagtaagtaaattaccaagcataccacaagccataggtttagagaattccaaacctataatactaagattgggaagttttgttaagtccattgaatagacttattatcaaaattttccttcttgttcttgtaataaaaatcttttggttactccatatgaatggttttaaccctagttctcttggctttgcctcttattctttattctgactatccattacttatttaaactatcaatggattttttatcacaagtgtctttcaagtcataacaaggtgagttcattgaaactctctcactacgacgaagtaccctgactttctatctaggaacacttatggtgttgacctcatcggttgtgtcaagacgacagaagcagtgcgaccatcttatacagtataagatgatataacactttagaataaaaatatctctacctttttactttcagatttagtcattttcttagaaaagtagtatttgttaaagcaaacactttcttatcttaatgaccacaggatgttccacttataatcactttagaatggctatcaaacttgcaaaccaaagttaacaattctagcttttcttaaattcatgatcaggacatccttgaatctagt

SEQ ID NO: 171331 - DNA, 596 bp, Cannabis sativa
aaaaggacaagtttgattgggaaaactggtgagacattaatcccacagcaaggaggcatgtcattttacttcagcagcaaaagggccaaagtaaatgtttctgtaaaactcagaacttaacacttctctagttaatgtaaaaataatcaagaaataaataacacttcacgtaacatacctccataaaattgtcttgtttaaaatatttgcaagtgactgctttccccagtaagcaagcttttgtgcctacagcacgcttgaccatccaatatcccttaccattgattaagacattaaccgagtcaactctatgtagtaaaataaaaacatatctaaggcacaaacaccttggagatagttaactttatctgactagtacctctacaatacttggaatcagtttaaatcttgcatcgcggaacatgtcactaccatccacgaatttagccaacaaggaatttttattcagaggcctatcagcagcatagtaaagcaccagactgtagtttggttttgcagggacctgtaatataaaccagataaatatttaaaccatgatttctcagaagagatcttgttagcacaaaaaatcctta

SEQ ID NO: 171332 - DNA, 627 bp, Cannabis sativa
ttttgtttttgagatctaaagtgttgtcaagtagttggggaactcatggcgcaaaatcatttaatcaaacatagatagtattttaaatgtgcattacgtattttattgaggcatttaatcaaacacataaaaggcatgagtgcatccattaatgactagatgcttctaccaacattaaaattcctataagagaaacttgaatagaaactaaacaaaaaggtgaatataaaagataaaaaacttctcacacacctgaaatgatgagattagagagtgaagagttgtagtctaaaaattggcatcaaaaaggaagagcaaggtgttgcacatcaaattttatatctagaagaaaaacaacatttgcatatataagaatttgtatagctcacctaatcattaatgtggcaatgatacccaaaatcttgggaccaaaaaaattgaaaaatattgaaagttgcatattgcctaagtcttcttctaccacaactttcagttgcataagttgcatattgggaccaaaagagactaaagattacaactaagagatcacaatcacaaactaaacccatcattatatagacacaacaacacccaacgaataatgttgcatattgcctaagtcttctt

SEQ ID NO: 171333 - DNA, 621 bp, Cannabis sativa
gatgtttttggcatcatgattaaattattttttatttcattttttcagtaattgtataactagtacacaaattacaacaacaatgcttatataaataagtattttttttttaaaaatttttaatcaattatttactatttttttcaatattttttattattgatgtattaaaatgtataaataagcattttttttttttatgatttttaatctcacatttattatttctgtcaatttttttttttttatcttttataaattagtatttaaaatctggcaaattttcatctaaaaaaaaaatcttgcaaatttaatcttttgccacatacatagcactttaatgtttgggtgcctttttcacaaataacacaaatatcacaaatttaatcaggtattattagcctcaatatattgtatttttaaaattttataaattaaaagaaattatttattaattttttaataaaaaataatatttaaaatttcaaaaatttgagaaaaattatttttttttaattaaaaaaataatattgaaacattaaaaattttgagaaaaataaatataaaatttaaaaatattaaaattaaacatactcctaatattaaaaataacaataaaaa

SEQ ID NO: 171334 - DNA, 563 bp, Cannabis sativa
gcagatgacgaaccaggaactccagtcacaggagcgggtggcgcaggtgggatgatcggagaagcagaggcagagccaagagaaggtcttggatggttgagcatttttggttttttccattttttctttgaaaccctagaaggaaaacacactctcaagcttgaagaaggttagacttttgacaaaaaaatgagaggagtgtgaatagtggtgatcttgggaagtgggaagttgaacatatatagcacttaaaattaattacccaaaaatcggaaaataaataaaaaggaaagtaacttccttaccttggtcaccacctgaggagagaaaaaggaaaccaaaaaaaatatttcaaaaattggtcaaaagttaccttaaatggaaaaaggaaacaacatatccccacaaaatctaagaattagaaaacccaaccaaaaccgaaaatgccaccaaaaaggaaacaaaaaaaataattaattaaataaaaacaagtttccgaaaacaccataaaaaaataagaccaaatccccaaaaataaaggaaacacaatagataaaatgcaa

SEQ ID NO: 171335 - DNA, 851 bp, Cannabis sativa
tcccaagtattgactcaatttgttaaccgagaagctcaagtcaggtcgggttgtggtaagatattgcaattaccaatgattttcctatataaagtggcatcagcaagggtatcatctttagcatcttgacacaactttagattagcttccataggagtactcattggtttgcatcttaagtattctagatcttccaagatttgtagagcatatggtctttgggaaacaaaaattccttgttcagatctagctacttctaaaccaaagaaatatttcaattttcccatatcctttagtttgaacttgctgtctaatctaatcttgagagcttcaagttctttcaagttgttacttgctatgatcacatcatcaacatacacaagtaaggctatgaaacctacttgtgagtgtttgatgaaaaaggaatgatcagtagcagaatgtgtaaagcctttctcttcaagggcattggaaaacttttcaaaccattccctagatgctggcttcaagccataaagacactttttaagcttgcaaacagtcttggtaggtagctcccccttaggactatacccttgagggagagtcatatacacatcttcatgcaaatctccatggagaaaagcattattcacatcaagttggtgcaagtgccatccaaaaacagtagctaaagctaaaattagcttgactgtgaccaacttggtgacaggagcaaaagtgtcagagtaatcaatgccttcttgttggttgtagcccttagcaaccaacctagctttgaatctttccacagacccatcaacattatatttgattttgtaaacccacttacaaccaatagcatgttgatg

SEQ ID NO: 171336 - DNA, 744 bp, Cannabis sativa
cagttgtgaattaaccgccaatctcatagaattgcaactatttgatttttacataatcctgggaatggattttctatctaaatatggggcaacgattgactgcaagcagaagatggtggtgtttgagcttgatagtgctaacccagcggtgttcgtgggtaaagtttagggagcacggataccaagaataacagtgttgaaagctaaggacttgatgagcagaggttgtctaggattcatagtcattgcagtggataccagtcaacgtgtgacatctggacctaaaaatacaagattggtgtgcgagttcaatgacatctttcttgaagatctaccgggattgccacctacccgggaaattgaatttgttatttaaattattctgggagcggatccaatatctaaagcaccatatcgaatggctctagtggaattgagagaattaaagatacaattgcaagagttactaaattagagattcattagactgagccactcaccttggggtgctacggtattattcgtgaagaagaaagacaggtccttatgaatgtgtattgattaccgggagttgaatgagcttaccatcaagaacaagtatctgttacctcgaattgatgatctgtttgatcaactgaagggaaagacagccttttccaagatcgatcttcacttaggctatcatcagcagagaattcgagaggaagatatctcgaaaactgcattccgtactcagtatggaca

SEQ ID NO: 171337 - DNA, 644 bp, Cannabis sativa
cttaagagacttattatcgccaagatacatagtcccataactttcagatgtaaattctttgaaccaagatttatttggtgtcatatggaatgaacacccagaatccaagatccattcaaaatctgaagtcttagaggttaccagcaaaacaccaactgagtcataaccgtcactactcacctctacttctccttcaaatcttgaatcacccttatgcctctctggatatgcccgtctgagatgccctattttattacagatccaacatctaagattcttctagttatcagattgtaatttagatcttgattttacttttgaacctttgtgactttctcttttctcacttctaccccttgtatatcaccacttctaggattctttgactcactcctttgattcagctcttttgaattcaagattgattgcacatcatcgagtgaaattgaatctcttccatacaacattgtatctttaaagtgcacaaaagacttcagtaaagaactaactaacaacaaggcttgatcttcgtctttaatggtgacactaatatttttaagatcgagaatcaacttgttaaactcatcaatctattttccaataaatttgtcttccatcatcttgaatgaatacaaggcctattt

SEQ ID NO: 171338 - DNA, 810 bp, Cannabis sativa
  modified_base (440)..(440): a, c, t, g, unknown or other
ttttttttttttgaaaaagaagcaacatgtttgacaaaatggtagaaatgttgtccttgtgttttttttttttaatttcattttatctacataaataaaataactacaaaaagacttcctaataagatttgtctatgaaaaaattatccctaaagcaacatctagtcaaacaataatactgttgaaacttattttactaggatctagatttactaacatatatgtttaattataatctataatctaatatcctaaatatgaatttcctaaaataatgaaataaacacatataaagttatagaaaatcttacattggtggcagcagaatataatggttcattccattcaattctctaacccttattccaatctgtcgtagagaattaccaagatctgaacctggatctccttagatgatggaattcttcacaatctttcanactatatttgagtattgacttgaaatgtgtgggcaagcactcaactcactaatgggatttcaaaaatatgaagaagacaagaggagggtgatttcgaattcaagataggctctctctttattttctaggttgtttgacaaagtagtctgataagccttatgtaaaagcatcttaatctatttataggatttcatctaaggttagaatttgaattatatagcattaaaaaaaagataaaataatggcttaatttaaaccttgttggtcgaaccttatgtgggccctataggtttcaattttgccattttatttaacaacttatcttttccttcacaaatgtcatattctaatgctaactctataaatgtca

SEQ ID NO: 171339 - DNA, 612 bp, Cannabis sativa
ggaaaaccctgcttgaaactcaaacttggagaaaggttaagaatttgagaactgacaatgtaatgaaattctgttaagatttgttcacgaatttttgtaggaaagttggcataagaaaacacaaaacaatttcccaaaatcctcaacaaaaaggtatggcaaagaggatgaatataaacattttggaaagggtaagatgcatgttaatacagaatttgttggcaagaatcattggagtgtcgcattctttagcatcttcaaagttgactttgtgtagaagatctgtagcatatttagactgagtgaggtagatgcctgaatgatttctgtaggcttcgaatcccagaaaataactgacagaaccgagagatttcagagcaaattttgtgtgtaaatctgttatcagcttggagatggcttgagaattagcacttgtgattagtaaatcatctacataaaccagtactaacaacaaagatccttgctggtttttgtaaaataaagatgaatctgatacagagactttgaacaccccaagttagaagtgtgctttttaatgtgtcaaaccaagcccttggtgcttgtttgagaccatagagggatttggtcagt

SEQ ID NO: 171340 - DNA, 504 bp, Cannabis sativa
aagagatgaacagatttgatgccgctgagttgctttggtattgggactgaaaaagatggaagactttgtagaattcaccttttgcccagaggcaatttcaaaagaatggagcaattgttttgcattgacagttgtacttgtagtagcttggcaaaagagataactgtcatcagcaaagagcatgtgtgtaatagaaggagccccgttagacacgcgacaacctcaaataatatggtcatcttcaaactttctgatcaagaaggagaagccttcagcacaaatgatgaacagataagttgataatggatccccttgacgaatacctcgggagggagtaatcggccccatgatatgaccattatgtataatggaatatcgtacaaaagtgacacatttcataattaaattgatccacttaccagtgaatcccatacgatgcatgaccgcacgtaaataatcccactccacacggtcgtaagccttactcatatcaagcttcatagc

SEQ ID NO: 171341 - DNA, 602 bp, Cannabis sativa
tatagcccatatctagttttacattaatttagtattgtgtcatggagggaaatggattgttggtggtggtggcacatcaaattaactacaccaaaatttttgacatcctataatattttgctattatttcctctaaatagattcaccatatttcatgtatacttagattgaaaaagttttcattgcagcatgaagtgtactatgtaacaaaggtgtctttagcagagattgttaacttagaaagaacatcttccttagattcccacactaaacagtagtaattagttcagtacactaacacactaacttgtactagtattattatgtcatttttattattccaacacagatccatatataatgttacattagagcagttatgtatcctaaaggtgttttgttaacacatgaatgaaaccattgtattttcctgtcttctgttaaagagtgattgacctctttttggaaacatattttatcatttataccttttgccatggggatatatatgatattcagtgaagcttgttaagtttgccacgttctgttttatagcccatatctagttttgcatgtgctcactatgttcatgttaattctct

SEQ ID NO: 171342 - DNA, 899 bp, Cannabis sativa
tattaataatatattggaaagaaaggaacggaaaggtttggaaacagctttgaatattataatgccacaaaagatctctatatatataaacgatatatatgatattaatgagaagccacatgtcatatcgtatcatataaatcaactaaaccttccattttttctctctcacactcttctactaatcctcttaacatttacatctaaatatttttcttcgctgaacatacgttatatttttttttgcttaaagtcaatctaaattttcttttaagccctcaaatttggagtgtttggaaactaataaacccgtagaagaaaagacatgaaaaaagggttggtagttgaatctgggtatgtattcgatgaagagaccagcctcactgtctcaaaaacctctcttttcttcgccggagatggcttcaccgtctacgattcaagaggtgaactcgtcttccgagttgactcgtacggacacaatattcgtgataaagacgaactcgttctaatggatcctcacggccgttgtctcctaactgttcgccggaaggtattataagtcttttttttttttatttacatcatgtcttttcactttcttccacacactctctctctctcacctcacgagttgactcagtgagtactcaactcggtgtcgcagaaactattgttaggcatttctagaatcgtgtccgcaaaagggttggctatttttttgatttagatttgtgggtaccaaatgaaatatcctttgttgcttgttttaatggagattcgcttgcctcgtatatatctgagttaactcggcgagtttggtttgagtttggtctggtttggtatatataatctttttcgttttctttctttattgtaattagtttattaataataataat

SEQ ID NO: 171343 - DNA, 663 bp, Cannabis sativa
atgtcaacctgggcactgagcccagaacaactttcaataaaatggcaataactccctcaatgtttattctatggagactattcaacttgagttttgaagctatttcaatgctttatctagtcatgtctcagacatcaattgcaattctgaagctatcgactctaaattttacccccaagggagttacgaatttaagctacaccttacccagagcgggtcccgccatcgcaactcgaactcaaaaaattgttgataaacatcagaagttattttttaccattagattatcatctacgataaaaaatatcctaaatttatttttccatatttttaagattattttattcacatttaataggacctcatttacctataaaaagagagcttctctagctcatttttcatattcagaaaaagtagtcataaggtcaaagactttcaatctagtttctctatctggaaattagatcatcaagacttagccatttttttgtaatccatctcgtgagaataaaatctcgaagtagatgtagctccattattgtcgtgatataagaagtgaagtactataaattgttgtgtctctctatttatacttaacatatatctcattctcgccaatctagcgagcagatgtggcttagaagtctattttagattttt

SEQ ID NO: 171344 - DNA, 691 bp, Cannabis sativa
gtttgtctaattttttattttatattttgtatatgaaatattaatagggttgattataagttattttcagtaagtaaatatttggtattaatcctttcaaaaaaaatatttggtattaatgtttagttaaatataaaaatgataggtacctgatacatttaattgtatgtctgaatacttgctggtgatcactccaaattgttaaaaaaaaataatttttagtgataatattttagttacagtataaattttttgtgataaatgtgacttttagtcataacaaaaaattactcgtgattaaaatataatatttaaatataaattattactaatttaattttagtcacaacaaatattgactattaataaacagtcacaataaattataatttttgtgactaatatactcttaaacacaaacctttaattataatataagaataataatttataattaatcacaattttttatttttatttttaatcacatattttgttttgactatttttttttttttacatataaataatttggctttgtaatctttgtcgaacataactatatgcatgcttagctaacattgggtaccaaaccttaattcatgcatataattaagaaaatatataacatttttttatatatatttgtgatgaattatataataaattattattattattaataattatt

SEQ ID NO: 171345 - DNA, 1093 bp, Cannabis sativa
gtgtataaattggtaatggaaataacatatgtgtttgttggtatttaatagtaaagtataagaatatatatatatatatatatttatatatttattgaaatgtgagactagcggaatagtcaagtaaaactagtttatattattaatggttagtttttttttttttttttaattttgttttttaggaatttacaattagttattctagagtaatgtttattcatttttaagtgttgcaatatatacatatatatatatatataaattagttaaattttattttgtataattgtgtaataattttttttagtgtaatattaaatttaaaagtttgtatattattagtttattagctaattagatatgatacaacttagaaaccttttaaatgttggatgtgtagaaaatataaatataatttgtttttttttttttaatttgaaagaaaaggtaattgtgttgattaaactttaagttttaatatatactaactttagtatttagtgttacataaaattgaaaagtttagtttgtgatatgtatattagtaataacaattaaaaaaagttttgtttaaatagttttatgatatatattgtgttactaaaactttaattttataatatgtatgtggtattattatatttcttgacatattggataatatagtaaaactttaatattgtaggtgtggatttaattagcaaggattcattttacaaatcgaagtgacgtttgtttggtggttcattgaaagaggtgtgtacattcactcatttctttacttaacgacataatattgttcatcttagaagagtttgaatatcttaaatattcatctatagtgaagtaggttttgaaattaagtgtgtgttgcggtgatagtggaaggttgaaacttgtgtgttttagtgaagtagcttttggaaaatttgtgtgctctggagatataagaaagaaacttcttgtatgatatttgttattgagtgaattgcgcatatcaacttcatttttaaaatattaacgaatttctctttgctcattttattgcctcaaataccgttaattgttatattatttttgaaatgtacat

SEQ ID NO: 171346 - DNA, 563 bp, Cannabis sativa
tctccactgctggaggcgagctataagatgatctacagggtggcctagtaaaaaacattactgagttcaataaaagtgctgaagtatttgtttgaaaagaagaagcaagaaaggagatgaagttgttgcagtttggcttgggaaacaaacccagcaatgtctcaacaagtaccgtctcgactgtggctgataattcagaagcctctagttcaaagaggaaggataactctaaggagtcatccaaggacaagaaaaaacacaagaagcacgataactatgtgccaatctacaccatttacactaagcttaatgaaactcgtgaaaacatctatctcgcgcatgagcttacggtggcatttcgtaaacctgagcccatgagccacgcgagacataagagagatgcaaccaaattttacaactaccacaaagacattgtgcatatgacaaatgattgtcctcagctgaaggatgagatagagagcctcatcactcgaggacacttcgagtaatacatgaaaagacagggcaatggacacaaccaaccaaatctgcccaataaccca

SEQ ID NO: 171347 - DNA, 531 bp, Cannabis sativa
  modified_base (449)..(452): a, c, t, g, unknown or other
tgaattggtgtgttttggcatgaatttttgagcaggaaaatgcgaattatttgggtttggaacttaggggtcacgaccctgcttttgggcactgcgacccgcctctattttgtggcctgggattcgaacccaggtgtcacggccccatgtgggagtgtcgcaggcccccttgtttttgggcagattcgagcgtgttattcgaatccttgtaactttgtgattcggactccatttcaggagttctatgtgtcgttggaaagctcgtttcgagctttatgtgattatctgtattttggatgccaatttttttattatgtgaaaatagatttagggattaatcctatacttgtaaatcccaaaaattgtgactaggattaccgacacttggtcaagagcacccgggttctggaatctccatgtctgtggaacatcaggtaagacagtagttnnnncgtagagttatgcgcggtggcgcttatataggaaatgatatatgtgagtaattaggaaccgggattaggattattaccc

SEQ ID NO: 171348 - DNA, 642 bp, Cannabis sativa
gatgcttatagtagaaattttacgacagacttgaggcaagaacctcctttttgctctgagtttactcaatggagaaattggtaaaagttaatttgtgaatgatgctcagccctatttataggcaaaagaatgaaaaagggtaatcattttgaatgccttagacgcatcagtttcccccaaaagcaaatattgggaatcaaatataatcaagtgtaaccgtcaaacgtggtgagagaaaattgggtttgaagcattaattgtgtcagagcattaattagttgaaaattgaagagacgcctggtcagcctcacatcgaatcgcaaacagacgcgcctaacacgtgtcacccatccaaacgcaaggacagctcgggtgaagtctacacgcaacttcgaaagtcccgtacagactcggggggcaaatgtcatcccaatttttgcactctgatgtggcatcacacgatggtgacatgtggaatcaactcgatgtacctgctcgcaagaaatatgccgaacagggcaccacatatattcgctcgaacgaagccctattagccgggcagtgaccaatccgcgcagcacgctaacactttgcatattcagcttttgcatcgtgagtcaccgaagaaatccctataacttt

SEQ ID NO: 171349 - DNA, 615 bp, Cannabis sativa
tttaaaataattttatagtttgttcaaaaaaataataattttatagttcggaaaaaatattaacattaattataaatctatagttggatttcttaattaataaataataaaaaaatataagatagtggcctcatcaacctttccttctctatatatataaggactatttacaaaaaacaatatatataactgtaaaaatatataagtaattaatgttattgtcatagcacatgagacatttaatataatgtctgcaaaaaaatggtcctttatttatggatgtgtgcccatataattcatacttgaatatacttaattctaaaaatatgtggtaaattttgttatgcattttgtttattttacaaaaattaaaatttagaatttgtgttaaatttgatccaaaaaaaatcaattttttttatattttatttataattttatggcttaaaatttttatttacaaaaatatacttgtaaagttttaaaattataaatatatacacttttttccagcaaaaagtaaaaaaaaaacaattaaaaaataacgaaaaattaacttcacgacaattataaataaattataaaataacaaaaaaaaatagtttattacttata

SEQ ID NO: 171350 - DNA, 659 bp, Cannabis sativa
cccattaaacatgcaaatgtagatggaaaatagtagtactattatatggtacaaacaatgatgctctatttgtttttgttattttttttttatttgatagagttcccctgatcagagttttcaattttggaattaatcaaaggtaactggaaaggagtcaagttgagatgatcagtagtagtagtgctgttataagtagtctcattactattagtgcttcttgccaatagttatttcttcaactaggtgttctagtagtttttcacatcattatctgttcttcctagcagttgtgatgctataacagaccacctataataaatttaagctgaaaattaccatagttatatacatgaaaagctatccatacatacataaaaacaaagatgtgatgctatccaatgttactataaagagtccaaatgacattgtcttcctccatagtaaaacctccatgcttgatataatttccaagtttttttttcctgaaaacttaagggagatcaatacaagactttttccagtgcttaaaattttagcattatttatactttgccttaaaatgaccaactaaaaaagaagaataaagcaacttctaagcaagctcaaaaaattgtatgtgtacttgaacttttctctatttttgttttttttttttt

SEQ ID NO: 171351 - DNA, 876 bp, Cannabis sativa
acccacgctgatcaacctcttccaccgcattgctcgaccattgtaaccaccgcaccgcttgaccgctgtgagcaccacgaaaacccacgctgatccacctcttccaccatgaacccatctcgaccaaaccaccaggctcaatgcagtttgattcaggtcagatgctcatgcgaatgggttggggaagacaaagacccgatgggtccgatggggacccgatggggttcgatgcttgtgttggattttctcatggggtctgatggcactcgatgctgggtctgatggggcccgatggtgttgagtgatttttcaaaaaaaaaattgtgttggttctgatggtgggtctgatggggcccaatgcctatgtgttgttctctttttttttgtgtgtgttgggtccgatagggccgatggtgggggcagtcggttgcgtggacggtgggggcggtcgggtgtgggtggcttgcatggacgggagtgggtggtcttcgtctgtgtccggtgtgcgtgcggttgagggtatgcgagatagagagagaaagagagaaagagaggggaaagagagaggggagtcagatttgaatgaggggagtgatgtgggaattaagtaaatgttgtcctattttaccaatatagggtattttaggtttaagggaaaaatttccccttaatgtaaggataaaaaatcaaatttcccttctctttctgtagcagtgtattgtcaagtaatgaacatgaatctctttcttgaattgtcaaacacctcttttacatagtattccacagagatctgagttctaccttgaatagagtggattggtactcaacacactatagggccgatttggagagagagagagagagagagagagagag

SEQ ID NO: 171352 - DNA, 1067 bp, Cannabis sativa
  modified_base (666)..(669): a, c, t, g, unknown or other
gagacactatttggtaattatcaaacttcagtagggcctttgccataattataccatctcaaaaatctaagctaagtcagagatatagagatatatatgtttgatgtcaaaacaaagcttttaatttattatttatttatattatttgaacagtatagcctttcgatttctagaatccccgctcatctttttttctaaaaattatccttgtctttgtttatgtcttgagttgaaacatattactataattcgtcctcgcctacggattagtcgatatttttcacaaattttacgaacgaggtttgattttcattatttaaatgaacctaaaatattccatgggatccctcctcgcccacaactggccaaaaagggaaggaccagtacataaacaatcgttggcttagtaaaattgaaaaaaaaaaaaattgactgaagtacttgaatctaacaatctcaatagttcaggagaaatttttaatgacctgaaaagtttaagagacatgatttgatacatgttaaaatatggagctaaagtcataattagcctaaacaataataatacaaactattaaaaaataaatatataattaaattttaaatataatgtcctcgcttcaagcttctattggaccttacacccatagaatgatggctcttatacannnntacgtcactctggttgcttcatggactgatgactgaccctataaaccaacacgagtattttcaacatgttttgtcctcactcacacgcttcctgagaaaacttccctagaggtctcccatcctgaaattatcccaggttaagcgcgcttaattgttgagttctatcgtgatgggctaccaaaaaaataagatccaccttattgatataggtagtactaatcaatcaatttaagtcatcttcatatatgtagtcccatacctaaacaatctcaaaatcatcacacatgaccctcccgagcgatgtgggattgtacagttcctggtctttcccctttggatcatggggcgctgactgtcataatcacccccctttgggagtccgacgtcctcgtcgacca

SEQ ID NO: 171353 - DNA, 547 bp, Cannabis sativa
tgtgtttgactaaccacacaattatactcaggggcggagcaagaataaaattatagggggggccaatattaatattgtatacaaaaattgtgaatttcggtgactttttttgaagtgatgcgtcaattgaaaaaatatcatatttatatgtattaatactgtataagttatttaaaaaaaatatatagaaccactcattatgtacaaaataaaatatgagtggtgatttaaggtgttcaagactcaatttaatattaccaatatttatttgtagtttcttcaatatatatatatagatgtatttttaatgggtattactctttaatgggtaaattttagtttttaagcttaatttttctatctaattagttaaatctcttatttttacattatatgagttggagttgttccatcgactgaaaaaattaagaaaaaaaaaatcagcaaaaaatagattaaaaaaaaattgagtttgacttaaatgttttgtacataaacatattttgatatagtgtaaaaaatatttttggggaattactccatatac

SEQ ID NO: 171354 - DNA, 549 bp, Cannabis sativa
ataaactataaaatgtatcagaaaactaacattaacaatataatcacacttaacatatactgtaaactataattaccgtaattattcattatatattacaatatgcatgttaatcttaatcttcctacatgttttttgttacttgatattaatttttaagatactaagcattaaagtagttggttggttgataattttgtgccttaaaattactaccttggtaaactaacaaataaactactgaaatcactactacaataaactcacaaatataaaccacaacaataaactaacaaagaaactactaaaattaaagaggcattaatgaattattacattaccactaaaataaactataaccaattaaaatattaaaagttagaaaaaatataatcttgttaattactaaaagttatagagagagcttattagaaggtaactattaagcatattgtatattagtagatttttttagttattcatgtagtttattttattgagatataggttggaattaaaatatatttttgtaattttaaaatttatttt

SEQ ID NO: 171355 - DNA, 636 bp, Cannabis sativa
attgtctatcatggtccaggccacaattttattttctatctgtacttccaggaccaagggatcgttgtgcaggaagcgaatgtggacaacatctacatcagtaaatgttatagtgggttcccctacccatggcatttttggctttctctcctctacggccaaaactactactttttgctcatactgtaaggttcgagcatacctttctcgagctttgcccgagtctctagctaggtgtgggcccccaataatgacttgtaaattctcgtccactggtggaggcattagtaggtcttgattattgtctgcttggacggcccgctgattctgattggccttgacgtatttctgcaagtgcgtgttattttttctgattaagaatcaatttcccgctttaggttgttgcactcattcgtgtcgtggccatagtctccatgaaaatggaaaaacttggaagtgtctctcttacttacgtccttcttcaccggagcatgttttttgtacgggaccatagaatgggttgccgtgtagatcgtctctaggtcctcagttaggatagagaaagcaataaacttggaggcattttctctaggggtgtgttcggctttacccatgaatttgttgggttttatgccc

SEQ ID NO: 171356 - DNA, 506 bp, Cannabis sativa
tggtctaaaagaaataaagaaggaaatgaaactaagcctaaaccaacaagaattatttgttcttttgctactaatcacattgtgcataatcgccaggcttcccaatcaaccaaaaatctccaacaactcaagaaactcaaatacaactgctatactcattttgcctcttagtcaactttcacgttcaaaaatacatgttggaatattttttttcaattttttttttcacagtggtgttcgttatgcttacaacaccatccttgtaaatttttgaaaaatttcaaatagtttacagtaccgaaaattattccgaatatcaagaactccattctcggcactgtaaactgtaatatcgctatgaaaaaaaattaaaaaatattccaccacgtgatttcaaatataaaaattgactaaaaagttgtaattagtacctttttttttttttgagatggaggctaatgcaatgactcataatattcaatgggcgataaacttcatcgaaacaa

SEQ ID NO: 171357 - DNA, 596 bp, Cannabis sativa
tttgacatggatctctttactgacttttgtaatagacatggaatcattaggtgtttttcaatggttgcttatgcacaagaaaatggacaagttgaagagttcaactaaattcttaaggatacgttaaaggaatgcctggtgcaagccaaagggaattagtcagaagaactacccaaagtattgtgctcttatcgcactgtagaaaaaataaaagctgaccacaatccttttgctctagcctacgggtacgaagccatgatatcaatagagttcacacaaccatcacatcagagactaacatacgaccaacaaaccaaccatcaattgttggctgagtctttaattggaattgaagaaataggagaaactgagcttcgaaaggcgacttatcaacaaagagtcataaaacactacaactccaaggttaaagatagggaatctaaccttgagatatggtgttatagtaagtattccgaaacacgaaagacgcatcaggaagagtgcttaggcctaattgggaaggaccatatgtctgttggaagttattttaccaggaacctagatctactcacaaatatgttgatttaacaacctaa

SEQ ID NO: 171358 - DNA, 881 bp, Cannabis sativa
gtatcattgatacctctatctgtatagacgtctttatttcttttagaacagaaaataatagagagaaaaaagtattattgaatctgaatttgaatgaaaaaaaatagtttgttatagtgattagccttatataggcataaaagataaaaccgaaaacaacaaagggaaaatcacagagttaactaacttggactcatcaactaataaacctaactactaacagttttaacacgcaccctcaagatgcagtgtagaaattcttacactcgtcttgaatacaatgtcatgaaattgagttagaaagagaggttttgttaggatgtatgccaagttggttttggatggaacatgattcatcttgatgctaccattggtgaccgtttccttttcttttgttggtatctcatcaatggatctacatcgctttagcaaagacgtcttggtctctctttttgatcatcagatctaggggatctcctgatcattacataccctttgttatggccttcaatctttaatgattaagcattgcaacattattgttcgtgttattttctttatttatgattgaaatagtaggattgttctgtcctcaagtttgattgaaagatcattgactaataattattaatacgtggactctgtcagatgctcatttggttaagaaacctagtatatttcatacttctttgatgattgaccgttacaggcatattggtattttagttgaaagtgttgttggaatttttttctaatttattataaataacttagttgacttattattgttaattttgctctttaaactatatatacatgtaatggactttgtccaatttactaaattttttaattttctctaaaagatatatatatatata

SEQ ID NO: 171359 - DNA, 635 bp, Cannabis sativa
atatatacatatatatacatatttggatgatttcttaatcggtaacactaatgggtactaaaaaattaatgatgtggcaatttagtgacttgctagagtaagttactaacaaattttttttaaaatttttttttttaattatagcgaatgattattttgagaaattattttgagaaattaatttattttacttaaattattatattatccttatataaatattaaaatgtataatgcaatattaaagatctatctcggttgaaaggtttatttatttttttttttttggtttatgcattattgttattattatttaattttgtttctattttctttgtacttttttcctcccttcctatttattggactttgtgttttaaagtgttttttcttttttttggcatttgggtccaattaacggtgaatcagcttttgaatacccattgatgggtattaaaaaaaggatgatgtggtgatatgttgacttcctatatcatgttactaacaattattttttttttctttgggaattaccgtatttactattattttaacttttttttttttcaaatttacggttcgggtttctaaagtgattgctgcgctagttgtaataggggtttctatacgatttt

SEQ ID NO: 171360 - DNA, 640 bp, Cannabis sativa
tgggatacgattacaatggactttttttactggattgccattgacacctttgaagcatgacgctgtttgggtgataggtgatcgtttgactaagtcttctcattttattccagtcagaaaggattacaagcttaccaggctagctcgactttatgtagaagatatatttacactacatggagtgccttcaagcattgtttttgatatagatcctcgatttacatcaaggttttggaaggccttccaataagccttaggaaatgaactttacttgagtactgcccatcatcccactactaaaaaaaggggattttgcgtcgatcaacacatttggtcaaacttgttgaccgacgcaaaagtcaacccacacttttttgcttcagttatccactgacacaaataattattaattagcatcggttatatatacggcgctaaaacaaaaaccgaagcaaaagatgaaatataaaaaaaattgtatacactattagcgtcaatctacaaccgacacaaaaagtcattatatacattattagtgtcggtgcacaaccgaagcaaaaaggcattaaaaaaaattagttatgggctttagcccattttcaaaaaaatctaaccttaaaatataaacacttctaaccct

SEQ ID NO: 171361 - DNA, 534 bp, Cannabis sativa
ctggggtgttggtttcgatcactcgaatgccaattctactccgagcattctctccgaaatagttaaaaatgggacaggagacctcgtccttaagttcaagaaccttggaaatgccaaaacaacatcctagaagctccgaaataagcacccatcgctcaagttaacaaatacctagggttctacttatccgattctaattctgtcccgaccgatcatttagttttttacaataactaagaggcatgaagtcacaagattgaaattcgcaacttcatatttttacttttccgacaaggttatttacgcataaatcgggtagtttgagtctctcgtttctgcacaatagcaacatctctgagaatttgtgattaacttcaccaaaactcaaaaatggactaactggtgtcaaaatatcacttagtgttgtcaatttcaatacgcaagtgcacgtatcgttgttcaagtaataaactcacacgagtgaggtcgaacctcagggaattgaactggataccactaaattagacttatgat

SEQ ID NO: 171362 - DNA, 743 bp, Cannabis sativa
  modified_base (467)..(472): a, c, t, g, unknown or other
tatatatataattttgcaatagtagttgtgatcatttggtcacgatcaataggtcgttaaaccaaattcaaggttttggattgggtgctattataagttgcttaaatcataagattagcctaattaactatttaaactatccaaatttagttagctcattcttcgtcaagagtgttattatcaagtcattgaggttttcattgttgttaagataaccattatatgaaaatttaatattgttttgctttctctttcaggaaaataaatatattaatttttccgtttagagatattttcttacatttttagagttttttataaaaataatacaaaaaaaaaaattacataaaaataacatgaaaataatatccaaacaacaataaaaaataatatacagataataaaaaatcaacaacaaattaacaaaagtacaatataaaaaaatcgtattttttgtaaataaaatnnnnnnaatcgtaaaaatatttaaaaattctgtacaaccgtatttttgtaattttcttattatttttgtgtatttgtaaaataatcccattcaagggataattacattaacactatttttttttttttttatatttttaggtttagagatatttttttacatgtagagagatttttataaaaacaacacgaaaataataaaaaaaattacataaaagtaacaggaaaataatatcaaaacaacaacaaaaaataatatacatataacaaaaaatcaa

SEQ ID NO: 171363 - DNA, 505 bp, Cannabis sativa
agagaaagtcttagcccgttggagaaatacttgagtaggcgcggtccgcatgtatggagggatcctaacccactccgtaagaagctccgggcggtccatggcctggaagctggaggaaaagaagaagcgttggcggtactccttcacatgcttctggtagttgaaagggatcgggccctcgttcaaaggatgggaccgaagtccacaaaatccatctttaaatttgtctcccttcttggtgacggatacaagttcttaaaaatataagatttcagctggactgggcgaaccccagctctaggcagtgtacaaaatgaataagcctgaaagcaggcagtatgcttggggaatcagttgatacggcgcaaggccaacaaaaactaaaaaatttacaaagtactcgtgaagagggagcatagccccgtacatcagataggtttggctccaggctccgaagcccccatagttgtgattgggtgtttcctcgtcccgaggcagccggtgg

SEQ ID NO: 171364 - DNA, 684 bp, Cannabis sativa
  modified_base (535)..(536): a, c, t, g, unknown or other
atcaaatgtccaatattcacacaatgcaaccatcccctgttatcactattcaagctcttctaaaaaaatacgccaagccaataaaagtgtcaggatttttcgacacgggagcgtcatatatgataatgaaccctgatattcttcctaaggaatattagaagaaagaaaaacaatactttcatgctgcaaatagaggtatttttggaacagaactcattagcaaaccgattcggttgtagttctttacagggtgttctattactcacagagtcattggataaaaattacccggaaaagacttaattgtcgaatttgatctttacacaaagaaagttttgtgtattcttcctagtggacttggttacaaataatattttgctcgatgggaagccataccaaactatttcttaatgccccatgacccatttcatcaaatcaagaaagagctcatcgaagtctcatgtgccaataatcatgcagagctcctaaagaaatgtgaccatcctttatggaaaaatcaacagttcttcataanncttccttttaagcttaatgaagatataaaccatagaaaggctagtcacccaggcatgaatttagaacatcaacaaatgacgtccaatgaatgtaaagagttacaacatcaggatttaatagagtcaacttcctctccatgggcatgtc

SEQ ID NO: 171365 - DNA, 535 bp, Cannabis sativa
tagaagaaagtggaatttaattgcatccaactatattgatgtaacattcatatcaattaattttgaattaatgtatagcactctagctatgatcttgtggctgaaaattataagttcgatcatcaatacaattatacaactgtgccatcaattgataatatagtttggcgttctcaatcataaatactagataaatattttctagactaaaaaaaatgaaataatataaaaaaaattaaatatgtgaaagtttacattagattatctccaatagttataccattttgggttaatttttcaccaatataataaaaaaaattaattacttttagtccaacaacttcaataaatatttacactaattatatcatactaaaaattgcaaaagtgtgaaatgatgaaatgagcttgtgaaatcacaacaactctaaattgaatatatgtagaatgaattattacaaaaaaaaatttacttatagtcacaacttaaaaaaattataactaattataaatcatgatttttatgttgtgacta

SEQ ID NO: 171366 - DNA, 859 bp, Cannabis sativa
  modified_base (606)..(609): a, c, t, g, unknown or other
  modified_base (806)..(810): a, c, t, g, unknown or other
gttgggctcttaatatcataaaaagggatgaggaaagccttttttttagggataagctgagaaatacctcttttttgtatccattaatcaaaaataccatcaaattatattttattaaaatatacccacttttataagtgggttgcccaatgcaccctcaccctctacccatgtctaacatataatttacattaatctaatggtataataaggacatcatctataaaaataagtatattttaaaaaatatagaaataaaggtaaaaattaaaaatgggtatacaatgtaattttctctcttttttatctattaatgtaacatactctcatattatatttcattaaaatgtatcaacttttatgagtaggttgttcaatatatccttactctctacttaagtctagcacataatttaaggtatatcttaaaatcatgaaaataggagagttctatttacaccccataaaatgataaattcatcacattattaaaaaaatatatacttaaataatttttaaaaattactcttaatattttttaaaaaaaatttcctcacattattttatgttaatttcaatagttattttgattttattttcataatnnnntctaactcatgtatatatatatatatatttatttatttctaagaaaatttcatataattttttattttaatttttttgccataatatttaaaatataatttatttttatttgatgggtatatatttttaagaatatgaattggaagaaaaacttaaaaaatttagtataatttaaaatataaattttatataaaatnnnnnttattaaaatagggtgtctttagaaatttctgggatgtaaataaaattt

SEQ ID NO: 171367 - DNA, 1190 bp, Cannabis sativa
ttttttttttttttttatgatatgagttttttgtttttaattaaaaataaatataaaataataaagggtattattgagatataaaagtttcattaaaagagaaggttaatgtagctaaatttttaaaaatgaagattactaccataagctaacctttaaaaagggaaagcctttaatctctttggagaggggctgtagcaatttttgaacctttgacttaagaaagttttttttaataaagacaatacgtacaactacaccacacaacacaccattttaatactattttaatggctttctctctcttggttctagagaactctagtggcatgcatccctctgttcctccaccgcacatggtggctttggtccatccgaatttgttttgtgatggtttagttcctcaaatcaaattcttctcttctaagttttctttgtttccattctctcaatccattaactcttgcatttattgctctgagtgttataatgaatatccatcccatcttaaaatctctcttcagatcattaaatgtggaaatcccttttatcttctcctcagcccttacatctgctgtttctctctatctctctcatctttctcacccccaaatttcattattactcacgtttatcactttgggttttggaaaatggaggcggagcaatggtttaatgatgatttgaagcttagaatcatcatttttcctattgggtctaggatcctggacaagatggatagatcctccaggagatcacaaagggcactctggttttatctatttaaaggaaggtccaggtatcatcttctccacttcacttcttttttccattttgttgttcaaactttgcgggtgtggtgtgtgtccgtcaatatggtagagttctttgctaatgtctctaattccttagccctaagttcagaagaatccactgtttttacttatgaggcggggtactgttgattctccacataccactagcctccttcttcgtcttcataccattcgccattttaacagatgttaggttatttttagtattaattttagtatatttttaattgagttttaatcgtgtttggagcatttttacgtttgtctttaatttgtgcagatttaaaatagaagaagattagaaaaatattagagaaaaagatgggaaaaaaaagataaaaatatcatgatatt

SEQ ID NO: 171368 - DNA, 532 bp, Cannabis sativa
atgggtgtgtgtgtttgaatctggattttctggcttggaatcgagcaagttctcaaagaagagaacttgctctgctagggtttcgattcgtgagagtgaaaggctgagtgcttgagtgttagggtttctagacccttctcagagtatttaaaactctgagaaccaaacgacacaagattgagtgtcgtgttggtcatacggtgtcgtttaagtctaaagcataagtcagacttggaaaggtcgtttttgaccttgaaactgatattaaaaggtcttgttggtgtagggcaaaagagtaaaaatcctacagtggtatcagagcctggtttggctaagggagatcaacaagattcaagggaaaatatcaggaaggaattggcaaatcttgaaagaaagattgacaagaagaacaacactcaaacagcaagaaaatcaagattctgaattaaattcaaaattcagaaatacaaactgagaaattctaaaactctatctgtttctttttcaattttattaatatgagtaacataaa

SEQ ID NO: 171369 - DNA, 672 bp, Cannabis sativa
gattgaatgaatcgggtgttcaaagacaacctggataggtgcatcattgtgtttattgatgacattttggtgtattctgagtcagaagaagagcatgagttgcatttcagagtggttttacagcggttacgggatcataaacgaagggaacagccagatctcgacaactagcaacatggggggccacccagggatctcttgctcaatggaacccccattgggcagccactggccagctagctatcaacaggagtacccatggtcggccagggtacatcacttcctctccaaagggagcgaggtgcatagaggtcgatcttcgatcgacaaggacagagagtgggtggaaacacccaaaatggcaatttgagaagtgaaactcatcactttaggcatctagatcaaccaaactctagtaattagtgtgatctacccacaatcgaaacaaagcaaacaccagtcgaccgtggagtcacgggcagccagaccttgtccaacatatgtttggatggccaaggaagcatcacaaatagccagatcctaccctttgtaggtctggctaccatggaggagtactaggcggccagaccctacctccctactacaaaaagtataattcacgtcggtttttaagtgtcacttaaagaatttacgtcggtttataaaaccgac

SEQ ID NO: 171370 - DNA, 620 bp, Cannabis sativa
aacattaaggtgatatatagttcactagtatatatacattctagggtaaatttatagtacactcttaaaaaagtcttttggtagactctttatttgttttaacaattaagaaaatattttagtctattttttctatgattatatatgttataattatttagaactaataataaatttttttaaaaaattatataatttacaatgtcaaaaacaagatttacaacgaataattattttttcttatatgcatttaaataactatttaaatcttatttttggtatcataaatattcggaattttttaaaaatttacaagcgatcttaaatagttataacatatataatcatgaaaaaaaaaactaaactaaaaaaaaaatgtgatgtcgaaacaaataaaagatctaccaaaccctttaagagagtctactacatatgattcctatattatttggggagtactaagtaagtattttattttttttttaagggggagtcctatttatttaaatgggttttgtcatttttacactttaaaatagttttttttgcatttttacgaaattttatatagaaactcttattgcaactagcactgcaaaattgtaacaaaaaatcgtata

SEQ ID NO: 171371 - DNA, 546 bp, Cannabis sativa
  modified_base (112)..(121): a, c, t, g, unknown or other
actatctaaatatttcataaactagttattattttttcaattttaatataatatattttagtctgtttattttattaaattattaataaaaaattacttgatttaagttgannnnnnnnnnattaataaattaatttttaactttaatttaattttcaaaataaaatttaaaatatctattgttataccctaatttcggctaacaactagaagctgacacgtgtaccagagaaggaatgtgaattagcttaataattgtattattatatgcaatttaaattacccgcttcaagaattacggttgatagaaatattcaaactcactgccatgtaagcagatacaagatgagaataataactatcaacaagtatgactggcgagacaataagtccatctcgggataacacagagtacataataaaggtttttcaagatgagtaaaccaagagcttgcagctcattaacccgcatacttgggaataagagcttgcagctcattgacccacatatctgtatgcagagagaataactacattcatccatct

SEQ ID NO: 171372 - DNA, 542 bp, Cannabis sativa
acagtcaaacatgcacttgtaatgccctctctctcgagaaaaagcaattccaacactttgattgaatttactactactttatattcaacttctgtttgtcttgtcctctctctacagaaacaaaagaaaatcaaatcaaatcctttgattgatataatattgggcttattacttttatgcctttttttttattattgtttttcttacttaattgcttgcaattcaagtaaattgtgaatgatatacatctatcactaaaatttaatttctgtgtaataagaaaataaacgaggatacaatatttgatagtagcacgaagaataaatactgatgtgatctatatatatatatatatatatatatatactcttaatttgctcacagcaaaattcgtaagtgtaatatatatatattttatcactgtttatatatttggtattggccataatttacaaaaacattctggctagatgctatcggagtaaaggattgtcaacaatatatataaagggaaatttgattttctatacttagaaaatcaa

SEQ ID NO: 171373 - DNA, 727 bp, Cannabis sativa
ttgatagaacttgcattgtttggcatttaaggcaaaattcttgatgacttatactttgaaaaatgatttaagcaatttttttggaacgtttgtgcctctcaaactaacatatttgcgattatccctagtttaccccttttgagtctcaaactgattttttaatgcactatttttgaactaaaaaataaaaggaaatttgcggcataaatacttattttattcattttgttgctaataagtacccaatttttaaaaattgcgccacaaatactcaaaacactattttaaacatttgttgttagtacccactaatagaagttagtgtagtaaacacgtgtcatgttctgattatttccaaattttttacctaatttattaaaacaacacaaacataaaatcataaactaaaaaaaaactcctattcccaattgcagtagacccaaaaaaaaaacattcacaatggcgcagaccctaaattaatggtaccaccaccatgatcaaccagaattcatatctgttctcttcctaaactcatattgggaccaaaaattttcgagaatattaaatctcacagttcacaaccataaaaaaaaaattcttttttcacaaaataaaatatatgtttacataatttgagctcaatttttttcgtatatgtaagtcttgcatattataattacaaatacaaatttattatcattattattattgtaatcaaatgtatata

SEQ ID NO: 171374 - DNA, 818 bp, Cannabis sativa
  modified_base (422)..(429): a, c, t, g, unknown or other
tatattgatattgatgattgatatatttctcctcacatttttttagtttttgttttatgaaaaacttacaacttacaaatatatattctaagaaaatagtagttattttcttcatcatcactcatacataactataaatatttttcctcaacaaaattctcacacctttataaatatataaaacatcaatatataatgatgtgaaaaagaatgaataaggattttattgtatagggttaaaagaaaaataagatcaatatttaggctcaaattggatcaaactaggaatttaagaaataggataggcttgaaaagctcaatcgatctaaaaaaattgcctatatcatatcttaaaatcatatgaaattaatcaattttgcctaaaatgattatcaaacaagttctagagtggttgagacttnnnnnnnnaagtcaaacatgcattcatctttctaaacattagcaaatacaataattaattgatgtgcaaaaattttataaaaattaagtttgagcagtaattaatcatgggctaagcacacaaatcatgagaatctatcattttcctagaattataactatcagagaattaagaatttcatcatcaacaaaattatttttcaaaagaccgtgcataagacatcaaagtaaaaacacatatcaaacacgagcaatcattgtcaacagaattttattcaacccacattcactaaaattaatataaaaaaataatataaactaaaaaagataaaaataaataaataaataactaaacaactaaagaaaaaaatagatagacacgacaattaatctccccc

SEQ ID NO: 171375 - DNA, 618 bp, Cannabis sativa
actttagagatgagtgtttggcttagaaaactaaactgaagagggaaaatcatcacaagtctaagaagcatggagttgatgatgtagctgatggctatgggttgtctgatgcacttacattgtcatctgatgcacttgtgatgtctagatcagattcaggtggagattagattctagattcagggtgttcatttcataagacaccaaacaaaggactgtttatgactcttttagagagtcatgggggcacatttcttcttgggaacaacaaagcttgtgagatcaaaggtgtgagaaaaatcttgttaaggaatcactatgaaatcatgttgaccttgcagcaggtaaggtatgttccagatctcaaaagaaatcttctcgctgttgatatgtttgattaattggggtatgttgtcaaagttgaggtaggtgtaatacacaaggcatagaaattgtgttgagaggaaagttgagtaattgattgtatttcctggatggaaagacaataataggttgtgcaacacctgttatggactcaattaaacacaatcaagcaaggctatggcatctcagattggggcatgtaagtcagagaggacttgaggaaatgaacaggca

SEQ ID NO: 171376 - DNA, 1119 bp, Cannabis sativa
aagaattagttagtgttgggccacaaccgctacctcacattgactcccctttgggtttaagccctcacaattttatttttgggcactatctaaaaggtctcgtactaatggagaaggtcaaaaacacttatatccaagacaattcttgtctattctttcaatgtgggactttggttgatatcccaacaatcctcccctcaaaccaaggaccacatatttgtgacctcccctccagcaggaagactttcgacacaggtcctaacactgatctccatcttgaaccgccgtaatcatcaacgggactcgccacctgactacatcaacggcaccatataaatcttcaatcgcaatgtcatcacattgagggttttttccacacatcgcaaatgtagtccattatcccaacactcctaaacttttggctctgataccacttgttgggccccgctcttctatcttgtcgggccactatctcaccttgacttctattagtatgatattgtccgttttaagcttaagccctcgcggttttgtttttgggtaccttcccaaaaagcctcatactaatgaaaaaggtgaaaacacttatatccaagacaactcgtatctattcttgcaggacttgggttgataccccaacagttagagatagtagttattaaattaatcattttacacaatgtttggggagcttaaactttgtatagatagagaatcattcaagggtatggtgtgtgaattgtctgggaaatcatggccggccagagggtggggaagccggggcctaggccccaggccctgaaaaaattaaaattaatattatatataaaaataaaaatataatgtatgtatatatataaattttgattcaatgatttttataaaatggcttatagcacaattggtaagagagaagttttgtgttgaggtgtaggactaggtgctaggtttaattcctatttccctcacattttatttgttttaaaaattcaaacttggttaaaatttgtaaaaattatgtatgtttatttaattatttttatttatttgataagaatataatattttaagatatattcaatgcattacctaaaaatatatataatataatatttagaa

SEQ ID NO: 171377 - DNA, 664 bp, Cannabis sativa
tgtttcaccaaacttgcttctccagctgaaacaatttctccttggagaatatataaactattgatattttcacctttcatcactatcagcagacttttggtgatcctcatgcttctatgcatggacttgtatccgtaatcttcatcttcaagtgcacccagggatatgatttttttgtcttaagtccaaaatgtgccttccgccatcatactatatgatgggaacctttccgattccaataaccctacatgaatgatcatttcccattagaactttacctccatcaactgatcgatctataatcaaaaaattattctcaacttggacacatgtgataagtgcatctagagtcaagaatccacactgttcattcaagattccgagatgaagaataattctctatctgttgaacaatcatcactatcctccacgattgcagttgaatccttcctgtggtgatgctgcatgttgtccttcctatctccattgtgagatttgttgaagccttgttgctccttatacttcttgcaaaatctttgtaagtgtccgaatcttccataaaagtaccactttcgagtttccttctctctagactttgaacttgattgagagtgatggtgtttactcttcaaacttactttattgggtgatcttcctcttgcta

SEQ ID NO: 171378 - DNA, 653 bp, Cannabis sativa
actaatattaaacaagttttttaaattatatatacttaaggatttttaattgtgtggcatgaagaaatacaaataaataagatatttaagaattcttaattgtgtgccttaaaaaattacaaataaagaagacacctccttttgaattcttttctttaaacgtgtgatccatatttaaaggcctcataagaatctaaaacaactcctggagctatagtcctgcaagagccaatgactaaatatgagaaataacttcaataaaatgagggaccactaccactctcatataaccattgtttacatgagctcaattttatgcttcaatctactaagagcttaacctctattctatattaataatattcactaatttaagtaaacaatattttgtattaaaaaagagtaataagaaaaacatagttatatatacctttgtacttttggaaagatgtctgaaatcataagcagacatatacatattcttcccttcatgtgatacaaggaagattatgaaaccgaaactaagagcaaaataatccgctgcaacaagttctggaacaactcaaaaataaaaattatgtaaaactctttcaaattattatagtgaagaatcacataacacaaaaaactaatgatgacaactggaggaactt

SEQ ID NO: 171379 - DNA, 574 bp, Cannabis sativa
ggctatagagataaagtggtcttccataatttaaatcaagatatataatattattttgatattgaaatataaaagtgtcggggtaatcctccaatatatatgaggagttttagacttgtttggtgtttaaaactaaaatgtgtatttttgagatatgcatgatatcttaaaataaagtgtacgtaacttaaacatatttagtgtctaatgttaagtgtgtaatataaacatatttagggtctaaattagtggttagttttgatatgtttggtatcaataaattagtaaaaatttgagttgtgtgaaaattaatctttttttattaaattttcaaagcttaagtacttaagaagaaagttgtcaccttaaaagtggacactatattttgctaacatgattcgcttggaatcaaaagtgtgtggttaacaaattgcctaatctttatacaagatgaaagcatgaattttcaagggataggacataaactcccttagtgctttacttattgatggtaacctatcttaacactagtaaaaatctagtcttatgttcaataggtaataacaagtcaata

SEQ ID NO: 171380 - DNA, 640 bp, Cannabis sativa
  modified_base (600)..(603): a, c, t, g, unknown or other
agcccaatctaattcttcaagcaacggtgttagttggtttagctagaagcgcctttgtcaacataagcatgttggtgggttaggatttcacgatcttcatgattataatctatctttcttgggcaaacaaggatggctgttactcacaaaaaagatacattggtggaaagaatttataaggctcgatattacccaaatggttcttttttgcaagctgaacttggtcaaaatccaatttttatttggcgtagtatttgggaagctcaagctctggttaggaatggtgcacgacgatcgattggtagtggctcatctgttagtgtccttctcgatccgtggctgcctatggatagtaacccctttatcatttcggatcatcaaggtctggttgataaaaatgtttctagtttgatgactgtgggtgagagatcatgggacttagagctccttgatgatatgtttgtggatagggataaaaacttgattatgagtattcaattaagtaactctacaaaggaggacttgtggtattggcacatggaacattcagggttatatacggtcaagagcgcctacaagaactgttggaaattattttannnngatctatttactatcatgtatgttggattaacaacct

SEQ ID NO: 171381 - DNA, 935 bp, Cannabis sativa
aaaggcaaaagccatgttggaattgggatcggtagtgacattttggcctcctctttggttctattcctgtgacactaaatggaaaaccctattaatttcaggcaaaggatccataacaagaatattacctctcacttgtgaatagagatcagataatcccataagaaaagacatgatatattccatattatggtgttcttgcaattttttgactcctccacatgtacagccattacaagtgcaattaggtatgaagttggacaattgttcccacactgttttgagctttgtgaaatacatgctgactgattgggtttcttgtttgagattcatcaaaattttcttgagattgtatatatgagcaccattcctttgctgaaacctaactcttagatcattccatatagcggctgctgactcgtcttagagaatgctagaggaaatctccttagaaaccgagtttattatccaagaaatcacgatattgttgttccgaatccaagcattgtagaggatttgatcggtttcagggggtttgggtatggaaccattcaagaaccccaatttgttcttcactgaaatggccaattctattgctcgacaccaagcaatgtaattgtcctgtccagtgagcaattgggataccagaatgtttccagggttgtctccatggtgtaaaaaatagggatcggagggatcttcaataggatttctaggtctgtttatttgagtatttagttccatacctggtgctcgagtttgattgttaccattgttggtttggacagtagcttcgttatcactgtctgttccatgattgttcgacatggcaagatagaaaagaagcaagagatgcttctcaagaactcagagagaagacttgtaaaagaagggtgtcgattgaagaaatgaattcttcaactgcggacatggat

SEQ ID NO: 171382 - DNA, 797 bp, Cannabis sativa
tcaacaacaacaagaaaccaaaaaaggaaagaaaagagaaagcctagataattctcctccacaagcatcctccctctcgaaaaaagagcctaaataattcatggcccaacgaattgtgactaatcctatttttgccatgatccatcaaacagatgaagaactcgaaaatgaaggaaatcagtcctcttcctctatttagaagagacttttgaaacttggtcctaagattcaaatactagtgatgagtctcaagattcagatactaattaagatgacgtacccccacattttattgctcaatttgtagaagaatcatattcctaaagtgagcgtattatcaaaagtgaagaagaagaagcaactacaataaaactagaatccaatcatcatcaaaagagtaaatattctaagtttcaaacttttactcttgatgacattctcccatctaagtggcaagaaatatttcaagaatttcaagcttggcttagcctggaaacacaagaaaccacaggcatagacgaggacgatccttttgaattttgtctcaagattcaccaaaactttgcaagattggtggactagcttaggcgaatacagacatatgactttcttgcaactcccatctgtcgtaaatgccctaagctatttatatgtcgagttttatggccaagacgcacaagtaactgaaagacttagagtagagtttttcaagctcaattgttgttcaaaggacaaaagagacttggaaaagcattataagagaataactcaatgattctaccaaataggtggcattg

SEQ ID NO: 171383 - DNA, 921 bp, Cannabis sativa
aatgactccattagtgtagtgattagtagttctttagcttctaaatttgtcgagtttagagattcaactatgttagaagtcatagttgtatacctgttgtgtttgctgtgataccttgaccatttgtggtatccaacttgttataaatagggtctaacacgcttgtccaagctatcaagcttgctcatatggtattcaaatttcatctatgtgtatgcttttgctgctgcaaattaagaatggtttatcgagtttgctggcattcttcttaaaggttgctcaataggtggtatacacagtagccgtgagttatgtctggaaatacgtgagcagcatccttaattatgctctcaattctgtctaagatcaagcactgttcttctcttacaccatatgcttccctcaattttttttaaaaatcatacccatgatgagttgttattttctaaatccaacagagagtgctaggggaaaaatgtatccatttgcatcttgtgtacaggctaagagtaatgtcccttcatatgttgattttaggaaagttccatcaaccacgattatgagtttgcacttgttccatctttttattgaaacatctagtgctacaaataagtacatgaagttgttatcttcttctgtttgcatgtgtactatggtttcaggattagtttttggagcatgtgcaaaaaaattagaagcaagctgtacgattctttagctttttttgtgtaattcttgttgtgtgtgctctttacttctctatgctttcatgtagttcatttttacgccatatttatccttgaattctcctctgatgtcttgtggcatttgagttatttttatgttggtgaaccttgagttaatgtagtttccaatcaactttcttgtagccaatcgcttgtctgcaaatcttatgttgag

SEQ ID NO: 171384 - DNA, 1203 bp, Cannabis sativa
  modified_base (441)..(445): a, c, t, g, unknown or other
  modified_base (761)..(761): a, c, t, g, unknown or other
agcccaaaatcgggactcgatcccagaatcaaacaaagcccctgatctaaattgggattcggacctagacatggacatgaacctagacccagactcgaataccgacccagacccaaaaagggatcaaaacactggacctggacccagacccagacgtagacccaaacacgaacttgggacccagacccaggaatcgaacctggacccaaactgggattcgaaaaacccgtacccaaactcggaggaagactcattacccgaccccaacctagacccatgcccagaccctaaaccaaacccagatcagaatcatcattggaactatgactaggacccaaacttgagaccagaatctaacccaaactcagaccagaacctggaccgagaccttgactaggactgggacatgagacttgggacctgaacctcgaccgagacccnnnnngggacctagacctgaccaggtcctaaaccctcgccgggacctgagacacgcgacccagaccaggatcaagaccccaacaaggacccaaacctgaacccagacccagactgggatcaagacctggacctgaactcagactgagacctagaatataatcaagactcgggacctgaacccgaacctagacatagaccaggacctaggaactggacttggattggggacctagacttgggacctatgactcggaacccagaccaagatctaaatcctggactcaaacctgaaccaggacctgacctggacccacgaatcngaagttggacccagacccagacccgaaaccggcccccgacccaaactaggacaagaacctggacatgaacccatatcaggacaaaacccaaactaggaaccgaacccaaaattgatcccgaacctgggacccagacccaaaatcagacccaaacctagacctacacccggacccgaattcgaacccagactgggatcggatcccaggacgtagacccagaactaaacccaaactcagatcgagatcgaaacttgggactcagactcgaacctagaactagacccaggtccctaaccataacttgcagcccgattccgacctagaccaagatttagaccagaacccaaactcagactaggactcgaaccctgacccaaactcaaaccctgacccaaactcgaactcggaatcgcaactagaactaaccgaactaggactagga

SEQ ID NO: 171385 - DNA, 1098 bp, Cannabis sativa
aaacatgattgtgcagcttcttaaatgctagcttaactcctttcgcttattgcttgatggttttggcatgccttgtaaggaggctttgtcctgtttttgacaagattatatttcacgtgtccttagacttggattatgctgacatgtcatgttaggtggaaaaaaattgggataacaacaataattcctaaagctattgggactaaggaaaaattagagaaattaatgaaagaaatacaaattataagcaaaaggccaaaagtcttttctcttcttcctttctctctctaatttcaaatggcatctcaaaaaaggatgaggattctaatccaattaatccaaatgtcataactaaaaaataagaaaatttcaaatttttaaagaaagatataaaagataagtgaaaaaaaaaaagataagatttttcctctttttctttgttaatgaatttttaaaatttcgaaggactaatcaaaagtgttcaaagtcctaattcagttggaaaaccttaaagaatagataaagtgcctaagaatgtcaaaattgatgcccatctggtagtttcaagcaaaacgggcttgattcacgtcattaagtcaactccacataagtgcaaagttgacttaggggcaaatgttaacccgtaaactttaactagtgatgtggacatcaattttatttttgacgacacgtgggcatgaaggatgacatcacgaagttgaacaaacttgagtcatagcagtcaacctaggaggggaccctagccttgtgcccaggttgactttaggatctccaaatggaagtttggactttaataacttgaattcaacccaatatccttcagtattttgtaccatgaacacatggatcaacctaattcaagccctcaaagatgaaattacacgaacttggaacccaaaagccaacctgggcacctagggtttcacccgttgcccaggttgacatccttgactagggtttcagtatccgagaccgtcttagtgaaaaatggtcaaaacatgcattaggacatcaactagacataccacagacatatttgaggcattagaatttgaatcgaagcaagttgatttttga

SEQ ID NO: 171386 - DNA, 606 bp, Cannabis sativa
agagagagagagagagaatgtgaaatgcggagttttgaagcaaaatgaagaatgaaacttatatatgttctgaaatattccctctcccaagaaacttaatgggtgcttatgtttccataaaaatagctatgcatgggaaagaagactaagagcttaaatatgggaaagtgtgatgccattacagaaatcctcataatgattggcaataaagttattttttgtcataaaggcaaatcatttgaagagtcttatacctggcttgacaaagttacccggtaaaggcttttacagtcaagactagagttgaaaagtctttataattcgtacaaacgtctaaacatggacttgggagcaaatgttatcccaaattttatccaccttacgtggcatgtccacatggtcaaaactaaaatcacatggaatacaacgtgtcaataaccaaacatggttaccttgcacgattcatcaattgtcaagattttgaaattgttaagctcgttcaaacaataattaaatgaaaagccagagaacattggtcggaccatacttggctggccaatgaagccccacatgccggccaggccctaaaattaaggctggccgacc

SEQ ID NO: 171387 - DNA, 578 bp, Cannabis sativa
tgcattgggcccaaaatacaatttacttcttttaaatttgaaaaaattacacttactataaaattttaaatttttttatgataaatatagcatatttaagtttaactaatttatatggtatttttatttttatttttaagtatttttgtagtatttgatatattatatatatgtaaattagattttcaaatcctatatttaatatttttatttgtttaggtagttttatttgtcactgatgccagaaaaatcactggagtttgctatcggtgccagaaaaatcatcggagtagtggtcagtgctggaaaattcgtcggagttactgtcgacgccgaaaaattcatcagaattggtattgtcggcgaaaaaaattactgaaaaaatcaccaagaaacatgtttcctttcttgaagaagaaatcagtttcttgatgaaagaaccagtttcttgatgaaaaaaaccactttcttagtattttttcggtgataatgccaattctgacgacttttctaacactggcagctactccggcgacttttccagcaccgacaacaaactttagaaaagtcatcataat

SEQ ID NO: 171388 - DNA, 730 bp, Cannabis sativa
agtaatttctctatatataaaatcgatatatagtgaggatatgcacataataaatatgaatattttcattcttaacatatacctctgacatacatatttatttcatatatattccctaggtggtcattaattttgcaaattccaacactaagtagtttaagtatctatatattatgtacttcaacacttcatgatttcaattatctttacaaaaaaaaaaaagaaaaagaaaagaccttcatttcaattataagtttagtatgtgtaatttaaaaaattgtatcttattaggaaaccagattttaccaaattatgttcccatttcttattcactttccaaatctatgatatatattattagacagtaattattaaaataatcaggaagaaattgtatttaaattattatatatgtttgtttcacttaattttgttgtaaaagactcgtcgtaaggtattagtcacaagtttgttgtgattaaaatatgtttttagtcacaatatttgttatgatttaaactaaactagtgataatttatatctaagtactatgttttaacaagtaattttttgttttgactaaaatcacatttacacaaaagttttatgttatgactaataaaaagttatcattaaaagtaattgtactttgttgtaagtgttaaattaataaataaaaaatgatttttccaaaaaaaaaattcaaaaaataaaaaatgatacctcaatc

SEQ ID NO: 171389 - DNA, 595 bp, Cannabis sativa
acaaactcaaaagaaatcctctattaatataaaccacgggtgtgagggcaagtaagcacccacgttcatatggagcttcgactaggaactgcgacaaggattctaggagctagtaggacatttagatcttggcttccgaatgacagttttgggaaggagatagtcatctcttattaattgtgtttggtattcagtgatggtgctaaatgtaagaagtctcaacttaaaggccaggtctctcgggtcattactctcaatggcaactttgagaagtttagttgccattactttccaaccacgcgccttgtctaggttcttagacttgggcataatcagtttagctctaatgaactgagccacatgaggatcatattcatctgacaatcttctgcttctcttcatcggaggcacagtgacttcaaaattttgttccttgcaactcttggaaagtctttttggctttggaaagacaaactcaaggtgatttcgaaagaaggaattctcaactcacaaggattgtgtcttggaattttgaaggcctcatataaggtatttttggattttagggagttctaaaatccttgatgcaagctca

SEQ ID NO: 171390 - DNA, 1130 bp, Cannabis sativa
  modified_base (472)..(472): a, c, t, g, unknown or other
  modified_base (521)..(531): a, c, t, g, unknown or other
tggtttgttagagcattttttatagtaacactatttaaagatactatatatcacacggaacacttctcaatgggtattacccataaatgtttactaaacaaatttaaactataaatattaatttcaaaaatattaaaccatcaaattttgatttaatgacaaataatgaaaaagaaatttaaacttctatgcttaatttaactacttaattaaaaaaatataaaaaaatatttctttttacactatatcaaatatgggtgcacttttaatgggtataacccatgaatgagtaatattagaaaattttgagtttttatgattaatttttctatttaattagaaaaatttcccatttttacattatatgaactgtgattggtttatcagttgaaaaaaaaatatttttttggcaaaaaaagtgataaaaaagttgaatttgacttaaatattttttcatataaatatatttttnatatagtgtaaaaagaggtatttttttatattttttttaattaagtagnnnnnnnnnnnatagaaattcaaatttctcttttaatattcgctatcgttccaaaatttaatggtttaatatttttcaaattaatatttatagttaaatttgtttattacccattaatggtattacccattaagaagtatttctatcaaatatatgttcatataaacatatttaagtcaaactcatttttttcttttctttttttttttgttaaaaaactttttttaatttttttttaccgatggaacaatctcagcctatatgatgtaaaaacgagagagttttttaattagataaaaaaaattgagcataaaaacttaaaattttttaattttatccattcattggtaatacccattaagagtgtacccatatctacacatcatctaaatatataatattttattttatttttagcacatttacttctaaaacactccaatagtttaataccttataaaatattataattatgatctcaaacattattatatatatgtataatttttttattaaacaattatatgggtgcactcttaatgggtattacctatgaatgggtaatattagaaaattttgagtttttatgattaatttttctatttaatta

SEQ ID NO: 171391 - DNA, 515 bp, Cannabis sativa
atatatctgagagatgtagtaatcctgaaattttgaattaaagtaggataatataatatattggtaattaattaaatcgggtgtagctactatataatattgcgcactaataaaaattaaataatctaattttttttttttttttggttaagatgaatacattaatatacaaatgatgagatatttacgattgtaaattatatataaataatattattatatattatttatacaaacaataaaacttaataacacataactaattttaatttcaattttttttgtaagtaacacataattaattttaattaagtatacaatgcatgcaaaaatgcacctcataataacttgactatatatattaattttgggcatacaagattgcatgtataacatattttatagctatatgtataaatatctaattagtgttaaattatttagggaaatttacatggtatattaacttttgtcatttttttacaaaaatactgccaggcggtattttttacttt

SEQ ID NO: 171392 - DNA, 512 bp, Cannabis sativa
  modified_base (430)..(435): a, c, t, g, unknown or other
agttagataagcggatttacaagtaaatccaccattagactccagtgtccatccccatttatcctcttcctgccccgaaggatttcctcctttcaaaatagcagagacagtttctttgtcaaacagattatttagtttagaaatgtcccaagatccatgatttgtgagaagataagccacacaattcaatccagacggaatttctctcattggtttcagaatgaaaccttttaagtgaggaatccaaggatccctcaaaatgcaagtgtttctaccatgacccactaatttacaagcccttttttccaggattgccttggctttgatcacgttcttctagaaccacgagtcagaatctttataatttcagtttagaaaatatttacctcataggtatttggccttcaggtgttatagtgagatttctctnnnnnngaaactcgagaccagactcctattcaaaggacacgtgtattcagatttctaatgaaagctgaaatgtccgtgagaga

SEQ ID NO: 171393 - DNA, 879 bp, Cannabis sativa
ttacagaaaaaggctaagtatttacgctctagtttttagagagagaaataagagagagatgctctgaccttgtggatagttgttttaatgtgaaaaatgagtcgaaggagctctccttttataggtgaagggggcccacaataataaggaaaaataaaaattagatatttttgaacgtagatgatgatctaacattaaatattagctctaggtcatgatggctattttttggagcttggcaggacccactgcaggttacacacaacttatttttgtaacactcttggggtgaaatttgatgttgatagcttcagaattacgatttacgtgtgagacattacttgataaagcattgaattagctttgaaattcaagttgaattgcatcaatcaaatcaatattgggtgagttatgattgttttactgaaggtagttcatgacccaacgcccatgttgacatccaacgcctaggatgacatcccaccacccaggttgacatatgacgtcaatctagacgttgggtaggtgaaaaaacatccaagggatgtactttaatatgcctaagtgatattttgatattacttagtttgtttctctgttttggcgaagctagtcaccagttctcgaacatgttacagttctatagaaatgagagacttgaaactcttcatttttgagtgagtttcctatgatggaaatgagaaatacaaagttgtgaatttgacttctccaactttatggatctttgttattgtgaaaaactagacgaatggtcgaaagggaataagaatcgaataagcagaacccaacgcactacgccgtttgtcaacttgggcactgggtaccccattcacaagctcctaggatctcgttttgata

SEQ ID NO: 171394 - DNA, 595 bp, Cannabis sativa
ataatgaaaaagatacaatttgaagtctagcgtttatctccttcctgtcccactcttgtccgtactctaccccactcattgaaaaaaataaataaataaacatttttatgagtttcattttattaaaaaaatgtattatatttggtcagttgagtagttgagaaatgatgggaatgcattttttcttttaaatttgttcaattattattttatttaaaaaaaaggaaatttgttcaattattgaaattaaaaaaaatgtttgagaagaaaaaaaaataataacttgataattatttggggtaaaatagacaggtagttagaggaagaaggacccatgtttagctcctgcccacaaaagaggaagtgtcccccaagcttcttcaatggctggtgtggcgttgtcgtttgttacattgcacacattttttattacttcaagcacagcgaaataacaatcttaatctttatctcaatctcaatctctctaccaaaatcccaatatacattttgcttcttcctcactctcaccacataacaaaactcacacacttctcttttcacaactcattatttttttccacacacatacctctct

SEQ ID NO: 171395 - DNA, 512 bp, Cannabis sativa
gattcattttttcacggccaataaaagagggcaagcccaattatgtctcatggcaaggttgaacaagcatggcaaaagtgtgttgaaagaattgttgttctgtggcattagtattagttgagaaaggtaagacacacttctctcgattgatttcttgactcgaggcacggttgtataactcaagtgcacgttgaatacatcgagtagattcacgggaggcacgacaaaatagcacactatcatttgcaaaaaatagatgagagatagatggagccgttttggcaaccttcaaaccatggagggaatcatttgattcttcttgccgcagtaaacgagatagcccctcaacacaaataagaaatatgtatggagataatgttcggttttataccttaaatgaaacccatttcaataaatatttggcaagcccgcaatgaccaagtttggaaaggtaattctaggacttctcgttatattttggcattagctagaggtaatcttaatcaatggag

SEQ ID NO: 171396 - DNA, 1094 bp, Cannabis sativa
aaaatcctcatgtctcattgtatggtggaaccaccgatatgatctcgcatttgaatagctttaatacaataatgcgagctagtaatgttacaaacaatttacgttgtattttgtttcatgggaacagctgtcaaaggacttcaaaaaatagttccaggccacaagggataggcgacccgaggcgtccttgctaaccaacatcaaggagcaaccaggcaaaacacttaaggcgtacttaagtcgttttggcacggctactgcaagggttagatatttggatgatagtacgcaacttactgcccttcaggcgggaatcactactgatctatcaaccattgggggcaaactgtgggacgacttacagggtcgtccagtgaagaacatcactgagttcaacgaaagggctcatttgttcgtctgaaaagaggaagctcgaaaagagataaacttattgaaaacatgctcgggaggcaaacctagtaatgtttcaacaagtactgtctcaactagagttgataactcaggggcctctggctaaaagagaaagtacgattctaaggagttgtcaaaagacaaaaagaaacaaaaagcacgataagtacgtgccagtttatactatttataccgagcttaatgaaactcaggaaaatatttacctcgcacatgagcacaaggttgccttcagcaaacccgagcccatgaggcatgcgaggcacaaaattgatccaactaggtattgcaaataccataaggacattgggcacacaacagacaagtgccatcagttgaaagatgagatcaaaagtctcatcgctcggggccacctcaagcagtatgtgaaaagaaagggcaatggacataaccagcccagtctgcccaacaactcaaacaaccagggattagaacctcttcctgttgaaggagaggacatccttgttatctcgagagggccgcatattgctgtagagagtaataactcccaaaagagatatgtgaaagaaataaaaaatgagcagtcaatatttgctcctaaaccttccaagaaggtaaaaactgaagaacctccaatcatatttttggaggaagatgagaag

SEQ ID NO: 171397 - DNA, 965 bp, Cannabis sativa
catgctgtgagtgccgtgctgatccaagaggaaaagaacatacaacacccggtctattacattagtaaaagactcgttgaggccgaaagtcggtacccattgatagagaaactcacttattgcctgattctagcaacaagaaagttaaggccctattttcaagctcatcctgttcgagagtacactgacaaaccattacgccaaatattgcaaaagccagatgcttctagacggttgctcaagtgagcagtggagctgggtcagtatgaaattactttccaaccccgaacaacgatcaaaggccaggccttagcagactttgtagtagaatgcacaggcaaagaagaaagcatatcaaaagcaaccccgagccagtacaaataccttagccaagtaacagtgaagacaagtcgacctggaaactacatgtagacgggtcggctacagatcaattattcggtgcaggaatcgctcttgtcacacctgggggcaacacctgcacgctgcagtcaagtttggatttaaagcatccaataacgaagacgaatatgaagctttgatcgttgacctaaaactagcccaagagatgaaagccaaacatatcaaaatatgcagtgattcacagctggtggtaaatcacgtatctggagaatacgaggctcagggagaaaaagatgatagcatatctgagcaaaatacatgacctgctcgcacaatttaaaagctacagtatcagacaaattccaagggaagaaaacacgattgtagacgcgttagctcggttggcgagtagtaatgtaagtgataaagcgaacttggttcctatcgagttcctcgaagagcctagcatcaattacatggaagagatcgaaatgattaatacttccccaaactggatgacgccaatagcagcctacctcaacactggggaactcccagataatcgaaatgaagctcgaaagatg

SEQ ID NO: 171398 - DNA, 698 bp, Cannabis sativa
tttttttatcaatgagcaaaaattgaaagatttgaaaataataatgttgtctaataggagtgttactgtaccgtcaacattttattacaatcttttagtcaatttttgtatttttttttaagggaaataccatgttattataaatcaaaagatagttcgtttacaataacagagtatatcggcggtggaatattatccaactaaaagcaagcttcttctaaccctaaagcatatctaactaactcatgggcagccatgttagcattacgcttaacatgagaaatagatacattagggagagaggaaagaagacaagatatgtctacaattaagtcttgaaaagaggaaattgcagaacaagtgtcagtcaaggcgttaaaaacgatgagcgcatctgtttcaatatgagtaattggtacttccatttgtaatatccagttgatggtgtgaaacaaagctttagcttccatttcatgggatgcgaagttgccaacaataggctttgacatagcagcaagaatacgactagtagagccacgaaccactgctcccactccgattacgttgtgctgactgtccacggcaacatcaacatttacaatatgtttggtaggaaggagaagtggagggatggagaggagaggagggagagaggtgggaggagataacaaatccctttgtttggcaagagggattga

SEQ ID NO: 171399 - DNA, 2248 bp, Cannabis sativa
  modified_base (1054)..(1054): a, c, t, g, unknown or other
ggagcggtggccaactccaaagaaactaaggagccacaagaaaggcaagcatattgagaggaagtaccatttactaaggaatatagtagagagaggtgatgtgacggtcttgaagattacttcagaacataacctggcagatccattcataaagacactactagtgaaatcttttatgggtcatattgttaatatgggattaagggagattcccaattcgcttttgggacaagtgtgagattgttagggtttatgtcctaaaaagcttataaagacatttctgactattaaataaagagttaaacatttgatatatgtgtgaatattaaattgttaatatttattattgaataattgatattaaatatcgaaaaatttcttattcatatatgaggctgtggcttgtagctgtacaataaactaagaccacatagatatgaataaaacaattagcaatatattaaagttataaaatctttaattaatggttgctagttcggctcattgatgtccattcttcagtgtaagtaatctcaattcggattactgatgtagtgagacatcaaagtgaaggtgctgtatataatagagattatatatgacaaggactgatatgaataaagttatctttattaacatatcatttatcataaagactaatttatatcataacaatgatcaatagtagatcagcctaaatcctgagttatcatgaacgcatgttcatgttattagtttctttgattcacttgttaaagtttctcagagaagatgattcttacaatttctattttgagaatctaataatatgaatgaccgggaacatgatgtacaatcatagaatcctgactttcctaacagatcaaatgttggttcattttatgtgttaattcttgaactggaatgttgtgcaaaaattcggatgggatcttgaattatacctctactagtgtattaatggaactaaaggatgaagaaataattagatggtaaaatagtattttaactaaaactaattacgaaccagcacatagagggctaatcactggaattnattatatcaatggacactgcagttaaactcagtaaatataattctataattactaagagtgtaattccatatctatagtggagtaatcatgaaattaatgagcaatgtattatttggttgataagactcaataaataatctagtttattggagcttagaattataggtctatagttcccgaattaccaccttgaaacactgtcaaagataaggataaagagttgtataaagatgttcaaaaaaaatctattttgaattggaaaaatagtaattatttatttttgtaataaataagtaattttttctaattaaataaggaaaaagaaaaaatttgttcagacaagattcactactacaatttagtcttttagtgatactatttagtgacacgcacaaatttatgtgcgggtcactaaaaagttagaagtgatttttagtgacacacaaaattagactctaaacttttagtgttagacacttgtaatgtgggtcactaaaaatattaagtgtcactatagggtaaaatctaaaattttctaatttttattaatttaaaaaatattgtcatatagtgacacaccaagtgtgactgggttaatgtatccctacacacgtggcgcgtcactatatcataaacttattttttttttttaaaaaaaaaatacagctatgattatactattaataataaaaaataaaaaaatattaaaagaaataaaataaagctgacaactaattttacatttattgaacaatattggaaaaagtaaaataataaacaataaaggaaaaaaaattaattattatataaaaacattagctgtccccatttaattaaaaaccctatttcttttatctctcttcaagttttcattaaccggccttttcttattcttctccctcacttagccaaaaaaatccagccaaacccatgccttttcttattcttctccctcactttgtttctaaattctgatgaccacctgcgtgcgaaccacctccaagacgatgaaataacgaccatccatggcctcccagtgcccgtcgacggcggacgacaaacggagtaaaactctaatcgatcttctgcctcaccaaactttgtaacctcttccgaagatattgacccatgaaccttccattccagcgtcctaatcgttagtttaagaggtattttccttattttgctatctt

SEQ ID NO: 171400 - DNA, 663 bp, Cannabis sativa
tacatctctaagaacaatatatttttgatacaatcaaaaaaattcttaatacatcaaaataaaacaacaaatacatatatataaaaaatacttctgcccaatacataacaaaataaaattcaaatataaccacatatacacaaatattaataaaatatttgtatatatataaccacatatacacaaatatatataaaataaaaatatattatttatattaatagaataaaaatttatattaaatatatatacagaataaaaatatgtataatatattatatataacatattatgtatacataaaaaaatttatatataataaaatataataacatatatataaacataaaaatatatattatatataaaaattaaaaatatatataatataatatattataatataaaaacagaaaaatatattatatatataaaaataaaaaaaatatatattatatatataaaaataaaaacataaataacttacacttaagtgtataaaaaaattctgaaaataatatatattttatatttatacatgtatgtccaaattagtggaagtgatcaaatcacaattaagaagcatgtgttgccttgaattgagtcatctacctcaatgtagaaaaatcctgacaaataatcacaagaattattatatacttt

SEQ ID NO: 171401 - DNA, 1053 bp, Cannabis sativa
tcttatttggaaagtgggtgatggttcaactattcgcactattgaagatcattggcttcctcactgtcggattaagtcatattcatctccccctccctctgattctactctttcttttttcctctccccatctggggcttgggaccctattaagcttcaccagttttttgatgagcagcttgttgatcatatccttaatgttcccatacctggtaatggttgtagtgatgatctaatttggagtaggaattcttctggtatattcacggttaaatctgcatatcacttagcagttacctctagagatattccttcttcttcatcttttgatcagtataaacgtttctggtctaaaattttgtcttcctcggttctttcaaaagttaaacatctggtgtggcgtgtgttgtctaagtccgtcccagttgcctccctcttatttctcagacacattataccttctcctatttgtcccctttgtcatttggaatgggaaactgtggagcatgcgttcctggggtgtgtgaatgtcaagaaatcttggaaacattctccactttttgacttttatagtaataataaaggattaagtatttatgactttattgctctagctatcgatcttttggataaatatgattgtgctatatttttttgttttatctggttactttggaatcatagaaataatctctttcataataagaagttgctgccaccttggcatctttatgatcaggctgtgatttatttattggagtatgagcatgctaatctgcctggttttaagccagacaatgtcaattttagatgtaatgggcaggttcaattatcacagcatgaaggatggaaagttagtacagatgcgggtgttagtaattctgttaggaagcatagtttgggcgtggtggttacagatgaaaatgatgacattaaggctggcttcattatacctattgtcggctcagttccaccggaggttgcggaagccaaagctgtcttggctgctatttcttgggtgcaagccaccaagtgtaacaccctaactacctt

SEQ ID NO: 171402 - DNA, 716 bp, Cannabis sativa
cagacgtctaccaagaagtgagacccagatcgctctagtgatagttatacttttttgacacaggatcagatcttgtcccatgtgtcaatccatgggaatgtgtatgccccacccgtaaacacgcctttttgcctgagggtttgtttaggcatcttttttttaaggtgaacccttttggcgacatgtgtcttgtaccattagtggtcccctattgtccagctgcttctacacacaagcacaaaaccttcttaagggctcaacagttagatattgcatatattttaccctaatagtgggcttattttgtaaaaaccctaggcgggtcatgggcatgtccatacccgccctttagcctataaatacctgttatctcaaattttgtccacctgacgtggcatgtcaacgtaaaccaagacacagtacatttggaatacaacctttccaatagcaagacagtctcctcacaaggtatggaaaaactgccaactagcaagcgaaaggagttaagcaagccatcaaggagttgtaccaccatgtctggctagctacgaggagtctataggccagccatgatgatcttgtatggctggccaaggtttgagcacaagatggtttgccaaaaggtgactttcagactaagggagggtccgttcgaccaaggaagcccgacctctacaaggaaaagttgtataaaggttggcctccacctacaaagg

SEQ ID NO: 171403 - DNA, 684 bp, Cannabis sativa
  modified_base (552)..(555): a, c, t, g, unknown or other
ctgaagaaccatgcattgctaattatagagacgcaaatttctgagatggatggatgaccaagagtacatccttcgatctcaccaagcagaattagatcgccgtaaccgggaggccagcgatctaataagacggttcaatcagaaaactgacagaagaggctaggatctccttaggtatccaattcaaggaagactaccgtcgggttccttaggaactagggcagatctttccctacaatagggaagacagacctttcctcaaaggtcaaatgacgtgaacaaccagatctcggtaatcagcggctttggggggctggccaaggatctctggctcaacagcaacccccattctacagccactggccgaccagggtacatcatcacttcacttcctcctccccaagggaaggggagcgaggtgcacagagattgatcttggatcgaagaggaccgagagtaggtggaaacacccaaaatggtgattcgagaagtgagatcgatcactttagacatctagatataccaaactccaacaattggtgtgatctatcnnnnatcaacacacaaccaacaccagtcgaccgtggagtcacaaatggccagaccctacccaacgcaagtttggtcagctaaagaagcatcttgggcggccataccctaccctttgcaggtctggctagccat

SEQ ID NO: 171404 - DNA, 1272 bp, Cannabis sativa
gtgaggctcgccaattgctagctcacccactcccgggcctgtctctctatcgtagaactggagttgaggtccagttgttgttccagggggttgtttcccctgggcccttcctttagtgggaggcgcaaacggtgggtctactcttggaggtgtgggtctgccacttggatccatcggggtgctcgtgtcaggttggccaggtatggtggccagacttattgcgcctgttgtggtgacaagatttaccacatctgtagtattcatggggattctagttctgactagaacctgagtgcctagatctgcgatttgtgggtcttaagagagacccgaagatgcagaggtgtgacaggagttcttcttgtgtttactatggcgtttgatcagatcatgatatccactctctcaatgaaagcaccaaactgttggcctcaaaaagtgatcaaccgacagcaaggtcgtgcaaatctgatgcttgccacgtgtgtgcataaataagaatgaaaagcaatagacaataggatttgtgttatagaggttcgaccccatcattatgataacgagtaatgacctactccccttttagttatattatactaagggaattactatccagatcgctataggtggaatctgctaaagtacccttaggattacaatgtatgaatcaatgcttggcaaaactcaagtgttagacaggctagggtaggcgtgtgagagagaatgaggaagagagagagtttgtcagacacttagagtttgagatcaggtttctagcttagaggcaacttaagttttcagtcagaggttaaggcctttatatatgaagccttaaaccctaggtttaaattcaaatcccttagcaatcatatagttagttagatatttacaaaataccaaagggcccttgattttagatattatataaccattatgttgggcttttggagcccgattcgtagcccatcaatgttgtccacgtataaatctgtccatctaggcatgtagagcctccttggctgaccaggtccttgtggtggccaggctggccggccatggtgttgtctttgggttggtcggtcagagggccagccaggggtggttggctagctcctcagagggagctggtctgtcacttgatccacgtttgagtgttggggtcttcgtttgctcatgtgctgacttggcttgttgggttttatgccctaaataaaactctttacaatctggttagttatcaacacaagaaatttgaagtgattgatgtttcca

SEQ ID NO: 171405 - DNA, 796 bp, Cannabis sativa
tttatcctattatgggtacttgtccgggttctaatcttggtttgggtctagggtcgtgttcgggtcccgagtattgattttggtccagttcctagtctgagttcgggtccaggtctcggtcccagtctttatctgggttcaaggttgggtccttatcagggtttggatcctggtctcggtcgctggtctcaagtctgggcgagggtttaggattaggtcgggtctaggtccctgtctaggttcgggtcccaagtctcatgtcccaatcctagtcaagatctcagtccaggtcctggacttagtgggttatggtttgggttcggttctcgtctcaagtctggctcctagtcacagttctaattccaattcggggtccgggttttgttctcggtccaggttggggacggggtccaagtcttagtccgagtcttggtacgggtgttttggaacctggtctgggtccaggtctgagtttgggtccaggtcccatgtttcgattccggtttgggtttgggtcggtattcgggtatgggtctgggttcgtgtccatgtccagtttttctcaaaatatcaaaaaatgtcgaaaaaaaacatcgccggtaggtctgaatcctagtttaggttaggggcttggtctgagtttaggatcgagttccgagttcgagttggggttcaacttcgagtctcagtcctagtctgggtttaggaccgggttcaggactgggttcgagcccgagttttggggctgggttttggtcgagttccgggtcccggtccaggtccaggtccttgtcac

SEQ ID NO: 171406 - DNA, 558 bp, Cannabis sativa
agaaaaataagaccaataatattgacgttaaaagaactcatgggcaaacaattaatatacaaaaaaaaaaaaaaaaactttttcattaattatttaatttaatttaaataattaatttggtccaaactctatctatacataagttaaaccctagctacctagtttatgtaatggtccaaactctattattattaagataaatttataaaaaaacatctgtaacaatttttttctttttcttcccaaattgggtgccacatgtaagataattgggtgattaggatcaaccacacatcaacatttaactggataaaatggacaaaacatgacggaactgcacttaaggtgattttgccacaaaaaaaaaagtaaagtgtacaaaaaatcaaacatataggagtttgactacaaaatttgctactattaattattaatggggaattgccatgtatactgtttttcttttttgttttttttacttaactttacattttttttttttttaataaaagttgtttccattttgaggttatattgttttcatttcgagattatact

SEQ ID NO: 171407 - DNA, 567 bp, Cannabis sativa
aagaacaatgcagaggaagaagaatagcaacagacaactcaaacttttgtaaaaaaaattctctttttttctttatttattttttctagaacgacataaactttattgggtttttgttgtttttactaattctgttttttttttcttttttggggttgtagtttaactcttgttttgtgagtggtggtcctgtatcgtttgatggctcttatagcttattttgttattgttttaatgttgttttactgttgttttctttcattttttaatcacatttttctaaatattattgtactgttttatttttaatagtaatagggaaataacaaaatttgtatgcaagttattttcttcagtattatatactccaatatatgttcagttttctttcgttgttctactgttattttttaattgttctcatcccttttatttttgatatcttctcttgtatgttctcttgttgtgtcccagccctccacatttactgtatttgttaagttgtttctttttctagccagctttcatccgtttatttatttattttttttttgtcttctagatttt

SEQ ID NO: 171408 - DNA, 617 bp, Cannabis sativa
tgggcgtattgtgcttattaactcagtactcatggctatacacttttattggtgccaagtaatgttgctgccaaaaaaattgtaagtaaaatagaaggcatttgtcgtagttttttatggaatggacaatacacattaataggtgttcccgtggttgcttgggctttgatttgacagtcaaaaagctccagtgggctgggatttagatgcatcttggattggaacaaggctgcaatgtttaaatatgtttgggccatggctaagaaggaagataacctatggattaaatgggttcacaatgtatatgtgaaggatgaggattggtggacctataaatctacggctcaagcgagttggtattggaagatgttggtgctagtaaaagaacaaatgaagagtttgggtaacttaaaccagtcacgtggtaactacaaagtggcggttggttgtagtgaattacacaagcagccggctaaggtggattggagtaagtttgtttggactcgttttaatcttcctaagcataatttcatcctatggcttgctatgcttaggaaaataaagacgagagaaagatttaagaagtttggtgtgatcgacaatgataactgcttact

SEQ ID NO: 171409 - DNA, 1954 bp, Cannabis sativa
gtaaaataattcccaacactttgatcgcacattgtctgtttttcaccttgcttattcaaagcttcgtgaaatttaaccctaaacccaaaaatttcaaacttctggcttttgacttatttttttttttttgaatattttcattcttttaatttgttgagtactcctggtcggcatatttgcctgtttattgttcaatatcccaaccaaacactcatcttgtgtgttgtcttttatagatgaaccctggtgagttttggggaagcgaacaccgaattgactaggacttgcttcaacttctgtacgaggatcaccctcgtctttgtgccagtccgttctcttcaagtgacggactttccaattcgagctttgaagactgggaggtgagtagtgaacgctcttctactctagatcccgaagtgcaacaccactattactccgagcagatcgctggagaggggtatgaccgcttcatttgggaattgaagaaaggttggaggcgttatctgtcgtccaactggacatacattgtctggccaggtgttgctgacactcttctgattggccatccaagttcggggaacttcagcattcccatcactgttcctactgttacggttgcccggcattcgcaccaattttcatccagcagtaggatgatggctcgaataaagcaaacgatgcggaaggtcaacacatctgatccccacgtggcccaagtcgccacattaccgagcgctgaacaggatctacccgtccaggaggagggagatcatgagggggacgctgaggtccaagaaattaaggaacaggacgatgtctgtcctggcagcccttcagaggtcgagcaggctgaggaggctgaacctctgaactttggaggatacaatgaggtcggggagccagtgtctgcaaagggcgaagtcttagttgaaggagtagactacgtcaccgaggagcttactgaagtagttcctcacaggaggcaaggtgccttaggtgccagatgggtgagtcctccgttcaagatcagtgaggcatgtatgaaggatttggacaagtctggctatctgggcggacttgaatgttacgtccctgcctcaaatcaccgagccacaaacccgcagaaggggatgtgtgcctggtcgggagcgcacaccaaacaaggggcaatgctgcctttgcacctgtacttaaggaaggtggcagattacttctgcctctgtccgacccagtttactcccaagggcatttaagtatctgtctgccctgttcatcctctacaccacccaaaagtggggtgtgccttctccgcacgaggtcagttggttttttgacctgaagtctacccccaagcaaagtaggtcggggtacttctacttctctcagctagatttctagtggttgacaggcaccgtggacaaagtcgtgagcaaaatcgagaattttgttgacgagtattactttgtggaaggcatgggcaccacttatactcggtttcaacagatccctatatattaccgtccacccctcacactggctcttagggacagagctcaggggattgttcaactgctggatgatgcctgaaatatcaccttgttgatctcagaggccaacgttgtggagtacgggctttatccaacagatttcgtacctcagccttgaacgaaaagaagaggaagtccagtgccggctgggctgagggagctgagcaagagaaggaagtcattcaactcaagcgtgaggttaagttaaagggaggggccagagccaagcagtatgctcaggagcattctaagcaggagaatgagctcattcaacttaagcgtgaggctaagttgaagggaggagccaaggctgaacaacatgctcaagaatattctgagcaggaggatgaggctgaggaagagcaggaaagaccgctcaaaaggaagaagaaactttcggccgggca

SEQ ID NO: 171410 - DNA, 631 bp, Cannabis sativa
ttaattttgccactttattaaatatcatatatttctttcttaaataccatattttaactctaactttataaatatcaattttatctatttaacaattataattaattattaaataaaattatcatttaatttatttattaattagacctatcaaagtctcttaattaataaataatcctaaaatctctctctttctctctttcttttttctctattaagctcttgcttagtgaaaattcacaaataagacatactctaatttagaattctaataattgattaattaaaaataattaactgagtctacaagctcatattatctcaactagtgcgggaaccatgggcttatataatcaagcccccaataagtagttctagaatttaccaagtaaattttctatcttattaattcctcctactccactatagattcgaaattgcactcctaactatatagaacgctctatatattccaaatatagatacactattaattattcattatttctatccaaataataatgatcctctattgatgatttacatcgagtaggaaaatttttatcgtttaactcttcaatgtattttatccttaaaatacttagctccttgtaaataatattttagtaaa

SEQ ID NO: 171411 - DNA, 1133 bp, Cannabis sativa
ctctctctctctctctctagctccatagaatccagctagggttggagtttcttcagcttgattctgaagatcttagctagttcttggtgaatccattgaaggtaagacccttagaacttttccctttggttttcttatgttcataattgagtatattacatgaatttgtgagttagagttgtgtagctttcagtagtatttgtgattgttttctgaagttaaattaaggataattaggttaatttgagataggtttatggattgtggtgttgtttgagcaagctttgagtttagaaactcaagctttgcactttaatggtgtttttgtattctgagtttattgcttgatgttattgcttggattatgtttattatggtgtaaataggtattctggaggttattgtgaagtttggagttgaattgaattgtttgggagatttttggtggtttctgcactgaaccggaattccagttcaaggggacctgtaggaaccaaaattccagttggcccctaggaaaccccatggaaccaaaattctgtttggggaatcgtctaccggtcgggacattttagggaaccctagtgttttccatttttgcaatatttagggtattgccatgttatccatcgatatggaaacttttagtttcaagtttattatgtaagcttgtagattcaatttatgtaagttgcacaataataaagaccaattaatgagtaaaaacaatgtttcaattcaaatatattgtgtctaaaccacttgctaacaaaattaacttcttaattttattctttagttagttccacatgcataaaaaaggtagcaccccaagtaaattcttaggcaaggtctatgaaacttggtgaattgcaagtgaccaagagactgcaagtctgcatgctcacttagggggcacccacaccgtacattgcatcgaactagcacagagaacttatctagagaaattttaacgcttagtatgagctactaaacctgcctctaagtcaagtgcaagcatacttcagcttgggataaagaaaagtaaatctagatacttatatgtcaaggcaataagaagataaccaagattaaagactgcctagtcagtcacatatccatgataaaaagcg

SEQ ID NO: 171412 - DNA, 1386 bp, Cannabis sativa
gctttattttgatgaataaaacttgcctccatgtatttttcaaaaggactaggtgggaaagaaatgatcataaataaataccttaagtaaatattatgttagaatttttttttaccggaaagataatagaatacaagagttatgagttattcttctcattacattttataattctaacatgttatcaaaacaaaaacaaaaataacatcttacgactattcaatctcaaataaaaagaagttgatcaaaacaaaagtagagcctaaaaaaaaaagaaccaccaaatccaataatacaatacattacattatattcaaaaagagccaccaaaaatccgaaaaaaattgttccaaaaagtagagttaaaagaaccacttgtaattcaaggatagtgagccaaaaaaaaaaaaatagaactgtgatcgagttgttcaagatggtaagcaaaaaaaatagcttaccttattgaggggatgttagagagactcacattgctattgtgtggaaagataatagaatatataagatgcataaactatactcctcccgttaccaatattgattttgatatggaatctcatgattcttgacaattagggattgtttggcttcataatttaaaaactgttttaagttttaaaaaacagaaaacagtttttaaaaactaataggagtcatttggcaaaaaaatttaaaaatagtttttttgaaactgaattttaaaaaaattaaaaaacagaaaacatcaaaaaaattatttttaatttttaaaaataattttttttttgtctaacatattatatttttatttatgctcagatcctagacccagaaccaaatccaaacctgaacccagacctggatggattcatgtcatggtatggtgttaaaatattaatttttttagtaaataaaaatctaaaaataattttaaaaaacttgtgccaaatactattaaatattttaaaataacaaaaataagttttttattctcacttttgaaaacacaattctaaaaactaaaaactgaaaacaaagctaaacaggctcttatttttttaaaaaaaattaacaaaatgactaaatataataaagtagataatgaaaattataaaattatctttctcttttcaaaatgatatgaactcaattttgtcaacatagaacataataataacttgatcaggaaatattataactagattaattatatgttttagcatctgttcgtactaaaaactagctttacattagttagattaaaaaaaagaaagaaaatggcgacaaaatctccaaaatttttattttggtttcacttaacccccaaaacctaaatttggacggtaaaacccccaatactcgtattctgttagcaatttatccttt

SEQ ID NO: 171413 - DNA, 507 bp, Cannabis sativa
ttgtcgctatgtataatgtgaggcgattgtgtgttgctacatttgatctgctcgtgcaggagagtatcctcttcttgtgtatgtaaatgattttatcctgaggcaaatatatgtctcatcaataccagtttgatagttattatcttgtctcgcataagactgagcagcccacgagttagaacattatctatcaaacttatatttaatagggacgagttattttaaaatatatttaatgatacaacattattatattatcagagttgattaatattccttctgtaggacacgtgtcagcttctggtatatagtcaaattttgggtataacaattaccgcttaaatagtaattttaaataaaaagaattttttaaatgattacagaattacaatcgtattaactcgtttttgaaaaattttatgccttgagtttttggcggttcataacttggaggcacatccttagcatttaatgctctaaaagttcccatttgcaatgttcccatcc

SEQ ID NO: 171414 - DNA, 509 bp, Cannabis sativa
gagtgtgtgattcgatttaattcaaattggattacttctttatatagaaagcaagtgatcctttagattacataataggttagacatgaccgttacattattaattacattcaattatgataaaaaatatttatagaataaatgaaagaacagtttcaccgtttttaattaatactcgaacgtatgcgactttagaccacgcacattgatcgtttatttttcttgaataccatatgaacttgcgagttctctagtgttacttgcatataaggtctttggaccacttaaaatctcttagggtaatttatatggtaaaacacctgcgaccatacaggtcgcatatggagcattgacatacttacaacatagaactcttgggttcaagacgagttgtcacatacattagtcattcgaaccagacatagatgtggtctttatatgggtacgtacaggagggacacttggtcatcacataaaatccttatacacacgacttgtgctaactcttg

SEQ ID NO: 171415 - DNA, 528 bp, Cannabis sativa
tgggcattaaacaaattttggcgctgttgtcgggaaggtaatttttgaaagcttagtgaaatctacaaaagaggttagttatttatttttttttttgtgaatgttgtcttatgttgtgtaaatatttgtgaaaaaaaaatatcaagaattcaaagtatgctctaaggttgcggttttatccgatcttccttattagaaatgatttcttgaaaaaaaaatatatatacaaaaaatatatatataataattgatatcttcttgtatttagttgcacaagtataatttttttttttttgaaaataatgtctattccctttaatttttgtttagtgtgattgtttatattattttttagttattgtcttctttcttcattagagttttatttgtctttttcttagtactcttagaatttaagtcctctaaaaaaatcataaaataccataagaaaaaaagaaagttctattttttttttttcaataaacgcttagtatttggtacaacagtgtaatattgtatatgacacaa

SEQ ID NO: 171416 - DNA, 659 bp, Cannabis sativa
gagaaagaggaaattaaaaggaaaaataccaaatttgagagaagctttctttcttctctctctctctctcttcgaaaccagcaagaacaaggggaagggctgctaatttgtggtgatttcagcaaagaaatcttggaaggatcaagctaaggtaagccctagtggaacccttctctagtttttaagctttttagttagtttgaaatagtgaatttgtgatatagtggccgttaggtttaggtaggtttaggtaggtttagggttcttttgagttgattttaactcctagcagcttgttttagtgtgtgttgttggttttatgcaagtttaagctttaagttcaaagctttcatcattaatgccaagttgagtttcaatggtttgttctatgattttctggctgaaatatattgtgtatacccttattaggtactctagaaggtttcattgcaattggtggagaattgagcaaagaatgaaaggttttgggaactctggtgcaaaccgtctagctggtttgcagagactcaaaaaccagctagcctgttttggtagggttcctcgggcatttcattttctcaattttcgtcattacggtgccttggttgggtgtttccccatttccagagttagaataacctatagaaagcataacagaa

SEQ ID NO: 171417 - DNA, 1357 bp, Cannabis sativa
tacaacttccaagtatccgggtctcgctgaataagcaaattttcttgtgaagttattccttctatcaagaaatctaccaaggcttggcacttgaatgatgttcgggggtgataagttatgacaaactgcccctgttaaattgaccattttatcaatcttccagaagcatccgattttgataaaacttgtgttaggggtttatcagttaacaccttaattgtatgtgctgggaagtaacatcgtaacttgtgagatgcgtggattaggcataaggcaagttttttaagagggggatacctcgattctgcccccagtaaccttttactaatatagtaaataggttgttggtgcattccctcttctcgcactattgctacactaaccacatattccgagacagccaagtagaagagtaatgtctctccatttattggtgttgaaaaatgcctctttatgttcttaaaggcatccttgcattcctttgtccattctaactttttgttgcctcacaatacattgaaaaatggtagacacttatcagttgactttgaaataaatctgttaagagcaaccattcttcttgtcaaggcctgtacttccttcaatttagttagtgatggcatatctatcaaagctttgatcttctcaggatttgcttcaatgcccctcgccttgattatgaatcccagaaatttacctgagaaaactctaaaggaacactttttcgggttaagcttcatattgtactttttcagtatttcaaagcactctgcgaggtctgttgtgtggtctcaactttttatcgattttaccaacatttcatagacagacttccatgtttcttcctatctatctcgtaaacatttcattcactagtcactgatatgttgccccagcattcttcaaaccaaaaggcttgactttataacaataaagtcccatgtttgctacaaagcttgtatgcttttggtcaaggacatgcatttttatctggttatatcaaaaatacgcatccatgaatgacataagctcgtgtccagcagttgcatccactaacttgtcgatccttggtaatggaaagcaatccttttgacacgccttatctaagtctgaaaagtcgacataagttatccaagttccatttggttttgggatcagaatagggttggatatccatgagggataaaatacctcgcgtacaaagtcattgactaacaccttatccccttcctgctttagtgccccttgtctctccgaatccaagggtctcctcttctgtctctttgctaggtagtttggatcgacatttaaatgatggtagataatattaggctcaatcccttaataaacttattag

SEQ ID NO: 171418 - DNA, 889 bp, Cannabis sativa
gagagagagagagagagaaccacaatagaatctaagaaagattttattgatatgaaatttgttacattgcatagaatgaatgagaagcttttatatacaaagcttggagaaagaaaagttaattacaaataaagttagttacactgaaaataacaaaatataactaactgacaaagactaactaactctctcatctaacagttgtattatagctatcatgagattattcttgtggttgtttttggttgttttatagttgcattatagtttttgtgaggttaatttctcgtcgttttttagttgctttcttactttttgttgagcaaagtgtatttttataattttaaaatttttcaagcgttttcaagcgtttttttgttaattaaaatttgtaggcgaaacaaagtttgtggacctattcaatatgatgggaacaagcttgaatctgttttttgattttttttttttttgtgtcttaaaaaatttaaaaatttacataaataaccaaaaattacaaaaatacatcaacacagaaattttttaatttttacgctttgagcttttttatttacaaatatacctatccagtaaaaataataacttgttctttttatagttgtattacatttgtcatgagattattcttgtagttattttatagtttatttatagttgtattataattttcgtgaggttgatttctcgttatttttttagttgttttcgtactttttgttgagcaaagtgtatatttataagattaattaacaatttcgtcccttgaacttttgagaatattgattttggcctctaaaatatacggcttgttaagaatttctcctgaacttttacatttacaaaaatttagaccttctgttaggttttgtcc

SEQ ID NO: 171419 - DNA, 828 bp, Cannabis sativa
tcgttttcgtgagccaaatttttttagggggcttttgtaattttggctacatttgaaaaacatttttaattaattttttttttgtttttttaattaaagaagtgaaaattaaaattttgaaaaaaaaaaaattacttttaaacattttttttaattaatattttaaactccgacccaacctgaatcatggaatcgagacttcgagctcagcctcagtcccgaacatggaccacaactctagtcccagacttgaacctagaccttacttaaataaaaatgaaaataaaagttataaaacacttttgttttctatttttaaatttaaaaaacaaaattagttataaaacacatttttatttcttaaaaacacaaattttacttttatttttataattaaaaaattaaaaaataaaagtgttatcaaaccccctttgttttttaatttttttaatcacaaaaataaaagtaaaatttgtgtttttaaaattttagttttaaaaaacaaaaatgtattctataaccacttttatttttaattttataaacaaaaaataaaaatgtgctcataactttcatttttatttttatttttttattttatttaaatcaagtctaagtccgaatttggggcgggggacgtggttcaagtctgggtctcaaggtccagttggggctgaaatctaaaatattgattaagaaaaaaataaactatttaaaaaaattgtgaaaataattttttttgttttcaaaatttttaaaattttaattctcaatttaaaaattgaaaagtaaaaaaaaatgttatagaacatgtttaaaaaaatattt

SEQ ID NO: 171420 - DNA, 992 bp, Cannabis sativa
tttttattatgatacagtttagggtaaatttttatcatatttaataagacattcttactctataagtaaatttacacaatacacctaaaattttatttttatttttatgtttttacgaaattttttaatattttttcggatacttgtatttatattttttatgaatttttttacgagttttcacttatttttattcaaagaaaaatattgattttttgtaacaataattaaaacaatattattattttcttataacagcaatgtcaaaataatgatttttttgaaaataattgaaaaataatagttcgtacttttataaagaaaaaaaataaattcgtaataaaaagtaaatctgtaaaaatataaaatttttgtcatttttaaatatttataaaataatccttaaaaatatataatataataagacggaggaaattacattgtatatccactttacattacttgttttaatttttacctctattttcatattttttttttagatatactcacttttatggatgatgtctccattagactccttaggttatgtaaattatatgctagatttaagtagggagtaagggtatattaggcaatccactcaaaaaaagtgagtatattttaattaaaaaaataatataagagtaattttgattaatggatatatatatatatttttcaacttatccatctttttagagtgggatatttttaaggaaattgtagggtgcaaattagtaatggatcaaagtacatgttcaaaactgatattagcatattatatttaggtgtgatttaatcgggcccgactcgagttaaggtgggctaggtccgtgtttagggcccactcaaatccagtgcccaaaatttttatattgtatatttttttacattatttcacaaatacataaaaacaacaaaaaaaattacaaaaatacggtttaacggaattttaaatatttttacgttttttttattttatttacaga

SEQ ID NO: 171421 - DNA, 721 bp, Cannabis sativa
  modified_base (449)..(451): a, c, t, g, unknown or other
ttgagtatctgcccggagggtacaagctgaacaggatgcctcaaaggcatacccgaagcaaagcgatcagcaatccgtgcagagcgaccaacacttagcgaattcaactttcgcattgtgagtcatcaaagaaatccctataacatggggatcagattacagagatatgggaagctgtccagatcccacgatcagtgtattatgcatttatcatgcaatctttctgcttatattcattgtaacaaaaagggaaatacttcctctccaagctcatagccctataaatagtgatgcatgctcactaggcaaagggtcgagagattttaccctagagatattatctaagaattcatattcagagatactgttgtaagagctttaagaaaaggattctttgtccttgttcttgactcaatacaaataccgaggattaggctattaccgaactnnncggggctgaacctctataaaatactagtgtctttacattgctttactatatatcaactgctttagattacttatcgcttactaaataagactcaccgtcattggctagaagcgaggtcaacagatataatattttcattgattaaataaatgttacaagtgtgaccaacattttaatctagtgggggattgttatattattttataatataataagtatagattaaaatttgataaatatataattatgtgaataatatatattaactgt

SEQ ID NO: 171422 - DNA, 926 bp, Cannabis sativa
gttggtgtccaacctcagcatgacttgaaggcttttatcaaggagagtattcgggaatatcaggctgcaacaatgcctatcctgggatatcataagacatacccggcttactatgaccaaatcccatttccaccaaactatgtcagacaaaagttcaaaaagtttgatggaattaacggttcttcccatgagaattttgcctatttcacctctgcatgtggtgaatctgcccaatcagatgcactattgattagacaattcgtgtaatcgctaaaagaggcaacattcacctggtatactcagttacccccaggatcgataaatacttgagatgacatgcaaagagcttttctggcacaatttgtgagctcaaagaagaccataagtctccatgacctggtgaaaatgaagcaaagaaccagtgaaaatgctaatgagttcataaccaggtggagaaatctcaatctccaatgtccagaaaggatatcgaaacaagcggcggtttcaatgtgtgccaaaaacctcaaccttgaggtggcaacttttgtgggcacagaacccaaaactttcaatgagctcgtctcgaaagcctgcaatgttgagatacaaatttctcgaccaaagggtggcaaaccctcaccgagattcgaaaataaaaagacattcaagaagggagaatcaatggcaacttttatcaataccgtcaacaaagataaaaggaaggcatgggagccacaaaagaaattaactctcaaagtaaggaaggaagttaagtattcatttgacgatgatggcgtcgaccaaatttttgatgagttgttaaaagctaaagaaatacgacttcccaagccaaaacgacccaacgaggttggtatgacaaatgacccaaattattgtcggtaccaccaaattgtgagtcatccact

SEQ ID NO: 171423 - DNA, 1100 bp, Cannabis sativa
ttttatcaaaagtgtcactaatttacgaatatgtaattttagtagcatattaaaaatatcacaattaaaaatatcacaagaataaattaatagtgacatttgtaaaaatgacacaaaatattaaatttagtatttaaaatgtcattttaattagtgacatttcaaaagtgttactagtgaaaaattttagtggtatttataatttattttcaaattatttatattatataaatatgtaacaatatttataatagaaattaaattttacccttagttattaattttataaattaaaaataactaaacaaatataaatattaacattggaccataattattttttctcaataaacaaaattgaactccataaaaaatattaagataaattaaaaatataataataataataataataatatataagcttcttcatatccatgtcatttgcatctaatgacactaatgtatcaataattatagctgccatatctttcctaaccaaactaatattttcattctcaatattagaaggtgccccacaaacctcactttgtaaataagacttcacattctcgttttatgacggtacgctcattaaaataatctctaagatttatttttaaagctacatgacattctttgtgtttgaggtcttccacatacattacttgttcagcttgagaagctaatataaatggttcatcttcacgcatcaattttgataagtttactcttgtgcaatcttcctctttcttaatgccacttgttgaaatccagtcacacttaaatagcacaacatgatattctgaacaataatcgagttttataatatctattaatatcccatacataaaaaaaatgtgtaacatctctctccaaaaaaaaataggatttggatccttactacttgaaaaactaaatttgagtcttggcagtcataataaccccactattttgagtttttaacttcttttcgattttctttgtatatatgaaacctaaaaccatttattaaatattttttaaatcgaatatacataaatgaagtagttggtttgttttcaagtttgtgtttaaaacatgtaacttaaagatacaca

SEQ ID NO: 171424 - DNA, 799 bp, Cannabis sativa
taattacgagtaaaatattggtttcaattgaccaaatggatagttaactaggagtaacaacatgatcgatttaggggtggggcaatagggcccacaaccaaggccaaaaatatttaacaaaaagaatttaaatttattttttaaaaatactatttatatatttttattattatttattgaaaaatataactattttttaaaaaattacatactttattttttaaaataccatatttaatatcttttaagaaaaaaattctcaattatattttaaaatactatattttaaattctaaccattatatatacgaaaaaataaaaaaaataattaaatttgtttgcctaaagcccctaattaacttgagacagatatgagtaacaatcatacttagggatcctttaaagcaaattcaaatgtacaaaaaatcaattaaatttgtttgcctaaagcccctaatttgtttgcttgttgataccatctgccctatgtgcaaagtaactgatgaaaccatctatcattgcttggtggaattctcttttgccaaagcatgttggcaacagttggctgctggtattaatttgacggtagctggttcttttgccaactgatttgctacggttctacagcaggcggatggggagaaaaggaggttgatcagaatgacatgttgggcaatttagaaacatcgaaatgagccagtatggtctgataagtcccctactgttgcgagtgttgctcacttagctcaagctttactcgcagattggactcgggctcaagattcaacatttaatcata

SEQ ID NO: 171425 - DNA, 561 bp, Cannabis sativa
  modified_base (526)..(527): a, c, t, g, unknown or other
agcctgcatgttaaccaaagctttggttcaatttgggaaactactatgagggtgtttgttatggggatttggtttcttgggaataggaataatactcaactttcgtttggtaaatttttttgggcaaggtttacgtttccgcatgtcccatttggctttatttttacgataatgtaaactctataagcacttggtttaagggagttttagcttcccctacaccaaacaccccataggtttattcaaaagctcagaaatttagagaatataattacctgaacacaactcttagagcttgtttggctgtgttttcaggttttcagtttttaaaattgtatttttaaaagtgagaatagaaaacagttttttgtcattttaaaaatttaatggtgtttggcacaaatttttaaaaactgtttttagattttttagcaccataccatgacattaacccatcccgatctaggttcgggtatggttccgggtctaggatccgagtatgtgagcaaaatataaaatataatannttagacaaaaaaaattgtttttaaaaattgaaaa

SEQ ID NO: 171426 - DNA, 719 bp, Cannabis sativa
catgactctttctatgccatgtggcactttgtctcgttttttgttgctttgtcaaggtcttctttgttgacctttatgttttcgaggtgtattcttggcttgtggaccttaatggaagatgatgggtactattctattttttgcaaaaattttggtataacatttagaaaagaaaaacaaacgcaatggaggttttagggtgatggatgaagacaatagcaattacagagaaagaagaattacgacaaagattgatggaagctagtagagaaaaaacagttagccagttagagtgattgacgtaaataaattaaaaaaattaatgataatataaaattgtaaaaaataaaaacaaaagacaaaatgtctaaactattatatatatcatgattttcttataatgtaaataataaaatgtgttttattgtaacagttcttataaaataaataatttattgatgtaattttatttatacctaaatgtaatttactagtgaaattgcaaattcaaatagagtagttttctcaagattacatgcaccctgtccatgcaatctacttgatgtaattttttatgaatgatgtttgaaacattttctttttacacatatttgtgtataatgtataataaatgagtttataatgatatatatatatatttatataatagcaaaaactacgtgcgagacacgtatactaaattttacgctagttttttt

SEQ ID NO: 171427 - DNA, 947 bp, Cannabis sativa
taatgaatggaaagagacatttaattttgctacaaccaatttgagattacttaatcttttacatgtttatttatcgtttaagcatttccatattttaggatattagattatagatttataatcaaacatacatgattagtgaattaagatcctagtaaaataagtttcaacatcttattccttcgccaccaccaccaccaccactcctaagtctcctatagtgtactccaggcgtccacctcttccacctcccgtttcatgtcctgcacctgtattttcgtcaccaaatttgaaactcaatgatgatcttcccattgcactacgcaaaggtaaacataaatgtacctatttcatttcttcttttgtttcttataatcatttgtcctcttcttcttgctcttttattgcttctcttggttctatcactattcctaaactgttcgtgaagccatgtctcattgtggttggtttgctgcaatgatagaagagatgaatacttagttgcaaatggtacttaggacttcgttaatttaccttcaagaaaataggccacatgatgcaaatgggtttttacgattaaagtcaatcttgatggaataattgctcgcttaaagggatgtcttattgccaaaggttatgctcaaacttatggagtggactattgtgatactttttctcccattgccaaactaacacatgttcgattgttcatctccatggcagctactcatcattggcctttgcatcagcttgatgttaaaaatgcttttcttcatggagatctcgaggaagaaatgtatatggagcaacctcttgggtttgttgctcaaggggatatagggcaagtttgtcagcttcgcaagtctttatatggtttgaaacaatgtccttgtgcttggtttggtaaatttagtcaggctgttgagaaatttggtttgttgaaaagt

SEQ ID NO: 171428 - DNA, 591 bp, Cannabis sativa
gagagagagagagagagaaaacaagtaaaatgaatgatctttattgagtagtaaaagtgttgaatacaatgcaataacataaatggattgagatatttataaagcataccccaagatacaaaacataaagatacacgtgaggttaccaaatatagttagttaacgatttgttaactaactgacaaggacaaaaatagtaagtgacacctaatgactaagacacaccatacaacacgcccagtaagatgaattatgtaggacataaccccccaactaaataacctagccataagtataacaatatcacaatatcaaaatcaattcataccatgcttgcatacatatatcaacacgtcatatcacctattattatcacatacgatataacatcatgtcacagtgtaatcttaatgcatgctatactcacacacataacacagtatcttatcgcacattgttctcacatacgataatctactcccactcatgttgattagacatgaagtataacctgccctgccttatgttgttctcacactcggtatccaatagggcaatcccttatcgcaagttgtactcacccatgatagg

SEQ ID NO: 171429 - DNA, 715 bp, Cannabis sativa
atggaaccttaaaaatacaaactcaagttccaaggacaaggaaagttgaaattttttatttttaaggttttttttctttcttttttgttatatatctatgaaccaaagccaatctaaaaaaaaaaaaaaaacccatagaaaaaggcaaacgacaaaacacttgtcaaatcaaataacggctaagaattttatataatataatcatcaaatcattacctttctcttcttccttcccttcttccaatctccatcatccctctgtaaattttttatctttttctaaacattgactgaaaaacctatatgggattatagcatttggattattccacaaattaaaggtacacaacaatatattctctttttcttttttgatattggtaaagttaggattttttttaagaagaattactaattctttgatgggtttttgatgatctttatcttgtgattgaatttgatgtcagggaaagaggaaaagaaagatttgttttttattattattcttgttgttttggatgattgggtgtgagaaaatggcatcactttttatgaggaaagcatcaacagctgaattagagattttttacccaattagaacagaatgccaagaagatgtacccaagacccgttttaagctcagggtatgcattttaatctcagatatagactttatatttaatctcagctgaatttgatgattgggttttatata

SEQ ID NO: 171430 - DNA, 1558 bp, Cannabis sativa
atggttgttacttgtgtcagcatatgagtcggtttattcagttaaatctgttgagtcctattttcttgggtctaatatgtaatgaggtccaagctataaaaggcttgcctctcccctgttttgtttcaattggatttcatttctttctgtttcaacattcaattcctctttcttaacatggctacacgcaacaaggttacacacaacaagaaggactggatttctttgatactttttctcccgttgcaaaaatggttactcttaaattacttcttgatgtatctaccattaagaactggcacattttacaactcgatgttaataacgcctttcttaatggagatcttaacgaggaagtttacatggaaataccacaaggtctgaccctgccttcttctctcaatgcaggaacgaatctcgtatgcaaattgcacaaatccatctatggtctgaagcaatcttccaggcagtggtacaagaagctatccgatgctcttctccaagaaggattcaagcaatctcaagccgattacaccttgtttactagaggatccgatgataattcatagctcttctggtgtacgtagacgatatcatcattacaggtcctaatgtatccaatatacactagctgcagacatctctacaccaaaaattcaaactcaaaactcttggagacctcaagtatttcctcagttttgaaattgcccgtgctaaggaaggattatttctttgccaaagaaaatacactctccaattacttgaggattcgggtttcataggcagcaagcccagcaaaacacccatggatcctaaacaaaagcttaacaacgaagaaggagagactttagacaacccatctcattatcgacaacttgttgggaagcttctttacctccccttgtctagacctgatattacatatgccgtgaatactctcagccaattcatgacaaatcctcgtactcctcatcttcaagccgttcatcacctcctcagatacatcaaagggaaccctggacaggggctcctctattccaaaaactcttcactgcatctccgtggcttctccgactcagattgggcatcttgccccataacaagacgatcaacaaccggcttttgcatcttcctaggagattgcctcgtttcttggcggacgaagaaaaaaccaacaatctcaaaaagttcagctgaagctgaataccgagcgttggctgccaccacaagtgaagtcacttggctgcagtatctcctaaatgacttccacatacctcaactacaccttgcattcatctactgcgacaacaattctgcaatacatatagcaaacaatccaaccttccacgaacgaacgaaacacatagagctagattgccatttcatccgagataagataaccaactgctccatcagactcatcccaatttccactacactgcaactagttgatgccttcaccaaacccctatcttcaccaattctcacttctcatatctccaagatgtcagtttacgacatacactctccatcttgaggagggggtattaagtttact

SEQ ID NO: 171431 - DNA, 1098 bp, Cannabis sativa
  modified_base (433)..(435): a, c, t, g, unknown or other
  modified_base (608)..(608): a, c, t, g, unknown or other
  modified_base (1049)..(1054): a, c, t, g, unknown or other
tgagatggtgattactctgggagttgagtagtaatttttggaggaagtataaaaaacctatctaaagtctctaactctaccagtgagattgaatgttaaagtggccaggaaataagctatcagataaatattcagcctatgaaaaattctgcacatgtttggcattattccagtaatggattaactattagtgttacttcctaactaacacagatatagtccccaaatagttaaaatctagtatccctagaggagtagacatatagaaaggaatttcacaatatcaaagaattttttactaaggaaatgtaatggtggagaaagtttgtattgaatacaacctgtgagatcctattacaaagataatactacatactacacttgatctggacatcaaggtactgaaattaattgaaatgcacttttagttttnnnttagtgcaagtgggagtttattgagttttatgccctaaataaaattcatttcactataattagatttactaattaataaaaacatataaatcagtttatggttcacatgatttatttcatgattatatgtttaatgtataaattctataaatccataacatatagttattcangattatagtgttgtcaacacagttaaatataatcatgattatatgtttcaaagtttaagtcccgtgagttttcaatatactggatttagactgacatgataatcagctataggagcttacttacaccttggataagtgttatgtccttttcagaacattgacaaattatgctaggatcggacatgtagagtatgcattggactggagcgatattaaatttggataagatatcataaacttaccgttatatctatctaatttaatatatgttagttgatcttaagttaaaagatcttaatcgtgatatggttaggttctgcttcaatgtattgtctatgttcttacgttgttcgttaaattttggccagtcgaatccttacttcttaggaacatgatagtataattgagtgggagcggtaatcatagatatagaatctatannnnnnataagtatttagaagtgaaatgatgatttcttttgagcttggct

SEQ ID NO: 171432 - DNA, 655 bp, Cannabis sativa
gttgcccgatgaagcaaacgataacaaacattcaaccgctaacatttagccatacggtgcttaccacttttcttaccatagttcagaactcaagcgtgcaggccgacctgagtggaaaaacaagctaggcgatcccggtcctatgtcacgacaaccaaaactcaatgaataccttaaattgaaattccagaataaaaccctaatttgaaaccgaataagaacctagccatcagtaactccaaaataggctagaaaacccataaacaacctaaaacagatactacgcaactctcagggccaaaagctgaacttgaagaaaacccgagaattccccctacagggcaaccgacgaccaattcttgtgcaccagaaccaacttgtcgaccgattctggcaggccagaattccttgggttctttccttcaatttcgacccaaaacacctccaaacctaaccaaactttcaaaaacagtataataactataatacaacatatcacaagctttaaaacacaacaattcaatcatttaatcaaaatcatacattgaagggaacaaaactcaactttggcttcattaaaccaaactcaattcaagctgccatagaaaccacttaaaaccatctccaacatactcaaaaacctaccctaaacaca

SEQ ID NO: 171433 - DNA, 628 bp, Cannabis sativa
atgatttaatatgaacaaagtcactgtaagaaattttaaaaacaacgaaaatacaccagaataaatattttactatagtattgaagtaattttttttagattatacgtgagttggattgtttgggaactccagttcaacattttgagatctgcatttcatggtttgaaaattgaagtcaagatattagttttatgcaaattaaattgaattttcgattaaattttagtttcgtagtagtttttctacactttctttttcatgaattcgaaacaactcctgttttaattgattctggtcatcttcttaagtgaaatcgtcgaaattaatggtggttctctttctggttgaatttttgtttcagttgtgttaggttgctgcgtagttgtatgatagttgcctaggaagcatgaatgctgggttgaaggtgtgtgtaagtggtatttgtgtaaaaaaaaaatatttggactgtatatttatttatttagccaactgaaagtatttttgtaatattattatttttttggttaaattgaagaaaaaaaacccttaaatttattagatgtgctttaatttttctttttaagaattagatataattttgtatgtcccaactattatttgataaaa

SEQ ID NO: 171434 - DNA, 703 bp, Cannabis sativa
ggacgggtcagctacagatcagttgtccaccataggaatttttcttgtcacacctgcggggaaacacttgcacgctgcggtcaaattcagttttaaggcatccaataatgaagctaaatatgaagctcttatcgccggcctaagactcgctcgggagatgaaagccgaacatatcgagatctgcagtgacttatagttggtggtaaatcatgtatccaaagagtacgaggctcagggagaaaagataatagcatatctaagcaaaatacacgacctactcgcacaattcaaaagttatgctctcaagcaaattccaagggaagaaaacacaactgctgatgcattagctcgacttgcgagtagcaatataaatgataaagcaaatataatccccatccgatttcttgaaaaacctagtatcatcggcacggaagaggttgaaatgattgatacatccctaaactggatgacgccaataacagcctacctcaacactggggaactcccagataacagaaacgaagctcggaaaatgaggagaaaggttgcacggtacatcattgtagagggagttatgaatagaagaggattatccatgccactactcaggtgtgtcacacaagaagaagctacattacttttgtcagaagtacatgacggatttcatggcaaccacgcaaccgggcagagtttatctaagaaa

SEQ ID NO: 171435 - DNA, 653 bp, Cannabis sativa
tgaaattaacataattatttattaaatttaattaaagaattatgaacgttggttgtatcgactttatatcaatagttacagtgttattagaaagtcaccgtatgtacttaatttgggtgtaattcgaattcatttacacgaggtatgattgggtactttgatatacacatcttaaaagagatatattaatatatatatattttttttatttatgtggatattttaaagaattttttagtctatttttttttttatattcgtatacgttatagttatttaaaatattttacaaaattttaaaaaatttaaagtagtgttcaaataatttatttcacacttgtatataaaaaaaaaaaaaacataattacgcgtacatcacattatttaaactctagttttgtcatgttagatttttttgaatttttaaaaattttaccgaatgtcttaaataactcaaacatacatcattatgagaagaaatttgacaaaaaaattatttcagataccaaaacagataggaatatatcggtacaacaattttaaagagatacattgtaaattttttcatatttaaatgggattttttcataaatgtacaacaaaaacaaaataattacaaaaaatgtgcgaaaaaaattattataaaaatttat

SEQ ID NO: 171436 - DNA, 900 bp, Cannabis sativa
tttctattgtaatttttttttaaattgtaaaaattgttgcatatatcccatataattatattctgcttatttatttaaataatttgttgatataatactaatataatgttagtttggcctaattcaagagtctacataaaaattaaatacataaatagtagtttaatgatgaacaatgagtatgtatgtacattcttagaactatgtttgtatgtttaatgttaataaactaagtagcttaaagttattaaataaaataagagtatcttcaaccatgttctctaaacacactcgttaacagaaataaagagtgagagttgaaaaaaataaacttcaattatataaaaataactttctatacttttttaatactactattttaaattataaaatattattaaaataatcaaatactataaaatagaaaacatgattagagcaacaataataaaaataattatattttagctttttagtttgaaaaataaaatagagagtaccattagagatgttctaagtatttgtactgcaattatacctataacttatagtcacataagtgaattattttaaagcggttacaaataaattttttaatttaatttttgacggtaataatacatatgttatatttctgtaactttgtaggtatctcgctgttaaatatcaagtacctatagaaattttaaaattataactatgtattattatcgcaaaaaattaaacttaaatgtttatactgtaaatatttctttaaaaaataaaatataactagtaataaatatttgctttgcatagttctaaaaaatttggacaaaaaattttgcaaccgataacaaaaattctatttattttaaaataaaataaaaataaaaataaattataaaaaataaaataaaa

SEQ ID NO: 171437 - DNA, 571 bp, Cannabis sativa
aaccagtgttggactttggttagtataggttgttttgatttattataattttaatttggtgttggaggggtttagttttgattgttagtctcttattgcttttctctagtttgtaaatagtatgttctccagcttgtaataatgttgttatgtttgttgttgtttggttctcttcaggtagtattattgtttcaagctgaaatttttgccctgctgactagactaaattgggctcattcgtgtgggattcccctaaaagcggttaaatctgtctgattctctctccatagttagtaatgacttttaataacaggaaggtgtttgcaaatgagatgtgtgtgctgttagaggatgtcatagctttattgtctaaattttcgagggcacttttgtctcatgtatcctgcaaagataacactgcggcccatggtttggctaaacatgcccttaggctagacaataaattatgctggtttgaagagcaaccgacactgttgaccaaggttttcggcaaccaataaaataatgagaattaaaagagctgtaagaaattaagagaaggatttttacg

SEQ ID NO: 171438 - DNA, 582 bp, Cannabis sativa
ttgggagtgcctatgaggcctagcaagtggagaaaagaaaagtgtgatgttctcatgaagaagatcaagttgccaattcaaacttgggctagcataatcctttgttggtcgtcctcaattgattcattcagttcttctttgtctctgaaattatttgatgagtaatattgtgctccgataaagtcttgttaagaaggttgaaaggtttttgtcgtaaatttctttgaggccaaactggtaaccgaagcaaaatacatactgcttcttggaaaaaggtctgtttaccaatgtttatggtggtactggttttcgggatgtctcgaagtggaataaagtaattactgccaaatgtttttagaaaaacatgatgacttgtgtgcgaaatgagttaatgccatttatctcaaggtgttagatgcgtggaattatagccttcactcagattctagctggcactggcgaaagctttgcaatttgagaaatacttttgacaagaataaaattgtagttgctagaaagaatggaaagttcaaagttgcagttttgtataataaatttatgccggctgctcctgttcattat

SEQ ID NO: 171439 - DNA, 502 bp, Cannabis sativa
  modified_base (384)..(384): a, c, t, g, unknown or other
ttttttaataaatgaggcttaagggtctataatgttgaatattattaactttctttattaaatgtcattaaattattcaaataaataaataaaaaaatataaaagaaattaattaattattggtataaaacaataaaataacacataatgaaaaaaaaaaatatttgtatgtacaaatattttcgtgactctatctaagtatttttctaaaatatatacatatagtttataagtttatttatgtataattaataattttattttaaattataattcatgtataaatatcatatttatttaaaaatattttttaatataatatagtaaaaattatttattattattgttgcaacattaatatttttgggtgattctacaatgcanccctttaaaagggatgtaccgatgtaccatttacttgttttgacatccagaagaattttttaatctattttttttatattcatgtacgttataactatttaagatattctataaaatt

SEQ ID NO: 171440 - DNA, 624 bp, Cannabis sativa
tagaaaattgtgtacgtgtgacaacatagtcttttgttccaaaattaattattagctgttttattttgttttgtttggtttttttgatataaatatttaaatatttttgagtggtccaacagctgaaaccaccaaacagcatactaatttttatttattttatttttcaaaataaaaattgctcaaaaaaaaataaatatacagtgattttacagaactgattctctataccttacctgtatccaatttagggttttttttaaggaaaaaaagaagaaagatttgatttttctgcaatttgtggaaccaaaaatgggggggcgcccaaattgttgtcacatatccttagctttcgttctcaaattcctcaattttcttcaagctttcgtcggtatctccataatactctactccttatggatggtcgatcaatggtacaatcacatccctataaacccaccaccaccacctttggctccttcgccccaagtttctgaacaaatcgctccgtttaagctcgctttcgatttggtttctggattcgatcgcagtttattgcttaatttgcactcccttgatcttccagcaccttggtaaatttttaatttcaccattttttttttt

SEQ ID NO: 171441 - DNA, 768 bp, Cannabis sativa
gaatttacacaatggcatgtagattggtaatgtgactgtaggctgtagcttagcaaatcaattgtcagttatcacgtagaaaattcaatgaaagggtaacacaattcaggaaaatattggaggcaggttctgctgtattatttaatgatagcaacaatacaaaaggtttccaagcgattatacaaacttgcaaggagtactaagctcactcttttcctacacttcatatataggagtgaatatttttttaatggagttttgtttgttccttaaaatgtataaatttatttttgttttactagtttaattttgcataatatatgtatatgtataatatttttattttgtttcttccttcttacattgtaaaagaatacatatatgaaataatatatattttttcatttaaatattaagtccaaattaatttaagttgatttattcataattgaagtgtaaaatttttgggtgtaccttaaaaattaaaataaaacggggaagcatatatgtatttatatatgattaatttggcaaaaatatttaagttttacaaatatttaagttttttttttttggttgtaaaaatatctttttatgacactttcttggccgttatatcataggatacgccacaattcttaattattttatgtcgatttttactttaaaaactcatttaaattattttaagttaaaaaattttaaaaattaaaattaaaaaaaataaatataactaaaattaaataattatatatttttttttttcaa

SEQ ID NO: 171442 - DNA, 928 bp, Cannabis sativa
aattgtgtgattatatgttgaatttagttaatttaaattattaattgacacatgaatgcatataattcgtttttctcgcaattttattttgtacattttattgaatgaaaacataatagtattgctatcataattatgttagtgaataagaaattgagtgaaaagatatctctctcatctttccctctcttttggtgatctcaccggagctatggaaaaaggaacgaaagttgctaggtagactaagccaaaagcaaagaaaaattgcctaacattttcggatagagtcattatgaccagatctatggacgcaattttaggggtgaaggaattagagatactggatgcgaaggagatagaggatcacagctgttaatccagattttcgttaactaaatttgagcctcacggttataattcctcacagaaaaaataaaagcttataaaaaataatatatgaacacaaagtttttttacatggttttgcagttaaaattctacatagtgcacgagtcaatcttatttagatttctgattgtgttttttttagggcctctcttgtagaagatttttcgtcccttttttgagcttgtttaacagaatatgtttacaacaattctagtaaatataacgcttagaagttgcgcaaaatatgaagagatgattcataatgattctcgaaaccgttcaactgccagaatcaaaggatgtgttttttccaagaaaagatcttgatgaaaataaccctttgtaattattaaaaagctctttttactaaaaaagaactttttaaggggcaattgttatacttgaaattcgactagacgacactagtcaagataaaagggaatgtgaatcgatgcaatagctttttatggaataactcattaattacgcaagtataagagtatatttgtaacccgctgac

SEQ ID NO: 171443 - DNA, 608 bp, Cannabis sativa
ggtagtacacacatttattgttattatatgctctattaaatgatgatatatcaggtgttgatgaataataatagtgtggatgaattagaaggagttctaagaaatgcaacaatgaaagacaaaacggtaataatgacaacactaaacgatgcatgggcagaaccaaattcagtattcgatctatttataaagagtttcaaagttgggaataatacaaagggactattgaaacatttggtggtgatatgcctagacgataaggcctacagtcgatgcatagactcacaccctcattgctatcagcttaggacgagtggtgcgaatttcacgaatgaggctgcctttatgtcccctcactacttggacatgatgtggagaaggattgagtttcttggttatgttcttgagttgggatacagcttcgtattcacggtatgtatattctatatatttaataataaaaatatattaaataccaatttattagaccatcattttgtttgatcagcattttaatattctcagattaattatttaattaagtgattaattaaatgcggaataatgaaactggtactgaaaatagtttttccgtagttacagaatac

SEQ ID NO: 171444 - DNA, 640 bp, Cannabis sativa
cttgtgattcgtgaaatataccggataaactgtacaatcatatatcgtttggaaaagtttaagtgtatgattttgaaattgtgtagatacgagattatattgttgaagagaatattttaaatgaattgattggtactaactatatcaataaggtaatatcttgttttctagtagtttatcacgaaagaactccacaattaaacgtgtttcacttaaactattaggaatatttcccaagaagcgtgagagtgagaacaaactacactagaaatactagtgttagtttatcgtgaaacggattttgacatggcatacaatacgaacaagacataaattttatgggtttgggtcggggtgaattcgatgagagtcgaaaataggtcggccctaattgacacgaaataaaaactagtatttttttaaataaaagaaaataaaaaattattattattaataatataattatgtaaaaatataaaaatattttaatttttattattatatataaaaaattataaatagataaatatatataagttttttaataaaaacaaaatttactattttctctactactccagcttcagtaatagcaaaacaggtcaaagtaaagtcaatacgaacacgatatgatttttta

SEQ ID NO: 171445 - DNA, 676 bp, Cannabis sativa
cacttttaaaatatcatcgtatataatctatgaccatatagtatctataactcttccaaagtgtatgtgtgcacttgaggagttcgtggaatatcaatatttatccaacttattgaatcattcatgcatgtgtatatacaatattgttcatacaaaaatttaaatttcaagaaatatgaacttaacacattaatgataatataaattttatttgcaacaattatggtactccaagactatatatttgttctattcttgttgtataatcttaatttacatatcaaatgatcatatatctataatattgatgcatatgaagtacttcaagcttctctgccaatgaacaaactatatacatttaatattctcaatatacaaaaagaaataaaaatttgttcttcaatatcatttataatataattaaaaacttaacttataatttacaaatttatattgcataaacaatcatacgtgttttttaaataaaaatttacttacatgtctctattttatacaaagatctttgtcatatagtgcgtgcagctttaaatttatatcacttaagacatgtattaggagctctaaataaacaaccacttgttgcaacatttatgtgacgcttataaattctcataaaatatatttcaggctataatcaaatcatgattatattttc

SEQ ID NO: 171446 - DNA, 713 bp, Cannabis sativa
aaaaaaataaataaataaagaagctttctcttcctttccctctctcttcgaaccagctcacgacaaaggaatagctgctggtttttgagtgtttcagcaagggattcaagaggatataaagccaaggtaagccctaagatctccttgccctagttcttgaatttaagtttaggttgagtttgtgattttatgatttagtggctgttagggttaggttgagttgtagttcgaattgtaggcttaatttgagtttgtattagcttcttgtagctggttttgatggttggaataggttttgtggaagtttgagctttgagttcaaagcattgatctctaatggcataatttgtttcaatgagtttctctctgaattactggctggaatatgttgtatataccctaattaggtactctaaaaagttttgtagcatttggtggaaaattgggcaaagaatgaaatgtttcgggtggactggtgcaaaccggctagccggttttaccagacccctaaaaccggctcgctagttttggcaggatccccaaacacctcattttctaaatttttgtctatttcagtgtcatggttgggtgtttcctgaattccagagtttgagtaacctttagggagtatagcagaacctagagtagtgggtttgggtttcccgggattagggttttaatcatgtcaattacccgatttcataatgtgatta

SEQ ID NO: 171447 - DNA, 725 bp, Cannabis sativa
ataaataaaactttgctgtcagttaactaaatttgaaatcaacaagtaacttttgtattttcacaaaatatagatccataatattttagagacactttgaaatatgagatttgaatttataaatattggtaaaaataaaattggctttgtttctaaattagtaaggataatggttttcattatggagtataatcgttaagagtacttccacataataatttagcttcattagaataaatttatgtaaaaaagagatcaagtgtatgtctccaaactatcataaaattgtttgtgatgtaaaaaaaaaaagaaaaaaaaattaggctaactattcaaaaagaaaaagtaaaactaattattattattattattattgttaatttaaaagaaatctaaattaaaagtgaaaaatttgcataaattaaaaaaaagtagtaaaagaaaatagaaaattaattattaaaatattaataaaatttgaatagacatgttaactgtgtaggaagttccacttttactatcatgttccatactttcttattacccttggatcatccatcaatgtacaataaaatatctctatctataaggacaaaacaagtactatatgtcctaaatatataataaaagagtaaataatattttggaccctgtgttttgtaaaaattatcaattggaccatctgttttgttaaatgaccaaatagatcttgtattttctaaaat

SEQ ID NO: 171448 - DNA, 744 bp, Cannabis sativa
tgtttgatgaaaccatttttccattttctcaagatgctctttcttctcaaacatcattttcaactcagatatcacctactgtcataccatctgtaacgccctaacaattagggacgctacgattttccgataaatataacttaatctcgctaatccgggattactagaaataagagcacaatttaaactttaaattatttaaagaatgaaaatataacttgtaactatttaaattttacaaagcattccaaaatattccacatgtcttaggattccgtagaaacattttcacaaaatattacaagtgattttaacatggcaacctaagcgatgaaaattgggaacacagatacatcagctggtagacttaacccgcgtggtctagtgtggcctgaacatgtacaatccaccgccaagccctcgaactcatggctgatcacaaaccgatttaccctttcctgcacagtagagcactcgtgagccaagcccaacaagacagtataaatgacaatatacacaataataaaagatcacttaattattgatgccactgcatctattgtctatttgacatagacctacatgttatgctcataagtctatttatgcctatatagcatagacccacatgttacattcacatgtctatttacaataaggccttagaatagtttatctcgattttgattacagagtcttgttgggttttatgccctcaataaaactctttacaatctgattagt

SEQ ID NO: 171449 - DNA, 854 bp, Cannabis sativa
cctttaaaactttttatattgtgttatgggaaaattcttctacgtatgtccaaaaacattttggttctgctctaactaaatcaactaacatatagtcatttctccatatgaacttttttttttgtttgaacaaaggacatgttatgaccaaaaaagaagtatctccaagaccttttttctttgtattttcaattaactttttcaaattaagcatataactaaatatacttgcattgcatgtaacttctgcttagtatatgtataacacacatattttttcttggaaggaggagtcacgtgggctgttgtccattttaatttttcgttatcaattttaagtaaaaaaaaaaaaaaaagcaaaactatcgtgatatgcccaatcaaatcaatactatttataaacttaaaatataataaaattggttagaataaatgttgaactgcccaagttttaacaaaatggcacaaattttttttaataaaaaaatacagtatacaatataataatagggtagtaaaaatgtaattttatgcatataacagtaaaattataaaaaattgggaaatccagtactgagtataaatttcccaatatatttgggccctaactaagaaacatgatattttttggggtgaaatggatcagcaccacttaaagaattctactttttgggagtattatctcaaactagagtttagttggtattgaagaaagttgtgaaaactttcagcagagacaatgtgatagctagggttgagaatcaattggtttgatcggtttttttctttataaaaatttaaaatttggttttcagtttagattggtacaatttaaaaaccgaccgaccaatcca

SEQ ID NO: 171450 - DNA, 522 bp, Cannabis sativa
ttgcaggcatttgagaaggcatggcagaaggcttgttcatctaatgttcctattgtactagtggtgccttctcaaaacacctatcttgttaagccaattgtgttccgcggtccatgcaaatccaaagttacagttcagattgatgggactatagaagcaccctccgatccatcagactacaatggacacgaaagcaactggcttatgtttgaaaatattaatgatttagtagtccaaggtggtggaaccattaacggtaatggaaattcttggtggaagctctcctgcaacattgatacatcactcgtaagtactactcaataatatatatatatgcttatatactccacacacatatatactaatcatgttttgtttttttctttgttgattttcagccatgcaagccagcaccaaccgtaagttcattaacaccattgcctttatttttatatgtataataattagagttctattaatcttgttattttgttgactacagggtttaactttttcaaattg

SEQ ID NO: 171451 - DNA, 761 bp, Cannabis sativa
acttggccattactcactcgtttccccaaaaattctttgatctcttcaattccaagtttaaaaaatcaagatcaaccacatccaagacaattaatcagcggtgaatcttctcaaccaagtcatatttcatcatctgtaacagccaccataacacctgcaacatctgaagcatcctcacaacacaacattcaatttggttgtcaaagtttaaactctgaaatgggaaatcaccagaatgcatttgcaggatttcctactacaccagccagtaatgagttaaggcccatggttcactttacaccagcaaaactacatcatgtgactgcacccctaactcaagttcccatcaacaaaccattacaacattctgttgctatgaaccattcaacatcatagtcaaaatcctgggattttgttactgatctatctgaggtattttgttacaaaatgcaggctttgatcatcctttatcctcaacggttggtatccttctttcctttggtatttcagttgcagaacagtgttttcttggttgcattccaggacctctttcagcttccgttgtaattcttcatacttacaattgattgaaatgtattgtccactagcttcataattttcataattcattcgatcatcaaattgtacattgcaaaagactatgaatggaatatcttctttttcctgtgattttgaaattattattagtgtaaggcaataattttgaaactgttttgattctgttattgctaatgttagta

SEQ ID NO: 171452 - DNA, 571 bp, Cannabis sativa
ccaattctttgttgataaacataccctgtttctctctctttttcttctctgtttttacttcttcaatagcaaaaaagaaaaaaaaaaaatcctgaaataattgaaaaacagcataaatactttcagtactttgggtatctcaaaatcttcatcttcaagttcaaaataagagtttgaatctttaatgatcggtttggaacgttttaattttctcttttcataagaatgaacaacttattttcttttggaagtatgtaggctatgagagattttttgaaatttttcttacccaatgctgatttactaacaaaaataaacaagtacgaatgaaatataatacatagaaattgagagaaaataaatcatattaaaactacaaatcaatatcaaacaatctccatctagaccctaatgaactgtttagctactcatgtttgttcattgtagcaaattcacacatattaatcttaaaaaaaaaaagagaagaaaatagagaagaagataatgctgaaaactccgttgaaaaaaccttcgcggtcaattttgctctccaaattttgtactccttgat

SEQ ID NO: 171453 - DNA, 660 bp, Cannabis sativa
aaaaaatacaagtaaaaaacttattaaaataattgtaaaaatattttaaaaaaaaggtactattttaggtattttttctaaaaatttcaaatatatataacatatattttcttatatatggtcggctaaaatgttaagtatccttacctaggcctgcctatttacagggtatacttgcttttgttattttttataaaaatactgctatgctatattttttacttttttattgtatatttttataagttttatgctgcagtatattctgtttattcttttattttttttttatttgttgtactgttgttttacggttatttttcataatttatttttttaacgtcgatttcactattctattgctccattttgctagaattaatgattgttttctgggtgttctcgtggtgctgtggtagttctatccgtgtgtgtggaagatggaggctataaaatatattttttcttgcttttctatagttattttatggttttttttttatttttgtcctcttaaaaatatatttgacgagcgcactagaaaaaaagttttgaggtgtgtgattcttttatgtttcactaagttgttatatctgcttattgttttatatttatttttgtgttattttagtagtttttttgttctgattttttaagatt

SEQ ID NO: 171454 - DNA, 1527 bp, Cannabis sativa
attaatattaatgcaagttggaattaaaaactttaataagtcttcagtcacttattaatatctttgaagctttggaagtataccacaaggttcataatgtgaattcgtaattaagtgccaatttaatgattatatatttttattgtaacgataatagttacatttttgttgacttgtaataacagagttaccaatatatatatataaaaaaaaaaaaattaaattaactataactaattattttcctaaaataattaattttaaattttaatatttactaaactcttttaaaaaattaacattaataattttatttttatatttaaatttctattataaattttttaacagttaagtcatttaattattataatatttacaataaaattctattattttataaaaattaaacttccacctcttcttgttaagtttatcaagaacacatgttcaagatcataaccaataataattaatagcttttaaattttcaatcatacatattcaagatcactaaccaataacaattattaactttcaaattttttcaataacaagtatccaagatcaataatcgataccaattagtaacttttaaacctttcaataatatatattcaagatcaacaaccaataatgatcaataattttagacttccgcaatttttttataattccacttcgatcaattgatacatatacagtaaatttagaactgcaaagaaggaagaataaagtaatttcgtctctctgtgaaaatagaattacatgacagagggtaaaatgaagtacagatgtgtggagtgcggtaaaaaaaagtatctttaattctataattgttattatattttaattttttattatttcttctttttttttttttcttttttttttcttttttttgtaaaaaaaatgtaaatcacttgaaccaaccttgaactaacactctttagcacttaaagtaatagtattgataataagattgagtgtagaattatatttaattagaggtcattcttatactctttttttattaattaaggttatgagtgtagcaattttaaattataaggagtattattacaaatatttcaataatttaagtaaaaaaaattaatttctaaaagattcttatttagtaataaattgtaaaaaaaataattaatatttattagtaatttaattttaaatataattaattttaattaagattttataaagtaataaagtatcaggttacaagttattaatttatttatttattttaatttttcaattaatcacaaccattcaatagtaatccaatgattaaaaataaatgtaaccatgatagttacatatttgatgtaaccaggggcggaaccaagattacatcgtagggggggccaatatcggcaagtacatacaacaagtaaattttagtgactaaaaccgttttttgaaagtgcatgtcaattgaagaaaatattatagtattttatttttataaatattttatacaagatctaaaaactatgaatcaagtaa

SEQ ID NO: 171455 - DNA, 818 bp, Cannabis sativa
  modified_base (411)..(416): a, c, t, g, unknown or other
atatcaaacatatcacacataattgtcccgttagataaaaggttctaatctcacttatgtgactctaatggccatccgttacattttctatcgtcaccgagcaaaaatcataaaaattataaatttcacatatagtataaataatgcacttagagtttaataaaatctccgaaattcaaaaattataactctaatacccattttctaaaaatggaacccacaacataaatattcatatgtaattataagataaagataattaatgttaattgccctactaatccatattttaatcatgtggtcattataatatcgtactttactcgagctcatctgtttttcttaaataggtcaacctattttcttatacgaactcaaatttatactccacacacacacacacatatatannnnnntatatatatatatattataactttcattatttttatataatttttcagcaacccttacatacaatcataaaaaaaattattataattattataatttaaatatttactaataaatattagcatttttaactcataactttttaaaattaatatgattttttttttttttacattttttatagtttaaattatagaattataatagttggtgttatatttgagttttattatcattttagtttataaataattgataaataagtatttattattggtgagaattatagattttatttgtttttataaaatttgtgcaatatgatttttttttttcaaaaaagttattttatgagattttctttaaaagaaaaagttaaaaaaaaaaaagacaatataaggtaa

SEQ ID NO: 171456 - DNA, 501 bp, Cannabis sativa
gtgcataatctcaaaagcaaccattatattatccgatatcaatcgacccgggagaaaagcactttgatgattagaaattaccacaggcaaaacatctttaaatcgattcgctaagaccttcgaaatgattttataaagcacattacatagggatataggccttaaatcagacatagactccggatgttttttcttaggaataagcacaatattagtatgatttaactctcttggaaaagaaccaataacaaagaaattcttaacaagagtgataagatcattacttacagtgctccaacatttttgatagaaccccggggtcattccatcaggacccggagacttgtcgggatgcttttggaagagagcacgacggacctcctcatccgtaaccggttccagcaaccgattattgtgttcactagtgacagccgaaggaacacactgaagaacaacatcatcatgcacgacattggcagtgaatagcgaagaaaaatagtc

SEQ ID NO: 171457 - DNA, 944 bp, Cannabis sativa
  modified_base (553)..(559): a, c, t, g, unknown or other
ctattcgccctcttcgttctctctacctcccagaatttggatatgccctctccccacgaggttagctggttttttgatttgaagtccaaccctaagcaaggcaggtcggggtacttctatttctctcaaccagacttcaagtggttgacgggcacttgggacaaggtcgttagcaaaattgggcattttgttgacggtacttcatggtggaagggatgggcaccactcatactcggttccagcagatccccacatatcatcgccctcccttcactctttctcttagggatagagcctaaaagcttgctcaggtgccggggatgctcggaatattattttgttgacctctgaggagaactttgtggaatatgggctctacctgaaggattttatccctaagcctgtgaaggagaggaagaggaaatccggtgctggtcgggctaagcgagctcataaggagaatgaactcatccaacttaagtgtgaagctaagttgaagggaggtgcaagggccaaacagtatgctcatgagcccttgaatcctgaagatgannnnnnngaagagcaggtgactccgctcaaaaggaagaagaaactttcagcccagcctaggcccgttgaacatgccatttgaattagggagcccagttcacctgctcagccatcctctctcatgctaggaaaagggaaagtcgtcatggcggagataaaagacttgtcaggtgatgatggactttcgagtcttgctcagacaatcgcttcgcaggatattctttcttgtttttaaacttcttaactatcatgcttttatgcttctgatgccttttttctcctaaccatgttgcttttgtttcgtgcagacatgtcttagaagatgctcaatgctctgaagaagagagttggaggaagctcaagctcatctcctctggccaagaaatctaggg

SEQ ID NO: 171458 - DNA, 640 bp, Cannabis sativa
cttcagctcctccgccttggcctacaatgcctcctggtgcctcctctctgcatgtgcctccctctgttgggcttcctcccggaacgccttcctctcggccgccaggtctcttagactcttcatggcctcgtccatgcccccaaactcggacatgacgtacccatgatctatcaaagtctttgagaggcgaccagtctcagcagcgatctggaaaagcaaacgagttaagtatgagagatcaaatgccacagggtagagcacaaatgaaaaggaaaaaccaataacaaagactcaccgcggtcatgaaagcgctgatatcctgaacctgataaatggcgttcatggaagcgcatgctgcgtatcttttggccgggagttgggtcagatgggaaacgaattggctagtcagttcggaggcgaagggagcaagggcagggccgacaaagcagttgaaccagtccgtcagggggtccatgtttaggtcccaggcattcttgaaggcctcctcgcacagagaattttgttgagcctctcgcaagaccttcttcaacgcttccacctcggcattccccatgctatattcatccatggcatagttatgtttggcaactcgaagctgctgcctctcctcatcggcggg

SEQ ID NO: 171459 - DNA, 526 bp, Cannabis sativa
gtcgactggcctccctcagactcctacagcagccaacaatgctgcgaacaacagccctgcccctggttcaagccaagcaggtgtcacctctaataccgcacaagctcagtcgagttatgttgcaaatttcacacaaccgtttagcacactaaaccagccatttcctctcaaactcgaccgaaacaactactccctctggaaaactatggtttcgactataataaggggacatcgacttgacggattcgttcaaggtactcgtgcgtgccctccggagttcgttcctgcagaagcaccagaaggacaggtcagttttggagttcaactcaatccccattatgagcattgggtcgtgagtgatcaactcctaatgggttggctatatagctccatgactgaagctatagccactgaagttatgggatgcaccacagctgctgcactttggaaggctctcgaaaacttatacggagcacattccaaatccaagatggacgatacccgtacagccattcaaacaacaagg

SEQ ID NO: 171460 - DNA, 614 bp, Cannabis sativa
caatacactctcccaaagtatggctagccaacctctatctcttgagaatcaacatcctccccaaggaggaccagtcaatcaagtccccacaacaacagatccttctgtacaagcatagttagaccaactaaaggacatgctccatggcatggttggcacgaagcctttagacctcgaacatgattggtctaggggatcatcattcttggcatatataaatgccttatctctaccaaagttcaagatgctggtatggaagatgtagactggatgggaggacccgttggctcacattaaatacttcgagatgtaactcaacttctagaaggtcataagtgatgtgtgttgttgcatattcccagctacagtgtcagagacggcccaatagtggtactttaagctcaccctaaggagattcaactcctgctgagttctcacgagaattctacaaatagttctcatcctcgagacttgtaccatgacagttggaagatcttgtcgaagtcaaacaacaacaaggggaacatttaaaagactatattcagagatttatggtaaaatatttccaacagtatgtttcattaacatcctaatatgaattctaaaacaataga

SEQ ID NO: 171461 - DNA, 533 bp, Cannabis sativa
aaaaaaaaaaaaacttaaacatgttattcatacgtatttctttctctctaattaaatttgttcttgttcatgtactaagaaaaattcaagaatatattttgtatatcctatcaacacataccgatccttgtgtcttgtggttgatctgaaagatcgtgatgtgagacattactgttcctggatacaatttacgaaaaatgctcgaatatacttgatagttcatcaagaggtatttatattttttttttgttcttttcgttttataatttaatatttatgcatgtggaggatcctagagtgtggtacgatgataatcttattaaatacttctgttgtacaccaaatttagtactacaaaaactgataagtctatcatcaagccaacttttttggtaaatacttagctatcaccttctctaacttgtggatcggtttaaactttgagtccaaggaccttttaaagtaggggtgttcataaaatagttaattcaatccaattcgtatgatccaatctaatccagtccataaagtgc

SEQ ID NO: 171462 - DNA, 814 bp, Cannabis sativa
taagtgttatcatcccacttcttgttaaagtgttaatgaacttgaagttctttttcaaataataatattaaatatataaataaatatttatttcaaaatttaaacgaagtaatatttttatgaagattgttatcgtcaaccttttattataactttttaattaattccgtacttaaaaaatatatattggaatattatttttcattttttttttcatagcagtatttgttatatttacatcataattcttataaatttttgaaattttttaaaaaatttaaaatattaaaaatatgtttgaaattgagtaaatactattttagaactcgtgttttgcaaaagttacagattggatcttttgttttgttaaataataaaatgaaccatatattttctaaaatggtacaaataaaaccttaaattaattttttatgaaaataaaacttaataataatctgacttagaggtattatgacaaaactgattaaatttcctacatctgtgttaggaattgtcttcaagttattatattaacaaaaaaaagttgttaaaaattaaactcaggatcttattataccattataaaaaatataaggtccattttatcatttaacaaaacagagagtcaaatctgtaacttttgcaaaacacatgattaaaaatggaatttaccctttaaaattttgtaaacacacgataaactaaaataacaagaattttgtttctgttactgtaaattatttagggtgcgtttaaaaagccacaatgtaattggatttgtgtgtaattggaggtaattacacaatttggcatg

SEQ ID NO: 171463 - DNA, 580 bp, Cannabis sativa
atggcaacgcgtgactattgaaacagattgtttaatggttgttcaagcaatacgaagctcaacaaaaatgatatccttgtttggacaagtcattgatgaatgtaaacaactctccttcgagttaaaacatgttcctatttattttgttaaacgatcagctaatgtggtagctcataactttgcaagagcttctgtattatttcctggtcgtatttttggtatggagtctgttcctaccgaattgttacactgtttggtaacagattttgttggttaataaaaatattattttccattcaaaaaaaaaagatagcccatgtaattaaaagtattgacatttaattatattattcacatgttattaaatagcatattataacattattttgccattatatattataaatagttaacattaatgtagtgttatgattcattatgttacatttattaatatgaatgaactaatctcaattctcatttctctgtgaggaaaaagaaaatgaacctgaagctggatctttgtgtttgtggtacatactactggtgttgttatgagaattgagaattgttgctgcca

SEQ ID NO: 171464 - DNA, 544 bp, Cannabis sativa
gcataaaacccaacagtcacatcagatcatgcatggttagtatgtaccttctgcctttcaacatcatggaagatgctatctaccagaagttacccggaggctctccctgtcagcgaggacagaaaggactccgtgatgctcattaataatttgctattgggaaggattagaagctataagtgttcaaggatggtagtaggttaatctgatccgagaagtctatagccagatgctcctggaacaaatttgggtgtgtcttattcggagctcaaggcgacagttgcatatcttctaacaccaaatcagatcttgtcccctgcgtcagaccttgataatgtgcgtatgtgcttatgtagctcttttttatccaacgacatgtctagacaccaactttgcaaggtgagctttttgggcaacacgtgtccttagtcccacaaattaggttgcggtaaccatacaccacacgatgagaaggctccctaccaaccaacggtcggatcgtcatgttgtcatcattagccattgtaacgtgttgaatacgaaa

SEQ ID NO: 171465 - DNA, 730 bp, Cannabis sativa
atattgtagtgtgcatagctgattaaactcaatttattatccttgtcctctatgtttccatcatttttgatttgtagccatccgttttcaagttggtttttgttcttaaatgaggcctctctttttttttcctttttttttttttttctcaggtctagtgaaaagcatgagtttcaataacattttccaatcagtttaacaacttgatttgttttagatttgtgacattctgcatatttcttgtattagattacaaagttttgctttcttttattcggaagcaattgtaaagagtatggcaactctatttcagtccatctatcaaaattgaaagaaactttttttatttttgtaatttttaaatatgcagcctattttttttttttttttaaataagtttagatatgggattttaaatatggcttcttttaatgttttacatttttttttggatttttttcacttttttttttcgaaattgatattggtaagtactgtaaattcgtttgtgtcgtactgaggttttcggagattttgtccagattgtgtccatattgtttactgagattttcgaaaactaattatatttagagcttaagaaaataagagataataaataataaacaaacgagttttttacgtgattcaggcgttaatgatccttagtctacgagtcaatagtattagcctctttgggcaagtgtttaggtattacaagtgtttacagtaa

SEQ ID NO: 171466 - DNA, 1359 bp, Cannabis sativa
agtcgagttgttggggtagcattagtaggagtggatatttataatattcattattttatgtatttttatcaagttggttaatgttactttgtttaagaataaagtggtttatttgttaccgtaattaatctatattataattatattcgtttctcttatgataattaactaggaaacaaatcgcacttcgcatgcggttgtaatttatttaatgaaaattaataaatcataaaattatattaaatttttagtaactattttactaattttttcgtattaatagatttaattttgataaatacatacattcaaaactcatcataaaactcacacaaaatagagatctaagaaaatcaattgataaatctatagaatactcatcatatgattgtcattcaaagccgatgttatcaccgtatctcacttgtagtcgccactacattcaaagtcgctatcattatcatatcttatttgtaattatcactatattgatcaaaataagtttgctctgtacataaaataaatcatatacttgagttaattaactactaacttttttatacataagtgaattgattttatatacatattttaggttttttttaatttttattttattttttcaaattcttaaattatacaattaataagtctctgatttgagatacaattaaatttagtgttagttttaacttttgatttaaaattgtatataaataattttttttattaattttaattgagagaattagataagactatgttgagtaatttttaattgtatagagaattaaatatttttttgaaacttacttgttagatatttataaagttttttttttaaaaaaattactgtgttttttatttaaaaaattagaaaattaaaaaaaaaatgagaaaatagataaataagttctaaataattagaaaaaaaattagaaaatagataaataggaaaaataggtttgaaattattgatatttttatttaaaattattaataattataaatagggtaagatttgttcgtaagtttttaattttttttttgtatatttatttatttatttattttttagataaatgcatagatatagatataggttttttaaaaaatttaatttaaaaaacttaaaaaaaaacgtgtgtttttaaaaaagtgattttatagttaatattttttaaattatataataagttaaaaaaaacgtatgaaacatatttcaaatatatatatattatttgatttttagaattaataaatagatttgtgttttttacattttataggaatattttattcaattaataattataaacttaataaaaaatttaaaaaatgagagaattaaggagagta

SEQ ID NO: 171467 - DNA, 1137 bp, Cannabis sativa
caatctgaattatacggaaattcacacttgtacgaattgaatgttaattaacatgtaaaaataaccaattcaatcttatccacatatatttttaaaaaaaataaaaatttacatattcaaataatattttaatataaaaaaaataatttgaaagtctaatacatataatataattatattttaaaatttaatatataaaatctatattccattcttatatatatattttttctacatacaatttaaaacaaaactaattttttttatacatacatacatttttttattcctttgaatttattattttatttattttaattttttgttagtgacataaaataacaataatttattttattttgttgctaattatgtgtaaaaaaatatttcatttttcataaatattaaatgatataatattaaaatgtaacaaatctaaaataaccaatccagtctggacttttacggattgaattagattggattggatttgagctattgtggattggatccaaaaataaaatccgcacttagtgcggatcagatgcactatgagcaaaatagtgcggattgaattggatgaacacctctacttaattagagatctttcaacaatttttctactctgtcttttaaaatatatcaccaaaaattattatttttctattttacaatatacttttatattatgttttcttaaaatatatcaccaaaactctacgtttttaaaattttattatattttattcatttcaaatatataatattaatatatacatgatctctatataaaaataattattaaaatttaaaccaattaataaaatatgtttagagaaataaataatattctataaattaaaacacaaatagtattatattttcaagaaactttaaaataaaaaaggtgtttaaaatatatgttgtagcgtgtttttttttgaatgaatggaacttctcatttggccttaagccaaaacaaaccaaaaatttaggtggtgtttggttggaaggaatggaaacatagaaaattgaatggaaatgggaatatgaataggaatgacactacttaaaaaatcttacttttagtcacaacaaaatttgtgactaaagataaaaaagttgtggctaattata

SEQ ID NO: 171468 - DNA, 734 bp, Cannabis sativa
ttattaatatatattatctttgtatttaaacaaaaacagtaaatacaataaataactttttaataaaaaaatatataataaataagcaacttgttgtatggatagtgattttaagtaaaatatataattgatttttcattgttttatttctataacctatgaatgattccataatataattgttaaatattaaatatttgaaaaattattatttttcaaaattaaacctttcaatttatttcaaatattacctatgtgatcatctcattctatctcttatatgcattaaatacatgtatcatccttctatccaaataatatgtctcatgtatgcccacaaattacataagcccacaacaaccatgaatcccattcatttacaatatattccttgcatctaaaaaaaatacaatttagtttttcttctctcaaaataataataataatatacttcatgtctaataatagtttacaaatatattaatttttttttattttttatggttttttaaatttaaaagtctatttttttgtggaattttatttcttacaatcaattattttcctatattttttccttccaatattttatttattttattcatttttatttgagatttttacactacgtaccaaatttaattactttttttatatttttaatgcttatcaatttattaaacatttttacaaacctatttttacttttttaaatctcaaaaattattataatt

SEQ ID NO: 171469 - DNA, 605 bp, Cannabis sativa
tttaggttcgtagtagtttttctagattttttttttcattaattcgaaacaacccttgttttgattgattctggtcgtcttctcaagtaaagtccccggaattattaatagtggtggtttctctttctggttgaatttttttatttcagttgcgttgggttgtcgcgtggttgcacgatggttgcctaggaagtatggatcttgagttgaaagtgggtgtaagtagtatttgtgtatttttttttatttggacggtatatttatttatttggccagctagaagtatttttataatattattacttttttttttttggttaaaactgaaaaacactcattataacaatataatagtatatttttgatcacttctgaataattatatattagttaataattacataataaatcaatataaataattatatttatattaattatagaaataattacatatattataatttatttataaacattaccaattattacaaaaaaaattgtaaaatataattattaaaataatacaattatttatgatacataagataatatagttatttataaaatatataatataaaattattatattttataatttttt

SEQ ID NO: 171470 - DNA, 570 bp, Cannabis sativa
ctagcgagttgaaacagatagttggacaaatgggtggagattgtccaagcttaaagtaaggctcgaattctatctttttgaattaattgttttatttctcgaacaatttagtttcaattttagtttaaaaaattttatttcctatttcatattattgcagacaattcattgtgacattttttagagtattaatttaaatttttctctttaaaaaggatttcattatgagttgtttttatgaaattgatctttatattctataacttgtatgtcaataccaatttatatttatctatttatcaatcttttatgtgttttacatttattattgatacaaaatttatggtataataatctccgcaaaaagataataccacataaatacttgaatttaaattcaatgcttttgtataattgtccattcttaaacaattattaagattttgtttgataaagatcttgtgatctgatttgggtgaaagaagttattaatatatgcagttcaaagatcttttatattgaactctagattatattcaaaacaccacagaatctctataacacacagat

SEQ ID NO: 171471 - DNA, 608 bp, Cannabis sativa
taaaattacacatattagttttttatatagttactttgtaaattaagactcctcaactactttaaagatgcgtttagaaagccaagagagaattgaaagtgaatatgattgaaggtaattacacaatcttatatatttgtttgatcatgtaattaaactagtcgaagttggttttaggttatttttagtattaaatttagattaattttagtatatttttaatttagtttaaatcgtgtttggagcattttcacgctttttatcttttattgttgtagatttaaaatagaagaagattagaaaatatcaaaggaataagatgaaaaaaaagataaaaaaaatctcataaaagatatataaaatagagaaattgtgcaagaaaataaagctaaaatttcaagtatgaattcgactatcttctgattatattttagaaaaagtcaaagcataaaagttttagctctctcttttatctttccggaacatcataaatcgtctaattctgataattatagagagggttatgaccaaaatactatcagtcgacgtagtaaaaaaatcaccattgaaacgaagccaggtagtgaaactccaacacgggccgcggc

SEQ ID NO: 171472 - DNA, 697 bp, Cannabis sativa
tttataaaaatattgttacactgatttcttttaaaagatattgtgtttttataaaagaacagtagaataacagtgaaaacataacacattatatacaatataaaacttacacagtttttttgaaaaaaaaaacacaatatttttgaaaaaaaattcgccctatagtatataagtaaaaaagttaaacatttcagtatgtggtgtaattattcctaataaaatgtacatatatatatatatttattgtccaacatttatatatgtaattgaaaattttattatttattagtttaatgaaaatttttgccaatatataaaaaattattaccagcaattaaggaaaaataaataagaatatgaaaagagaacatttattattataacggttaatatatatacttgaactcttatttaaattctaataaataaaatgaagaaactgtcatgaaaaatttataagacatatttctacattgtaaggcaaagataagttacagttgtattacaatagatatctcctagcaatatgcatgagaagatttcgtaagctgtaagggttaataggtttacaccaccgataaaaaaaattgagtccactttctcaagattaatagacacaatctactcatccactaatcaataaatattgatatgtagtctccctccatcttttactgcatccaaaaatgtcacgtat

SEQ ID NO: 171473 - DNA, 824 bp, Cannabis sativa
aaaatgaaaacacagagatccaaacaaattttaattctccccactagaaaaagaaacaaatcaaccaagattcagctcatatactaacaaagacccatgaaatttcatataacacaacaaaacccagattgcaaaaatgagccagatccaataaaagaatcgaagattgaaagaaaacccagaaaactaaaaccccaaaatagtaaaaattagtagatgaaaagaataaagaatcatactaagaaagtgaagtgtgtgtcggcaatggcaggtgagatagaatagagcatgaaagaagatgagatcagggcaaaaaaactttgaaagataaaatgaatattaaaggaaactgaacaaaccttcccgtttaggtggactgagaggggctgtgtttaggtcgactgagaggagctgtgtttaggtcgactgagaggggctgaaggcggcagtgcgactggagactgaaggcggcagtgcatttaggtcgactgtggagtctttcgcgtttaggtcgactgtggagtctttcgcttaggtcgtgaaatgatgaacaatattttatttaggtttagtttaagggatttcactttttgttgcgtctcttactaattctcactattgtattttgtgtcatttttaaaagctcggtaatataataatcgactattaataaacgacgcaaaatgaaacgtaaatatttaaattttttgcttatttgcgtcggtttagtttttagcgtcatatacctaaacgacgcaaataacatattattagtgtcatttttaaagagacgccccaaatatttcagtactattcacgtcggt

SEQ ID NO: 171474 - DNA, 812 bp, Cannabis sativa
ttgggcaaagagccaatttttctgttaggtcctatggtggtccgatgtcttcctgttgttgaaatgagtaaaagttgaagacgaaggtctgatgatagtccgatggtatcctgatgatatgatccgatgggggtctgatgatggtctgatggtgacccgatgccttcttgacgagcttaatgaatgagcataacatttataaacgtagatatggtctgatggtagtctgatggtcacttgatgctatttttttttttatgtacaaaaacataaaaaaaaaataggtagcatcgggccaccatcgcatccccatcagaccagcatcagtatagagaggaatagggagtatggaatatggtgaaattagaagagaagagaagagagaagggtataatgggtatgaatataaagtgtgcctatttttcaaattttagtaagcttgtgctaaaaaatttaatataaactaaatgtaaacatataaattcaaattttcctaacagaaaatgttattttttttttaaatattataatttaaatttaaatttattatacatatctcgcttttttttttatcttatattaaatgtggctttatattttttaaagaatcactattggacgtcttattgtagttactaaaaaatatttttctattattaatttttgtaaaaaagtagaaaaagtataaaatatttctaaaaaaagataaaagtattataaaattaaagtagtatgattaaacttaacttataattaacaaaagttttttttgttttttttgaatattattatgtttttttttgttttttttt

SEQ ID NO: 171475 - DNA, 847 bp, Cannabis sativa
atccggtggtactgttgaaaagtataaggcacatcttgttgccaaatgatttagacaaagaaaaaatatagatttctttgatacatattcacttgatactagaattacatatatttgtgtgcttattgctcttgttgctattcataatcttattgtgcaccaaaatagatgttaaaactgtatttttgaatggtgaattaagagaagagatttatatggaccaacctaaaggttttgttgttcttggtcaaaaacataaagtgtgtaaattaggtaaatccttgtatggtttgaaataggcacctaagcaatgtcttgagaaatttgataatcttgtcttatcacatggttttaaagtcaataaagtgacaaatacatttattataaatatgaaaatagtgtttgcactattatatgtttatatgtggatgacttactgatttttggatcaaatattcatgttgtgaataatatgaaatcagtattatgtgaaatttttacatgaaagatctaggtgaagcaactgtaattcttggtatataggtcactaggtctgaaaatagaatttctttggattaatctcactaaattgacaagatcttaaagaaatataattactttaactgtaaacctggtcgtacaccatatgatcccagtgtaaaattatttaagaacattgatgatggtgtaacacaatttaaatatgcgagcatcattggcaatctttggtatgccactgattgcactagacctgacatcgcctgggactattatgcaggtttactagtagacctagtgcagagcattggcatgctattgaaagggtcatgatgttgggttttatgcc

SEQ ID NO: 171476 - DNA, 595 bp, Cannabis sativa
aaattatatttcttttttaattatataaaatgatgattttgagaaattatttttaaaaattaatttattttacttaaattattatattatccttacattaatattaaaatgtataatgcaatttagagtggtaatgatttcaaatggtgggttctcgaaacaattttcattgtttagtttattgaaaaacaattcatgaaaaactaagatgatgcttaacttatttgtaatgatgatcaactttcttctccgctctataataatacaatttatgtctgttataatctgattattgagcaatttaagctcattaaacctccacctccttcgtctcagcgcttttctattatgactatttccacccccttctccagctacaagcttcagatccttgctttgggattccattaaagcattgataaattccaccagtgactggctaaacccaaggaaaaaagcccgcctcctgcggtgcttgaggctttttctaattgctccacatatggcttcatcacaggcgtcgatttcctggctcatttttgagttggccaaaagaacagataattctctctgaattgggaaaggaacatcaacc

SEQ ID NO: 171477 - DNA, 744 bp, Cannabis sativa
  modified_base (523)..(530): a, c, t, g, unknown or other
aatgaatatcttctttttgactatatacttagaggcagacgtatgtttcgtcaatatttgttcaatagtttttatccttatcttgcttaagactatatagtcagcgagtttcgaatattttctattaaacctgtatttaataataacgagttatattattctgcatttaatgatataaactttattatatcaggtgattcatattttatttgtaagacacgtgtcaatttttgtatgtattcgaatttcgggtataaaaaatataattactacatattaatttcttttaaaaaaagataataattaaatgaaattatttaatttttttagtattacatattaatatattgtaacaaaataaataaatacattagatcttgattatataaagaatatttaatatattgtatctcagaaaattaatatatcttaataataaaattatataccacatataaattataacaatactaaattaatactcaaaatatatatataacgctaacaaaattatatataccannnnnnnnatatgtatacataccaaaaaattaatatataatcattatatataataaaatagaaagtatgttaccatcttaaataaataatatatatagacaacaaaaatcatatatcatacaacaaaatatatatacctacagtaaaaaatcaaatatataaaataatataatattattaaaaaaattatatataccatattaacaaaattatatacaacta

SEQ ID NO: 171478 - DNA, 1070 bp, Cannabis sativa
aaaataaattccaacagaattttctttattgttttatattttggccagcaacaactctgcaatctttattgtattgaggatcgttttcttttgttgagaaacagcttcgattcttgttttcgattgaaattctgaagatcgttgccgaagcttttttcttcatcaatggtgttttctttcttgaggatctactcagatttgtttctgttatttacttacattaacacagaatcaaaattgtatacagattcataaatcattttttgatttcgatttgttgataattggagtttaggttgtattcgaaggttttttttatcgttaatgtttttttgtttttgtaaaaatgattcaaattgatttgcaaacttagcaaattgtgaatttatatgttcttgtatgtgcgtttgaatgtcacacagtgtttttaagattcctattccgtaatttgtggattaattggcacgtatgtttgattctgtcttttttttccattatcattttttttttcatttcaggtagaagaagcctacgtgtcacggtattaggaatagatttttttaattaaggttatttttgttttttttaaagaacctcggttcaggatagattaactccaaaggatatcggcatttacaggggaaatccctcccctttacagttcaaaacgctgctgtgagaatgttgagactcattagcaagcttgtctacattagagatgaaacatctctttaggaaaaaaacattacaaacagaaaaggaagacaataaaattaaaacagaagagaaggttgcaagcaagtgccagtcaggacatttcttctggtgtaaagcttcaacaagaaccttggagtctgaaatgatggagaagtcattccagtgatgttcgactgcccagttcaaagcaaacaaaatggcctccaactcagcggccagagcattgtagcatttgccattcgaagagcaccaaaaccaatcagtgcatctgtaacgtccctgcttcaagcctccattgggtccttacacctacggaatgaatggctcttctacacgagtacgtcactctggct

SEQ ID NO: 171479 - DNA, 538 bp, Cannabis sativa
ttttttaaaacttattgaatatgtcgatgtgttgtcaatgaaatgtggatatgttgtcaatagtaattgattgtttgagcataactggatttttcaattttttttaactgtatattgataggatgtcgacgtgatatctatggtttgtcgataatttttgttaagatatactctgttagaatatatttagtatgtcgatataatgtcgaccttttgtcgacattttttatgctttatctgatttattatatcctcaattatgttgacgggttgtcaacaattgtattatattttgttatttttttaattttgattatatgaatagaatgtcgacattttgtcgacaattttttgtgagggcgtctttgatattttttgttatatattttttcaaataactacaaaattcatagttctaacatccgaggattttactgaccgcatgacatatagaggcacaagtgctgtaatacccagaattaaaaaatggattagcaaaaccctaattagataattatgaataattgaggaattatat

SEQ ID NO: 171480 - DNA, 503 bp, Cannabis sativa
ataaaaatatataattacctaaatgttatattttggaaagaaaaaaaatttagctaactttatattttaagggcactatctactaatagtgttaagagttgaaggtaaaaatgttaataggttaattaggagttttattccctaaactttaatactaaattatatcctttgaacttttctgaccgtttaaaatctctcatgaattattgagattgttagatttaaggacttttgtttactttcatttaattttactattacagtgattgtttatctactaaactatgctcctcacattttgatatctaccaaataatgtccctcgaactttgacatatattagattatgctctctgaactttcaaccatatgttagacttcttttattaaaattagataaaagttcttaaatcgaacaatatcaatagttcatggaggatttttaacaaccttaaaaatttaggggcatgatttggtacatgtcaaaattcgggagtaaaaat

SEQ ID NO: 171481 - DNA, 597 bp, Cannabis sativa
aaaaaaaaagtgtttgctttagtattttattttatttcttactattgttgttgtttttttattatttttataatgaaaataataataataataataataatattgttgttgttgttgttttatgataaattgtccaagtcaaattttgttacataaaaaccgaaaaagcacgaaagactcaaactaaaggaaatataaaaaatattgactatagagttagttgggttttttgacacaggagcccaacacgattttggaaggtacgatatggtacgatgcggacacgatacaaaaaatatgatgtaaattgacatgacatgacatagtacaataaatctgaaagcacgatcatattagctggagagcacagcgcgtaagtatgaatatgtaaaatctaaaagcactatacgcaaaagtccaaaagcacaacatgcaaaaagcccaaattaaacccataaaaataaaataaaaatttcagtcaatttttttcggagtaattatataaaacacaatttttttttgtaaaaaaaattatatttttcacgtttaaagatttttttttgtatttttacggttttctatagaaataacacgaaa

SEQ ID NO: 171482 - DNA, 1133 bp, Cannabis sativa
aattgagatataaattttaaaaaacaaactatttaaaaaataggatattttgatggttaggatatcaattatatttaaaataaaataaaatatcttaagtttgaaaatattatggttacctaaccctaaaatttctattcaaactaaagttaacaacttttcaaaatttcatgttattttgacaaaagtataaaaattatgataaatatctaataagataaaatgtcaaaaactaatatttttctaatcttataatttaatttaataaaaactattttaaaataacaaatttaaaaaattgatatggttgacaaaccttaaaattctaactagattattcctaagttttgttggtattttaatattaaaataagatcatttcaaattttaataataaaataaataatatctgatctgataattaaaataaataaaacaaataaaaataataaaaaatttcaaagttaaccataaggctagtttatggaaaaattaaatttttaaattcaaaggctactaatatctaatactaatcttaattaattaaaaaaattaataaaattaattttattctaacatttagattcatatttaaaaatttgaattttacacaaaattctaccaaaattttactgaaatatgatctttgaatcaaaagatatcacaaaaataaaattggcatagggagtatacattgcatactccctgcgagcgcaagaggagtttggtgcgagggagagcctgtaatgcagccctgttggccgagtgagctcggcatgagcatgccttcgaataggacctttctgagacacctcggccacgaggttgtttgaacctcgatcatgaccgaggagtactcagcctccgcgcgtgcacacgatgcaccaattttgggatattttcactcaaattcaaaaaatcataactagttcataaaaatttttagttgagttctgtaaaggcacaaatttattaatttttcatctactttctaaaaaaaactttcaaaatgaaactaaaaatattttgcatcgtaaaatcgtaatttccatacaatcatcaaatatgcacataaaccaatatgaacacatccaaatcaatacaatcattattttaaatccatatttcatgaa

SEQ ID NO: 171483 - DNA, 572 bp, Cannabis sativa
ccatcttggctcacaccggcagaggtggtttttgatcaaacacctatttgggtgcggttcaagagcataccacctttctattggaacaagacaaatctgtaagaacttgcaggcaaagtttctgcagcttatgaactccccaaacatattgagaaaaactttaagagaggatcgtttgggatgggcactgttcgatttcgggcaactatagatgttaacaaacctctgttctcaggcttcttcttacgaagaacaggcatcaataatctttggattcaataccagtacaagaaattgccaaaaatttgctttaaatgtggagctctgtcacatggacagaagtattgtttcaaaactccaacggtgattaaggatgacaaaggggcactttttcctatgtttaatatatgagacctgaaacttacttgtactaataacgatatttacacgtcataaagtattagacactaaaaccttttaacatttctctaacactaacgataacacaatagatataagatatgataagataagatgatctttttataataaatattattgtcttgtttaga

SEQ ID NO: 171484 - DNA, 725 bp, Cannabis sativa
ttttaatttacataactaaaatataacttttgcatcatatagtaactttgataaaatttgtgtgggttacactgtttaacatatttttaataaacatatttaaaaatcatgaattttttttctatattttgttaattataaagatttttaattttaaatatttacacggatataaatattagacttttgtttgtatttattgaatcaatcaactaaataaatagtttattttaaatatttgtttgatgagtttattttttataaatttacataaagaaaataaaaaattatttaaattaacttgatttaattaataaatgttatttaaaacatttacgatatataatttgaatttcataataagtataaactaaaaatatctatctaattttaaatattctttctcatactacaaatactttaaaagtttaagtttagatttttattttattattttaaaattttaaattattttattcattaataataattaaaaaaataaaaataaattataactataaataatataaaaaaataaaatatctaaaatacctcaaaaaaaaatatatttaaaactatgttacttaattagtatatatataaaagagaggcagattaggtgaattcattggtactactattgatgattataataattataacgccttaatgctaaggcacgctacagtgttttttcaattacggtgcaatctttgctaatcaaa

SEQ ID NO: 171485 - DNA, 557 bp, Cannabis sativa
tttcttggcattaaagctttaccaagtgcttctggtatactcttaagtcagaaaaagtatattcaagatcttttttgtagggctgaaatgcaaggggcaaagactcacaatactcccatgaatagtggtttgaagctctctaactatggaagtgatcctgtggtcgatcctagtctataccgatccatagttggtgctcttcaatatggcaccattacaagacctgacatagcattcagggtaaacaaagtttgtcaattcatgcataatccccttcagtcacactggatagcagtcaagcgcattttaaggtatttggctggtactctcaactatggacttcatctacataaagtctctacctttaaacttgaagcttactgtgctgctgactggcatctgatcctgatgatagaagatcaacaacaggatattgtgtttacttgggcaataacttgatatcctggcaatctaaaaagcaaccaaccatctccaggtcttcaaccgaagctgaatttcgaagccttgcagcggttgtctctgaaataacctggatc

SEQ ID NO: 171486 - DNA, 641 bp, Cannabis sativa
cacaacccttgtggggcacatgtggcttcacccttaggtatttgaccgttaaatattaaatcattatcctcgtgtcatttctcgttggtatatttaaattaatttttttaaaataataacaaatttaatgacttggaccaatcaggaaatgccacgtgacaatttacttaacacttaatactcagtacttacaaaagttccagaattataacttaggtattattaacgccaaaaattaaacttaaatatttatttatagctgagagttaaacttagatatttagagcatctccaatgctaaaattttagaggatgcatggtgaggtagacatattatgtggcaaaatattgagatattataccattgaagagaaaaggatgtcattctagaaatttgcatagatgctatgttgtagcattgcttctattcattattttttaataaaaaattaaaactaaaaagttattgtagctaaaaattagaatatatatcaaataataatgtgtgagatcataattataatatttttaaagagtgctatagattggagtgtttttagaagtaagagtgtcaaaaatgatgtgaaagagagataaataaaatattatatttttagttaaggggaattaccccatatact

SEQ ID NO: 171487 - DNA, 687 bp, Cannabis sativa
gtttggttttagttagttagggcgccacattgggtagggccggtaaaacaggttagacacgataacacgactcgaaacccgcacaacagttagcgggtttgagtttaccttaaatgagttcgggtcgtgttcgggttgactcgtctaacccgtttattaataaacgagtcgtgtttgggttgatacggctaacacgatattgatttgttaatgacctatttaaagttattttagtactttaacgtgtcataaataggttataaacatgttgaatacttcataaacgtgttattggttgacatgtttaaacaaaatatgcttataaatgggttacgcgggtcgtgttgtgtcaacccgtttataaacaggtcgtgtccggattttattttttaacacgattattaaacaggtcatgttcgggtcaagcatgtacttgttatatatgggtctcgacacgatacgaacatggagaataataaaatttgtactgaaatagttattcattttggtactgaacgtgtaattaaaattttgttataatatattatcccattaacatatacaattaaaatttttctaatagattttattacaacaaatataaaatttatccaattactaaaattagggatacacatttggggcccgcccgacctggacctagtaaactcagtactcgaaaaaaaa

SEQ ID NO: 171488 - DNA, 800 bp, Cannabis sativa
  modified_base (326)..(331): a, c, t, g, unknown or other
aaaacacggtttttcaatatctatatggtatatttctttttgataaaaatatatatttatatataagggtgcactcttaatgggtattacacatgaatgggtagtattgaaaaaaaaaatgagttttcatgattaatatttttatttaattagaaaagtttttcatttttacattatatggattggaattgttctatcagctgaaaaaaaaaataataaaaaaaaatcggtaaaaaagtgataaaaaagttgagtttgacttaaaatatttttcatataaacatatttttgatatagtgtaaaaaataggtattttttgatatttnnnnnnattaagtagctaaattaagtatagaaattcaaatttctcttttattattagctatcggaccaaaatctaataattcaatatttttaaaattattatcacataaatttgttttgtactcatcaatgggtaatacccattgagaagtgttccttatatatatgcacaaattaagaaatactgtgtgtttctttttagacagaacatttaagacattactacactagactaatcattttattacttggcaaataacatattatatgcatttgaataggggtgttcacggattggtttggtccagattttcatagtttttgaaccaaaccaatataacaattttttgaatattagaaactaaatcagacaattaatttctcaaaccaaaccattaagaacggtttgatttggttcgaaatcacggtttaagtggaatttataattatttttatttttttaagtaattgtacta

SEQ ID NO: 171489 - DNA, 690 bp, Cannabis sativa
tttaataattaattcagaaatactgaaaaataataaagagtttacactttcagattttttaaattttttttatggatttcttaatcctttcataccactattttagattattccaaaaaatacgatataatttttatatatgtttattatttatttttatcatatatagtttgtatataaaatttaaaatatatttcacatagataaaatatataataacttgtaaataattttttaaatgcacatatagtgtaattaaatactataaagtacataaaattgtaaattttccttattttccatataggtgagtttttatttttttattttttttaatattgattttgttaatatattttaaattttataagaatttaaataaaaaaattattaaaaatttattcactaaatttagtaaaaatgtaatattttgaattatcatacataataagcttttaaaattaaaataatattaatttaataatagttacttaaattaattctaagaaaagtaatatgacaataaaattataattatttttaaaattactaaaaaatttatatcgatattttagaaattaaaatttgtattaaattattatttagcataaataattttacattatttaagtattttttatattattattttaattatttattaaataaaaatatgataaattattttat

SEQ ID NO: 171490 - DNA, 939 bp, Cannabis sativa
atatatatatgtatatatatcgattcccataaatatcatgatttatgtatacatgcatatactatgataaaacaaaataaagaagtgtaactctttagagtccaatcgcatgcttactttaaaggatgaatatgtattacatatatttaattgtcaaatatatatttatatattgcatgttcatggcatcagttatatatatgtgtgtccatggcattgcctacgtgggcagcaaccacaaaaagagaagaaaaataataaaagagagcagtgactcacatatatttaagtgcatgtaaaattttgaattaaatcccaaaagccttaagagaatcccacgatagattcgaaaaaagcatgcacactgatacaaatttacaaacgcagtaattatccttgaggatatatatgatgtaatagctatatatatattgtcgaatctatctatctatatatataaaggagaagtatgaggcggtgacatgtcagtctaaaaatactttaaagtcatctttcttttttctctttaattctcttaattttttaattttttaattagttaattaatctcatatttcttttttaattttttaatattattattaataattttttttaaaaaaaaaatctatatatataaaaaagagatatgagacaatgacatgacgctataaaattactccaaataacattacttcactacaaaaaaataagtctatgtcggcgggcccggccctccgttattgatctatctcgacgggtctggcccgccgtaaatttcaatgccgagattggtggggaatctatctcggcggtcccagcccttcgttattggggtcattctcggcgggcaaagtccgccgttattggggtcattctcggcagtctatgcccgtcgagataggtatatttttattctaatttactattttttgacac

SEQ ID NO: 171491 - DNA, 712 bp, Cannabis sativa
gagagagagagtcactacaacaaaaactatcatcacgaagaactttttcattccaaaaaatctcatagtttgttccaaaagattatttggtgcgactggtcattcctgataactcgtgcttgaaaatcgatatcaggaacaaaatatattgacgtgcttgatgctaaaatatccgaaacaaaaataaattgttcctaaaaagtaaaagtcgttccaaaaaattaggctagaaatttagtttttacacattatcaggaacgactgttttgttatcaggaacgaaattgttgttcctggtcatttttcaaaataattaaatttatttaaattaaattaaatattaattttttcttttaatatcacatcttttttattaaacaaggtaaaatgaaaagtttatataatcaaatgaattatttaataaaagttagttatgaatttaaattttaatatgaggtattttattaagcattgattgtgaaatttgtctatatatgtttatgggtaattagtttctccatttttgttgattaaacttttaatttgttctttaccaataacgtaaattattccatataatattaattaattagtatggatcgacaaaattaacatatctttatcccttcacctctacctccatttgtatatatgactggcctagtaatttgcttagatgtggcccaaggatgcttttatatatatatatata

SEQ ID NO: 171492 - DNA, 1240 bp, Cannabis sativa
ttcttttttatcttcactactttcgaagtcatcactccaagtaacattaaaacccttttttatttttctttaaggtattggcacatttagattggatatgaccatacccttcacactctctacattgaataccctttttattgttagagataaagggtttagaggaattgttactagaattgttaccacttggagttttttgagaaattctttttatttcccacagatttcatgtatttttggaaattttttgtcaacaaggccatttcatcattagaaacatcattttcaaaaactttaagtacaatacctttgcttttctcactcaaggaactttgcttacctttttttttatttgttgatttaactaaaaaattcttatagaacccatgagttcctcaacctttattttgctaaaatcttttgcctcttccattgctagcaattttttgaaccaagacagattcatttaatttttctcccaaagtaaagtactcattagaaatatcagataatctcccataaaatttagataaagtttcagtttcagtttctgacattcttaattcatcaaatctagtttgcaacatggtaaacatgatctttttacatcagcggtaccctcaaactgagtttgaaggttttcccacgcgtcctttgcagtttcacaagatgaaattaattaaataaaaccttcaccgacaccattaaaaatagcatgtaaagccttattgttataaccaaataattttttatctttagtggtccaattgagttcaagttttatcttagtattacctttctcgtcattttcactaggttgtgatcagcctgtaaatatagctctccaagccttctcatcttgtgacttaatgaatattctcatcctgaccttctaatatggataatttgagcattcaacagaggtcgagtaatggagcttccttttgcaaacaaagatatctcacacaaaataaattaaacgaaataatttcaagatctcactaagagtttagtgacccgctcttataccactcttataccaattgaaattctacgtattttaatattcccagttttattatttattaaatacttaattaaatgtggaataatgaaactggtactgaaatagtttttctgtagctaaagaagacaactctatatctccagaagaaaccagaaaaacaaacagtacagaaaagtaaaagcacacaagatttttgtacgtggtttcaac

SEQ ID NO: 171493 - DNA, 568 bp, Cannabis sativa
ccacacaaaagcgaaggaacccattattgcaactgcactgtcggactgtaagtgagcaacgattgttttcgagcaaaaaaacgttaataccacccaccattatatatacctctccatcacatcactttatttcttatttttatcttacatatattaatatatctataatataacataacataacatgtatataaagatgaattgactttttggttttgattcaactattttgttttttgtgattaatttttttttctcttttttttttttttatgtaactttaaagtattaatgttttaaatttaaataatttaatatttattttttaattttataatttttttccacttaatatatttataaactcttcaatctttaaaaaaataaaattttaaatttatatttttaaaatatttaataattatttatttaaaaaataattctcttaaaagttaatctttatcattatatttagcaacttcctctagactcatactctttattttatttttatatatttattttaaattatatttaatactttaaaaaaaaaaaaagttttattttt

SEQ ID NO: 171494 - DNA, 816 bp, Cannabis sativa
  modified_base (766)..(769): a, c, t, g, unknown or other
ctaacactatgtaagtgaatgctctcatttcaaataaagaaatatctttttttagactatttattatttacattatttttttccacataaaaaaaatcattaattttttcatattttttaagaattaaaaataaattacttaaatattatgttaaatattatggtatatctatattgttttgttatatgtaatagttgtatataattttgttagcataatacaaatattttaatgtatgtatataattttattgacatgctaaatatatttcataattattttttatattttaattgtatgatatattatttattttaatactatttaattatttctattttattatatacaatagggtatataattttattgtcatagtatatatattttagttgtggtatatagttggttagtataatatatatatatattagtaatatatatttttattattattgttagtatatatattttggtgcatggtatatgtattttctgttatacgatatatcatttttttaaataatatttaagttctattttttattgtccttttgttgacatgatatataattttattagcatcttatatatttttgtttttatttgttgttcttatatatatttctattataatgtatatatttttgttatatgatatataaattttattctgttgaccgaaatttttggcaaccaatttaataatatgtaagaaagctttagaaagattaaagcacgagaattttacgtggttggggcatnnnngagccttagtccacgagtctttagtatttatgagagtatttattaca

SEQ ID NO: 171495 - DNA, 1029 bp, Cannabis sativa
acagtgatattatttattgcttttgcatcatgttcataatgtttttgacaagatcattctctgaaaaaagaaaatatgcaaatattcacttgaaagtaggatcatctatattcaaacatatacattcagggattgatatgagttatcgttaagttcttagaagatcactctagattataccttgtataaataaatttgaaatgtttgagaaacttcataaatttctagcaatgttagaaaacattaaggtaagttgttaaagatcttgcgaattgataagggtggagaaatatttggttatgaagttcaaatatatttaagtcaaacttcgaattatatccaaaattacctccttataaattcagattgcatattgatgaaagtaaaatgtctatgattagttactagcaactgcctacgtccttgtagggaaatagcctagtgataggaaagcttcaaaatgatggaatggttgtgtacaccattactagattcatggatgtcttgatcatgaacttaagaaaagctagagctgttaacttaagtttgcaagtttgatagctattctaatgtgattaggggtggaccatcctatggtcatcaagatatgaaactatttatttcaataaatattacttttccaagaatatgactaaatccgagaacaaagtggcaaagtagatgagatatttttattctaaagtgttattctatgtaagatggtcccactgcctctgttgtctaaacataaccgatgagtataataccattaatgttccaagataaaaagtcacggtaccttatcgcagtaggagggtttcaagcaacccctattatgacttagaagacacatgtgataaaaatctattgttagtttaaacaagtaatggatagttagaacaaggaactaagaagctgtttggaattgagcaagacactgaagatgttagccatgaatggattgatcttgatgtagctgtttggaatgatttttaaattttttgtagattgataaaaatttagaagact

SEQ ID NO: 171496 - DNA, 861 bp, Cannabis sativa
gtcgttaaaaatacttcctgaattattaaaattattgtatttaaagatttttttttaattttagtaaaaaagtctaacatggatgaaagtacatagacagatttagtacatgtgaaaatttgaggggcatgatttggtagatattaaaatttagagagcatgattgaatatataaacaatcactaaaatagtaaaattaaacaaaattagacaaaagttcttaaatctaacaatcccaatagttctatcccaatagttctggagacatgattacatctcaaagttcagagaacaaaaatcctaataaacctaattaaaaattaaattgaaatatttatataataaattattctatttataattattaaaagtaatatattgtttttataattttatctctcattcacctaaattttaatacatttttctgcaaaaagcatttcgatgataaataacttcaaaaattaaccactatgatttcgcatcacatattaaattaatgaatttttttttgttaaaaataactttctttaaaaaaagaaaatatcacattattttctttttgcaacacttaatatctaaaatttttaacaaaattatttaaattgataactataggagatactctaatatattaagcaccataacaaataatatacccattattaatatcttacctaatatataaaatgtctatctaacctattttgttgtgtacttaacagattattatatatttaacagaatattctaaaaagaaggttaactttaacagacacctattctatttataaagattgttcacagaccaagacaaccattcacaaacacccattggcatatcctattctttcgcacaag

SEQ ID NO: 171497 - DNA, 861 bp, Cannabis sativa
gcaactacttctgcacttgcttgataatgctttctctttcggatgataagagagcaagtgtgagtgttacaataagttcttattgagaaatgctatgagttgctaacttttgctacacgcactgcctatttgcatgacttgtaaatgcatttcatcacatataatgacttggtagattttgcaattttcatctcaaagcaagccttcatcgcaatatctttcaacgtcgaactttacctcatctttattcttgaattcttgaacaattgccaaattcgacccatctgtgaaactaaatgtatcttcacttatgagttgattttgttggtctgactgctccaacggatagtcaaatgggtcgctgagattttcagtcatcaattcttcttgtgaacggtttggagttggagatgatcctattgtgcttttgttaagatgatccaaaaattcacaatcgagattaacaccactttcacctggtgcataagcaatatcacaaacattttcttcaaagtagaattcacgatcaaagtagttatctactaagggttgctcaatttcttttgtgcaacttccaatatccttttcacctctatctttatttataagctctacatgtagtgcaattctgcgattgttctctccacaatccaaaagataagctgcaagacattcatcccctcgtaaaataagtggcagcatgttttctccaagtgttacagataagtaacttatttttaattcgatttcattttgatttgctccaatcttcttatacaatttatccaataacatctcaaatgtagtgctcgaatcatcgacaattatagatataactttcttattttttggcgaccactt

SEQ ID NO: 171498 - DNA, 743 bp, Cannabis sativa
gggcataaaacccaacagtaggctggatgatggatattgttttcttccctgatcagtacgacacttagaggatgctctgtaacaaccatgtatatccctagttcttctccgtctagaggctttgaaagtacgggatgttttgcaagttgtccttttagctcttgaaaggcgttctcacattcctccgtccattcaaatttcttgtttcctcgcaggatgttgaagaaaggaacacacttgtctgttgactttgaaaaaaatctactgagtgtggctatccgacaagttaaactttggcattctttgatctttgtaggcgatttcatatccaagaggtcttgaattttttctggatcgacttcaatacctcgagcattaacaataaaaccaagaaacttactcgagctgaccccaaaggagcactttaagggattgagtttcatgttgtatttcctaagggctttgaagcattcgtctaggtcatctatatgcccccagctttcctggatttgacgagcatgtcatccacgtatacctccatatttcgtccaatctgatctttgaacattttctttacctatctttggtatgtagccccagcgttctttagaccaaatgacatgaccttctaacagtatagacccatatccgttcggaaacttgtatgttcatggtccagtggatgcattttgatttgattatacctcgaataggcgtcaataaagcttaggatctcgtgcccg

SEQ ID NO: 171499 - DNA, 795 bp, Cannabis sativa
taacctacaccacatcaaaggaaataaatcaaacacaaggtaaaacctgacctttaatccttagtcaaagcacaagtttgacccctgattttaaaccccacaaacggcaacccctatttcatgtactacaagtcgtttctatattatttagggcgtctccaacggagaaactcaaatttggtgttaaatcaacaccaaaaaactactattataacactaatcttttttttcaattccaaccacaacactaaaaattacaccaaattttatattctttattattttattattttataatataataagaatattttaatactaaatataagagtgaaactatactatatttggtgttttagtgtcccattggagatggccttagaaaccctaaattgcatcagacatatatattctctttttagcattcaaacactcaaacacacacaacccagcctccactttgaaaaccctagcagagaaaccctagagctgccttcgtcttcgatgttcttctctgaagaacaagaagacagcagtacaattaacagcccagaaaaaccagaaattaaacccagaaatcaccctatgcccagttcgaacaacccccttaaaaccgagccttgttcttcgttgttcttctctgaagaacacgaagaacaccaacaaaatacccagaaattcccaagcaataattaaataaaacacaacaataaaagtgcaaaaaagaaaaggaagaaataacaccgggttttatagaggttccccaaaatcgttctgggtacgtcctcttcgagc

SEQ ID NO: 171500 - DNA, 1009 bp, Cannabis sativa
  modified_base (630)..(636): a, c, t, g, unknown or other
tataaattctgtaaaattcagaacatattcttactcacaattataatgatttcatcacagtggaaagtaattgtgattatattcttcaaagtctttagtcccatgattaatcagtatactggatttacattcacatgataatgaacgataaagtttacttacacttatataagtggaatgtcgtttttaagtcgttagcaaagtatactagcattggatatattggatatacatcagagtggacggatgttgatagtggaaaagatatcataaactgactgttatatcttttctaagtcaatgttacttagttaattttaggtcaacatttcttaatcttgagatggttaggttctagcttaattgtattacttgtgttctttgacttattcgttaaagatgagcaaatggatcggcccaatacttacatcttgggaacatggtagtgcaattgagtgggaacgctaatcatagatatgaatctatagcttctataacaattttgaggtgaaatgataatttcctttgagcttggcttaacagacataaatggacgagttcttatttcagtaattatattagtttacttaaatatcatttataggaagcgaagtgttttaaggataaaannnnnnnaagggtaaaacagtaaatttgtcctttactcgatgtaaatcattagtagaggatctttgattatttggattgaaataatagataattcatagcgtttctattcttggtgaatagagtattctatataatcaggattgtgattctgaatcgatagtggagttaggaggaattaataagatagagaatttaattagtcatttctagatctacttattaggagctttattatacagacccatggtccacacactagttgagatcatagtgtcttgtagactcaatttattagttttaattaatcgataagaattttgaataagactatatcttgtttgtgagttttcactaagcaatgacttatttgagaagaaaa

SEQ ID NO: 171501 - DNA, 1227 bp, Cannabis sativa
tacatatatatatcatcattatgagaattattaaaaggtagcactagttatgttagacaatgagttatgctggtttgaagaggttccagcaccgattgttgaagtcttctcgggaaagtcctaatgtgatcgtgatcacatttttcaaaaaaaaaaaaaaaaaaaaaaggccaccactggtgcctagcaccctccttagttttataccaatatttatcgggtactatatgacttaagaaaataacttttagggaatatcgctaaccgattgtagagccccacttatagaagatgttggacaccattggtacccaatagcaatactctattattaataaataaactataaggttttttaatatatcgtcctatattttttgggcttgttgtgtgtcatgcctttcaacttaggtctattcgtgcttacaatatcgtgcctttcatccttctcgtgttgtgtcgtgctgaatgatatctttttcatgacatgtcgtgctaatttgtagcatcatgttgtgttgtgtccaaactcatattttttcatgtctagtcgtgaggggcgaagctagaaataaaatttaggtgaggagattatgtatttttatagtgaaatgctaagcatctatggtgcctagcactcttccgtcataaactattagtgtaatttaatattgaatctcactaattttacttttaataatgattatagaaaattaataactatttataggcaccattttagaaaaaataaataacctaagatactaatttgtagataatatatatcacaataataatatataataattaggtatacatgcctgattgatccatagcaattactgtaatctgatagtgcaatactatcaactaagtcttccttcataataaatcagaagcaattttatttatctaattatcaaaagggtatacaactgtgatgagacgatatgtatttatagagttagggaggggacttagctacataaccctagttgtaccgggtctactcatcaaaggcttcagttaagtagaaaagtccacacttctgcttcaactagactttacacacatagatgttaagcccattaactattaatcactaacaatatgggctaacacaataaagactatccaatttactgaatttttaataaaactaataaaatttaatgtaagcccaaataaaaagtctaacattcttccacttgggctacattaatttta

SEQ ID NO: 171502 - DNA, 906 bp, Cannabis sativa
ttgagggtgttgatttttttttttcttctagaagaattacctcatcatgatttgggagtttttcaacattgtcttgttgaggtttaagatttatttcttgatcaatgacaggtgtgaaagcctgaacattatcgaaaatgatagtaggaaatgaatttgaattcactttcctccacaaaagcaatgtctctaaccttatttctcccccaaattcaacgtccttaaaaaatattgcatttcccgtctcaaaaatatttctaaatgtgggatcataaaacttatagcccatagatcactcagattaaccaataaagtagttgctaactatgttagagtctaatttcttttcatgtggcatataagaccttggcttagctggacatccccaaatgaaaaaattctttagactaggctttcgaccttaaatatcataaggtgtttttacaactgctttagctggtactctatttaaaatgtaagttattgtctttaatgcttctccccagagagacttaggttagctacaatgagcaatcatcctccttaccatatccttaagagtcctatattatcttttaggaaataaatcattcatgctaggtgatcctgacatggtgtactgtgggatagtactacattcctctaggaatttagcaaacggtcctggaagttgttcacttgagtcgtcatatctaccatagtactcaccaccatgatcagatttgactttttttaaaccttttgttgagttgattcttagctcagctttgtaagctttgaacacatccacaacagaaatgtttaatgaatgagatgttcccataacgtgagtaattgtctatgaatgatgatataagatattgttgatcattccaagataccgtagggaatgacccacaaatatct

SEQ ID NO: 171503 - DNA, 555 bp, Cannabis sativa
  modified_base (179)..(180): a, c, t, g, unknown or other
  modified_base (238)..(250): a, c, t, g, unknown or other
tcagaaattgacttcgaaaaaaaagaaagaaaattgaatgcaagataacatatccacccaaagatgtcactgaaacccttatgtgtgttgaaatttattttattaggatctagatttactaaaatgtatgtttcattaacactctaaatatgaattctctaatacgatgaaattaaacnnataagagtttagaaaaccttacataaatatgaattctctaatacgatgaaattaaacnnnnnnnnnnnnngaaaaccttacattgatggcaacgaaataatatggctccttctactcagatctctaacccttgttcctttctctcgcagaataataacaagatttgagcttgtatctctttctctccttcgggtttgttaacactatcttctgcactatgattgagtacttgacttgctatgtgggcatggtacactatcactatggctcgaattgatgaagaacaatgaataaggtataaatcactatagaaatgagtctctcatctagtagtggtcagagaatgaaactaggtttagtttggttgaagtaagt

SEQ ID NO: 171504 - DNA, 713 bp, Cannabis sativa
tcgccacgatgtgggaacctgattgttgccgctgcagccacaaccttgctcgttgcggcaagaccctgctttccctaggaatttttgggtttttattttcgctataacttttgacttgggactttatttgggacgttagaaagcttgtttcgggctctatattcttatctataagttaaaagcaaattatgtgattatgtgaaattgaattttgggattaaccctatttgcaaaatcccaggaatgtgtaactaggattatcggcgcttgctcaggaacactcgggggttttgaatctccacatacttgggataccaggtaagacagtagttactacgtagagttaagtgctgtggcgctcatatttgatattgtgctagcaattgagtgagaaactgatgataggtttattaccctaaagtgagcggttatacgatctagggttattactctagtgtttaaatgattttgaatgcaatactatgttgtatatgttaagataaagaattatgcgggtaaggcataattaggttagactcggtaatcaaaatcaagataaaccactctaaggccttattgtaaattgacgtgtgaatgtaacacgtaggtctatgttaaatagacaatagatgccggggcatcaatatttatttgaattgacagtatattgcatattgttatttatactgtcttgctgggcttggcttacgggt

SEQ ID NO: 171505 - DNA, 554 bp, Cannabis sativa
agacgttcgaatgttattcacaagttgcagaattctgatggtgaatgggtcggctgggaagatggtctccctaccgtgattgtgaattatttccagcacttatttatgcgttcggatggtgattattcttcgcttctcaactgtgtttcccaatcggttactgaagcccaaaataattcgttacttgaggaggtaactcgtgaggaaattaagaaggcgttgctccaaatgcatcctgacaaggctcccggacctgatggtatgactcctggattttatcaaaaattttggagcttggttggtgatgatgtgatgcggttggttcagaatttctttgctactggtgagtttccttctgttttgaatgaaactaatattgttcttgttcctaagaagaagagtcctgaacaaatgggtgatcttcggcctatatcgctctgtaatgtcatttacaaagttgtgtctaaggtgatcgcaaatagactcaaagttgttttgccgaatgtcatatcttccaatcaaagtgcattcttgccaggacggttaatttctga

SEQ ID NO: 171506 - DNA, 603 bp, Cannabis sativa
aatcaacatataccttaaaaaaaaggcatgattgagaaatcattctatataaacaactcaataaaaaatgaagtattacaattgcttgaaccaataaatatctatttccttcaactttttcaggatagccatatagctaatctatctttaacatcttgctgaattctattacaacttaccatgatgctttgtacaccaaggcaactttcgatacactataaacttgcctctgtaatttagagatttttgctctattaatcctcagaataatgttcaaatctgtgctcaaacatctccatccgagccaaatcttgttgaaataacagttaaagtaaagatacttcacagattcagtctgaacatcacacaataaacatgtatttgttagatagatattaaattttattagtctatctcttgtttgcaatctttataaagtagcaagagtataaagcaatgctttgaaatacatattacatagtttctcccaaacttgattagcccaactcaccttttcatcagtaggaagcaacatgtgacagtcagtagtcccgtgatccgtaaggggaaacaacgggtaagctgtgcaatcccacaccgcct

SEQ ID NO: 171507 - DNA, 625 bp, Cannabis sativa
tgaaatactttgcggaaaaaaactctaatctccaattaatcaaacttttcttatcaagggttttactttgatcatacggtaaattaatgtataggtgttcacagattggtctggtccgaatttttatttttttttgaaccaaataaatataacagttttttgaatattggaaaccaaaccagactaataaatttttcaaataaaaccaaaccaaactttaagaacggtttgatttggttcgaaaacatagtttaagtgaaatttataattattcatattttttttaagtaattgtactatttttactaaatttttaattttatttttcaaaatatatatttaacatgataagtaatatatctataacatataaataacaatataaaaatattctcaaaagtcaaacataacagaaaatctaaaattaatgtaataaaaaatttgacacacaaaaatgtgtaaaattatacatatagtcatgtataaaatatatataaattaataatttattataaacggtcctgtccgcttcggtttaaccattaactatttattacaaaccgcaaccgaaccattatgcggtaaacggtccggattaactagaccaccaaaaatggtttcccca

SEQ ID NO: 171508 - DNA, 1341 bp, Cannabis sativa
tttgaaagacatagatggaatgtcgtttcctaattcttcattaataagagatttaggtaatagactaatcaacgaagaacttgattatgacagagaacaattaaatatattgcatgagaaatcatttgcttctctaaatccttgccaaaaggagcttatgaagcaataatgcattctgtagaaaatgaacaaggaaatttattttttatcaattgacatggtggcactggtaaaatatttttatggattacaattattgcaaagcttaggtctcaatccaaaatagtcttgtttgtagcaacttcaggaatagctgctttattacctaatggtaggacagcacattcaagatttcatattcctttagatgttacaacagagtcaacttgtgaaattcgtaaccctattagttggacttttcatgaaaacttcattgatcatttgggatgaagtgcctatggtaaataaattctattttcaagctttagataagaccttaagagatattttatgaacaaagtttgaaagtagctctaaaaaaccttttggaggacttgcaatagtatgcgatggtgattttcgacaaatattaccaattgttccaaaaggtacaagagctgacgtcgttggtgcttctctcaactcatcatacttgtggccaatttttaaaatatatgagctaaactaaaatatgaggctatataatggaagtttaagtggatctgaggctgctaaaatagctacttttaataaatggttgttgtagataggagatggttcattatatgatgacattgacagagaattaattaaacttccttctgatatatgcaaaaattcatttcaagattcagtgaaatccatagttgaagctatctacccatcacttttacaaaactacaacgatcctgcatatttaaatgaaagagcaatattaacactaaaaaataaaatggtccatgaattgaataaaatgattatgaatattataccaggtgaagggagaatatattatagctcagatactctatgcaaagcaagtgtaaggacaattgatgatgatcttttgtatccacctaaatttttgcatagtttgaaatttaatggtataccaaatcacgacattcgacttaaggaaggtgttccattaatgctccttaaaaatttaaatcaaacggaaggcttatgcaatggcacaagattgattgttacacatcttggaaaatggttcattaaagctaacattatttttggaacaaatatcggtgaaaaggtcacaatcccaagaattatcatgtctcccaacgaatcgaaatggccattcaagcttaatagacgaca

SEQ ID NO: 171509 - DNA, 569 bp, Cannabis sativa
tatcatatataatttatttaacaaaaaagctatgtagtataggtagtcactaattttttatcaattataaaaacttaatttatgtttatattatttgagatacatttttgattatttctaaaatttattttgaaaatcttaatatgccaaattagttacatttagattatattatatatatatcttataattatttaaagtatattttgataaccttttataaactaatgaacaaattatcatgctatcaaaaaattactatgtagtaattcaacatatcaaaaatacactttttgttatgtttttttttttaaaaaaaaaaaaataactaattgttacttttacattttttttttatttttacttcatattgtgtgagataccttttagttactttaaaattgtaaatatcttaatatacaaattacttattaagttacatattagtaaccttcaagtttatctagaaactaataaattgtaaactaccatatttagcaaatagttccatttaatataagaaaatttataaattatatgctttatattaaataattatgtgcataaaa

SEQ ID NO: 171510 - DNA, 671 bp, Cannabis sativa
aataaaaaagagcattttgttatgcagttgtttgaatgcatttcgcttctaataattaattattaaaaattaactctaattattattaataagagtttaatttcaaaaaaaaaattaattattaaaaattattcgatttacaaaaatatagagaaaaaaaaaaagaaataagttttaatacatgtgacatataaatttaattgcaataaatataacttttttcaaaaaaaaaaaaattaaatataaaataaattatcatagataagaattaataaaagtcactttttaaaaaaattaaaaactcatatataaatttttacttctatataataaaaaccagcattttagatgaaaaaattagttttttgataaaaaaaaaatcaatttcttgatgaagaaattagttaaaaataatttttttaagtcaatgaatcaagaaaccagttagttactttcatgtaatcgaaactagtttctaagtgaataaatcaattacaaataccaaaattcatataaattttacttgctttgtattttagtttaccgtatagaacaaatccaactcaatactaaaactaaaaccaattataaatttctcataagctccaaaactcgaccatcatctcattaccaaaacagtcattatccactaagacaaaaaaaatagaatg

SEQ ID NO: 171511 - DNA, 565 bp, Cannabis sativa
aaaaaaaaaaaaaaaatacaccaacccatatccaaaaatgcaaccaaaaaggaaaagtccccataaaaaaacaaaaggaaacacaataattaaaatgcaataaaaacatatttccacaaataaaaaactaaaagaaaaacaagccaaaaaatcaaaaaatatgtcccccttttcttgaatttttttcaatataagcccatttttttttgtatatatataaacaagacaaaaaaaaaacaacaacaaagaacacataacgcatcaatcaacgctttagagcgagaatagtgtctaagaaaataatgaaccataacaaaaaaaataagaagaatttttaagaaagctcaattgacaatgtgggtcacatatttttttattttattttttaaaagaaaaatagaaaaaaaataaccttgatatttttgccaacaaaaagtacagaatgtcctcttgtccttgttcctaatgaaaaaatcaaactcataagaatagtcaaaaatgattttatcaagctaatgaactagtggagtgatgtaacacactaactagcataggcgtattacgt

SEQ ID NO: 171512 - DNA, 847 bp, Cannabis sativa
  modified_base (800)..(806): a, c, t, g, unknown or other
tttttttttttttgtattttttatcgatttagcttgaacaatttacaaaaaaaaattgtacagccttaatattaggataagttgagaaatatttttttttgtatccattaattaaaaataccatgttatatttcattaaaatatatctacttttgtgagtgatttgcccaaagtattttcactctacacttaaatttaacatataatttatattaatataaggcgtataaggaagacatcttaaaaaatatagggtgattctacaaattctacaatgtctacaatgcacacccttaaaattaaaaggaatgtattgatgcaccttctacttgtttcgacatctagaaatttttttttagtcttttttgttttcatattcatatacgttatagctatttaagatatcctacaaattgtttagaaatttggaataattaacaatatataaaacaaaattcaaacagtttattttaaacgcgtataaaataaaataatcatgtgtgtcgcacactgcttgaacgtaattttcagcgagttaaacttttccgatttttttaaaatttgcaggatgtcttaaataagtataatttacataatcatgagaaaaaatttgactaaaaaatatttcagatactaaaacagatagagatatatcggtgtatctcttttaaaggggtgtattatagaatttcctaaaaatatataaatagaagttgttgaccgagattttcggcaactaatataataatagtatttaatagagctgtaaggaattaatgagagagatttttacgtggttnnnnnnntaatgagccttagtccacgagtctgtgtatttatgagtgta

SEQ ID NO: 171513 - DNA, 634 bp, Cannabis sativa
actccgacaattactacgttattccaatggtcttgaagtttctcgggttggacttagtggtggtataatgcttttatggactgatgatattgatgttactttgctgaatatggggcctactttttttgattgctatatgaagttcaatggcagcccaagttttcactttaccggtttttacggggctcccgaggctgctaacaaatcggattcttggaccttatttcagcggtttggtgatgttgctccgcttcttccttggctagctatcggagacttcaatgagattttatccaacaatgataaatcgggaggtgggttgcgacgtgagtcccaaatggaagcctttaggactaccttagataaatgtttcttgcatgaagttacatatattggtgatccttttacttggataaaaaatcgtactgctgtgcattctctaaaggagcgtcttgattggtgttttatcaacaacatatggacaactcattttcaggcaccaacagtggaacacttggattttttcaactcggaccatcgtgccattgctgctggtttttcctgcatcacgcaagctgatatcccacagaaacgtaggagtcggttccgctttgagaagttgtggcttgctgac

SEQ ID NO: 171514 - DNA, 692 bp, Cannabis sativa
tgataatttgtcatgaagttctttttggtgaatacaaatgatgtgttttttttttcgtctttaaaatgaataattaattgaccttcatcaaactattcaagttggtgtaaatgtaataattgtgtggaaaggctacgttaaaatcaaagaaacacttacaatttcaaagattgagaaagaatttatctcaaataataataacaaaaaataatagaaaaagaattagggcaagaaataagaatggtgatttcttaatgacttttaagaccaaggctatgtttggtagataggaggtagagtaggatgtttggagagtatagaaaggatggagatgatatatatttttttttgtgttgtttggtattgagatttgagagtaaagttaaaaagatggagtgtaaaataagagaattgataaaaggcactagtggtggttagtattttctttaatgtcatattgtataaggtttcatataatttaaaaaataatttttagggagtatcactaaccaattgtagagtgtcacttataaaagatgttggtcactactggtgtccaataacaaagatcgtaaaatatatatgagaaatactaaaggcactagtggtgtctagcacatttttacgtgtcaatattactattggtgcgattacgtattgagtctttaaaaagtatcgctagctaatcgcaa

SEQ ID NO: 171515 - DNA, 944 bp, Cannabis sativa
taaacacatataaagtttaggattggttcttggtgggatccttgtatttctaagggtttgtaaggcatgatctgtcagtagtgagtcaccctggtcaaccacgcatctgcgagtctataccaccattctgtgtgtctgctaaaacttaaggcaaagaacaaacttggatttttcctctcaatgaaagcatcaaaatgttgacctggcttttagccaacaatagtgagtcaattaataagtgataagaaatgtaactaagacagagcaaaacgcagtaagtaataaagaacacaagatttgataaaggttcaatcccttttagtttggtaatagcctactttccttagattgtattgacttgagaacaaagaatatagtgtttcctctgtcaaagctctcacaatgaactcgctgagtattttctcttagatctctctaaagtaattatttccaccccttttacagtgaggatggatcactatttatagggctaaatgcatgagggaaggtttcccttttatttacaatatctataatttgtaagaacatacattacatatttagaatacataaaatgggggattcagacagctttccatatccctttgatacaatcccataattgtagggattgttcttgagcttcacgatatcaatcctgaagtagttaagtcttgatgcacggcttagaggaatgacttcatttgttgttcggatcatctgcccttgctttgctcggtcaggcagactttgtccgtgtagatgtattatcgaagtctgtttggaacatttttcctgtcaagcataaggaataacagacacgtgtcactagtacgcattgccacgtcatggtgcaaaaaataggataacaccacaacaacccataatgaattaaaaaaattgacataattttaaataaaaaagattttaacaaaactaatata

SEQ ID NO: 171516 - DNA, 613 bp, Cannabis sativa
  modified_base (570)..(584): a, c, t, g, unknown or other
aaattttgtactactatttttgtattttttttgggtaattatggaaaattccttaaaaataaagttgttataatgtgtctatattattcattaatatttatatgtaatattttagaaaaaaagacatcatagtgttattagagaagttaattattatcataatttattggttgcatatgacttcaaacttgtaatttgtagatctaagtaaagaaaatatacatatatatatacattatatattaattaagcattaattagtgtggttggtaccactaattaattaagtaaatacttaaaaaaaatcaaagatttaagcttcaataaaactcatttaaagtgtgtttagtaggttaagaaaaaatgccttatatagttcatctaattaaggtagatttggtaggaataatgatttcaagaaaaagatatttgattgtaaattttactacttgtattaaaataaaataattgtaatgtaatatttcagcacatcacattaaattaggggagttctatttacaccccacaaaatgataagtacaccccattattaaaaaaaatataaacttnnnnnnnnnnnnnnnattactcttaatatttttttaaatttttt

SEQ ID NO: 171517 - DNA, 598 bp, Cannabis sativa
tattgtgataatcttttcaatgttattttatagtttattttgagttgattagttgatttgcatatagttaatatcttattttttttagttgtttttcgatgtgtatcttcattataatatagttcaacaatacaactataaattacttattttaactcaatgtattaaaaatatatatacttgattagaaagaagatagacatcaagtaaaaaaatataaatatcattatttctcttttgtttgaacaactaaataataacgaataaataattaaacaacaaccttatttataatatgcaaatcaactcaaaagaaacttaaaaacaacactaaaataacctcttaattacaaacgaaacttgaaaacaactacaaatcacgtaatacaacaattcattaatttactaacaaaaacaaatactcaactgaaaatcagctcattttaataaaatatttaaccaaataactagattttaaaaatgagtttgatgcgatttgtaatacattgttagaaattttttgaataaatattatcaaaaaagtgtaattaaaaaaaagtgtactttaaatataataatttattttataagtaaaaga

SEQ ID NO: 171518 - DNA, 716 bp, Cannabis sativa
  modified_base (494)..(494): a, c, t, g, unknown or other
cctggaaggcatccgatctattccaagcgaagggtcctcccgacggcggcctgagctttgatgtaagccaactcatgttccctcctaaagaggtacttctagtatcggtcctctgtcgaggctatgatgtccacccagagcgctttttctacggtcggggtatgaatgttgcagaagagaaccttcgaaaggttaaagtcatccaccgactggctcccgaagataagcttggccctccggcagttttctgccgtgaccatgtcccccacgttaagaccttttttgtcataagtggagaaagtcttggcgtgttggagaaaaagctgggtaggagcagtgtggagaagcgggggaatcctaatccactccatgagaagcttcaggcagtccacggcttggaagccggaggagaagaaaaagcgatggcggtactcctttacattcttttgatgattaaaagggactgggccctcatttaaaggatgggcccgganggtgaaaaaaccgtctttaaacttgtcccccttcttggggacagatacaagttcgtaaaaatacaaaatttcgaccaggctaggtgaagctcagcctctggcaacataaaaaataaacaagcttgaaagcaggcggtaagcttgtggaattaattgataaggcgcaaggcctacaaaaacaaagaagttaataaagtaatcttgaagagggagcatggcccc

SEQ ID NO: 171519 - DNA, 779 bp, Cannabis sativa
tggtaaaataattccaacaataccgattactcgttctttatctctttcacatatcttttctgggcgttattgctttcccctgcgatatgtggccctcccgaactaaccagatgtcctcttctccttctacaggaagaggttgtaacccttgtttgtttgggttattgggcagactgggttggttgtatccatggccttatcttttcacatattgtttaaaatggcctcgagcgatgagactttctatctcatatttcaattggcgacattcgtcggtcgtatgcccaatatccctatggattttacaatacttgttatatctcttttcctcctcgaattcctcatgggctcgggcttgccgaaggtaaccttctgctcacgtgcaaggtaaatattctcccgagtttcattaagctcgatataagatagtatatactagcacgtacttgtcatgcttcttctgtttctttttatccttcgacggttccttagtaccgtcctttcttttcgaaccagaagccccgagttatcagttctcgtggaaatagtacttgctgaaacattgctgggtttgcatcctgagcttgttttcaacaagttcatttcctttcgggcttcttcctttcgaacaaatacctaagacctttcgttgaactcagtcatgcttcttaccggacgaccttgtaagtcatgccacaactcgccccctacggtcaatggatcagtagagatccccgctgaagggttgtaagttatgtgttgtcatccaaattcctaac

SEQ ID NO: 171520 - DNA, 556 bp, Cannabis sativa
ttttttaaattgggctcaaaagttaattaagggcccattaaatagaaaattcttagtttccactaatgactggaaaaatgccattttaataatttgtgtgttttaaaacaaatcaaaatagtattagagcatctccaatggaggttgccgagtcttaccacaaatgcgatgtgatttaattttaaagagtaattttatgtgaagtattgcttaatatagacaatgatcgtgtgacttttttttctcattttttttttatttttttttagaaaaatgttattttttcacctaaaaagtcattaattcaatgtgaggtgggaccatagtaggcaacttttagaggtataaaccatagagtattttttttaagagaagatgacaaatcttatgtggatgagagaaaaaataaaaaaaatatattttagaatgatgtgtgtattttggcaactataggtgttgtcccttgttggagatgctattataatataaaccctttttctagtaaaaatagtttcaaattgaaaattaattgctatttttttttttttttgagttt

SEQ ID NO: 171521 - DNA, 520 bp, Cannabis sativa
cacaaaaattggatggcattgaaggttttctttaagtgggtagatagtgatgttgttgagtgtgtaactagtaatggtgaattatgggagaagattggggcatcaattaaaaagtctcatatgcttgaatgttatgcggttgaggaagttgtgtcacctactaatgaaacagagaatctcacacaagatggggttgatttgggaaatggagttatcacacaaggccctgttttggatggtcaaattgataatggttggcctgatttgggtgaggggaaggtcacacaagatgggcctgctatggatgatgacttaggtgctacaatgaggatattggttctggtttggaagctgaaaaatgggctgctagtggtgaaccagttaggcctacaattgaggatattggttctgctttgggagttgaaaaaggggttgttagtggtgaaccagttgggcctacaactgacgagattggttctgctttggaagctgaaaaaggggctgttagtggtgaaccagt

SEQ ID NO: 171522 - DNA, 549 bp, Cannabis sativa
atttttagagtcaaagatggtctagctgaggatgagccaaaggtggacaaggctagattagttacaaaaggattcacacaagttgaaggggtagattacctagaaattttctctccaattgttaaaatgaagacaataagaatgatgattactattgctgttcaacttgactgggacatacaacaaatgtatgtaaaaatagcatttttgaatggaaaacttgaagaaactatatacatggagcaacctgaaggattcaaggtggaatccaaagaaggggaactggtttatctactaaagaggtcactatatggtttgaagcaatctccaaggcaatggtacaagaagattgattcagtggttacaaaagttagtaacatcagatccaagtttgacacatgcttgtatttcataaatttgaattcacaagctacaaccttcctactgatctatgttgatgacttgcttattatgggaaaggatcaaaaccaaataagcaaactgaagtatgtcctaaacagtgaatttgagatgaaagacatgggagtt

SEQ ID NO: 171523 - DNA, 894 bp, Cannabis sativa
agtgacatttcttgtagtgtaagttgataactcactttaaccaattattattttttatttaagatagattgtgctattcaaaagtgactaaatcatataattctgtgttattacatttgtataagatttatgtttcagactatgtcttactactagaattatacgctttctctcttcattttttttaatgaaaaagataaaaaaaaaatgaaattttttggatgcttgtactcatccaacctcagtctcaaacaatggcgtactattttagagagaaaaataatttttctttttctcccagtatttagaaaattacagtgtgaaaagcttcttctgatttctcaaatcaaacttctatttattgtagttaatttctaattaattaaatcatatttaattctttaaataaatatctataaccaaatttggttactgatatttttgatgagggaatatctcaaccaacttaacaccagctgagcttgtctctaacgtttattgtacatgttcaaccggtctacaggaagtttaacagccttggcgctttgatacaaaactgtagcaccttaacaattaggcacgctacgacaaccagtaatataacctaatcttgctaaaccgggattactgacaagtaagagcggaaaatttttactttaattacaatagaatgaaaatataacttgtaataatttaactttacaaacaaatcccaaaagacaacatgtttcgggatcccacaaaatttttgcaaaatattacaagttaatttacatgcgaacctaagcggtgaaatctgagattacaaatgcataatccatcgccaagctctcaaactcatgggtgattacagacagatttaccctttcctgcacagtagagcacctgtgagcc

SEQ ID NO: 171524 - DNA, 884 bp, Cannabis sativa
tctaaatgttcaatggatgtgtcgacaagaaaaaacaattaaacaaaaataaaaaagaattgttatgaggttatgatggaaaaagggagataagatttaaaatagaaaaagaaaggcaccttaggcgttcaaatcaagtaaggagtaaaatataacctcgtcaagctttattatcgttataacattattttattatgctcaaaaagatgcaagctagactttggtttgactataaagatattaaagatatttgttatgttacgtacaaaataaaatagcagcttcttgcctaacccattcaattatttttggaccgaaaaagaaaccatttattatattagttattaaaaaaatatataattttaataatattttagaattttttatttttacacttttattattatttttataaaattttatataaaaaagcaacttaaatcgtaactaaaattcatataacaacccacataaattaacggaaaaaccaaatcataaattaaaaaaatagtatttaaaataataatttgtggtatgaatacctaagtttaattttcgattacaaataaatgcacaagtttaatttttaacagtaataatatctaagttatatttgtataactttgtaggtagctgaacattaaatgtcaaatcattatctacactaggtgtcattttttattggtacatataaattattttaaaaaagaaaattaaaaattcatgatgacttgaattaattagctagggattgtcacgtagcaatttaattaatatttaacactcaggtacatacagagtaggggtgggcatccgatccaatccaacatttttttcctcatccgatccaatccgattagtaattggatttggaaaatcatcat

SEQ ID NO: 171525 - DNA, 1376 bp, Cannabis sativa
gattatgtttgcactcttgatggtacctctacttccacggctcaccctttgtgcaatttcttgtgttatgacaggttatcccctcagtttcgtgctgccattttggctgccaatgccatcgttgcacctactacaagctataacgaggcagccaccattcgcgaatggaatcaagccatggacaccgaaatcattgctcttgtggctaacaagacttgggatgtcgttcctcttcctcccggtgaacatgctataggatgtaagtgggtctataactataaatataataaaaaaggggaggttgttaggtgtaaagcccggttggttgccaaaggctataccaaaaatacgggatagactaccttgatacttttgcccccgttgcaaaatttaatacaatcaaagtattacttgctatttcggtaatcaaaaattggtccttatatcaattggacataacgccttcttgcatggtgatttgcatgaaactatctacatgcaactccccaaaggctatacaccttcaggcattgtccccaaaaatgtcgttcgcaagctaaacaaaagtctatatggtttgaaacaagcctctagacaatggtatactaaacttagtcaataccttttagctaatggttttaaacaatctcctaatgatcatatttgtttatcaagaatactaacaatactttcttagctattcttgtgtatgtggaggatattgtcattgcttctaacaatgatgttgatgtccagaattttaagaagcaattacactcgacttttcagctaaaagaccattggtcctctccgattttttttggggttggaaataggtcgttgctcggctggaatttccatttctcagcggccttttacacttcaacttcttcatgatataggttttttgggagccaaagttgcctccactcccatggaacctaatattaaattgagcaaagatgttggcactcctctttcggacccaaccatttatagaagactcattggtaagctcatttatttgttcaatactcgtcccgacatctcctatgctgtcaacactctaagtcaatttttacatgagccacggacacctcatttacatgctgcacataggattcttcaatatctcaaaggcacaccaggacaaggactgattctttatgctaattctaattctcatttgtgtgcttttgctgaatccaactttaaagatgcagaaccataacttaaaattttttcagatgtagattgggtttcttgtgttgacacctgaaggtccatcacagggtattgtgtctttcttggtcattccttggtttcatggaagtccaaaaagcagccaactgtttcaaagtcttccgctgaagctg

SEQ ID NO: 171526 - DNA, 710 bp, Cannabis sativa
  modified_base (668)..(669): a, c, t, g, unknown or other
tatatattatgaaatgatctctctgtatatactaattcaattttatttttaataaatgcttccgttttatatattatcactgttataatagatatatgatattatttttttgttcttgtttttccttttagtgtttatacatatggtaattttatttaaattatttaagtattaatagttttggtatatttataactgtgatgaacaaatttgttcttgttttatgcttttttatttttaataatttgagtaactttttgttttgaattgttggcacttggcagtaaacttgaggcaaggaatcactaaaggaagaagactattagatattattttggtcaagtttgtaatcactatttaattagtattgtattatagacatttttatttacaattttaagactttggattactgtaatgatattttaatacagtgatgagatttagatctaaaaaatttaatgtaaaaaataaggggtgtaacccaacccgacccgacccaacctaacccataatatattgggttgggttaggctctgcataaaatatgatatgaatgggttagaattttctaggccgatctaattgggttggcctgttgaaatactatcaacccgaccaacctaacccgtgcacagccctaagtgagagtatcatgttccttttanngtgtttcaactagggcttagggttgaattatatggattaaa

SEQ ID NO: 171527 - DNA, 581 bp, Cannabis sativa
agatatcagagttaaaacaatatttgtctttggaagacagatgacgagcaacttctcgccatccaagataagttgggtccattcccagcgagcacccctaagagataagggttccatatacccttaaatgtgcgttcatttcggcttaataaaagtgggatactcatagctgtgtaaattacctcatttacataacttgatttataatcgaaccccgttatttgagggattaattgttgtaacaattacagttaacttttgcaatttacaaaccactatttaattataaatagtggtagacaagatcaagtaaaaggggggtacaaaagaactcatacaagagatttcctaaaaaaacaacaatcagagatctgaaaaagattgactcgtggactatgcaaaattttaactgtaaaaccatgtaaaaaaccatgtgttcatacattatttttctatagcttttattcaatatgtgtgagattaatattgtgaggctcaattttatttagcaaaaaatctgcgttaacagtttggtacttccattgagagcctctgtgaaaaagctcagaaaaagcctcctg

SEQ ID NO: 171528 - DNA, 824 bp, Cannabis sativa
cacttatacttttttgcaagtgtgttgttttgtctgtttggaattttgggctcgaccaagccttttgtacgcactggatggtaaattaacaacatgctagtaaattcgactcaatttgaattttgaaataaagatcttttttcatttatttatcaaaaatgtttctgttaccgtaataacttacatcaaagctattaatttgatctaatctgatctttagcttaacatggaataaaaccaattgtagaaattaaatgtaattccctaatctataaggacgccacgtgtgtgattttataaactagtttaatactaatagaataattaattattaaaaactgtgataatattaaaaatttgactaaaataaaacattaaaatggatattataacgacataaaaagcgtgttctggggatccctattataaaaagttttgctaaaaaaatatacacgacaaccatttaaacacaaaatcaaaatacacaatagatacagccagcccaaaacaactcctggcaactcggcacgcaggctaaggaggtcaatatgtacattactggagaagactgtcacctcatggttgatctagcttttctttgcctttacctgtaccacatagcactcgtgagtcactagaactcaacaagaaaagtaataataacaatcatataggctgctattcgaacattgtcatttatacacaataagaatcaaaccatcacccattgttcataagatgaaatccatataagtagtggcatctgcgacgaataagcatcagtctacaaatatttagtaatacaaaaccattacaccaataat

SEQ ID NO: 171529 - DNA, 646 bp, Cannabis sativa
  modified_base (272)..(281): a, c, t, g, unknown or other
tcaataaaatgccaataaataatcgcgaaaatgaatttcggccacgaacccggttcgacccaaaattctcaattgtgaccatatcgcgccgacttgtaaaaaaacacctaaaaaaggacactacaaatatactatataataatatagtccacaagcacacaattaagctaaattcacagttttacccttctctggtcaaaattataaaaatgcccctggcccaccaacggggtcttaacatgtcatatatccaattaattcacatataatannnnnnnnnntaatataattccataataatacacgtttaactagttagggtttgctaatccattttcttaatcttagggtattacaatacaacacctcataaggagtcattccctattgtactttggtagttgatgttgtaggagaattcgatcaaaggtaagtacttactccatgagcccccaaagtccatgacacaggctcgtaataaatctcctaaaatctgaatttttctttctaattgcccatcagtctaagggtgaaaagttgtacgaaaattcagctttgtgcccatagctctctgaagatttacctaaaattttaatgtaaactctggatccctatatgaaataatggatttaggcactccatggag

SEQ ID NO: 171530 - DNA, 856 bp, Cannabis sativa
ggcataagatatgaatttttcaatgggaaaggctgtagaggttgcatgacaaacatagtctgcaagatgtttgggttgtgtaactggtctgccaacccgtgtttggatgggaggttcgacatctaaggtcgaagatacaggttgtgtatctcgtgaattggtggcagaagacgggatattattttttgtaatggtctcggaagtgagacaaggtgtggtacagccgagttttagcacaacagagggtgttgttgctgttgttttattaccaggagtaggtaatgtgggttgtggtatatcagatgagggaatgtcatctgttgtagccacgggttgtgtgaaatttccaggcttagtgtgactgatatgtgtggtattgggagaggcatctggtgtgggaaatacaccagattgctgtactaatggttgagcccgatctaagggctgaggatgagatgttggaatggaaaaaaactggtttatggactgttgtgacagctggccagttaatggaaaaatgtcttcataaaaaacaacatctcgggattgaaaaatttgcttggtttcaatgtcaagtaatgtataggctttcataccttggggatagccaataaagatagaggcacgacttcgaggggaaaatttgtgtctacttgaaggtaaggtagaagcatatgctaggcatccaaatgatcgaagatggtcatataggggaggtttattgtgaaggatctcataggatgtacagccatgaagtagcttagagggagttctattcattaagtatgtggccgtgagaatgagatatgaccaataggctagaggtatgttggattgaaagcataaagcccgagca

SEQ ID NO: 171531 - DNA, 560 bp, Cannabis sativa
ttaaatataaagcagatgggagcgttgagaggtttaaagctcgccttgttgctaaaggcttcactcagacttacggaatcgattatcaagaaacgtttgcgcctgttgccaagcttaacactgtacgtgttctattatcccttgctgcaaataaagattggcccctccatcaacttgatgtgaaaaatgctttcctaaacggcgaccttgaagaagaagtttatatggacattccaccaggctttgagaactcctcaaatcagaacaaagtgtgcaaactcaagaaatctttgtacggtctcaaacaatctccacgggcatggtttggtagattcactaaagcaatcatacagaatgggtatactcagtgtcaagcagatcacaccttgtttgttaagttctcgtcagataaaaggatagctatcctaattgtctatgtagatgacataatacttacaggtgactacaaggaggaaatggagagattgaaagagttcttatctaaggagttcgagattaaagatcttggttatcttagatattttcttggcatggaaatt

SEQ ID NO: 171532 - DNA, 702 bp, Cannabis sativa
agagctttccaaatataatacataatgaactcaaggctagtttagtggtgagagagggattagaaaacagaaattatggatttgaatccgagacctttattataaactattaattaattgtaaaatattattacgctatgcttagaaaaaaattatattacataatatagatacttcatttaaatttaatcaactttcctattcacaaatcacgaataaaaatttgaaagtggtattatattatatatatatatatatattatatttttatacgatatttcgttaaattttaatttatcttaaaatattatatatttatatggatttttgtaaaaatatgtattttatttgttatctttattgttatacttttttttattaattaattaactattttcagatgtatatttattaaagatgtatatttataaaagggaaattcgaattattattaaaatacctaatttattaaattaattaattatgttcataaaatattcaatttaattaaatttgtacgatctaatccaattcgtaaagtgcatatattcgtacttgtgtggattgaattgaattgagaaatttaaaatccacacgacgctcttccgatctttgatttagtaactcattcaatcaaattcgcacatatttatgtatatggaagaggtttcaatggttacatttttattgtaaccatcatag

SEQ ID NO: 171533 - DNA, 777 bp, Cannabis sativa
aggttaagtcacctacgtacattttgatgtaccggttatgtcttaaatgatcgagatcacctcggaaaatttgaccataggagtgatgaaggaatactcctaggatactcgaccaatagcagagcctaccgtgtattcaataagagaagtgggacggttatggaatccatcaatgttcgctttgatgatttagaagtatctgagggagcttctactgaggaagagcctcttgatcccacacttcccatggctgttccagtcaacatccctcctgctgtatccgagagctcaattaacttagcatcagaagcttcacctgatgcatctgagtcatctggaatctctccagaattagctacagacacggaagtgactagtggtacccctaccagttcatctccttcgaggttgtacaaaaagggaccaccatcctggatacagaaggcacatcctcccacaattgtaattggtgatcctaatgcaaccatggtcaccaggagaaaaatcttaaatgctattgcatttgcttgttatgtgtctgtagttgaactcaaaaatgtaactgaggcacttctcgatgagttttggaacaatgcaatgcaagatgaaatgggtcagttcaggagaaacagagtttggatcatggttcctaaaccagatggtgttaatatcatcggtactaaatggcttttcaagaacaagaccgacgagtttggtactgttgttcgcaacaaggctcgactagttgctcagggctacaatcaggttgaaggaata

SEQ ID NO: 171534 - DNA, 1997 bp, Cannabis sativa
cttaattttttctaaatgttgatgatgtatttggatcaatgcatgattagtaacttgtcacaaaaactaaagttattctttttattaacatataacattatttcaaaaccatatatgttaaattgttaccgtaatttggaacggaagtataattgcattcttctatgcataatggtaactcaagtatagaattgcaactcttctttaagtctatgtaaaaagccaccgagttgttaatcaacatcttgattggtggctcacttttagctacttggtatgagatctcaacattgtcccaagtagtgtttatttcaaatttctaagatcaaataatgaataattttttagaatatgtgcaccagccactttgtaatttgagtagcagttactttcattccactctcctccataatgaattaatgctttaataaaattcattctccaagaaaattacaagtgctaggccacttcctgaagcaaaaagaaaaaataaaatcatttaacaagttactttataagaaatttaaaataacatgtttctttttttaaaaaaattattgtcttaacacaacaaacacaactatattcaaatgtaaggtaccatgttacttttagaagcaataaaaaactttaagattgaactagcaggtgacttttttcaagacatggtattttttttgttataaattgcagtcacaacaaaacaaacacaaccgtattcaaatgtaaggtaccaggttactttcagaagcaataaaaaaccctaagattgaactagcaggtgacttttttcaagacatgttattttttttgttataaattgcagtcacagcaaaacaaactcaatcatattcaaaagtaaggtgcctggttacttttaaaagcaatataaaaccctaagattgaactaacatgtgacttttttcaagacatggtattttttgttataaattttagtcacaacaaaacaacccccgccatattcaaaagtaaggtaccatgttactttcaaaagcaatataaaaccctaaaattaaacttgcaggtgacttttttcaagacataattttttttgctataaattgcagtcacaacacaacaaacacaaccatattcaaaagtaaagtaccaggttactttcagaagcaatataaaatcctaaaattgaacttgcaggtgacttttttcaagacatgttttttttttgttataaattgcagtcacaacacaacaaacacaaccatattcaaaagtaaagtaccaggttactttctgaagcaatataaaaccctaagattgaactaacaggtgatttttttgaagacagtttttttgttataaattgtagtcacaacaaaataaacataaccatattcaaatgtaaggtatcaggccatattcaaatgtaaggtattaagttactttcagaagcaatataaaaccctaagattgaactacaaggtgaactttttcaagatatgagacttttatgttaaaaattacaattagcacaacacattactatgagaactaaaatgaaaacctaaaattaaaattccttatcatttttcccaaagaacatgttaactacgttaagaatgtaatcaaaatcaatagtttcttacttttgtctattttgacttcagattttattgattttcttcatcgacattaggaacatgaagaataagatgaagaatgataatcacaccagaagagaagcaaagaaatcggaggagaacaaagaaatccaaggagaatcaaagaaatcgcagagaagaatcaaagaatcacagaggagatcgcaacccacgatagagaatagttgagttttgatattttgggtgtgaaatttataaatggaaatatccttttataggtattccattttttccatttttaagttttttattttttttttctagattttaagttttttcattaaatgcccatattttttaaaatgcatttagaaaaattccactccatagtaaaaa

SEQ ID NO: 171535 - DNA, 754 bp, Cannabis sativa
tttttttttttttttatagatgtacaacaaaaacaataattataaaaaatgtgcacaataaattattttaaaaatttatacatttgtattacataaaaccatacaaattaatttttaaataatataatacattaatgactaaattaattagtataaatatattttttattcaaaaaaaattagtataaatatatttttgtataaatatatattttttcttattaaagattaaatgtttattaactattttagtaggaattatcataatttaagaattttttaaataaaatacaatatcaaaattataaacatcagtgtatataaattttaaatatgtgtttatttaaaattaaaaaatataaaaataaataaaattcaaatgtgtgtttaccatgttattataattaatgtttatagtaatactagtttatttagacattatttataataccacattgttgactgaggttttcggcaaccaataattagagttgtatggagtaattaatgaatgctagaagatatgatttttacgtggttgggacaataatgagccttattccacgagtcactgtattaatgagagtgtttattatagagaattttccaaccgatcccctttctatacttcattggggtattataggcccataatggtgataatgttataaaaattaatataaaccccaagattaatttatatataacatagaacacaataataatatataataattaggtatgcgtacctgat

SEQ ID NO: 171536 - DNA, 1441 bp, Cannabis sativa
tttcacacacttatgcttgacataatttgtggtaaaaattttcatatccttgaacatggtgttataaaactattacatactgttttactttgctttaatattcttggtgactaagtcaactttttttcgtgcataacctgtatgacctcattccactagttcattagcttgataaaataatttctatctattcttgtgagtttgattttttcatcagggacaaaaacaagcagagattatgtactttttgttggcaaaactatcaaggttattttttttgttgtttaaaaaataaaaaatataaaaatatgtgtgaccgattttgtcaattaagctttcttaaaaattcttgttatttttcctgttatgtttcattattttcttaggcactatttttgctcttaagtgttgattggtgctttatgtgtcattatgtgttgtcttgttcgttctttgcaaattaatatgaggggcatatttttaaaaaattaaagagaaaggggggcataattttcgatgttttggctattttttcttttttttctctcttttatggaaacatatttttattgcattttttctactgtgtttcctttatttttgttgagaatttggtcttacttttttgtggtgttttaggaaacttgtttttatttaattaattatttgtggtttccttttttggtggctttttcggttttgtttttgggtttttgaattcttagattttgtggggatattttttttcgttttttccatttatggtaacctttgttcaatttttgaaatatctttttggtttcctattttctctcctcacgtggtgaacaaggtaaggaagttactttcctttttctttttttctaattattgggtatttaatttgaagtactatatatgttcaacttcctacttacccacgatcacaactattcacacttctctcaattttttcaaaagtctaaccctcttcaagtttgagagtgacttagttttctagggtttcaaagcaaaaattgcaaaaaccaaaagtgctcaaccgtccaagaagccttctcttggctctgcctttgcttctccgatcaccccacccgcgccactagctccaatgatcggagttcctggttcgtcatctgaacctgaagaaggaagtgaggaggatcacaaattagagggtttgtccgattcaagtgaagattttgttcccaaagaataaccctctgctgatgattctgggcctgaaagtgaagagcctgaagctgaacctgtcagtgcagaacctgttgttgtccctattgcaattccaaagaaggacaaaggaaaaagaccaattgtctctccaagtcctatatttacacagaaaaagaaggaggccctctggtattactcttgaaaacttcaagcctcattctcattatttttgttataatgatcatgctag

SEQ ID NO: 171537 - DNA, 1083 bp, Cannabis sativa
  modified_base (1019)..(1034): a, c, t, g, unknown or other
aaaaaaaaagcattttaaaagaaatattaattttaaagttcctaacaaataaaaccaaaataaacaaatgaaagacttaaaacagtatttttctgaagcatgaagttatgatagaaactcttgtcaaagagtgagaataggttatattactacttcaaaaaggtatcaaagatgctgcagatgcatcacatgtagccagcagatatctgataccgaaagaaagcagagagagaagttaaaaggaaaatggatatgccaaataggaaaagaaaacattgcccgaaaagttggcaagaattgtaatagttgtgactccttaattactttgattaaaaagaaatgatgggaagtcatatgtattagactataagacataaaactacataaaataaatattgtttttctcttcctcatttgtactagttgagagtcacattttaaaaatattttgggccttattccataatcgcaagtgcaaaatcagtgaaatatttattagaaagaaaaagatacacaaacgcaaaaggaaggagaacctgtatttccatcatagtagaagccagaagcagcatcgtaataatacccagatgcttcatcccaaacaaaaccagattgtggagccgagccctctttttggacaacaatatccccaccactttgccccagtcctccaacagattgcttgtcatctggattgtattcttttggtgcccatccaacagcatcatactatacttaaataataagctaattagctagaaaataaaacatcaaacaagaaacatagtttgacataagtaatatatataatagatatatttcattgaaatattattgttacttgtgccaacactgttgacacattatagggcattcatacaagagtgggtgtgctccacaacttttgctagtattattgcaacaatatttaatacaaggtgtagttttgtttacaatatatatatggaacacttctcagtgagtattaccattgatagttactaaacaaatttaactannnnnnnnnnnnnnnnaaatattaaaccattaaattttgatccaatgacgaataataaaagagaa

SEQ ID NO: 171538 - DNA, 608 bp, Cannabis sativa
ttgttattctgtggaccctaaaaagaatatcattgtgctctactcttcaatgtgaacattttaaaatatgaaaaacatatgttttttttttttgactatttctaaaaaataaactatttggttactaatatagtgattagttattgttttattattattttttttaaatcttagttaacattcattcttaaatagtatggaaggtggtataaatttacacaaagaaaaaatatatatatatataacataaaagtacatcttaattaacataatataaattaaaaatgattatataattttaaattaactaatctaaaaattgaatattatctatatgagatatttttatttaaagtatactaaataaaactatttaatatatatatgcttatttgttatactatatgaaaattaatttgtttctactgtaaacttaaaaggtaactaaaaatataactttaaaataactaattaacaatttaaatatttaccaatttgactaatatgttatgtgagttttttttttttttttttttgaactttattatagcttattagtttattaaataaacttaaaagtaacataaatatttttacaaaagcaaaat

SEQ ID NO: 171539 - DNA, 556 bp, Cannabis sativa
  modified_base (352)..(365): a, c, t, g, unknown or other
gccaatggcacttttcaaattttcgttttattttatatggtatatatatatatctatatctatacatctatctatatataaatcgagctaatgtcacatgcactaagaatccattattttatgttaccttttctctcaatctctctttttatttttcacgttgtcaatttttttttaataatgcacaagcaacttcaaaccatacttatatttttaattagctatattacttaatgaaatcacaaaataagagaaattattaaacatttctttatgaaaaaaaattagtattattcattatttttgttatctttataattacagtcattacaaaaaatgtcacttttaccannnnnnnnnnnnnntgcgctggtaaaagtaacttttaccagcgcatttcgcaaactgcactgacaaagaggtcaaagttttacggccagcgtacatttgcacttgctaaaatctaacttttaccagcgcatttacgcgctgggaaaagtcatctttgctagtgcttttcattttatgctggcaaaagttctaataccaacattga

SEQ ID NO: 171540 - DNA, 1333 bp, Cannabis sativa
  modified_base (512)..(514): a, c, t, g, unknown or other
gatcatgattagcctacaaatatacattacatagcaaagaaacatttatatctatatatttatataattatgttgttaggataggtgaggtggagttctaacttttcaagaaactaattttttttttctcaatatttcactgtttcatttacttttctaattattatttttctatataattgtgttgttggggtatgtgacatggcattctgtctttttagtattattatttttctattttatagtttttctaagatttattcatttttatatatgagtgtctattcatttttataactgctattccattataattatgtgcatattcattctcataattcctattctattaatattattattttataaattattattgttgttgttatttatcttattctcttattccatcatttttattatttttctcctttaataaataattacaaataattatcatatcatataattagtagtatctatatataatcatcctaattaaattttatttnnnattctttgatttttttaattttttaacatttatgtttattttttatatcatttaataatatttttaccattatatattatatatttatatatctatataaaggaaagcacaaaagagattatgtggtattttatatgattttcattctatttttacttatttgtgaggttttctcattttgtgaagaaagtttgataatacatgttttcaaaatagtctcacattatttaagaatcatgtagggtattatatactttatagtataaataaagtctattaatctttacttttatttgtaataaaatgagtttttttaaccttatgtggtggttgaataaaatttttcattatttagttaaatctaatcttgcttaattagttcaaattttttatttattattttgtcaaaatcttagtattaagaaaagtgtcttaaacactaaaaaaaaataatctatataggaaatgtggcattttatatgattgttattctatttttacttttttgtgacgctttcttattttaatatagaaatattatatcaataacatttttatataaatctctcatttttctgtttcaaaaacaaataatgttgtgatgccctattttatagttgtcatcccaaattcacttttggagagatgatattccactgataccacaaaataaaatgtaaatttttcataatatttgttaaattgtttcgttctaatatagaaaaaaatagtctaaatagtctcttaaaaataactacatcatcaatcacaagcctattttattaaatttagaaatattattctttttttcatttattt

SEQ ID NO: 171541 - DNA, 581 bp, Cannabis sativa
tcgaaagaggaagtacccagcaacatttttggaaacctctataaaatctggtattttctcttcctttacttttaataattgtttgcttgtgtgtgtgtggtttcagatcgatttagatctaaagaaatttgtgtttggtttgatttaatttttagtttgagcagagcttcgagttttgaagctctgcgagtgtttcgcgctctttgattatgtgttgcgtatgggggattctcgattgttcttgggagttttgtggggggattctcgattgttcttgggagttttgtgttttgatcaaaacgctgtagttttgattggagtcaaacattgttttcactaggagtgaaaggtaaattgtgaccttgaatacttaatttggtctctgttaggtgtagggatagcttcagaatttcttacttgacagggaagctacaatagaaactaagaagaattgaatcaaagaagggaaacaaaaaatcaagaatattaagaattaatagaccgtgttccatatatttcagaattatatatggatatttctaaacctaactattacatttcttgatttaatcatattacac

SEQ ID NO: 171542 - DNA, 642 bp, Cannabis sativa
taggaccaaccgaaattctgttcgaatcaattagaacaatgtgggaaaccaatctcctccattgtattctcttcacaatcctcatgattctagaccaccctgtgaccccgtaaagggaaaaagacataggatcagacttaggggaagaccctggaagctctaccataaaagtgaagagtatgagtttcgaagggtgaagatcaatgaactactcaacactaaaaaatacttttgtgatgaacaaggtgcttggtgtaggtacttcgcttgaggtcctgacggtcgacagtacgaatacttcccgtgggttcatggagacatgttgaagctgagaaatttttccaactcccttcacacatgtcactaagaggaagactattaagaagggaatagtcggtatagtactgcgagtcgctgctcacgaaacaaacacttaagagacgacaatatcgtcatacgagataaatccccatagtttccatcaaggccacacgaccaggcaacaaccataaggccaaggccgatcaatgcctttgatcgacttggaggacaaaagagcctagataactacatcttctagtgttaggttataattagcctatgttttgggtctttaaagttagcattatctcgtctattggt

SEQ ID NO: 171543 - DNA, 688 bp, Cannabis sativa
tatagaaaaataaaaagtaaaaaaatagtgatattcataatttttttctaattatacataaatattatagtaaaagataattatttgaaaaaaaaaatgtagtatctacatatttttattttattttttagtttttagtaaataaaaaaaaagtatataagtatcatcaaatttttgatggaaatgacaatagaggtcatgttgcttttcttttggagtgaataatttcgtgacaaatggcactactacttctccatccctaatccatgcttctaacaagctacaaactctgtctttatcacaaggaaattcggctggtttatcacttcatttcccttttttatgagcttcaaaattttgtctgtcttgagctagcgctatgtcaacaccacattttgaacctttccatggttgatgtgtttggtcgttttggttggacggcttggtcaaatggaaaacagttgttgtttcttgatttagctataagctctacaaaattgtatatggcatggtttcaatgtgtaatcgatattcatccaacatgcctttgatacacattttgactagatccttttcagacatggtctccgcataatcaagagcttccctaaaattttgaaagtaattaacgagtctttctccaaaattttatctttctcctaataagtcagctatgctccatttatct

SEQ ID NO: 171544 - DNA, 836 bp, Cannabis sativa
aaaaaaaatagcaataaaaatacttttttgtaccaatttgattgttaagtgtcaacttaaaaatatataacgacatattattagagcacgtattaaataaaaaaaattatattttctctaaaaaaataaaattttttatttaataaaagaaatattgatttaatttttctatttaaattgtattttttaattaaaaatagaagaaataataaatatataatatgtggtctaataatattatcatcacggtgtttttgagttgatacttaacagatttagttagcacttaacaactaaaaggatacatctagaactaaatcgtaagttaataatgtccattatttattagagttatatgtgtaacaattacaaatgttaaaagagttttgtaacaccctaatgcttagacacgctgtagtgactttctaattacagtgcacacctttgctaatcaaatgattttcttgaaaattgtaataaattaaaactttaatctttaaaattttatagacatatacatatatttagatacaaaactgggatgttatttttaaactttacattcaagatagtgtttatggacatgtcgcacaacgaccacaaaataaagtccaagtcatctcaagaccgaactctccaggttgcaccgtctcgacatgtacaatcatccccaagctctccaggtcacaccgtctcgacatgtacaatcatccccaagcttagaactcactgtgttcagctttagccttcctttacctacacatgaaagcaatatctgtgagtcaacagacttagtaagaaaagcatgtaacatacattatattaccgacttgtat

SEQ ID NO: 171545 - DNA, 638 bp, Cannabis sativa
ggatgaaaccatgttgatcggcatgcacagctacaaccttgttccgagtagtgagtaagatcttgctatgcaatgtgtctccttgagtagtcgtagggaatgcatgtttcagaagatcccatgttgcagttgtccatatatcatcaaggaccaccaaacattttttctgtttctgaaagttgtaaagctccttggctaattcaacatcacttaagtttctgatgtgatttctttgtacatcagtcggagaagtgaaagcaaagtaaattccttccaagacttggcgcgtattacactgctgagatattgaagcccaagcataagaatcaaagtgagtcttgacttgaggatgctgatagacctttcttgcaagggtggtcttccccaaaccacccatcccgcatacagagatcaccttatacttatgaaagttttctttttcaatcaaaagggcaaccaactcttctatatcttttccaaatccgacaacatggttgtcttcaacataagaataagcttgcctcaattgtctttgcctttggacatagcttgaagaagcctcagcagcattgtctattgatctgtgtactccaagtgcttctaactgtgaagtccaagtatcaatgttggatgagatc

SEQ ID NO: 171546 - DNA, 636 bp, Cannabis sativa
tctactgataattctaagtttcctaagtcgattgtgtgtaataattccactgtacctgttgttaatgctcaattctctctttggcacaataggttaggtcatcctacagcaaaaattgtacaaagtgcccttgtcttcttgatcaaataagccaataaaactgatgcaaatttttcagatttgtgtgccgcttgctgtttaggcaaacatcacaaactaccttttcctatttccactacagagtataatgaaccattacagctcattcactctgacttatggggtccagctcctatcacttcctctagtggttatagatattacatcagttttattgatgcttattctcggcattcttggatttacatgttaagaacaaagtgtgaggctttgcgtacctttgtaacatttaaaacctaagttgaattgcagttaggatataaaatcaagaaacttcaatcagattggggaggggaataccaagcttttaccaaactcttaagtgaacatggcatcattcacaaggtttcttgtcctcacacacatgagcaaaatggggtagctgaacgtaaacatagacacatagtggagagtgggttaacccttcttgcacatgcatccttgccattaaaatat

SEQ ID NO: 171547 - DNA, 569 bp, Cannabis sativa
  modified_base (89)..(90): a, c, t, g, unknown or other
agagagagagagagagaggacaatttttttttaatttgaattagacattaattcaattaattaatcatactttataataaatttattanntatattatttaaaatatttaaacttatttacttattttattatctattaaaattagttagatacattttttataaattaatttaatactagattaaattttatatattttaaaatataattaaattgtattatatttaatttttattattattatttgaattaataattaggtaatagtaattttaatacaacgcaaatatgcattacatgttactaatatccaattataattatagttgatattgatttatatgtgtgtatatataacattttgacataactgaaatttaacataaaaatatacaaaaaaaataatataaaatacaatttaatatattgtatgttatacaatacaatttaatacaatatttcaaatgaaacatgatttaatataattatacaatacaatctattacaatattccaaacaaatcctaataatatattttataaacttttttatatattatttattttct

SEQ ID NO: 171548 - DNA, 625 bp, Cannabis sativa
aggactttttacgaaggtttgggcgtggagaaaaaatgggaagaataacaaatttaattgaaaactctcgtatttataagtgagttcaacctcctaatcctagagaaattgtgagtctttaaaatttaaagctttaaaggaagaggtaaatgataaaaaaaaaagatataaatatatcttttctcttctccattaagcttaaatttcaaacttcctatataaataggaatagtaatttaaatataaaagataatatagcattatcaaatagtattaggatttaaatccaattaatcccaataccataaaaaatacaagaaaatttcaaattttcaaagaaaaagataaaagataagtgaaaaaaaatggataagtttttcctctttttttttttttttttgttaattaattttcaaaaatttccaaggacaaagcaaaagaatcataagtcctaattttattgggaatgcttgaagaacagaaataattgtctaagaatgtcaaaattgatgtccatctggtagttttaagagatacaggcttggttcacatcatcaagtcaactccacacaagtgtgaagttgacttgaggggaaaatattaacccaaaaacttttcctggtga

SEQ ID NO: 171549 - DNA, 556 bp, Cannabis sativa
ctactagtagcctcttgcacgcgcggatgaggccgcatgtttgcctgggcactaggacagggtgctttttcacccaaaatgcaattttcttggtgttttttcacgaaatttcgcattttttgattttcaaaccctaaatatcaaaataaaatattatttttaatatagttaaactttaatatcaattttgtaaattaataatatttagtttaaaagattattattaatttgtgatatttagaggtttaaatttaaaaattaattattttattttttaaattatggtcagattttaaaatttattaatttctataatatttatattttatttaattataaggttagatattttaatattgagtatattttaaattgaagataacattatccttttaatttgtgttatctcaatttttacactctgatgtgacatcacacgatggtgacacgtggaatcaactttgagtatgtgctcgaagggtatagcccgaacaggatgcctcgctgacatacccgaagcaaagggatcagcgatccgcgcagagcaaccaacact

SEQ ID NO: 171550 - DNA, 1071 bp, Cannabis sativa
ttccaccttcctcttctccttttttctctgaattttaaaagacttacatccttcatccagatttctgccttttcttcttgaatctcttaagtttcagaagtgatcgaaaccaatcacagggagaatcgttaaaactaaaggttagtttcgaaactacttgcgcatttggtttctgattttgaaaaaattgcatttctgggtttttgacactttgagaagtttgaaaatgcatgtttagttgtagggaatacacatagagttttactcctttgttagaaatggatgatccccaggagaaaacggacctataattggcataaccgtcaattcaggaagaatactttaaatattcgcatctttttgactgcctatctcttgaatattcgtgggtatttggatcagcatctcgaatactcgcatatctgcttcccttaggatttctagagactttatcatttttcctcgttgtctagaacttaaggtttttatattctctgtatattttgttgggggaatattggttaagtctttcaaatggtgggtgtgtcagcgtattccaatgctcatgcgtgcgatcgcatgttccttgaggtactgcgatacccccagccattttcgacatacaccagtgttccttgttcccatataactgtatatttcgactagtaggtttgctcgaaacagtgaggtgtttccattagcccaaggtttatgcaagaaaggcatgccccttgagatataggagattcctcagctgtttcttgagatataccactagtcggatatgcgtgatatactcacaggttgtgattggttagatttctcgaaacggtgggtgtttcccagtaacttcagggtcatgctcaaaaaatgcatgccccttgggtcactgggtaactcctagccgttttttgagatattcatttaatcacacacttgcaattttatgccttggtggctgattggtttttcacgagaatccgaattagccttccacggaaatcttgaattttttatgcgggtgaggtcacttgtattgttttcacacattcaccacactgaaaagatctt

SEQ ID NO: 171551 - DNA, 589 bp, Cannabis sativa
aaaaaaataaagcaattcattttcaaatagaactgaatttttattttatttgaattagttatgattttttaaaaatttgaaaaaaaatcagggtggaggtcacctacttacgcatgcagacgctgagtgtcactcgatcaacacatgtgtacggacaacatttgtctgaggaagctcgcccacgaccttgtctaaaaggcccctacgtgcatgaaaatcctacgagcagcctccaacactaggaaatctcggtcagcatccatcactgcctgcacggatttcattcattgcataccatctacaccaaattttttttattttttttcctgcaactaattttgaattttttgtataattttgtatgtaaattttttatttttcaaattttaaatctaattatcaattcataattaattaagttttttttaattaattttagatattagtagattttgaacctaaaaagctataatatctatattttttgcataattggttatctcatttttacgaatttgattatttcatcttaattttaaatttaaggtcagatattttatatattttgatgatatccttcgagcttggc

SEQ ID NO: 171552 - DNA, 1824 bp, Cannabis sativa
  modified_base (68)..(68): a, c, t, g, unknown or other
  modified_base (289)..(294): a, c, t, g, unknown or other
  modified_base (736)..(738): a, c, t, g, unknown or other
  modified_base (1748)..(1794): a, c, t, g, unknown or other
cattaaacaaagtgtttttctaaatttaattttaaaatactctaataaaaataaatttcatatatttnaaaactaattatgttgctaattcatctttaattaggttaaactaatattattagcctaatacaattatttcaataagtcaatgagccttcacaactggaggtgatttgtgtgagggagggttgggttcagtatgtcgtacccactactatggccccttaactctcacactaggcccaaaggagatgaatttaaccattaaattaaataattgttattcatnnnnnnagcccaatactaattgggcctaattaaaactaccaaatatgatattttattttagcaacctagttcatttaaataactaaacttaaatgggcttcttgtaagcatctaagctcaaaagcaaatatataagctcacacaagtcaaatgattatttatgggccctatcatgttactagatttattatcgatgaaagaaattacaaaatttacctattacaaatgatttataagatctattgaccattggactatgattaaaatcagattattggatctgtcagcaaggtaatcataccaatttagataaaataattaataggtttgtttaaaaaaattgaataaataaataaacaaacataacaaacatgtaaagatatctggaaagtaggttaagatatttctatttgaaaaaaatatttaaaatatatcttaactagaattnnnaatttaggttgttagaaaatatttgaaaatatttaaaatctaacaaatttcctaaataaccaaaattttaactgaaatttaaatatccaactaattttcaaatttttaatttatttaaataatttaaattaattaaatatccaataagataatgtaatataatatcttaatttaaaattgagatatttctagtcttataatataataaagtaaatttaacaaaataaacaaaattgtaaaagtaagatattttgatggttaggatattatcaattttatctaataattaaataaaacaaaaatgtcataagtttgaaaatatgatggctaccaaaccctaaaatttctattcaaaccaaaattaacaaatttttcagaaatttcatatttcttgacaaaaataaattttaattaatataaatatccaataagataaaatgtaagacaaacattttttcaatcttataatttaatttaaaaatatatatatcaaaaaataacaaactttgaaaaacggatatggttagcaaattttaaaattctaactagattatttcaagttttactagtattttaatatcaaaataagatcatttcaaatgtaaataataaaataaataatatctgatctcctaattaaaataaataaaacaaataaaataataaaaaaaattcaaaattaaccataaggccagtttgtggaaaaattaaaatttcaaatttagaggctactgatatctaaaaataattttaattaattaaaaattaataaaattaattttattctgataattggatttttatttgaaaatttagaatctacacaaaattttaccaaaatttgaattttgtttcaatgaaaaataatttttgaattaaaaaatatcacaaataaaatattgggcatagaggtatgcattgcatacccctgcgcgcgcatgagggctgatgtgcgtggaaagagtgcattacagcctagctgatcgaggttagtgttggaaattattttnnnnnnnnnnnnnnnnnnnnnnnnnnnnnnnnnnnnnnnnnnnnnnntatgaactttctaaaacaataaaataaaca

SEQ ID NO: 171553 - DNA, 551 bp, Cannabis sativa
  modified_base (496)..(503): a, c, t, g, unknown or other
gaggtaattggttacctcgttagttatcttaaattatttttctcatatttttttaatttttttcttttaattttttccacaaaataatttttcaaaaaaaaaaaatatatatttttgtaaaccttgccaaaaaaaaaaatacaaactataaaaataaaaattttcatgaaatgaaaataattttctagaagagcacaatagatcgatggagagaaataaaataaaatacgataaaaaaacaactcacgcattttctttttctgagggtagcgtaatagtattttacagtcaatttatagcttaaaggtcttgagttcgaacccatgatctctccctttttcccatccctccctcacaacttagttagtcttagtagcttaattatttttcaaaggcttattagtatttttaccacccaaactttaacatgtaccaaatcatgccccctgaacttttcggccgttaaaaattccccctcaactattgagattgttannnnnnnngacttttgtttaattttattcaattttactatttcaattattgtttat

SEQ ID NO: 171554 - DNA, 873 bp, Cannabis sativa
aatttctaagtatatagtattataacctttaggaaaaaagaatagcattgtgtaatataatcaattataattataatttaataattatatatactctgaattgtgtttggtggcctaatttaattgagcattgctattaagtaccagtaatgcctaacaccttctcgacatgtcgcattgcaattagatagcgatacttcttaaaagttattatattaaattatatgggacccgatacttaattggaccaatagcgatattaacatataagaaggtgctaacccttagcatttctcaatttaatttccctatttctattttcaacaatatctagatgttagtaaactgcaacgatattaattactagttcttaattagttttttttacatgttaactttcattaattaattgtgaaatgagtagtgaacaggagttacaaggaaggtaaaaatttgctcatcatctaatccaaagtctaatctagcataattagagaataataattaaccattctttttagatatgttactatgaattacattcaattattttaaatttcaactagagagtttttctacgttgggtaataataaacatagcacgtgtttatgatagggattattgttttgtccttatagtatggaagtttttatagcaataaataataaaattagtgtaagataatagttaatatttaacttgtattggattatttattatattattttaataatatttaataaataaatatttatttataaaatacaattaaatattatttttctctcttcttctctcttttctcttgattatctctatttacactcttttttaaggagtcattgactgactatatgttttttttttttttt

SEQ ID NO: 171555 - DNA, 956 bp, Cannabis sativa
taattaaaacataagagaaaattaactccaaatatactaataaataaattcaatagaaccgggtccacaataaaataacgagatgacccaaccacacctagaacctaacactgatacataaattaaagccagttaaataaaataaataaatccaaaaccgatttcttgaattaactaaataaaaaatcggttccagaaaaaattaaattaaaaactattttttgaaataaataattcaagaattgtttttttcaaatgactaaatcaaaaactaattgagacaaattaaaatagaactggttccacaacaaaaggactaaaaataaataacacacaataactcaaaaaatcggttataattaaaaaaaaaaaaacagctccaaaaatactaatacataactaaaatagaactggccggttccacaataaaaggaataaaaataaataacacataataactcaaaccgatcataattaaaatagaaccagttataattaaagaggaaattagttcctaaaatacttgaacataaattaaaaaaaaaaacaccagtttcacaacaaaatacctcataaaactagtaataatttttttaaaaaaagacggtaagaatcaattctaaaaaatactgaagcataaaatatgaacagaaccagttccataacaaaataaaaaaaggaaaataataataacacacaattcaaatattatataaagaagtgagttatatttgtcaactatttaaaaaattgagacaaaaaaattagttccgtaaatcaaccaagataaaaatatacacacaaaaatcagttaaataaaataaataaataaatgactggttctttaaactaactaaatcaaaaatcagttcccgaaataactaaggtggcgcttggtaacacttttttaatcagttttgtgtttttaaaagtggaaaagtgaaaatatttttcaa

SEQ ID NO: 171556 - DNA, 523 bp, Cannabis sativa
ataaataggcgagcacgctcaataatgtcaatattgtactttgactgagaaataagataacttttgaaagaaaaaaaaaaagacaacttcaatacccaaaaaataatgcagagaacccaaatccttcatctcaaactgagaagctagttctaacttaacattttaattccttgtgattacgcttaagaaattcactcttataaaccttgctctgataccataataattatttatgaagagaagaataacaaataaaatataaaatagatgaagagaaattaaggtttcattcaattgcaaagtcaaaaataaaaagatacaactaataagtaaaccttatacaggcaactaacaaaatattaaaattaattaacctaaataattaattaacactattgacaatatttggtgtatataaagaaattaggtaatatagccactcttcgcgcgattaatttaatttttttagtattataataaatagttacttaaaaatataattctaatatatagtaaaattata

SEQ ID NO: 171557 - DNA, 695 bp, Cannabis sativa
tccaccaccccctgcacaaagcctatcgctgtcctgcgcaaagcccgtcgccgtcccctgcgcaaagcccgtcgttgtcccctgtgcaaagcccgtcgccgtcccctgcataaagagccgtcgtctccttcgttgccccctgcgactgagagaaaaagagatgtttgagtctatgatatgcggctgtgttttagacttttgtctttagggttacacaatttattatatataccctatttgattttacccaaattaattattttatgattaaaaaaaattattttataaattatttatttatataaaataaagtaaaatgatacactttaattttatcccaattaattatttattatttatttatttaaaataaaataaaatctaatagtaaaagataaattttatttacactccaaaaatttctaaaaacaacctattttaatatttttttaatgtaaaatttatatctttaattgtaccaagtattttttacattttttcttctaatttatattcttaaaaaatatacccataaaataaaaataaattatatatcaaacatgtgtgatttttatcatcgtgtcaaaaaaaaaaattatgtatcaaacattataacaaaaaatttaaaataaaatagaaaaaataaataaaaaatatacatatacatatagatgatttagaaaaaaaaaatatga

SEQ ID NO: 171558 - DNA, 1253 bp, Cannabis sativa
tagttagggtgttacaatatccctggatccaagacaaatataactagctcaaacctattgaagaactggaagaggttattttagatccaaataatccacgaaatgtgtatacattgggaagaatgtggatgaaaaactaaaatagaaattaattgattttttgaagggaaaccagaattaatttgcctggaaccactaagatatgataggaatagaccctaaagtgatttgtcatcatttaaatatcgaccccagttacccagcaaaaagacaaaaaggacggccattagactccgagagacaaggggcacttaaagaagagattgacaaattgttaaccaatgacttatacgcaatgccttttatctctgaggcttttttgggtcatgttgtatatttttcccaaaaccaaacgacacttagaggacttgtattgactttttagacttgaataaaacatgtcttaaagattgtttccactacccatgatcaaccagttagtggatccaatagcagggaatgagctgatgacttttatggatgcttattctggatataaccatattaaaatgcatattccagaccaagagtatacaagttttgtgacaaatatgagaatttattgttataaagtcatgccatttggtttaaaaaataccggagcgacgtatcaacgactggtgaatggaatgtttgagaactagattggacgaaatatggaagtatatgtagatgatatgctgataaagttgattaaaagtgaagatcacacgaaggacctcgcagaatgctttgatatacttaaaaagcatataatatgaagcttaattcgaataaatgctcttttggggtttcctcgagaaaatttcttggcttcatagtaaatgcaagaggaattaaagccaacccaaaaaaactcaaggccctaatcgagataccctcaccaacgaagtctaaagaagtctgagctttgacagggagaatggcagcgctaaagagattcgtctcgaagtcaacaaataaatgccttccattttttaatatattgtgaggcaataagaaatttgaatggacagaagaatgtgaagaagcttttaaagacataaagaagcatttatcaacacctcctattttagccaaactaataactagagaaactttatacctttatctagttgtctcggagcatgccattagtgtggccttagtgcgagaagatggaaagcaccatcatcctgtttactatgtcagta

SEQ ID NO: 171559 - DNA, 1376 bp, Cannabis sativa
  modified_base (1307)..(1314): a, c, t, g, unknown or other
ttttttttttaaatttgatttttgtgaatatctaattaacttttctgatacattaactaaatattagttcatattttgagatcacgtaccaatctattatcctttactctctagaccctcctttgaagcctcatatccttgctctcaactatcatagttgctttttttttttcttgatacctaagaaaattttcaataaaataaaaggttaaaagtaaagcagcaattgagattttgagggactcaaatttgttgattggaagcctttgtcacagtattcaatttctaaggtatgaaactgtttcttgttgtgtaattttcgtcaagtatgatttctttttcgttttcagagaaatagtgttttgtaaaacaatcgtatctctctgctcgtatgtccattttttgtgatctaggtaccattttaaagataatttaatgatctacattttttgtgcagagccttttccctaattctgattatttcggtgtcaaaaattcatgttttcatactggctgtcgagttacagtttttttttagattttcttccgatgttgcctcagtaaaagtgcgatatctctctcgatatctattattttccagcgattttgacaccgttagtaagataattcgataatcgatattttttgaagaaacctttccctaatttggggttcttacttgtgaaaaatcgatatctttactcggttaggatatctcattttaagttttgtttcagaaaaagtgactttagtaaaaactcaatatctctctaaattttgattcattttgaaagatatttatctcgttttaaagcttaagcaaagaactacatttttttatgaagtgttgtttggatcggggtgtaactatttttaaaattattattttggggttgtatccagaaatcggcatgatccagaattttaaagaaactgttttaacaaaatatccataaaaatcctaggttataactccgattttgatgatctttatacagttagaaaggttttttaattatctaaaaactttgtgaacaataagatttctaattcaaacattttatgagtaaaattctgagctaaacttactttatatgaattataaatatagagtttatcgggggtctaagggttcgctaattgttgatagggcctagaagatattgtaagagttaattacagcggaataaaataattatactttatacttgtaatttttatatagtttgagtacttagtgagactggttgaataaattgtctcgaaattgtggaatatgatagtttcggtgaaatagtgttttgtcnnnnnnnngtatatggctgtttaatcatgttccaagtacttggacttggttggaaaccacacatgtatgg

SEQ ID NO: 171560 - DNA, 588 bp, Cannabis sativa
ggggcgaccctgtccaaaccacatatgaggcatatttagctttagcattcttagaaagcattttcttatcattctcatcatacgcctcataagtcttaacaactgttacaccatttatgacatgtttagcaatgtaagcatattattttctgaatttcttggaaacgccatttgtgctcaaaccttctaacatgttattttctaaatttcttggaaatgtcatgctctagattgtgaaatctaatcaaataaatgagcccttgctctaataccaattattaacctaagatatgtttccaagaggagggtaaattaaaaatttaaactaattctggtaaattaaaacttttaacacaaaactatgcaatcaatttcttaatcaaataaatgtaagtaatatggcaagcagcgacatataacaaataatcaaacttgtaaagtaaggagtttaagggtaagaaattacaaactctttatttttataaggttcggtagaaaagccacctacgtccttagtctttaaagttatagacctagttttgagttccactatcgagccaagttaatgggcttgactaacccttacaa

SEQ ID NO: 171561 - DNA, 1197 bp, Cannabis sativa
gtaagcacgggtgcaatttgttcgaatgcattttgtgaaggtaaatccatggccggtgcattatcttgatgatcaggtgcattttgcactgataattgtacagatggattttcttcgtcatggtaaaaatcagcacgatatacagtatgaatgcatttaattattaaaattaaaaaaatactccaattaaaaaaaccatgagcaaaatattttgattgtcatagttataatcatgactaacatcaccatgactctgtggtacgacggtaggaagtagtaccattaccatacagatggtgaagaaataaataataagagccattaatgctgtaaaaataatttaaaatattaataataataataatagttagtatataatatgcataaaaaagtatatatttttttgaacaacataaaaaagtatatattgatcatatatatattacacactcatatttattaatgtcttttttaaactatccttgatattaattttattagaatctttatgagattttttaatttttttcttttataaatttatgaaagattgcaaatcacaaaatataattatattcaaattaatgtggatccaaacaagtatctgatcgagcaaaattctttagcaacatatatataatagtaattattaattcttataattagaacataattctagtaaataacaagagtatatattactgatgttaaaaaaaaattaaaaagacgtatagctatagggatcgatcatgtataatataaaaaagatttaaaaaaagaataacaaacaatttaaagaaaaaaaaactatgtactcattgaacaattaaatttttccaaaaatgataataatatatttttggccgattaaatttaattatggtaaatatatctatagctgccaaaagaataaattaattaaatagataataagcagatgaaaatgatattaatttatatctcaagtaataataatataagccatgcatgcatgcagtacgtagttataatatatatatatatttatataaatatataatacataccaggtggtttggcgaagaggtataggcaagaaatgtattaggagcctttaggagtattcagagtgatatatagaatatctatttgttgaatttactttgataattatatatatatcaaaattattgatgcaaatgaagatatatatatata

SEQ ID NO: 171562 - DNA, 1238 bp, Cannabis sativa
tttctattttgcataacaaataggagtagtaaacttggaaataataatctcattattagtaaaaccaatgttaaataatttttgtgcaaaatagataaagaaataatatttctggtacattcaagaataaaataaacattattcaataacaaaacttattatcaaattttagtcagacattgcccaacaacccttggtagacacttattgctccgttcctaacccgcataatcacctctccatcagctagctcccttgacgaattaagtattcgtatagaagggcaaatatgatacaagtagctacgagtagcatcatgtcttgtttgattagactgctacccaaacatggcctgtagagaattcattattttagatgcattctccatcttttcatgcatcttacacagaacatcgtccatgctaacaagcatgaagcattaggccttgttgttggaatgaatccaagagtcatatctatcttgaatattttttggggcatttacagcgggttcctcaggatgctcctcagtcctataacaaattatcttaacaaatttttacttttttcctaaataattaattttaaaaaataaataataactattttaccaattcaaaatatatatttctaaacgatattataccactctttattgctacccttgatagtgtttcaaggtggtgattcagggaccatgggcctataattctaagctccaataaactagattatttatggagactcatcaaccaattttttatttataccatgattaatccattataaatatagaattgaactctaagtaattatagaattaaatttactaagttctactatagtgtccattgatataatcaattctagtgattagccctccttatatttgttcgtaattagttttggtcaaattacaagtttacctttttaattactaatttatcctttagtaccgttgatacactagtgaaagtataatttagatccaatctaaatttgtgcacaacatttcaattccaaaattaacacttaaagggaaccaacattcaatctgttaggaaagttaggattccattattagctcatgttcctagccatccacaatattagattcccgaaatagaagttttaagaatcatcttctctaataaactttaacgagcgaatcaaaaataataatcacattaacaggatttcatgattacttaggatttaggctgatctactactgatca

SEQ ID NO: 171563 - DNA, 714 bp, Cannabis sativa
  modified_base (379)..(382): a, c, t, g, unknown or other
ccttatgttgtgttaattgtttttattagagaagggggcaaaaaggtctttttacaagacctcttttgtctttttctagttaattctttggctgaatataagtttattttttaaaaaataaagaaggaaagaaaagggttggctttacccattgaagaaggaaccttaggagagagtatcattccctttctctctttgtcgtgcaccccaaagaaccagcaagaaggagtatttgctgctggaaattagagtttgtaacctgaaaaagaagattcaacttaaggtaaagatccttagctaaccttttctaatttttagtaagtataggttaggtttctcttgtgaatttggtttctaggtggctgtgtggattgaaatnnnntaatttggtattctggaaatgattttaggttgtttaaccttatttgatttgaaattgaaggttaatttgaagtttgagcaaagttagagtttatgaactcaaacctagctctctaatggtagattgaaaatttgtgtgttttgttgggttctattgcttgggtttggtttattataatgcattcaggtgttctggaaaggattggaaagtttggggttaaattgagttgtgagggttggaattttggttcccagaccagaaccggaattccggttcctgggagcctgtgtcaaccggtcgaccggttggtcccaggaaccggacttccggtt

SEQ ID NO: 171564 - DNA, 592 bp, Cannabis sativa
  modified_base (77)..(83): a, c, t, g, unknown or other
tttataatcaatgggagtgcaagagcagttcaattgttgggtttaattggattttgttttgggattatttcacaaannnnnnnaaataacaaaaaaaaaaaaaattgcaaaaatacggttgtacggaattttaaatatttttacgattttcatgattttatttacaaaaaatacggttttttatattgtattcttattaatttgttgttgattttttatttatttgtatgttattttttattgttgttttgatgttatctgtatgttattttcttgttactctcatgtagtttatttcttgtatttttataaaaaaccgtagtaaaaataaaaaaaaaaaaaatctttgaacataaaaaatataatttttttacaagaaataattatctcttttattttctctcatggattaaaacacagatgctatggaatctgttttcattttaagcatataatatataggctttgtttgtcttagtaatgtgtgtttgacataatttgagaaagagaaatgcaagtaaatgaccctatttctaactctagttatagttaatgtctcttttttaaaataataaagcaaatatcctttttt

SEQ ID NO: 171565 - DNA, 644 bp, Cannabis sativa
gtaatagtaataatttaatttttgaattgtttgtctccttttcccctaactgtaaaaagaagtaaaaatttatattagtttttatatatattattatttgttaatataataaataggataactgtaatgccctaatgctaaggcatgctacaatgcttttccaattacaatgctgtctttgttaagaatttccttgaaaaaacgtgtcaaaataaaacttttatattaattaataaactttataatttacaaaactatttacaagtatcaggatcccatttaaaagcttttgtacacaatataccaaaatacgtaactggtcgcacagcgactacaaaataatatccctagatgtcccaagaccgaacactccatgtcaccctgctttgacatgtacaacctcatcccagctcaagctcactcatgttcatcttttgcctttcctttaccgatacatggaagtagaactgtgagtgactgactcagtaagaaaagcatataacatatcatataatttcaaccttatatttaggcacccatagacaatttacaaggcttaacaaatgagtaagaacgttccatacaagggtacaaccactataccacatacactacgcaccacagtgtacgagtgttggtagggt

SEQ ID NO: 171566 - DNA, 663 bp, Cannabis sativa
gcaaatcccaaattagagagcacaaccgaatgaaaaatctgactccaagaattagaaactaatgctctatcaagacgtacctcaatccatgcatttgtggctctacctttttcccaagtgaactgatgaccttgcagctcaagatcttccaatccgcaatgcaacagagtttgttggaacccagttaacagccaatgggggtaaggacgcccacccctcttgtcttcttgacgaacaatattattgatatcccctataacacaccaagggagtggagaccggtctttgaggctttgaagcaatgcccaagattcacttcttttattacgatttggttctccataaaaaccagtgagtcgccaatccggagttgtagaagatattgatatttgaagatcaatatgattattagagtaacccaacaaagtaccattatccttatttttccaaagaaaagcaatcctacccgaagccccaatagcatcaaccacaaagacaccttcaaattgtaaagattgggccaagcccaccacttttgacttatgacatttagtttcacacaagaaaataaaatcgggtctcttttgaaaaacaagttccttaaggaattgaatagtctgttggttcccaagcccccgacaattccaactcaacacattcata

SEQ ID NO: 171567 - DNA, 624 bp, Cannabis sativa
  modified_base (336)..(337): a, c, t, g, unknown or other
  modified_base (568)..(596): a, c, t, g, unknown or other
caccattgaatgaacttagtaggatgtttgaaaacaactagtacctgctccaagaaattccattcaataatatcataggctttctggagatcaagtttcatgcttatggtttgatatacaatttttgttaaatacggaatatattctaactcacaattacaatgatgtcaacacagtggaaggtaattgtcattatatgcttcaaaagattatgtcccatgattcatcagtgcactagatttacacttatgtgatcatcaacgataaagtttacttacaccttggataagtattatttccattccagggtattggtaaagtatgctagtatcgganntatggagtatacattggacttgactgatattgaatgtgccaaagatatcataaacttaccgttatatctttctaactcaatatcacttggttgatcttagatcaaaagactggaatcctaatatgcttaggttggacctcaagagtgttatttgtgttcttagagttgttcgttaaagctaaccaattgttttgggccaagatatagatcttgggaacatgatagtataannnnnnnnnnnnnnnnnnnnnnnnnnnnnaatatatagcttctatctggacatagaa

SEQ ID NO: 171568 - DNA, 685 bp, Cannabis sativa
tcagtttcaacttatttcatttttacttatcaaaaaaaaaaaacttatttcatttttcctctttttaattaattaggttaattttaattttttttatttgaattttaatgtggattaaattaagtttattgaacttttaagacaattaaaaattttctttaaattatcaagattgttgaatgtaaaattttttcttcaattttattaacgaaattctaacatagataaaagtttagggacacgatttggtacatactaaaataacaaaacataatttagtagatatcaaagtttgaggacacaatttagtatatggacaattaccgcattagtaaaattgaatagaattgttattaaattcaacaatatcaatagttcaaaatttttttttaacaatatggaaaaaatttaaaaacataatttaatacatataaaaatttaggggttaaaaatcttgcctaatttttcctttttttccgccttacaatataattaattatcaacaataatacctctcttaaacaaaatatctaaatgttatgaaaaaaaaaaaacaattatacctaaatattataacatataataaataataaatacctgttataaatagtaataattatgtggatgtccaaatcttttatttattaccatgaattgtaatgaacattcctcttttccttagttt

SEQ ID NO: 171569 - DNA, 580 bp, Cannabis sativa
tgatttggcctcaattgcaggtataacaagcatttgtgtcgaactcgtttttgcttaacgaatgactgaattatgttctttttatatttcatattaagggttaattgcggcataactacctaaagttttgagtatgtaaacgacatatatttaatgattttattatggcataagtactcaatgttagtgaaaactgtaatttttttttcatttgaatttattaaaaaaatgtttagaaataattgatactacatgtttctattcagacctataaatgatttaaaatgtgggccttataatgaagtctgtactgataaaactagataaaaattacaattttacaaacattagtacttatgttggtaaaaaatcattgagattatgccacttaaaaactcaaaactttaaatacttatgacactattgtaccctcatattaataagactgggtgtgtgtttatctcggaaaaacacctagaaacaagataacaacctgtaatcaacactggtttttctataaactttgcttatgcttatgcaaattatatttttttaaaaaaatgcagaggatgcaaggttg

SEQ ID NO: 171570 - DNA, 560 bp, Cannabis sativa
atttttgagactaaatgattatccatgtagttagaaaaaattttaaaaactatttaaaaaaaaaaaaaaaaaagagagagggagagggataatatttgataggtatcacatcatttttaaaagaattagattgtcattataaaaaggaaaaaaaaaaaattgtaacttcaacatatatgcctttgttgtgacttcaacatatatgcatttgacaaagaaaagtaatatagaggacaaaagaaaaaactagcgtatacatacaaacataaaataaaaaaaaaaaaaaaaaagagcagcgcacctacgcatatacctaccaaaaaaattgtaaaactaaaggtatattacacaattaaaaacatcaacgttagttgtgatattcttttaacaatttcgttggtaggtgtaaatttctcaaaattaaaatggtgggggtccacctaagaattcttgattgctcgagagttttcaaaaacaaaatttgaatactattttgagttttaggctaaaaaatgaaaacaccatttttatgtttattgtgtttttaaatcattgaatcc

SEQ ID NO: 171571 - DNA, 552 bp, Cannabis sativa
gtatatcatgtaaatttcccttttataatcacacaaggtatattttttttggtgcttcgtgggcagggatgcacaaggatcagaaaatttgcggggattgctttcccatcccatccccgtttattccccaccagtaatgggtcgaggacgaggggaagaatccactaatatatataaaaaagtttattttaaaaagtttaatgtaaaaaagatattaacaaaaaaattacacattacttattattcaatatattaattataatacaaaacactactttaaacattataaaaaaaatactaatatactaaaacaatacgaacacatattataaaatattaataaaaagtaaattagaatatcatgtgagtcactgtcggggcggggagtgccatccatgtccctgccttattccccatctagatggggaatccccgattgattagcggattccatccccatgaaaaaaatgtgtatccctacgtgcaactaaacatgattattatggtaataaattgtgttaaaattttgtaatgaaagttttcaaaatgagt

SEQ ID NO: 171572 - DNA, 1722 bp, Cannabis sativa
  modified_base (351)..(364): a, c, t, g, unknown or other
agagagagagagagagggttcggctagggcaagaacaaagcaaaaattgattttctaaaatgccaaaattcccatttttgcaaataattcaaatgcccaaaaacgataaaattgcccctagggccatataacacacattcaattaaggtcaaataggtcatttccaacacacatcacaaaaccaaataatttttagattaatcactcataaataaaatgccaataaatcatcccaaaattgtatttcggccccgaacccggttcggcctgaaatacttggttgttactttacctcgccgacttgtcaaaacacacctaaataatggaaaaacaggcatactatataataannnnnnnnnnnnnnacgtaattaaattaaattcatagtttatccttctgtaacgccctaacaattaggcacgctacccaaggtgattaagaaacctaatcccataaacaggattactacgtagaaaagtgtgagaactttaaactttaaacgaaaatagaatgaaaataaaacttgtgataattttaactttacaatcaaagttacatatttcaggatccctaaaatatttttcaaaatattacaagtctttccactagtcaacctaagcggcaaaaccgaattacaaaagttcatcactggtggacccaacccgcttggtctagtgtggtccgaacatgtacatacatcacccagctctcacactcatggctgatcagagacagatttaccctttcctgcacagtagagcacccgtgagaaaagcccaataagacagtttaaaataccaataatcataaataacacatcatataaacattaacaacatttcacctttctctgcatgacacagacctgcatgttacgctcacatgcctatttatgtctatgcgacatagacctacgtgttacgctcacacgtctatatacaataaggccttagaacggttcatctcagttctagttatcgagtccaatccgattatgccttgaacgcataaccctaaatctcaatatacacatataattaacatggcatagcatttacgcattattaatcactagggtaataaccctaggccattaaccgcttatattagggtaataaccctaatcccagtttctaattactcacatatatcatttccaatataagcgccattgcgcacaactctatgtgctaaaatactgtcttacctgatgtctcgcaaatgttaagatttcaaatccctgcgtgcccctgaccaagtgcctgtaatcctaatcacaaattccgagattcacaaatctaggattaatccctaattccactttcacataatataaaattggcattcaattgaaagatattcatatagatctcggaatgagctttccaacgatatatagaactcccaaaacacagtacggatcacaaagttatgagtattcgaatatcgcgttctaatctacccagaaacaaggggccggcccgcggcactccccacatggggccgtgacacctgggttcaaatcccaggcaacaacacagaggcgggccgcagcccctgggttccagacctagaaatacccactttcagcttcgaatttcatgcttaaacacacctaacgcaagacaaatttacatatgattcaaaatcatcctccacaaactagcaagtactaaagcagggcattaaaatacatataacatgcatcaaaaagatcggaag

SEQ ID NO: 171573 - DNA, 664 bp, Cannabis sativa
  modified_base (193)..(197): a, c, t, g, unknown or other
aagtttactgtatagttttctaatagaatgtatatgtatatttgttattttaggttttctagtgtgttttttatttttaatgttgtatgttattaacagtttataatttagtagtattttttggctatagttttggttggtatactaattagtttttgttgtattaattttttattaagtagattttttctannnnngtgcttgatcaatgtaatactgttgtattactttttatttttatgttaactatttcagattaaagtttacttattagtttctttttaatgatgttatgggtgaatatttgcttggggatatatatatgattatgtgttttttttatttgattaagcacttatatatgttattttctaagtttcgtgccttaatgccctttttgttgaccaccatagaaactatgttggatttaatttaataaagaaataaacaaaagagattatattttcatagaattttcatcaacataatgatggttttctatttgttgcaattaattattttttctattttgatttcattattcttttttatgtagctttatattaaaataaagaaactgttttattgtttttaatattatgaaagtaataccgatgtattactttttatttttaagttcattatttcagaatacagtttactt

SEQ ID NO: 171574 - DNA, 618 bp, Cannabis sativa
ggatgttgttaagatggttcaggaattcttccgatctaaggtcatgcctcggggtctaaatgatactaatcttgttctcattccaaagaagaagtctccttctattatgggcgatctgaggcctattgctctttgcaatgcgtcatataaaatcatttcgaaagtcatggctaatcggctcaaacacttattatcgaagatcatctcggagtttcagagtgcgtttattcctgggaggctcattactgataatgttattgtttcatttgagatcttacattatcttagacataagcaacaagggaagaatggttgtatgactttaaaacttgatatgagtaaggcatacgataggatggaatggtctttcttacgagctattttattgcggatggggtttgcggaggcttgggttgacatgatcatggaatgtcttcgaacgatttcgtataatattgttcatggtggtgaaagtttgggtcctattatcccatctcggggaattcgccagggagatccgttatcgtcgtatctgtttatcatctgtgcagagggtttgtctgctcttattcggttgtatgaagagagggagtggcttcatggttgtcgggtggctag

SEQ ID NO: 171575 - DNA, 1018 bp, Cannabis sativa
ataaaaagtttaaagataactacatgtatttatttaaaaatcttgactttgactcgaagacggctttaggtaggccaaaattggcgggcctgggccggttgatggataaaggaggtactagctagtaaaggttagttgagtttacggatatacccctgagacattgccgtcttacgaggcaaaatacatagccggcctcggtctgcggatgaaacgctactttcacccttcgaatgtgggcttccccacagcaagcaagaaacaaacagacaattcggctttgcataaaagccataaaagcaaagatccattcatataagccaccaaataaagattgagctatgtttaattaaatatgattatatatgcaatgaacatgacccactgcctccgctttaaaaatgactataaatttaaaaaaattacaaaaatacggctgtacgaaattttaaatatttttatgatttttataattttatttacacaaaagtacacttgttaatttattgttaatttttcattatctgtatgttattttctgttgttattttgatgttgttcggatgttatttttctattacttttatgtaattttcttattgtttacgtgttgtttctataaaaaaaaggttaaaatgtaagaaaaaaaaatctttaaacgtaaaattataatatttttttacagaaaatagtattttattatcccaaaaatgagattatttcacaaatacacaaaaataataaaaatatttacaaaaatacgattgtacggaattttagatattttcgcgatttttatgattttatttacaaaaaatacgacatttttatgttgtactcttgttaatttgtgcataaagtttttacgtgtaaaaaaagttttttttgactattgattttagatcatgtgatcattaaaatataagatatatactctcttacgttaagattgcttctatataattaaaactttatacataatataataatatttaattatatatttaatttaaaaaat

SEQ ID NO: 171576 - DNA, 786 bp, Cannabis sativa
gagcttcatgttatattttctgaggattttgaagcactcactcagttcctctattttcccctaacctttctagatttgacgagcatgtcgtccacgtataccttcatgttatgcctgatctgatctttgagcatcttgttgactaaccgttgataggtagctccagcgttcttcaatctgaactgtataactttatagcagtataagccaacatagtctggaagcttgtttgttcttggtcgggtggatgcatctttatctaattatgccctgaataggcgtccataaagcttaagatattatgccctacaatagcatttactagctggtcatttcttagaattagaaaacagtccttggacatgccttattaaggtcattaaaatcgatgcatacatgccacttcttgttaggcttgggaattaagataatattggctacccatccatgtgttacgaaaaatatgaacaactacgcaagtgtacgtaatcaagtagtactcacataagtgagatcgatcccacagggaattgaattgaatatcactaaattagacttatatttctatttgctaactgataattttgatacaaataaaaataaagagtgacaagataataaaattatgcaataaaagtacttaatcaaagatgagaaattagggaaacgaatcttgttgatttaattacgcagctgttaatgctaattactattctctttcttaatgtgaatgacagattataaaaaataattcaactatttttagatcttttaggccctaaatca

SEQ ID NO: 171577 - DNA, 576 bp, Cannabis sativa
acataaaaccgccccatgtttatcatgtcaaaatctgttcaaaacattatgctataaaatttaaaggcttatacaaatcaaaaaaaaaaaaatccttaaagttaaagaactgtctaacctttgagaggcttgcaaattgctgccctcacccttttatcttctgaaaagataatagcccctaagcctactgaacttgtattattcaatactgttgcatcaaccataagtattgtatgtctctgttcttcttgggaatctctaggtagaaattctgaattatttttatttctttgatgagtaaggctactaaccttggctccatcacgagcagatacaatagtttcataataattgtcaacccaattaacaatatgttgtggttgtcctaattgttgaccatgagtaactttatttctctccgtccatatagcccaagcactaataataattttttcaaacaaatccttttctatcacctcagaagcatataatatcacatttttgaaatcaattacctctctcacttcatgtagaaatttaaaatccagaagtttccaaatttcttgtgcaaaggga

SEQ ID NO: 171578 - DNA, 582 bp, Cannabis sativa
  modified_base (223)..(224): a, c, t, g, unknown or other
aatgtaagactagccattttgtgttatataacaatacaactttctagttcataacaaaaatctaataagtacaataattcttaataaaaaataaattaatatgtttacatcaacgtatatttaaataagcatataatcaagtaactcatattaaaataaatgagttttttgtattataaatatctaattttaactttcgattgtaaataaatatttaagtttnntttttgacagtaataatacctaagctaaaattctgaaacttccataggtacctaacgattaagtgttaacttaattgccacatgacagaccttaattagtctagatcattaaattttattttttaattaaaaattaattaaaatatatcaataaaaaaaaacacgtgtataataacttgacacttaatggccaagtaactagaaaaattctaaaaatataacttatgtattattaccgtaaaaaattaaacttgtgtatttatctgcaataaagagttacacttaggtatttacaccacaaattactcaaaaataaattaataaacttttttaattcatattaaaataaattaatatt

SEQ ID NO: 171579 - DNA, 615 bp, Cannabis sativa
  modified_base (548)..(567): a, c, t, g, unknown or other
tttttttttttttttttaaactcaagagggttttgcagcttttgctcactgttcatgtttggacagaatgattaattcttgtttttagatattgtgttaaggggtatagttattaattctttagttcatagtctgataagatatttgaaatttctgaaccattgattaagtgaaagcttgagtttttttcactctcttgatgttttctgcattaatgcttctagctgttgtagcgttgtgtagcagagcgataaccattctctcgttattttctttttctgtttcatatatacacatttatatttttggtcacttgtcaaagattacgacacttctctttacacactttgaaatgatattatcattcattattctatcagtatgctttgtgattaattgtgtacttacctaataaaagattaatattgttgatatatttcatactattgggtcttgcttcttgaagatgaatgagtttattatcccctttagaagcatcaatgcagctagtagtattagtagccagttagtgttggaaattattttannnnnnnnnnnnnnnnnnnnacaagtatgttgattaacaccgtaaatatgaacttctacaacgattat

SEQ ID NO: 171580 - DNA, 1204 bp, Cannabis sativa
tttttgcctacaaaatctttagttgcctagaccaactccaatcaaataacttacaaaaatactataaaatttagagaaagtatacaaaaatagacgcataattttttacatttttactgtactaattttatcaaaatattgtgttttagtaaaataagaagacaactcaaaaacaactaaaaaataatcataaaataacttaaaaaataactataaaataacaaaaatataactacaaagtaactgaaaaataacaaatattgatctaattgcaataagtaaaataataccaacttctcgatatgtttttgtattacgattttttaacttgatttatctttttgtactattacattgtttttttttttttatggaatttgttattacaattttattctttcaacttttttttcctcttttcctttttgagttaatgatagttaaaaaacaactaaaaaataacataaaaataacaaaataaatgcacatatatacaataaaaatattatctggaataaactaaaaatatacacgataaaaaatatacacgataaaaaatatacataaactaaacaacaactgtacccaaaacacataaaattaacaaaagaaacaactatagaatacctaaacaacaacataaaaataactatgaaataacaaaaagacaactataaatcaatagaaaaatagcaagacatcaatcttgttaatagggttgagcatcaatcagtttggtcggtttttttctatataaaaatctagaatttaattttcggtttggattggtacaatccgaaaaccgactgagcaatccagaacttgtcttaaaaccgactgttttgaacctcggtttggtcagtttaaatcgcccaaaccgaacttcttttttttctttaaaatatgatctaatttattgtataagcacattattctacattctacaactacaaccatactttttaattgttcaaaaactgattgccttgttctttttaacggtcggttttgattttttcggtcggtttattacccaaaaaaattgttagttcaatggcagctttaaccattaatgatttttttggttttcagttccgtctatttcagttccagtagctttcaacaggtcggtttgaacggttttttcaatttctagatttcatgctcaaccctacttgttaaaatatgcaaatcatttataaat

SEQ ID NO: 171581 - DNA, 868 bp, Cannabis sativa
ccttcacccgtggtaggtagttgggtgtttggttgttcaagatttgtggctagtgggacccttgcattctctgaagtctacagtgtgggatctgacaccagtggatccacctgatcgactacgcctctacgagtttgtaccaccatagtgtttctaatcaaactataagcaaagagccaacttagattattgctctcaattagagcacaaaaatgttgacctcgcttttagccaacgacaatgagtcaaatagtaagcgatagaaaatgtaattaacatatagtacaagcgaataaataataaagaacacaaggttttaaacagtttcagccccgtcagttcggtaatagcctactccccttgatttttattaacccaagaacaaagaacacaatgttttctctcttgaagctctcacaatgaaatctctgagtatgctctcttagatttctctaaagtaattctttcgacccctctaccagtgagactatttataggcttaaatgattcagggaaggcttcccttttgcttacaatgtcaataattggtaagaacatatattacatatttagattacatggattgtgggatttggacagcttgtcatatctctgtgatacaatcccatactaatagggattgcttttatgcttcacgatgcaaattctggaattcctaagtgttgatgcgctcctcggattgtctactgctcagctgggatgacattatccgtgcaagtgtatgctgagctttgttttgaacatctcttctgctagatgtagggaattaggttcacgtgtcaccaacatgtgttgccacgtcatagtgcaaaaatgggataactaaagtaatcaagattgtgtgatt

SEQ ID NO: 171582 - DNA, 682 bp, Cannabis sativa
  modified_base (604)..(605): a, c, t, g, unknown or other
acaatttaaccctaattataccatgattagatctttagtttggaggaatttggatgggaagtttgttatgtgtgtgtgtgggaaaaagtgtgaaaattgaaagaatatgaaaaaaatttagattgacggcaacttgaaaaaaaaaaagaaaagaaagaaaaatatgacaaccagtgtcacattcggaaaaaaataaatataaagttgttgcaatcttgttgaaaaaaaaatctcatgtaattataaaaggggtattgggattgtatgtgaaatatatatatatatatatatatatatatgtgacatgattggagaagcttatggtataggcaagcctaattaaccatttcaactacccttacctaagcctaacactataagcctagaaagaccttttgattcttggttgtgcattggtttatattaggagagaataataagtattggtagtatatggaattttgggttagcggattgaaggttgtaattggcatgcataaagtggttcaattgttagttaattgcgttctatagtttcatgagctgaatgaaatcaaaattgaagtgtgtcaaggatgtaattgaactgaaattctagattgtnntgcataagtaaaatttttcataatcatgttattgagtctacttgaaagttactcgtgttctagagattgacttgctt

SEQ ID NO: 171583 - DNA, 853 bp, Cannabis sativa
atcctggtaaaaaaattccaacagagggaacctaagcagaggtcgtgtatctaacctcttccgaaggagaaggccagtacacgacaaagtaagttctagctcgagacactcgaggtctcgagggcacagtcgatcaggaaggcaaacacgagaaggaaccagaccccgacgttatgttgatcaagaaagcattagcaatacgcgaaactatcagactgagagttactcagagatgggatctgtgagaagttatgagcaaagacaacatgatcttcgtaaaaatttgaatcgaagacaacgtgatctttgcgagcgactaaattagaatgcacccgacttatgccatcaacttaatgccaaccaacagaaagtggatcccatccagttgtgaatcattgagttggaggataagtttagaaaatatcaagatggggaacatgggaaattacctggctatgacttggatgaggaaaccgagccatttcatcccgatattctgaatttcgaattccccaaggattcaaaaatccacacgtcttgcaatatgatgggactacagatctagtcgctcacatgcataactttaataccataatgcgagccatcaatgtctcgaataatttgcgatgcattttattctcgatgtctttaactggggcagcgagtagttggtttgataagtttactcaccattcgataacgtcttgggaatagctgtccaaggatttgaagaaaaaatttcaagctgccagagagcaggggcgaccctgaaaatatatgggcccaagaccaattaaattttggggccctcaaaaatatataaaaaaaaatcaaaaaaagagtattatgggat

SEQ ID NO: 171584 - DNA, 622 bp, Cannabis sativa
ctgatgatcattccagccccttctacctcatcaccggcgatcaccctagccttgtgcttgtctccaccgtcctcaacggcaccaattaccaaccctggaaacgaggaataaccatggcgctcattgccaagaataagatcgcatttatcaatggatctctcgcccagaacctggtaacatctatcttaattcttggttaaaatgtaacaatatggtcatgtcttggttgattaactctgtttcgtctgagattgcacaaagcataatgtactttgacttagctactgaaatgtggaacgatcttgctgagcgttttaatgaaggcaatggccctcagattttctaattgcagactcaactaacccgacttcaacagggtgacaattctgtttctgcttattttaccaaactaaaatccctatgggatgaactcaaagagttccagccaattactacttgcacatgtggtgcaatgaaagtattcttggattgttacaaccaaaatcaagtgcttcagttctagactggtttaaacgaatcttttgcctcggttcgagcacaaattctgctcaatgaacccataccttacctgtcccgtgtttttgctatgatcgttcaagaa

SEQ ID NO: 171585 - DNA, 580 bp, Cannabis sativa
aattatttgttttactaactttgactttatcctccaccaaaaaaattaataaaattaagagcttatgacacaaaattttatctcttttaaaaaaagagttgaggttattgtaattaccggtggatttggttgcttatggtgacacttgaaatgttattttcatatattttgtccatttatttatgcagatactacacaccacaaaatgcctttgataaagataccaacattcaaaatcattcagtcattttctttttcttttttagatttattattattattattggtatagattaatttatttattaggaaattatcttctatattactttttaattttttatttgagttttttgcagttaaatcctcttaattattatttcagataaaactctcagaattacttaactgttagcgaagttagagtgacatttattgccaacatagattgattatgtgtatattctggtaaacgtggcacgtttatattagtacacttaatactattatttaaaaattataaaaaaattatttcaacacttgtaatattttttatttattatttttatagttttattta

SEQ ID NO: 171586 - DNA, 555 bp, Cannabis sativa
aaacacaaactgcgaccgaaacccagaccagacccaggacctatacccaaaatcaggatagggacctgtgcaacgttactaggaccgggacctaagacccaaatttgacatgaacttgaacctagtacccagctcctgacccagcacccaaaatgcaaccacgctgggacccgagatcgagatccagatctggacccggggcttggacctaacccatactcaatgtctggatctgggacctagccccgtacccaaacccagaccaggacccgaacccagactcggatccgaacctagtcccagacccaaactttgacctgaactcgtaacttgtgacccaaaattggaaccgaaactggaagtagactaggacccgagaacgggaccggaaccaggacttggacttagacaaggcaccgtagccggacctggacctagacccagaaccgtaaacagaccaggacccagactcaaacccagacatagaccccaaccaggatcccaacccaaacctagactcgagatcccaactcagacccaaacatggaaccagac

SEQ ID NO: 171587 - DNA, 774 bp, Cannabis sativa
ccatattctttgggtcaccagacataaagttttttggttgttccacataaattgtctcataaatgttgccattgagaaacattgttttaacatccacctgatgtaactcaagatcaaagtgagcaacaagtgccattattatcctaaaagagtcattcgatgaaaccaaagagaaagtctctatatagtcaatgccttgtttttgagtgttgggtgtacatccaaagtcccacattggctagaaatgggaaagatcttgggtatataaggatgaacactatctccattggaatgaggccttttggcaaggtgcccaaaaataaatctgtgagggcttaggcccaaagcagacaatatcataccgattgagaaatagatggtgtccgacagtccttacaagtggtatcagagccaaatctcaaaattagccatgtgaatgtatccccagattgccaaacaaaaagaatgtgaagcttgctgctagagccgttggaggtttagatctggttcgaagggattttgaatcttgctggtgaagggatgtatctagcttactcaaggggatcttgagtggttgaattgagggattcatgtatttgaagggatttcgaatctagctggtgaagggattcatctagcttactcaagggaatcttgagtgttggaatcgagaaattcaggtttagatctgtaatcgtttgagggtaggcaaagtggtccttagtttgaggggaggattgttgggtgtacatccaaagtcccacattggctaga

SEQ ID NO: 171588 - DNA, 918 bp, Cannabis sativa
caaatccaactcagatatcaaacactccataagtttgtatacaatgtaagatggttccaaagctgttttggtatatgatttattgactatttatatttggataaaagaagaatcaatagaatatctgtttataaaagattatttatcaattaatataggagtagagatacacagtgttgtaaatacatatgtgtcgagtgacttgattcatatttttatgtaatttttaagatatggaccatgttgaccataaaagatatatgttgtgtcatattcggttgggaaatttgcggcaaaagtcttctaaaagtttacgttgatccagattagtccccaacttttaaaaatagcggtaatagtatttaagctggacttttgtgtttgtccgttcatatcctatccattagtatgactaacgatacacgtgtacgcctatgatttaatctcgtttcattttgttttacttatttcttttcaaaaatgaaaataaaatattttccaaattaacaatttaaaaaaaaaataaaatttttaactaaaaaggtaaaatggtaaaatactgaaataagaaaactccatcaccccgaatcccaaatccctaatcgaaacccaaatccttcgacaattgatctagaactaggtcacaatgatccaaccccagaaatagattcaactgtttatcaccttgttgaatcgtgacctaaattggagcttgaagtcgactgttggggaggtacccagaaatcgaaaggatgtctctgtaaatcgagagagggcttcaaagattcattcgtggaaggttaggatggacggggagggttcttacagtagctccagtcatcaaaggtcgaaaggagtggttggttctgcttatcgaagggatcctcaaaattgttactgtggcattccgtggatcgt

SEQ ID NO: 171589 - DNA, 506 bp, Cannabis sativa
gttattgtgataaaatataactaataagataaaatatcaaactaatagcatcaatctaatcttaaaacttaatttaataaaatatatttaaaaataataaattttgaaaactgatatttatggttagcaatttaaaaatgatctaaattatcttaaaattttattactattttaatgtaaaaataagatcatttcatattttattaattaaacatgtaaatatctgatcttataattaaaattaataaataaaataaaaataataaaatttcaaaataacaaatatattgagaaatcaatttttcaaatttaaagcctactaatatttaaaattaatttaaattaataataaaattaataaaaattaattttaatctgataatcaaattttatttgaaaatacacaaaattctaccaaaatttaaatttcatcagaaaatgatttttagaagttgaaaaaatagaaaaatgggcaaaacaggagagtatgcaatgcatactccttg

SEQ ID NO: 171590 - DNA, 633 bp, Cannabis sativa
taacagtactagcaattatagtttcaagaataggttttattcagaagaaataaagaaaaaattggatggtaatagtagtgaccaagattatctttgagcaacttgtgaatgatgataaacttaatccagtgatcaaatttatgaataaagctcaaagagaagaagcaaatgtgcttttggcaattttaactaagaacgtgtataattttctctatttgatgaaattatggtgtacgtagattttagaatgataatataaaaactttgaagagtacatattttttgcaagttgtgatactttgcttataaaatattatttggggtggtggtaaagcaatttttgatgtgtaaacaattctcattcatggttttagtttcttgtaattttatctacatgggtctttactattagtaggcgaggagctcttaaaaacgaaattaacttctaggtttataattgaagcttccaaatgtatgagcaagattattgagacacttaatactttactatgagtgtttatttttattaagctaatgctggttgaataaatttattccaaaatctaatcctttgcaggtaaagttggaaaataatatagcaaaattagactatattaagataaatgaccatag

SEQ ID NO: 171591 - DNA, 640 bp, Cannabis sativa
gatttacttattttaaataaatgttctctttttgttaattttgttagcagattttaaataatttttatatatatatatataatagcttttgaaagttaatgtatttttcagtataatgtgaacctcattgtcaaattgaaattttgatttgcttcattggacggtcagaaagcttaaataaatgttctcctctcagccttctcacgcgatttagcagatgaagcatggttgttcaaatcgatgaagccaatcgaagaatcgggtaaatccaatgatgctctctgatgtatggacgaaacttctcaacgattttggttggtttaaggtactatctttcgctttcaggtttagattaatcatctacctttatttatgaattctttttttctttctattagaacttcgataatctcgctggtaaatccctaaattataaatacttatttatatagttgatcaatcaattaatccatacctgtatatgtatgaatttatctctatataagattgatcaaagatttgaaacaataatcattttaatattcgttttagatatgaaacaaaacaatgtgtcctgttttgttggatactttggggcctggtccagagttggccaccactgccaaaactacatgaacca

SEQ ID NO: 171592 - DNA, 570 bp, Cannabis sativa
tgatttgaattatatacatttgtacataattttattattttctccatatataattttttcattcagtgacagagattggccatttaaattttctcttcattgtaatttttcattctttttcagtgacaacaattttagctaatactttctattcaatttgttttaggtttaattaaatataattttatattttcattttattttttttgtgtaaatatcttttattaaattatatataatattgtcatatataataattaaaatatataataaaattaaattaaggtattacctagctagtatatatatggaatactttttaatgtgtattactcattgatggttactaaataaatttaattataaatactaattttaaaaatatttaaaaattattagattttgatccaatgtcaaataataaaaaaaaaaattaaatttctatgcttaattaaattacttaattaaaaaaaatgtaaaaaattatatatttttttacactatatcaaaaatatgtatatacaaatatttaagttaaattcaactttttttatctttattttactgaaa

SEQ ID NO: 171593 - DNA, 564 bp, Cannabis sativa
gattaaaataaatttgaataaattagagcaaaattttttaaaaaataatttgtggcataaatatttaaatttattttctagttatattgtgttatattttataatttctgtaggtatttggctgtgtaaaattagtttcaaatgtcagtcactcattgatccaaattatttaactttttttagggtttttttttcaattttaacaaaaaaaaaagtaatgatattacaaaaataattttagctggccaaataaacaaatatacagcccaaataaaaaaaaatttacacaaataccacttacacacaccttcaacccaagatccgtgcttcttgggcaactatcacgcaactacgcagcagcccaacgcaaccgaaatgaaaattcaactagaaagagaactaccattaattctggtgacttaaactgagaagatgatcaaaatcaatcagaacaagagttgttttaaataccacttacacacaccttcaacccaggatccatgtttcctgggcaactatcgcgcaaccacgcagcaacccaacgcaaccgaaacgaaaattcaa

SEQ ID NO: 171594 - DNA, 535 bp, Cannabis sativa
  modified_base (490)..(500): a, c, t, g, unknown or other
tttcaatgaagggttcttcattgcgaggaattgtaagaactctcattggatgatcaaatcaaaattattgttttagcttatttaagatagtagagacataagagttgagatagctgggagagtctagagagaataataaattcatatattctttattaattggttaaatgaaccaatagttctatttaacaagtcatgaccactcttcacacagacaactaaatatgttcttacactaataaattactaaactaaagagtaatatttgttattattttctgttctttaatatttgtttaagaaaggggtgtatcagcttgacttagcaagtcttggaatgatggctggttcaagagtgagatataagaagggtagctcaatggttaggcatgttgtttactctcgtaaggtttgatgccacatcatctaattataaaaaaaaataattttttaaaactttattagaggggtgactattcaatggttacannnnnnnnnnnaccatcatggttacatttttctttgacctgtaata

SEQ ID NO: 171595 - DNA, 1148 bp, Cannabis sativa
ttttttttttttttgtagttttgtttctatattgttgcactacaattagtcgtcagttttattaacactctgataattgataagtcaataattacacactgattaggttacattgttgttagtcttatttgcacgtatttcatatagacaatgcaatacaaagctctcataaaaacaattgtaatatggtcgtttgttcatattttaatattgattgagtttatgttgatttagagtgctcttacaattgtttcttcacaaaatattctcaaactacaagtcgttcatcaatccaataatactttgttaattttttttaataatatctaagcatattgttcatacaaaattacaactacgttatttatgtgttgctccatagttgtgttattaaaattttattatgtataaaattagggatcactatattgtggtaagtttgtttaaaatcatttaaaagaacatcacatgacacgtttatattggtaaactaaatatttttagttcaaaattcattttaaaattaaataaattataaaaataaaaaattaaatatttaaaaaataaaagatattataaatgttgaaatatttttttataatttttaaataataatattaggtttatcaatataaacgtgtcacgtgtataaaagtgtacacataagttgtccatgtggcagtcaactgtgaaaaatagatgacaccttaaatttgctaaccgttcagtcgtttgaagagttttacttcaaaatttgagcctagagtgttgaatgcaagtgaaataatagttggagtgcacaaaatatgggtcaagctattcaactcggccaacccaacctatttttttttagtaaagggttatgttaagagtaggtcatgactcattggactgaaaagtaataggtcatataataatgggttggttatgggtcggacacatcttaactctatataactaaaactaacccatttcttgaaagatgttccaaatttgagacaattttcatacatatatatttaaaagcatatatacatatatatatatatattttacattcacaacatgtatacaaatatattgtaatacccgaaattaagaaatggattagcaaaaccctaactagataattatgtataattgaggaa

SEQ ID NO: 171596 - DNA, 1240 bp, Cannabis sativa
  modified_base (353)..(357): a, c, t, g, unknown or other
  modified_base (1146)..(1149): a, c, t, g, unknown or other
ttgttagaatttctaactaattttaaaatatttagtatatttaaataatttgaattaattaaatatctaataaggtcatataatataatatcttaatttaaaaatttagatatttctaatcttataatttaataaatcaaatataacaaaaataatcgatttgaaaaataagatatatgatggtaaggataatatcaattttatttaataattaaataaaaaaaaaaaaaaaaattctaagtttgaaaatttcatgatattttattttgacaaaaataaaattttaattaaaataaaaatcttataaaataaaatttcaaaactaatacttttctaatcttataatttaattnnnnnaaatatatttcaaaaataataatatggttaacaaatttcaaactttaactagattatttctaaattttattaatattttaatatcacaataagatcatttcaaattttaataataaaataatatttgatcttataataaaaataaataaaataataaaaaataatcaaaattttaaaattaacgataaggctagggtgtggagaaatcaaattttcaaatttaaaggctactaatatctaaaactaattttaattaattaagaaattaagaaaaattaattttattctgataattttattttgaaaatttttattctacacaaaagtctaccaaaatttgaattttatttcaatgaaaaataatttttgaatcaaaagaaatcacaaaaacaagattgcacaggcgagtatgcaatgcatactccccgcgcgcacatgaggctgcgggtgggcgagggaaaggctgctagcagcctgcttgggggggaaagcctgggtcaggaggggaaatattcggacatggccttgtttgaaggcctcatgtccgagtgagcctccccatctacgtgtgcatgtgcatccctttgagatatttttattcaaactttaaaaaatcataactaattcataaaaaatccaaattaagttctgtaaatgcctaaatttattatttagcatcgtaaattgagattttcatacaatcatcaaatatgtacataaactaacatgaacacatctaaatcaacaaaaacgtccttttaaacccatatttcatgaaagtaaatcatnnnnatggctctgaggccagttgttagggattattttactaaaatctagatttactaccatgtatgttatgtaaaatcctaaatatgaatttcta

SEQ ID NO: 171597 - DNA, 527 bp, Cannabis sativa
gattgctgcaaatgtggttacatctgcaagaaatctacttgatcagttcaaagacggtcaaaaaagaaagggtctttcttctccgttgatcgacggaggccgtttggttgagcattagagtgcaccttcttcaaaaaagatcaagattaatgttgatggcgccttatttgagcatgaaggcaggtttggggttagttatgtggctcgtgacaaccatggccatgtggtggaagctttcaatcggggtcatttggggagtgttcaacttgaaattgctgagatggttggcataaaagaagctttaagttggattgaccgtcactcttggggacaagtgattttggagtcagatagcttgatctgcatacaagctattcaaagtaaaatctctatgtcttcttcttttggtcttctaatgcatggtgttcgtgttttacttttatctttaaacaatgttgagttttattttgtcaaacgatctacaaacaagctggctcactgctagccagagattcttgtttctctcc

SEQ ID NO: 171598 - DNA, 591 bp, Cannabis sativa
aggtcgatttcgatgtactttgatcgagcgtgaaagaccggattggcagctagtgaagctgcacctagttgtcaacccaaattattggtgctgtgggtagaggaactttgagttcaatgagaacagagcagagccaccttaattctgctgttgtttttgtgagggctctaaattcactttccgtactcgatctagccactacaggttgtttttttgcaaaccaagacaccaggtttcctccaaagaaaattacatagccacccgtggatgtcgatctgggcaacttgcccaatcggcatctgagtatgcttgaagacagagttgtggtgctggtctgatgagaagtccctcatgaattgcccctttaaggtatctgaataacattttacatgcttcccaatggactgttgttggagcatgaataaattgacttaacttgttgataatgaatgcaacgcccggcctagttaaagtcaggtattgtaaggcccccaatgtgcttctgtatagtgtttgatccataaatggttctccctcagatagtgatagcttgtgtgtagagcttgtgggatttggagaaagcttagcacc

SEQ ID NO: 171599 - DNA, 709 bp, Cannabis sativa
aaattccacttcgacaagaaccacaatctctgcacaatcgggtagaggcaaaaaaggtgactcgtcaaattaccattcggtaaatcacaaagaacacaaggccctatagtgttactaaagatcacttctagacgagatccaatataaagggcattgcactacaccttccataagaacagtttgaagtgggggtagaggttggaatgctaaagtgttttgtaaagatcatcacttttttaaaaaaatgtattagcattaagagcccaatatacagatttaagggtggaattaccttgaacagaaggtttccacactagagtgtcctcatcggccatgttcgtaggagataatgatacgaactttgaagcagcactaggagttagtaagttgtggatcaatccaagattctaacttacctcaaattagttctttagttagagaattctattttcttatttttagtcagttagatattttaaattttaaataactacaacgtaaacggtaaacgaatataataaaaatctgcacacgggctttaatactactaatgtgacgctcattcctaaaattcccaacccaaagaaagtgtcccagtttagaccaattgccctgtgcaacgtcatctataaggtaatctccaaaattattgctaacagagttagagcgatcctcccgagactgatttgtcctacccaagctgcttttg

SEQ ID NO: 171600 - DNA, 648 bp, Cannabis sativa
ccaagaacaccagattgattccttgatcttgttcaatgagtccaccatactcaggcgacgccagacctcaaaacaccattgattcacacatttctttacaaattattggtttattgttcccaagaactttacaaccattaatttagatcagattcatgaatgtcaagtctcccattagtcttatattcataagtctcgattaagatttcacctaaaaatcctttgctatacttttatccacacacttttgaaaacataactctcgtgtattggatccaatcaataaaaacaaatagatgtagccccattaccatcgcaacatgggggtgaactactataaattcctggtgtccatttaatttattgcaattttattaatcagattaattcaccgtgattctcttttattttacgatcttcttagatcagttgataaaaaatcgcgtcaacaaaaactatctacataatttttatttttaaatatatatacaataatactataaaatcaattaagaatattctgttaaataataatatattctgttaaaattaatcttttatataattttgttacataaccacactataaagatatatatatatatatatatatatgatatattgcattagtatttttttttttttttt

SEQ ID NO: 171601 - DNA, 1073 bp, Cannabis sativa
  modified_base (120)..(120): a, c, t, g, unknown or other
gcatgtgtgggttggtttgaaaaataatcaaaaactgcaccgcccacaccgcgaacacccctactaactgttgtcagtcatctactttcttggtcttggaagcctcctctttgaacctcntgatgaagttcttcaaggtttccattggtagttatttgatgttattcaaggaactaacttcaagatttatctttctagctataacaaatttccttctactattagtttgcaatttattcaaataatctacagatcctggttttaaatttatgaaccattcttctacagatcctcctaatgtcagtgggaaacacatgcatttggcgtcattggtgaccctcatgactgtcatgactctattgaatctagacaggtgatcacttggacctgtgtcacccatgtacatagtcgtttcaagcatcttgaagttctttaggagttcggcctctagtatgtttcttgcacaaggctcccagtcctcacaatctgattctgagtcgtctccctcctgcctccaagagatccttgctatgtccttctggaggatagcaagttcggccaggactccttcatttgggataccctcggagcctggtgcgacgttctttctttgatcaaggtgtgcccttaggtccccgtgtttggcattgagtgtgtgtcgtacatcgacagggggatctttcctggcaaacaccttttgttttcctagctcttgatgcacggatacactcttttgatctccacggtcctgggggctaccccctgtggacccttcccttgtgggagatcagaacaaaatatttgtggatcctgggccttcttgttctttccaggcgcggtcgtaggatttccttccaggacaggcctttctagaggatacctgatgggactaggttcccattcttctatttttggccttcctcgggctgagagggttcttcctcagtcctctcttgtaatgatgggattgcagttagatctagttagatgcccgcattttctatttcccttttcatgacaatcaatatctcttggattctcttgttttgttctttttgttttgccaactcaac

SEQ ID NO: 171602 - DNA, 515 bp, Cannabis sativa
caaagtagtataacgttgaagtaactaatacatttaaaatgattattcaagtggaacaaatgattatgaagctgaagcataacactttactttctctataagcaaatctaaagataacccatgtgaaagttcagtgggtagaaaactttattacaaggtatataaaagtaataggcaaaagtagatgactgatctgattaacttaataaaaatgcattggcttctcagtctcagcactaacaaagctggcatatttaatcaaaaaaaaaaacaaaaaaaaaacaaaacaaagctggcatatacacgcaagactgataatgataagtatttaactctcatgtctttcttatactagcaatagattctctactaggtaaattgataccaacactctaaggtagcatttggttaatggtaatgaaatggaataaaaatgaatcaatttttattttattcttttgtgggctatttataaaaatatggaaaaataaagataggggtaagttgaaaaatat

SEQ ID NO: 171603 - DNA, 968 bp, Cannabis sativa
actaagcggtctttacaataacaagaacaaaaggagagaaatgaaaaacgtattcaacaattgaaacaaagtaacgctaagcgtttgtccacagtgggagcagttgcaataacagacgctaacgtcattttttttttaactttaatttatgcttactccgctactctttcttcttcttcttcttcttcagttacgtggattggggcacgtgcctatctcatgctcatcaaatgtttgtcccatttctattcctcaattgaaatcggataatcagacgtgtccagatcattttacgaaactaccctcagcctcagggtttaattttaggagatttccgtttaagcaggtggtggttaagaaaagagaaatagtaatggacacttacggtgcctttgttattaggtataatattgtaattgatataatttaatatcgagtttcagtaattttactttaatgatgattaaaaaaaatcgctacctagttacaggacgccacttaatagtaggactacgcacattggtgtctcatagcattaatgctcgtacgaaaatgatcatatatatagggatttggaagtgttcgcagaaaaactagttctagtaacgtgaacatcaatatttgacaaatgataagaatgaaaacatcctagagtaagtatcttcaagcagtcgacctgggaggggtcctagccctacacctaggttggcttcgggaactctagaatgagtgtttggatcctgcttatgagtccatatatcttataaatatggtcaattttgtagtttaatatttttaaattgattctttaaattatttacctttgaagcaaaacttgttgggttttgtgccttaaataaaatctatttcaatataatcatattgacgaattaataaaagatcaaagtttatttcatgattatatatttatgtataatttctattaagtctaaaacatatatatatat

SEQ ID NO: 171604 - DNA, 736 bp, Cannabis sativa
gttcaataatttagaaggttttaccatcaaattttgagcttaaaatgttactaaaaataaaataataattgagaaagtttaatggtaaaaaacttaaaacaaaaactacaatacataatatcatataaaaaattacaaaaagcttcattactacacccacccatttttaaagtgcaccctaaaagcaagcaaaattatatcagaaaattctacaacgtactttttaaaaagggtgtagtgatgcacatttatctgttttagtacctaagaaaaaaaaaatttaatctaattttcttaatagtcgtatatgttataattttttaagacattatacaaaattttgagaaattcgtaaaaatttaacacataaaaaacagagttcaaagagtctattgcataagtaacttttttattttatacacgtgtgaaataaactgtttgaatattgatttatattgtaaattatttcgaatttttctaaattttgtaaaatatcttaaataattataacgtttactattatgaaaaaattagacaatttttttttttctaaatgacaaaataaatatggttaaattaatgcatattttttagaggggtacatgtataatcatccaaaattctatatataacaacaaggaagaagtgatagtttttaatgaattggtttttcttcatacatataaaaagtcggttaattgtctaatccctctctctatatataataatagagaat

SEQ ID NO: 171605 - DNA, 711 bp, Cannabis sativa
tatcaaaaatggcaagctgattcaatttttttttctttttctgttttaaaatggcgtcaactataaaaacaataaggtattattaatagtcatcaacattattagtacgaaataagaaaatgctgattgttgactattataattgtaaataattcttcttcaatatctgacttttgtggtcatgctttgctacctctgctctaactgaccttaattctttttcattgaaaattctaatttcttttttattattcctatttggactatggtttgaatgaaactaagtgcacatgaagtataaacaaatctaacaaaattttattgaataaattattattctacttttggaaaataaaaataaaaataaataatcaacattgtttaatgctttagcaacgtaacgattctcacctaacgatatcgatatctaatgggatctaatcttaccaaaatctggatttgtgtaagtccattttattttgaacttaattatgattgtatatttatatatgtatatactaattttgaactttattcattcaggtttcaacaaattaaattcatcaaatcgattttatgtatgtatacacacggtcaatctagacaatttgtaatgggaaatttgaaattctatgcttaaaataccatttaatttttcctctaaatgcatagttattaaaattggtcttatatgacaactttcctaatttt

SEQ ID NO: 171606 - DNA, 616 bp, Cannabis sativa
attttaaatctaattgtcaaagattacttaactgtcattggtgatagtgttgacaaaattcgagacagtgttgcttattggtcgggtacaccaaaaagacatgaaaaatttgaagacactactcgtcaacttagagtacaatacaccaaaaaaatatcacttgattgtgtaataagatggaattcaacttttttgttgtttagcacagttatatcgtacaagacaatatttgaacgtccaaggctgtgtgagttgtgtttgaggtgtgtcccttcgaaaattgattggcaaaatgctcaacaattgtgtgacaaattagagttgtttcatgaagtgacgaaattattttctggaacaaagtacccaaccgccgatatttttttcctaaaaatatgtgaaattacgacaaacattgaatcatggatgtcatcatatgtgcctttaattaaggacatggcaactcaaatgatgtccaagttctagaaatattggggaaagattcacaggctcatgtatgtggtggttgttttagacccgaggtacaagttcatgttgctcgaatattatttccctgtaatttatggagatgagcaatatgtaactgaaattgcgaagg

SEQ ID NO: 171607 - DNA, 694 bp, Cannabis sativa
gcggccccgccgagaaaaatgagtgtttgcagctggaacgctcgaggtttagggagtcctcgagcgttccgtcacctctccctgttggtcaagcagcatcaacctagtatgctttttgtgatggagactaagctgcctgctggccgtggacctgccttgaagtacaagcttcattttgataatgttttagaggttcctaggcaaggtttaggggggggtcttttgcttttttggaacaattgtattgatattaccgttgtctcttactccctcaatcatgtagattgttttataaataattttaatgatagacaatggcactttactggtttctatggttccccttacattgattcaaaaatttttacttggacacttttaaatcgattatatgacactgctccgcttttgccttggctggttattggagattttaatgactacttatctattagtgatcgtaactccaccacttctcccccctcccatgctatgcaccagtttcataattttttacgtactcggaacatgtccccccttccttacttgggacataagttcacttggcgtcatggtactatttttgagcgtctcgattggtgcacttccaccccctcctggaatagcctttttccccatgcttcactcacacatttggggttttatggatcggatcaccgagccttaaaactcc

SEQ ID NO: 171608 - DNA, 668 bp, Cannabis sativa
gaatctttaatatggaattaccaaatacagttcacaatacactatactctagtgtgtgtgattttaatttagatcacatatgtggatagacatgtagtaaacgtgttatatataatttaattatacatgacttgaccaatataaaataacatctttcattaacatgtcgtttaccatgaaataattattcatatcacaacaataatcattagtagattagtcagaatcatgagtatatatgaactcctatttgtgtttattattaagttatttgattcactcgttaaaatttatcagaaaagatgattcttacaacttttgttttgggagcttaataacatgagtggctgggaacatttgtacaataatagaattcaagctttccgaaaggatcgaatattagttccattataatgttaattttgggagtactaataattggatccaagtctataattggattataatttaactgttcacattaaattaatggtacataaggaatcaagagataattagaaaggtaaaacagtaattttgaccaactttaattataaattaataattagatgacaaactacttatattgattatattaatggactacaagtaaaaattgtataaatataattctatattgtcaaagagtgcaattcaatatttatagt

SEQ ID NO: 171609 - DNA, 1071 bp, Cannabis sativa
ggagtgaaaaatagaagtgttttcatccccattcttcacccaagttacctttgctttctactgtagcattgaatgaagatctgctgtagttttaatcagcttttcccttgcttccctctcttcattgtgcaaagaaagattcaaaggatcaagcttgagtttatcttggcagctctgtaactcttctcgggctttgatttctgcagcatggagatttgagtatccttacttatttatctccttcaactctgtcttcagcattttcagtcttgaaaccagttgatacatcttagtcccttttatacttgattcccaaacttctctaactttcttcccatagtccgggtgggaactccacatcctgaaatacttaaatggccttttgccacttcttgtttcaggatggatggtcagaattccaggagtatgatcaaaaagcacttcatttaaaaacaaaacctcagcccctgtgtacttattaatccagtttgggtttgcaaggatcctatctattttggaatagatcctagcttcgccatgttgcttgttgttccaagtatagtaattaccactatacttgacatcctcaagcttgcaattctccacacaaagtagaaattcaggcgccaaatctcctctaactttatgccctatcctctcttctcttgtcaaaatgtcattgaaatccccaagtactaactacgggtcctgtgtatcaatctcttgtaagtgtctccacaattccttccttccttccctatcattgtaagcatatacaatggtagcataaaaagagatattcccatcagttgttgtaatatgacaatgcacaagctgactagtacacctcaaaatattaatgttgaaactatgaggattccaaccaattactatgcgacctcctggatgccaaggcaaattcgacgtgaaacaccaaccattaaaaacatttgtgtacagggctcccaatttagaagccttgactcttgtctcaaggagacaaacaaaaccagctttttgtcgagcaataaattgcttgattacgccttgtttctgctgattatttgctcc

SEQ ID NO: 171610 - DNA, 899 bp, Cannabis sativa
tacaccaataagtgttgttgggtgcaaccaaaattctacattgactagaaataagaagaattttgggtatataaggatggatactatctctattggtatgaggccttttgggaatagctacccaagaacaaaatcataaggattaggcccaaagtggataatatcataccaatgtaaatatagataacgttgaacacaaacaagcactttaagctcttagagcatttatttatagacttgactctttaactgaattacctgttaacaaaaaataacaattctccaccttgatagataattcaagtgaacaaataaacgaattgtcaacaaaaaataacaattcattctgcaggattttcttcaggggaaatcttgttgagttgaactttaccctcattgatgatgtctcacagtagatccgaagcttcctttgatcaactcctaactcccttgaaattcctttgagccatagtgcctcttttactgcttcagtacaggctatatatattcagcctctttagtagatagggctacaatgaattgcaagtttgctttccaacttattgtgcagccatttagctgaaaaaactagattgagatcttctctaatatagatctcctacatagtatgaatccacaaatccccttactcctgatctgtcttggtccgatccatagattagccccacattgattgttccttgtaaatatctcattatccacttcactgcctaccagtgttcagtccctggttttcccatgtatctgctcaccatgcttacaccataacacaagtctgctctggtacataccatgaggtacatgatgataccaacaacacttgcgtatgatattgttgagaatattttatcaggatatagatttactaacaagtgtgt

SEQ ID NO: 171611 - DNA, 508 bp, Cannabis sativa
  modified_base (460)..(480): a, c, t, g, unknown or other
aactcaaaaataaattcgaacttaatcgtaaatcttctactaaaattataccaaacataagtttgagtttacattcttaaaaatttaaacccccataacaaacatgtaattagggtgacattatctaagtacatttctgtttgtaagctgataaggtccaccttttgtttagtcttttcttgttttttggcttttaaaaactttgagaaagtagaaagaatcctagtttttattttgaaagagatttgtgattctctaatcagtgtgatagagtggtctatgtaaattggttctctctttatagaaagcaagtgtatgtgacattgctagattatcatcaaagcaattcctatttcctcttgcagccaaattcattgcggtatgggaaagtgtcatccagtaagagacatgtatgggtccataaggtgtcgtttagtaacacttttattttttaattttnnnnnnnnnnnnnnnnnnnnnaatttttgtttttaaaaattttgttttt

SEQ ID NO: 171612 - DNA, 606 bp, Cannabis sativa
cacctgtgggtatcacagaggttcacagaggttctttccctgtggatatcgcaccaagagagagaagatattttcgccgtatatagattattaagtaatatattaggtggctcaatatggggttataatcatatatttgacttttattaattttttaataattgttaaaaaatatatattcaaacatagtataaatttaccttactatatttactaagcaaaatttagaagaaaaataatataataattaataaaaatttatataaaaaaaaagaagaatatataacaacacaaaaaaaaaaaaaaattatatgtatactcgtatagtcttctacactaaaaaaatcttaaaaatgtaaaaatgacttaaaaaatatatttttaaaatataaaatagaataaaaaaatgagagagattttatgaaaaaagggcgaaaaaagataaggttccaaaaaaaaaaaatgactaaaacattaataataggtgtaaagaaaataacacatacaactccaacacataaatttctaagataacactactacaaatataagaattcgcgacggtcttaaaaataatttttttcggggaccgtcgctaaaaaaatt

SEQ ID NO: 171613 - DNA, 653 bp, Cannabis sativa
  modified_base (591)..(594): a, c, t, g, unknown or other
tacgaaggcctcacgggtcatgagcgtcagttcgtggagatgatgtgtaatggtgaattcctgcaaaatgagcctgaagaaactcttgagtttcgcgttaagctcgctgaaaaatctcacacgtggactggtccaagtgctgctgaaagcaccaacagaaatcgaccagctggaatttaccaactgcgggaaggggacaatataaagacctaagtcggaagctttaaaaaatcaagttgaaatcctttcaaataaagatggccaaaaagggcgcatggttgcccaagctcaaacaagaccacttgaaccttgtttcatttgtggagaaaatgagcatttagctaaggactacttagtttacaaagaaatgagggggggttcatgaggagtaatgcaataccttagggaaatataacaagacattctcccatacgtagaacccttgttggagaaaccacccgaatttcagttggagagataactctaaccaagctcaaacatctggaggacaatggagaaatgagaatcaagttcaacctcaaaaggcatatcttgcaccccaatacaatgctcaacaacaagggaactccnnnnaaaataccattcatgcattcattgaggaacaaaccaaaatcaatcgccaattaaaggaa

SEQ ID NO: 171614 - DNA, 780 bp, Cannabis sativa
gaaagttgtacaaaattactatacgaaatcaatttaactagtcaacttatcaattttagtagcctgagatgagttcagagacttgccagaacttcaatcaaaaaaataataataatatagaaatatatactattttctttaagcaagcaacttctgaactaccgtgacagtattgttcaagtcacaccaattcaacgtacaattaaaaaagaaaaagtttcctaattaataataaaaaaataagagtgttccatatttattattcttttggttgtactaagtcaatatcactttacaactcttgtcaaacccttttaaattactacaactaagaacaatacttcacaacaacaataactggtcatttttagaatgtgaaaacataatgtgaacaagcaactctaagtagaataagaaagaagtaaaagaaacaacagaaataatacaatcaaggatgcctaagcattatatatgaacaaaataattttatttttaacggagcatcactccctaactttgcatcatggtaaaccattactaaatttctatactcatttccttgaagaaaaaaaacacaattctgtcactggtgtttctacttacgattatcaaataaaaagataaaaagaatattaaaacaaaacattcgacatgtaatacagtagaaacctaggtgaaaactaatctcataccaaagagcatatggatgacatgatatatcataatgaactaaggcattttaagtagcatataccacaagacaaatcaacaaacataaat

SEQ ID NO: 171615 - DNA, 784 bp, Cannabis sativa
tgctgaattttaatgagacaaacttcagcttctgtgagggaaggctaaagttgcatgaaaattcaagtgataacttttctttgaaaaccaaaagggtgaaacattacttggcgtgtgacagacttcaagtagcctttctcttccgggaaggagggttgaagaggcatcgtacccccagtgatctttcacgcacaaaaaaagtacgtgcatgcgagagtcatgttgaataacttcagcttctgcgagggaaggcttaagttgcgtaaaaattcaagcgataactttgcttaaaaatatcgatgggtgaaacatcactgggcgtgtaacacactttaaacagtccttctcttctgagaaagagggttgaagaggtgtcgtacccccagtgatctttcatgtatgaaaaactacgtgcatgcaagagtcatattgaatttttattaggcaaattttagcttccgcaagggaaggctaaagttgcataaaaattcaaccgatgactttgcttaaaaagaccaaaggttgaaacatcactgggcgtgtgacagacttcaagcagtccttctcttccgagaaggagggttaaagacgtgtcgtacccccagtaatctttcacgcataaaaaagtacgtgcatgcgaaagtcatgttgaatttttataaggaaaacttcatcttccacgagggaaggttaaagttacgtaaaaatttaagccatgacttttcttaagaagaccaaagggtgaaatgggcgtgtgacagacttcaagcaatctttctcttct

SEQ ID NO: 171616 - DNA, 596 bp, Cannabis sativa
gttttctaaatgtaaagattgaaggggaataaagaaatagggtttctttctagggacacgtgcaaactaactttattgtttattatctttttcaacattgattaataaataatgaaaaactggccagcttttcttttttttttttattattttattatattttttattaaaagtatattaaaactgtattttaaaaaataaaaaataaaaatttaggattatgatatagtgacgcgtcaagtgtgtcgggacacattaattcagtcacgcctggtgcgtcactatatggcaatattttttaaattaataaaaaattagaaaattttaggttttatcttttagtgacacctcttatttttagtgacacacattacaggtgactaacactgaatatttagagtctacttctgcatgtcactaaaaatcactcctaactcattagtgacgcgcacattttatgcctgtcactaaatagtgtcacttaaagctcaaattgtagtagtgttgtcagatcctattacggagagaatactataaactacacttgatctggatatcaaggtgttgagattaattgaaatgcactttttgtttta

SEQ ID NO: 171617 - DNA, 1081 bp, Cannabis sativa
  modified_base (440)..(444): a, c, t, g, unknown or other
tagccccacatttatcaccatgatgctattactttgaaaaaatggaaacccatccatgactttctcttattcataaaagctctctcaaatccatatttatgaaaggaagaaatgtacttgtattatgatataaatatatcaaaataaagagggtgcatatcattttatatgacaaaattaaatcaatattcagtaagatggttgagtacaatggttaaaatgccaggtaaactaactattttaagtgcatacttagaccatattcaatgaaagatgtaaaaattgtgctatatttagtacaaagattaattttttggtaaatttacactaaattttaactttgtgcttcaatgtataattataaaattttgatgtcaaatttaatatctaattaatgttttattaaaaaaaaaaaatctaataactttataatcaatttnnnnnttattttaatatgtaagacaataaaaaaataatacaattatttcataatttaatgtgatagttaaatatactaataaaataatagaaatgattatataaatgaaaagttagtacatttattgtgatgtaaattttatatcataacaaatgttgtattattattattattttttttttgaaataagtgtgatatcattgcaataaataaagttagacctcatggtcgttacataaaaggttctccggtaagatagagaccgggatagttccaaacatttgatgcgcaaatgcccatccaaccacattgtgagtggcaaaattacaagttcgactaataaaagaaaaattacaactaacaaaagagggagaagacttcgaacaaaaagagacgtagttatcaagtacccaacgagactcaactccattgatagcattgatcaccaccctcgagtcattctccacaattacaaacttgcaaccgatctccaaggcaaccgtcacagccaaacaataggcctcaacttctccacaaagagcatcagagaaatctaccctcgccgtctcgactctaatcacactgccaagatgattcctggcaaccactgcagtacagatattgtcaaatcccacttttaca

SEQ ID NO: 171618 - DNA, 606 bp, Cannabis sativa
  modified_base (535)..(548): a, c, t, g, unknown or other
acaaatttaacatgagtcaaatttaactttgtaatcaatatcatcattttgtatcatttttaataagtattattaactttgttgaccttttcatttattttgtttcttctgtataataattccaaaaagtaagccgaatataacactagacttattttttaggccaatttttgcataaattatgtaccatgcataaatatgtttctaaatcttatttaataagctatttccaatgtaactaatataagttgtttttaattagtaaagttagtagaaagcaaataataattcatgttttatatagtaaataaaataatatatcaccaaaaattaatataaataacgagttatttgaagttaaataaaataataggtcacctgaatataattaaaacaataagaaacatatttaataagtaacaatagcaacaagttagaatttctttttgttttttttttttttataaaaaaaattagaaaaaatgttaactaattagtttaaagaataattacataaggcactattttttgtaannnnnnnnnnnnnntacgttcaaagaatattttttttacatttttacggttttctaaaaaattacacgaaaa

SEQ ID NO: 171619 - DNA, 788 bp, Cannabis sativa
taattattgagatttcatagctacgatgtcgatacaactcaagttgggggtttaggtttctattttctataggtgcgatcgatgtgggtttcttctgttcatatgattcaatttattttagggtttagaagttaagttatttgggtctaattgtaatattaactgctggaaccaatttaatatttacttaattattttttggaatattttacacattttgatataaacttaaaatgtcttttttaattttatttcaaataacaaatcgaattatgtaggcattattaatcccacaaataaaaatattttataaacatcatgtatgaagaaataaaaaaaaaattaaatttgtgacatatataaaagtaaagattaatcaatttatttatactatatagtactacaacacattgtgattgaaattgttagtattcatcatcaaactttctttacaaattatgagaaaaccttacaaattattagaaatagaaaaaaaaaaattatataaaatatcacttaatttattttatacttttctttatataaatatatatatatatggatatatttaagagaattttattaattatatattatatatcctcaatcttaaacctcaaatggtaagttatttaatgtttattatatattttattttatttttggctcgctaacatcaatcattaatattctgttagagtttttattagaagaaaaagaaatgtaaaaaaaataattaaataaaaaattctatatatatatttagagagagagagtgagcgagaata

SEQ ID NO: 171620 - DNA, 575 bp, Cannabis sativa
tattttctatgaaaccattatttctatatcgagatattatgactaacgtaatatagaaaataataaccaaatattttggttattacagacagagacttcgggggctgtgatttgcactagtcattaatgttgattttgggaattttatactgcaatttctgattgagtgactgtgatttcttttaactgcatcatttaattgctccaaaacaagtaaaaagagaggatttatgatagctgaaaaacccactaaaaagagcatattaattttgagagctgaaaaaccagtaaaaagaccgctgaaaaactagtaaaaatactgctgaaaaaccagcaatatatgaataatatatagttagtgggcggtgcatgctgtaatcagtaagatactctctcactacgatgaattacaggatttcatgttttcgaaacaatggtttttctcggagcattgctattaagtaccagtggtgcttagtgttagacatttatttgtatagactaaaacatacatgattatgaataaagtgcggaattaataaatcatatatgcactataatttaaggatcgaaat

SEQ ID NO: 171621 - DNA, 617 bp, Cannabis sativa
ataaattataatattgtaactgaataaatagtaaaataatttgtatttactttttacaaacattatttgtctttaattttttgtttaattagaaaatattaccatttatgattagttataattgataaattttattacttatcacactttatcacttgtatatatatatttgtataaaaattagaatttttttttatgaatacaaaagatataaaaatattaaaattttacaaaatagaaaaaagttgattaatgaaatttaatttaagtattataattgtatgtagtattctactttgtattcgaggaacataattcaacaactttaacatagtattagagttaattttttacaaaatgaactatattttaacaatacatctcttatttatttttttattaaagatgctgcagtcaaatagttactataaattttatatatcatataattactattattattattattattcaataaatataggagagtatagaagaatttcttttttttagagttggtggagaaaaagattgtaaaatcaatagtttgctaaactatttgcaaaattaataagtttgtaatgatgataatgtaacgtccccgcttcaagcctcca

SEQ ID NO: 171622 - DNA, 646 bp, Cannabis sativa
ttgagctggttttgctttggaggcgaaaattgtggtggttcatatgtgtaataccctaactagtttaggcatgttaacatgatttttaacttactgtgcaactcattgctaatcaacgaggttattgaaaattgtgattaattaaaatttgcttatttaattaaaacataaaatatcatacatataaacatccgggatcccattttcaaaagtatttacaaaagtttaactgtatataacaaaaaattttcgcctaggaactatacaaaataagcccttatgtcccaaagatcgtacgctccaggcctaaccgcccccaacatgtacaatcttcacttgctcactgtcacggctcctcagctttagccttgcccttacctacacatagaaatagcactatgagtcgacagactcagtaagagaaacataacataaaacataataatatctcatattataattaggcgcccatacacccaaccataaccctaattgggtcaggaacattttaacaaaatatgattaaccgtgaatccaacctatactcagtactctagtcgtactgatgtggtagcagataactcatactatttgatagcctaggatatatctgttggcgtctcggtgcatctctatgtacacctca

SEQ ID NO: 171623 - DNA, 948 bp, Cannabis sativa
aaaaattagtaattatcacaaattaataataatgatcaattttaatttagtttggttgaataattattttaattatttattatatcaagtgaagtacgatgataacattaattttagatatagagataacacaataaatgatgacttattttataagagagaatcacaataaagtttttgagtaaatagcgacataaatacttaatgttttgaatttgtaagtagcataaatctaatgatatatttagtggcataagtattgtttgtaaaactgtaatttttctctaattttgtcagtacaaatttcattattgtcttaaacatgacacatataagactaaaattctaaattgttgggtcgggttggccttattttatatctatcttctcatatttctttaaaaaatttatatgaaaaagtaataatattaaaatttaatacaattttattacttatttatcattaaataaaataaataatttatttcatatatatagtttaaattttcttaaacatctaccacaaagtgcgaattatttactagtttatatataaattttaattaggatatttaatgatttatgtaggtttacgaaaaaaaatctttttttttttgttttaaattttgtagaattaaaaaaatatgaatttgacatattgaaaaatatattcagtacgaattaatttttttgtttttgtcttctatttaaatatataaatatagatatgattttttttttcattaattaatgaatcaatagttataaattgaatagaaataaaaaaaaaaataagaaaattaaagagagaatatatagaactatatggagtgattgtaaagtgtcttgtcacacattcgtatctctcctttatatatactaggtgattgttacgtgccaagtcacgtagtgttagttttatttaatattttagttttttattttaat

SEQ ID NO: 171624 - DNA, 1217 bp, Cannabis sativa
ttctacgatgatataccgtgtagcatttctcctcatttttggagcttcatttctgttatttggaagtttcctagtattgaggtaggctgctattggtgtcatccagtttgaagatgcgtcaatcatttcaatttcttctgtacaggtaatgctgggttcttcaaggaattgaattgggattagattagccttatcagctatattgttgcttgcaagtcgtgctaaggcatcagcagttgtattttcttctcatggaattttcttgaaaacgttgctcttgaattgtgcaagaagatcatgtattttgcttaaatagcctatcattttccccctatgcctcatactctccaaacacgtgatttactaccaactgtgagtcactacagatctcgatgtgtttagcatgtaactctcaagcaagttttagacctgcaatgagggcttcataccctgcttcattattggaggctctgaatccaaattcgaccgcccttgcaggtgtttccccaggcgtgacaagggcaatccctggactggaaagttgatctgtagccaacccacccacgtgtaatttccaggttggtttgtcttcttgttgcttggctgaggatcttgtactggctctgggttgccctttgaaatgctttcttctttacctgtgcactcaactacaaagtccgctaaagcctgtcctttgattgttgtttggggttgaaagattatctcgtattgacctaattccactgctcatttgagtaaccaccttgaagcatcatggttttgtaatatttggcgtaatggttggtcagtgtatacccgaacaagatgagcttgaaagtaaggccttaacttccttgttgctaagattaggcagtaagtaagcttttctatcagtggatatcgtccatcagcctcaaccagtcttttactgatgtaatagatcggatgctggatgttgtcttcttctctgatcagcacgctctgtaacagctaggtatattcctaattcttctctgttaagaggttttgagagtacaagaggttttgcaagttgtctttttaacttttgaaaggcattctcgcattcctctgtccattcaaatatatttcttatttcctcgaaggatattgaagaaaggaacacacttgtctattgactttgaaacaaacctactaagtgcgactatccgaccagttaagcttgttggaattatttt

SEQ ID NO: 171625 - DNA, 765 bp, Cannabis sativa
  modified_base (132)..(133): a, c, t, g, unknown or other
aaaaaatgacgcctccatcttccacacttacggacgactctactacaaaacaagcttttagagacgctttcttcagtataataataaataacagacgcaatagggttggaaatttttagaaggaaattttannccacttatggcgtcggttatttggaaataaccgacgccaaaagggtttataaccttagcccagctcttcgtcttcctcattcggtcacccaacccccccaaactctctccgccaaccactacagaaaatcaccccatttcatcatttttcaccattttagctcagttttttctaaatcttctatttttcatacctaaaactagataccttaaaagatcacattttttctcattttttagggttaaccgaaggtagaggtagtggttgtggtggttatacctccgaccaccgtttttagtggagaaaatattgtatctcaatgtatattaaggtataaatctaatttctactaattttaataatgtacattgctttattttttattttataaatttttttacggtttttctatattattaaatatgtattatgctttattgaatatgtattgtgtgtatatatatattgtgaatgagaaatgtgatataggagagtattttatgtattgtatatgtatatattgagtattttaaacaaatggttttgtaaaatattgtaaaggagaatgagataggagagtattaaaataaaagtttagaaattaatttctaaaaaattagtttagaaattaa

SEQ ID NO: 171626 - DNA, 1459 bp, Cannabis sativa
  modified_base (1278)..(1286): a, c, t, g, unknown or other
ataatattattatattattaaaatattatttgtataaaccttataagtttatatatattattaagtttttgaaacataacttactgaacaaatcttatttcttccttcgacgaaactttcttcttctatctattttcttctattttcaatctgaaacttaacgatccaagctccagtggttgtgggatagaaaatcattgaagaatgaaagcttaaggtaaggtttaattctgtttcaaattaaaaacaattagttttgtatagggattttgcgaattagaatagttatgaaggttcttaccttataggattgttctcgggtaatcatgggactagttccgatgtttctttattaaatttgaggtgattttgagttagaaattgagtttgagacttttcatagcttaagtctgaacattagtagtgtttaccaattaagggcttaattttagtttctattacgtaagtatggtagtatgtatagtatatatgtgccctatgaagtttagagtggtttggataggtttcagtagcgttttggtgagtacataaacttggaaaatcatattttttacccctcaccaaccagtcaaccgaatctagtagaagcggttaaccggttctaggcgatcttgggaactcgggaatcatatttttaccataactttgtacttgggtgtccattttggacattctatataccctttcgaagcttgcgatgagctctaacatatggtatatattttagagccaaaatataagttttattttagtgtatttgaactacggagtttggtaggaaaccttaagttgtcctttgtaactgttaagcaatattttgagataaacacttgttggtttattattgttatgacatacgccccgggatcatcgattgtactccaagcaggtcggccaacataactaaagtattgaagtaaaaaaaaaaagtataatgtaccacatgtcatgacagttttcgtgatcatcgactatctgattagacaataataatatgaatgtgacatacaacttcaccttattaggtgatatgatacatgggtttaaaattatgaaatgagtttgtctgattaggcaatatgatatataaatatacctaattaggtgatatagatatagtgccaagctatggcataggctgagcttgcctgattagggtttatgccttgaaaagcttataaaattttttctgattattaataacgagttcaacattttgatatatgtttaagtattaaattattaatatttaatatnnnnnnnnntatatataaatatcaaaaaaattcttattcatatataaagttatggcttatagttgtacagaaaactaagaacacttggctatgaataaaacaatcagcaacatattaaagttatagatttttaatcaatggttgctagtacagttcactgatgcccattcttcggtgcaagt

SEQ ID NO: 171627 - DNA, 597 bp, Cannabis sativa
ccttattcgtgccaggtatatagacatgtggaataaaatttaaagtgcataaaaaaaaataattaatttttttttttctcatcttgtattggaatgatctttttttttcgttttatgtttttggatgcaatccaatcggcatagtaactcaaattcaatttaatttgtagaagtgcaggttagattagtaatgttatttttttaatatttattaaaaaaaattatttttttacatcaccatcaacaaaataaatattatttgatgccttcaacaataaattaaaataaataaaataaaaatttaaaacaagaaaaaaattatgtataagaaatgcttaattttattttgcattatatttttttaaaacatatttatatcattttcaaattattattttttatattaaaatattaattatatatgtatttttaaatatatgtataaaatatgtgtggaatgaatttaattgttacttttataaaaaatttctatggtcggcacacctattttgtccttatactataaagacattttcttggctatattatacacattaaataaagtgtagttgcatctattagattaaaaataaaaga

SEQ ID NO: 171628 - DNA, 1472 bp, Cannabis sativa
aaaaaattcgtaagtttggataaagttgcaggattaaaattgttttactaaactgatcatatctggagttttataactccgattgaggtgattctagtggccttagaaagataattcaaggatctatatatttttaagaaataattatatcataatttggaagttttctaggtcaaaatgaagtcctaaacttacaaaatagagagcttacaattaaattttaaaaataagatatttgttgatttaataatattttagcagtattattattagttaacctaaacctattataatatgatatctcatactcttcagtgcatgattttttatcaaaccctaacctatcatacttttatttttcctctgcaaatcaattagtcaaagcctcattcttcttcatggtactactcctctcaacccttccatacttcttcttatttttctacctctattcttaaagttttggatttataatcaaggcttacaggcttgagttgtgaaaatgtatgaaatattttctttctcattaatgctaaatgttatctagggttcagacttattatatttttcattttcaaaaataagttttagtaaagtgatgtgcttgaaaatgaacttgctccgattctgattctaatgcctcaaatatgtcagtggtatgtctagttgatattccaatacaagttttgaccattttgcactaagacagtcccaaaaattgaaaccctagttggatatgtcaacttgggcgttaggtgaaaccctaggtgtccaggttggcttctgggttgtaggttcgtgtaatttcaactcttgggacttggattagattgctccatgtcttcatggtacagaataatgaaagatagtgagttggattcaagttattgaagtctaaacttccatcccggagatctcaaagtcaacctgggcgcaaggctagagtcccctcccagatcgactgctataactcgtgtctactcaactccgtaacatcatccttcatgccacatgtcaaacattgatgtcctcgttaccaaggaaagttttcaagttaatagttgcactatacttgtaacaatgatatttttatagagtattaaattgaaataaatagtgatatttagtttttttttacatatttttcttgatatttttttattaatattattggatatgtaattggatatccaattaaaaaaaatcgatctaatccaactagtaattgaattggatttgattagattagattttgaggtctaattagatcggatgggatgataattttcaaaatctaattacttattcaattagattgaatgagggaaaaaaatattagaatggattggaggccagccctattaaaattttctatacttaaaaaatcttaaaaaaaatttccctaaatgcatacttaataatattggtcatatatgaccacattcctaatatcccacaaatacccctcccat

SEQ ID NO: 171629 - DNA, 1106 bp, Cannabis sativa
cacttattataaaaaagaagaggaaccatcaaactccattttagtaaaaaaataatgaatcttttatttagatacatatatacaaaagtagagtaaaataccatgctatatatatgtaaaaatttaagttgtaacttaatttttatcaatgttagaagttacaaaattataatttaatgttcattacaaactttataattaatattatgagagttataaaatgaaaagagacgctcttttctctttcaattaaatagttagggttttgttttcaatgttatagtattagtaaattaaaaaaatatgagagagcaagaaaattagaagaaaattcatatagaatgggatgtcattgtgcttagcaagattattatataaaacacacacactctctctctctctcttacaaaataattaagaagcactctttttatgttttttatcttctacatgattaataaaagtagtatatttattttggatgtgttgtactttattcagagttaatttatcaataatttgcatattttaacaagattgatgcctttttatttttctgttgatatatagttgtctctttgttattttataattattttacaattatttttatgttgtgtttaggtgttctgtagttggtttatagttatttttcctgttatttttatgtttttatttatacaattattgtttagtttatgtgcattttttattgtgtatatttttagtttattttagataatatttttattgtatgtatgtgcatttattttgttatttttctgtttatagttgtttttttaactatcactaattgaaaaaaaaaaaaaaagaaagttgaaagaataaacttaacaacaaattccatgttaaagcaaaaaataataaattctatgaaaaaacaatgtaatagtacaaaaagataaattaagttttcaaaattaagtaaaaaaaaattcataatacaaaaacatattgatgaacttatattattttgtttagggtaaataccattttggaccctctgttttacaaaagttaccaattggaccgtgtgttttgttaaatgacaaaatggaccccgtattttttaaaatagtacaaat

SEQ ID NO: 171630 - DNA, 756 bp, Cannabis sativa
ttcattgagagctgaggaaagaaagaaccatgcacgatggtcattagcgcaagcctatggagagaagggctcgtgcgaggaaagaagaaggaaggccgcctgactgcctgtcagggtctggccagaggtcaggagggtcttggtcagaagtatttgtcgagactgaagacctacaccctcgatcgcccgaagaaattgcagaagatgaacgcatacggtcttaaaacactcaccgtaatcatgctcgcccttaaaagcttagatctggccaagcaactccctagagggatgccgtccactaaggtataactacgcagacacgacgaggtgcaagaggtgttagggctagtgaagaggctaagacccgatgtggttacaacgactaactcacgaagggtcatcagatataacaactctatccatctcatgactcaagcgccagtgttgatgcgaggaccagatccattgccaacagctacttcccctacctttcaccacgtcacaaagttgatcgaagatcaacatgacgagatcatgtcgtgacaacagctgagaggagtccatcattgtcatcagcgctcgatgggtttccaatcaagcctggtatggtaatgttggtcgaagggcagtgctagggcaaacccttttaggcaaagttcgctgatagggatctctgtcattaagatgtaactacaaccctagatttacatcaaagaaagtaactcgtgccataaaaaatcagttagggaatcttta

SEQ ID NO: 171631 - DNA, 888 bp, Cannabis sativa
tctcatgtattagtcaatcaaactctgtatgccaaaattagaggtgttcatctaatttaatctgcacaattttgcttatagtttatgtgatttatactaagcgtggattttatattttagatctaatctgtaaaagtgtggatttgattaattattttagattggttactttttttttaatattgaattatttaatatttgctaaaaaaatattttttttttttcacaactatcaacaaaataaaaaaattattattgttttatgtatctaacaataaattaaaataaatttcatcaaaaaaaaaataaataaataaaacaaaaagtaacaaattcaaagcaagaaaaaaaattgtatatataaaaaatatttaattttgttttagataagattttcttataaataaaaatgtaatatacatttcatctactatgctttgaaatgtatttgtatcatatgtattagatttttaaattattaatttttacattaaagtattaatagtatgcataatttttttttttaaaaaaatatatataaatatgtgtggattagatttgatcggttatttttacatgtcaatctatacaagtgcgaattttaaatttttcaatctaatacaatctgcacaagtacggatgtctatactttgtggattggattggatcggatcgtgcagattagattagattgagcattttacaaacactcccaattaaaactagtgctatatagattagagttgttcctctaatgacaaatcatatgtattagatttttaaatgattattttttatgttaaagtattaatattatgtatattttttaaaaatatatatatttttatatattaaaagtgcctatctaacggcatttcttggtttaac

SEQ ID NO: 171632 - DNA, 577 bp, Cannabis sativa
ttgtccataaccttgttaaacaggctctttctcttggtgagacaagagtttggtggctagagttacccgagttttcgtaagattttggttttgttttggttttggcctaatgataattatctttcattcaaaaaaaaaattaaaaaattaagaggataaaacaattaataaacaacagatgataactcaaacagtaatacaaatgaataaaaaaaacattaaatacaataataatgatattaagaataaagctatgaatattagaactctagtcttcttctaacattagggaacaatttgtttgaggaggacaacgatgaacatccgtttttttcttcatttaatttgactttagtaagatcattatcatcattcggtgaataagtaatgttgagatccatagcaaaaaccacccttttacctgatgattgtgaattggggaacattttgtttgagggcgataacaatgaatatccttcagcaagatcattatcatcactaggagtataagtaggagaataagtaggagaataagtaatgttgagatccatagcattatcatcactaggagtataag

SEQ ID NO: 171633 - DNA, 740 bp, Cannabis sativa
tacatttaaaggggaagggtctttggattggaatagtaattggttcagttgtacaatcaactcttctatttttagttacaattttctccaattggaaaaaacaggtaccatatatttatatataaatataaaatatataaggaataattattgtttacgttattaacttacaattgataatattgtgattctaatatataataatttatggtaaaatattgaatatatatcgaaaaatattattgatatcttatgattctgagaagaaaaattattgatatagtatgattgtcgtatttaaaggctgaaaagtaggccatatttaattattataattattttgtaaataacgcaggcaatcaaggcaagagaaagggctatatcaacgctggctggacattgaatcgaaaccatatataaaatgtagtaaatgaaacaattcacgagtccttacaattcttaacataaattatctatctttgttaggatcgattaattatttatgaattgtaattcttttaggctgtgtttaacagatgaattttgataaaaatagaaaaaatgcaagaaaaaaaaaaacagtagaaaataaaacaaaataaattataatatttagtatgaaaagaaaaatatatagaaaaacatccaatttaacaaaatttttcatttcaaacataaaaagatggatttctttttttaatttttttttttctctgcactttttttttttttttttactt

SEQ ID NO: 171634 - DNA, 507 bp, Cannabis sativa
  modified_base (161)..(162): a, c, t, g, unknown or other
agttgctccccacgaagatgcccagtatatccctggcctgccactgagacccaacgggagagtggctatgatctctggaggaccacacatcgggggaactacccgtaaggagctcaaacgttacgcaggggccgtgaaacacgatgaggtttgggaggttnntcaactcccagctcaaaggccccaactaatggaccagcccattacattcacagaagaagacgctaagactgtgcgttttcctcaccatgaccccttggtcatagagactcccattgccaataagatcgtggccagagtcttgattgacaacgggagttctgtgaatttattattcaaagaggccttcagtgcaataggccttacggaccaagatctttcaccaagcggttcccagctcacggggtttactgcaacaacacttatcccaatgggaaaagtgaggttcccagtcaccttgtgcccggacaaaccccaaagcacttttaaatactgcacatttgtggt

SEQ ID NO: 171635 - DNA, 795 bp, Cannabis sativa
aaggatggtatgtatgcatgcgacatatttgttcgatttgtttttgcaaaactaataagaaatgtattagtctatagtactacaccctctaaaagattgttttggtagatttttatttgcttcggtatccaaaacagctatatatttcaattgtttttttttatcataaatgtgtacgttgtacttatttaagatcacctgtaaatttttagaaaatttcaattaatttatagtagagaaaataaggttcaaatattacacgtgagtattgatttttcctatacacgtgtttagtaatcatttgaacttttatttttgcaactgtaaattatttagaattttttgaagatatacatatgaacttcaataactacaacatacaaatcataaaaaactgtactgaaaaattgtactgaaaacctctcttgattttacaaaatagataaatagtaaattcccttttagatagtgtaccacacatacttgtagaaacttttcttaatctaattttgtaaaatatggcatggtaaaatagcatttttgacctactccacattcggtctagagactattttataaaaggaattatcaaagatgacgtctcattacaaaaaaaaaaaagtatttttagtgacaattttttagtcaacataatttttttgtaaccaaatgtaacttttagtcacaacgtacaaaaaagttacttgtgattacaacataatatttagatataagttgtcattaattttattttagtcacaacaagtattgtgtctaaaaatacatttagtcaca

SEQ ID NO: 171636 - DNA, 603 bp, Cannabis sativa
ttattaagtttctctcgtgtaatttttgtaataatttatgttcaactttaaaatacttgataaaccaaagttattgatttctatgctgttgtacagtttactacgagttgtttacactatactgttttatcaacatgtaaaaaatatagacttttatgattcaaaataaaaactcatatcatcccttaatcttgatacataatttggagaaataggatgacaatatgcattatattgataggaagagattccgaatatgaataaaattaaaaatattagatcaacaactacattataaatctaaactttatgttcaatttataaatttaggatctaataacatgatgatgcttaattactgatattggaataaccaaaattgtttttatatttttgtagagttatttttaagttgtttagtttgtttactgtaattattttcttcattcattatagttgttttccttgattcatatatattagctagtagaatttttttcatataattttagtgtattataataatttttgaaaaaactagaataaaaacaactcaagtgaatttttgggatactataataaatatagggattatttcacaaa

SEQ ID NO: 171637 - DNA, 590 bp, Cannabis sativa
cttttcaagtttgaaaacagattgaaaaattattgtaatcccaaacatattcaagtaatacaacattctttttctctattgttaaagctctgtaacttacttcaagttctttaagctttgctttcattttttatattgagtctttgattttccagcctatctaattgatgagttcttaggtcaacaaattatttacaataaaaaaaaattataatcacaattattactagaaaatgaaaaataaaaacataaacgaataaaaaaattaatatatagttttttactaaaaaattaatgtatatattttcgaataatatatatgcatatttaatgaaacacacaagtgatagattttcctttaatctatatattaattacgaattatatattttttatttggagtgcaatatgaaatgatatgacatatatttatagatacaaatgtgtgactatttaataatttttgttggtttaacaaaatattttaagaatattatcatatttcgttaaatttaacgatgttagtaaaattgattttaaaaatatatataaatattaatattatttgttttaggataattgaacttata

SEQ ID NO: 171638 - DNA, 653 bp, Cannabis sativa
cctgcaaaggcacctatggatccccgaatccgattgactgaccaagaaggagatgtcttggacaatccatctcactacagacaattaattggcagattgttatacttgactctttcacggcccgacatcacttttgctgtgaacactcttagccaattcatgtcttctccacgcacaactcacctcacagctcttcatcatttattgcgctacttgaaaggaacaccaggccaaggaatattgtattcttcttcatcttctcttcacctccgaggtttttcagactcagattgggctacttgtcctataacaagacgttcgacaaccggattttgcatatttctaggtgactgtctcatatcatggaaaaccaagaaacaacctactgtctccaaaagctctgccgaggctgaatatcgcaccttggctgccaccacaagtgagttaacttggttacaatatctcctcaaagacttccaaatccctcaatctacacctgccttcatctattgtgataacaaatctgccattcatattgccgacaacccaactttttacgaacgaactaagcacatcgagttggactgccatttcattcgcgaaaagattgcacaatctgtcatccgcctcattcctgttagcagcaatctcca

SEQ ID NO: 171639 - DNA, 1017 bp, Cannabis sativa
gttacattggagaccgactgcctggttcctgttcaggctattagtagtggtattcaaatgccttcatcctttggcctcctggttgaagattgcagaaaaatcttaaacgatttggattttgttaagtttgtaagacgttctactaataaggcggcgcatttccttgcgcgttgtgcttgtttattgtcagattgtgttttttattcaaacaactgcctttcgagttgttaagtattgtattggcggattcttgaagttaataaaattgccaatcttccattaaaaaaaatgtataaatttttgaaatttaaaaaaatgtttaatttttttttttaaaaaaaacataacattatttaaaataaaaaaaattataatattatttgaaagacttactatttcctttatcttagatgaatatactattggactatcattgtcagcaagtgagtcccaaacttcaacttttttcagagacaccaacagtcgtgcgagaatataatgtttcgagaataagagtggaataaaaatctaaaaaaaattcatgttattttgtatttattgaagaaaaaaattaaataaggaataatattatcatacctcgttacatttatcaagagaacccatgtataaatcataataacacattttcttccaacgttgataaagtggtagattgttgtagggtagcgtctcattctacacaatccaatatattcatgttataattttcttccaatataattatgaatacaatataactattactactcacagttatgttagctggaagataccatcttcttgcttttccacaagttttgttcctctcgtcattggttaataaagtagagaccatagtcaaaaactatataataaaacaaaattaatacaaacaatgaaaccatcgaacaccttattcataatataatcacattaattaccgttatttctacttcttttccagggccaaggtatcgaaaatctgatcgtaaaagatgaatgtcactattccttaca

SEQ ID NO: 171640 - DNA, 940 bp, Cannabis sativa
aataactatttaggttatgcacatattttaatagggttgtacataaatttttataaactatccaatctgaacaacccacccaaatcaaattgagataacccaacgaaaatataaatcgaaaaaccggacaaaaacgtaacatacccaatctttatattaggcaggttgaaaataatatcaacccgaccaacccaattaagagagttttatatatatatttattatatatgatctatatattatataatttatacacatatttatataaaaaattaaaagttcaaactactacattttttataacagattatttaatctttgaattaaatttttatatttgtctcattatcacaataattaaaataaaacaaatgaatgtgaaaataataaacattagtccttgatttggacgggttaacctgatcaaaccgaccaatttattgggcaggttgaattttttttcttaatttggcgggttgccttagatttttgtaacctgatctttacattatgttaagtaaaatgtaacgtaaactgaacaaattaaccgacctacacccctatcttttaaccctatacaacttcactacaagaaatatcacttttaccagcataattcgctactgcactggtaaaagtaacttttaccatgcgcaagttttaccaatgtacatttacagtagttaggatatttttagtattaaatttaggttaattttagcacattttttggtttagtttaaattatgtttggagcatttttacgcttttatcttttaattttgcagatttaaaatagatgaagagtcggaaaatatcaatagaaaaagaataaaatatcgcataaaaatatcctggggaaaatatcaaattcgaattcggaaaaaagataaaaacatgtggaatttggagcagagagccacacgggccgtggcatggt

SEQ ID NO: 171641 - DNA, 609 bp, Cannabis sativa
ataatactaatacaatacaatccatcacaatacaatataatgcaatgtaccaaacgatcccttaaagaattatagaacacaaacccataattaacataatatttttctaataataatattaaataatgcaaaataacttaagagactacttagcattacacaacatatatataataattaataatcaaaacaacactaaatacttaatatataataacaaattacttaaacacaaaagcacaacattattataactaatatacttaaaactagacccccaaagctaattacatgattaactagctttgatgatgagtttggtcaatgatttgggccaatatttccttgcactccttgagtttttttatgctcccatccaacttggctcgcttcgaagcaaccgaaggtgactcctctaacattctcaccaatcgattttcatttgaacccataatttgattcacaagctctctttccaaatgcttagtcacaagcctatggacactcaattacaaatgtagagccattgagtcaacaagccttctttgtacaatgctccaatatgccaccaatctcatcctcaataatattcatagaattttggctgtt

SEQ ID NO: 171642 - DNA, 736 bp, Cannabis sativa
tatgacatttaaaataaaaacttaccagagatatgtcattttgaattaccataaaaaatattaaaattctctttatatttttttttttaaaaaaaataaaacaaatgaaattatagtgattgctagagtttgctgtcggtgccaaaaaatcgaagtagctgctgatgttgaaaaaattatcgaagttgctggcagcgccaaaaaaatcgctagaattgttcccagtattaaaaaaattgtcaaaaattgacattatcgcagaaaaaatcacacaaatatttcctatggtaagttatagcaaatattggaaatatattgttgtaagctagcaatgtattatgtatatattacatgaattcaatagaaaaacttgacacatgttatatgactcaaaacgcggtttcactcgataacttaaaaaaaaaatgtcatgtcttgtagttgtaaatatatgacaattacaatcatatatatgtatgacatcactaccatctaagaataagaagacaaaataaaaaaaaaatcttaatcacttaattaatatatttgtatatgtatatttttatctttattgttggtagataccaatttattttgttgcacactataagaaattattatttttaataataattttttaatcacaatagtataatttttttataactaaatgtgacttttagtcacaacaaaatattatttgtaactaaaattgttgtgaaagaacacagctaga

SEQ ID NO: 171643 - DNA, 661 bp, Cannabis sativa
atagtttgtcctaggcttttaggtgcagcccgtgatacccttctccaacccccaccagaagtcgcgcaccaaactatcaatcttagcaactaggcgactaacaatttgagcatgcaataaagtttttttctcaaacgcactcatagtcatagcatgataagaaaagtttttctcaaacttttcggcctaagaaaagtttaatcattttgatgtgatttaaaaaaaaaaaattaaaagaaatagattattataaaaagaattttttacaccataaactaaatttttttattttttttcttttttactatagggtaatttttttcaaaagtagtgtgtattttttatactatataccatgttaagtttcctatgttgttccattattgtttttaagttgttttactattatttttaatagttatgttttgtgttacattgttattttataacaataaaaatattatttttagtgtaattttgtgattggaatagaaacaaaatataatagtatatttggtgttggaccatattcttgtaaccccacaccatatatttatatataccatattttttttctaacacatacatatttagggatatgattttgtcacgttattgtactttcacggattgtaatccgtgatgtacgacagccgtcaga

SEQ ID NO: 171644 - DNA, 1436 bp, Cannabis sativa
ttgattttattcttattcttattctattatattgttgtttttgaccttatttttacaataataatattatattgttttatattacttttacatttttgctatgttgtttacaagtattcatattgtttgtaaaaatataattaaagtaaatccataaaaaaaaatcagcatagtctataaagttattaaattttgtatgaaagtcacaataaatttctttcacttgtaaactaaatatcgtcatttgtgttctctttttcattgaaacaaatcaaatttagaaaagtatttattataggatgaattatagttgtctatttattagcgtgtaaagttagatgatacaccaccctatgatgagttataggtatggctatatagtattatgcgatacgaatatttgcctcttgattgaatcaaacccttatcacatcgatatgcacacttcattataataattattattcatgcagttatatcggtctagctaccaataaaatgtctatttttttgatagaaaaaaaaaatatctaagttttagtcaatcataatgaaatccacgtgaagcaagcagtacttgttaagcccaattatgttctttttttgtttattaagataagcccaattaagttatgagtgcgatgaccttcgagatagaattttcgtacactcatatacaaagggatccctttattcttttaagtaacttcatgcttcaacatcacaactataagaatgaattaattaatgaatgaaagcaattcatttcaaatcaaactatttttcaaatatgatgcattttttttcccaactacttgctttaatatatagataaagtaccaatatagattataaaccttggtgtatgtaattgacagatatggttttgtccaactaacatgcattagtagtttcaattttcaactagagatggaggtttcttaaccactattattggtatttttcaaacaacattattagctaaaatcgtgaatttgaaacatctgaaaagtaaaaaaagaaatataaactcttcactttatcctcataccccaacacattagtctttataaaaagccaaaatgtgaatgaagaagcacatcagtttgaataaaataacgcgtggggttggttgttttattgttggtttgttgggaataaatgaagctaatattagatattattcaaagtaaaattaaaagttgaagctaaaataatacagcagctagaaactttgaaatattttaagtacatgttctaaaactacttaattagagtacaaatatatataataattgcctttgaaaatagccagcaattaatatttatatatatatactagtaaaaaattacgtgcgatgcacgtatactaaattttatgctagtatgtttctatgttatttaaaagtataacaattaaaaataaaaaaaaatat

SEQ ID NO: 171645 - DNA, 524 bp, Cannabis sativa
acacaaacgtaatgaaatgatggtatatctaatttgagtaacgtcacaatctttactaatacatttacaattattacaattaagaaattaatatttgtaagaactaaaataaataataattttcatttcattcttttatttaattgtatttaaaattattggaatatcattccgatggaatgatatttccattattttggtggaatgactattccattttgaaatggaatgaaagaccattctaatacaagatttaaaaattctaataattttttttatcaattttcttatgcattttaaattttaattcattcctattccaatttctattcccattcttattcctatattttcatttctcccaaccaaacgccacctatatttttgtgtttgtcaaattatgaattttttgtcatttaaacagtcagtagttccatttgaatatgtctattattggtttataggttagctttatagatcagcatttttatgttaaaatatcttagacatattattggtttata

SEQ ID NO: 171646 - DNA, 759 bp, Cannabis sativa
  modified_base (382)..(390): a, c, t, g, unknown or other
ccacgcatttaattacttagccttgtgggggatttattacggcgtctctcttgcttttctcctcacttggattgctggagatgtgtttaatctagtgggttgtgttcttgaactggcgacgctgcctacccaatactacacagctctgaactgttgggtcaaaatatagaactattctctgttcgataccggtcgaggtttgatcggagaagagaacgtggcagcgcgataatgttgatggcggtcgaggtttgattggagagtgctggcaatggcaaatctaccgtgacgttgactgaaagcgctatggacggaggtggtaaggttggattgattcattactttggtttttaaagatcgatttattattattattattatnnnnnnnnntattattattattattacaaatttgttaggagaagtatatgtatgtgttcatataatgtattgtattattagatgagctattttctttttatttttttatttttttttagattcttttttcaattttctcatctcttttgtatatcataacatggatttgagttattttttattttgtcatgtttcatctcggcctgttttgttatatttagcttgtgcacagattagttatgtaattgttgttcatcttactgtgatcggaagtggcaacgacagtgaacgaaatggtaatggcggtgcattcattaatggtggctgttttatgatcatcacaatttacagagtgtaagttacaagtgtattagtttt

SEQ ID NO: 171647 - DNA, 601 bp, Cannabis sativa
aaaatagtatttacctaagttaatttgattagcgcaaaattttttattgagtaatttgtggcataaatacttaagtttattttcgattgtaaataaatatataagtttaattttttggcgataataatacctaaattatatttctgcaacttgtaagtacatgactgttaaatattaaattattaataaaaatttatttaatacttaatagttagataaattttaaaattaacttaaatattattatcatgtaaattaaatttaaatatttatttataattaagagttaaatttaaatatttataaattatgcattattattttcagagacaaaacccataaacgctaaatgacgaatttcaggtcctttcatagataactgccacgtcattattattattattgccttacctccatggttgagccaccctccaaaaagtcggcgaggaccaaataatcggcaaagtcagtttgaccaaagttcttattatttgttaaaacaaaaaatcatattactatattattattattgggataatctaattaattaccatttgtagttttgttatctaaaacattatatttttctttcaaaaaaaaa

SEQ ID NO: 171648 - DNA, 934 bp, Cannabis sativa
tttggtttgagcgcatgggtgcaatcaattagaaatataaagacaaatttataaaaaaaccttaccaccataaataaataaataataaaactgaaagaggaatcctccaataaagaactcaaaaaatggtcatcaatttcaatgcgttcaaatgtttagataatatattaattgggcaaatacgacaagcagaaaaaaaaaaaaaatacctgcagtaaggagtgagaggtttagagagttcagatgcgacaacagagtccacaactttgggttcagtcttcctgatatctgggtttatggcttgagctgcagcagcctctgttgctctgaccaccataaccctgggtcgtcgagcattatttttactgttagaaaatgagagcgacggaaaaggaactggtggcttgttccctgacgacactaaaccgagagtggtggtaagggtaacaacaatcgacgccattggagcttaattattaggcacagtactaaggaaggtaagacaatggctggagaggattattaataatggttggaggagctgtctcagcttgtggacgccacgcaccctcgtagctttaggaattgggtggagcttgctcatgacacgtaatataggttaggacaactaaagcactcacatcaaatcagcatttttactttatttttcaaaatttataatcaaaatttaattttttattttacttcaaattttagattctttaagctaggagaaaagttgagagggcactagatatagtattttttttttttatatgttattaggaaactaaaccgcgcttcgcgcggtcttgctcgacttttataaatattttataaatttttttttttacttattcaatgatataatttagaatataatattttgatgtgtgcattataaatcaattaaaatggttgaaattaaaaacat

SEQ ID NO: 171649 - DNA, 593 bp, Cannabis sativa
  modified_base (535)..(535): a, c, t, g, unknown or other
gtaggggtttggggtcaggggttctggggtcaaggttcagggttcaaggttaaggggaatgggaatgagaattgtataaaataaaatttaaaatgcataaaaatgataaaaaaaaaaacattaaattttttcttatattacatttgaatggtcttatcttccatttcaaaatagaatagtcattccaccaaaatggtgagaatggccttccattagaatgacattctaatactttaaaatttaactaaacaaaagaatggaatgaaaattatttcttttccataccatttcattagctctaaccaaatggtacctaaggatctgtgttaggggtagagttcagggttcaaggtgttgggtgttaggtgttggggtttagggtgcttaggttagggtttggggtttgggatttgggttttagggttttggatttagggtatatggttttaagatttaggggttttagggtattagggcttaggggttttgggttcaaggttcatgggaatgggaataaaataaaatttaaaatgcnaaaaacattgataaaaaaatcattaaattttttctcttgttacattggaatggtcttt

SEQ ID NO: 171650 - DNA, 999 bp, Cannabis sativa
tgctgctatgacaactgaatttcaggctctcaagagataaggaacttggacattagttccataccatccatcaatgcatgccattgataacaagtgggtgcacagaataaagttgaatgctgatggctctttggacaaatacaagtcacggttggttgctaaagggtatcttcaaactccgggaattgattatgaagataccttcagtccggttgtcaaaccaaccacagatcgcattgtcttaagcattgctgtctcctccaattggccagtgaaacaactagatgccagcaatgcttttctctatggcaatcttgaaaaaacaatgtttatgaaataacctcaaggttttgaggatcctgaccatcccactcacgttttccatcttcacaaggcattatatggactgaaacaagcccctcgggcatggaatggccgactcaaaaccacactacttcaatggggttttcaagtttcaaggtctgataatagcttattcatctatggctcgggcaactcattggtttacctattggtgtacgttgatgatatattaatcacaggaccgaattcttccttaatctccaaactcatctctgatctgaacagggagttttccctcaaagacatgggttcggtccattattttttgggggtagagatacatagagatcataccggtatgtatcttactcaaagcaaatatatcacggacattctcactcgactacacatggaaggagccaagtcatgtcctaatcctacaagctctacaaccaagcttagtctcactgatggagaacctttcgaagatatcactttgtaccgaagtactatgggggctttacaatacctcagccttacaagaccagatgttgcatacattattaataaactaagtcaatttcttcatgctcccaccaccaagcattgggaagcatgtaagcggctgctacggtatctcaaagggacgataactgatggtttatggctctcacc

SEQ ID NO: 171651 - DNA, 624 bp, Cannabis sativa
  modified_base (562)..(565): a, c, t, g, unknown or other
taataaaatattttttagtaaccttttaaattcgattgatgtttctaaatttgttgattttaatttttggttgattaagtagaaaaagaaagaaaaaaaagttatttttatttggataatctttttttgtaatggtaaaaaattatataattaaaaagtagattaatgtgaatatggaaaaacttttatatagttttgttagaaaaataaaaataaaaaaaaaattataagaaagtgagagagatataatttcattttattaagagaaaaagacaacaagacaacaagacaaaaatatatataaaaaaaaaaaattaataaataaataaataaaaaatcagttgttaagtaaaataatagagaaattctaacttttagtggctgagtggcagctagccaaaaaaaattgactttcggtatatgtttacctatttattaaaaacaacgaagtattaacagtattaaaatatttgaacgcatttttataaatattttcaaaattacgtattgcaccgtaatttaattatttgaggaaattatactctataccctttttatattnnnntcttttatttttaccctcttttttaaagtctatcatttttacctctttttttaaatatt

SEQ ID NO: 171652 - DNA, 1122 bp, Cannabis sativa
gtcgctagaaggtcttccattggttttgcttctgcaaaaagaaataaacaaaatgttagaataactacaagaaggcatgcgcctaacagcaaaaaaataatgctagtcttaccctgactctctaactcagccctagcaaagtcttgaactacaatgctagcttcatcatccccaagaaagctatccgaggggagaaaccagctagaagacaagtacgctgagtgatccaaagggatgggtgcaggaggtccgagacctatccgggaccagcctaagaaatgaccttagtgggaaaaataaaaagccttggcatgatccccccaccgagtggggggcatcctaaacttaaaaaggcgttcgtcgaattctacaagcctataccaggaatactcttggacagaaggaacatgatagacccgtaaaggagacttaccgacccggatgtgctgctgtcgggagccccagtgttgggaacaagaccaaggatttaggcttggagggtacccgatctgtgctcgcctccaggtgaagggtcctctcggcggcggcttgggctttgatgtaggcaagctcctgttccctcctaaagaggtacttctgataccgatcctctgccaaggctataatctccgcctggagcaccttctctgcgaccggggtgcgaatgttagggcagagaaccttcgagaggttgaactcgtccaccgactggctcctggagatcagtttagcctgccgtcagttctccgtcgtgaccaagtccccaacgttgagatcgttcttgttgtaagtggagaaggtcttggcgtgttggagaaacagccgggtcggagccgtgcagaggagaggtggaatcctaacccactccgtgaggagctccgggcggtccatggcctggaagcatgaataaaagaaaaaatgatggcggtactctttgacattcttttggtggttataagggactggaccctcattcacaggatgggcccggagggtgaaaatctgtccttaaacttgtcccccttcttggggacagaaataagttcataaaaataaaaaattttggccgggctaggtgcagcccagcctctggcaacatagaaaataaataagcctgagagc

SEQ ID NO: 171653 - DNA, 716 bp, Cannabis sativa
gctcttctccaagaaggatttaaacaatcacaagccgattacactctattcacaagaggaactaatgacactttcatagtactcttggtttatgtcgacgacataatactaacgggtccaaacctacaggccttacatcaagtgcagaattccttacaccaacagttcaaacttaaggccttaggtgacttaagatatttccttggctttgagatagcaagatccaaagaaggtctcttcatgtctcaaaggaaatatactttgcaactctcgaggataccgggttcattggctacaaaccaaccaaaacacctagggatccaaagacaaaactcgacgacacacaaggcgaacccctcacaaatccatcggagtatagacaattaattggaaaacttctctatctcaccttgtcaagaccggacattacatacgccgacaacaacttaagtcaatttatgtccactccccgtactccccatatgcaggcccttcaccatctaatccgttacctcaaaggaagtctaggtcaaggcctcctctactccacaaattcctcactcaacctccgaggattctctgattatgactgggcttcctgccccgtgacaagaaaatccactacaggtttctgcatattcataggggtctgtcttatttcctggaaaaccaagaaacaacctaccatatctaaaagctcagccgaagctgagtat

SEQ ID NO: 171654 - DNA, 514 bp, Cannabis sativa
gtaattaaggtaatcatcatcgatttaatacatatagtatacaaatagtatacaaattctcctttgttgaagttataataagttttagaaaccctagctttttgatgtataaaattgttaaattaggtactaatcgaattttagaaattggtaatttatttgaatatttttaccgtaattgcggtatttattaacaacaaaacaaataagatcagtatttatgccgtaaatttttctaaattatatatgtcacgtgcatgtagtggggacacagacggaagagttccagtgctgtccacaagatatagcttgaattcacttggacttcccattatcaagacatggagaccatggtactaccaaaatcaggtattattagaaaaatttgagatgttgtatttaattttgtaatctaattaaaaaatttctctcatttttacattaaatgaaggctaattagtaatttttccctctgagctttgacatgtactaaattgtgccccctgaacttttt

SEQ ID NO: 171655 - DNA, 561 bp, Cannabis sativa
agcttgagccaccgatttaagcaaaacttccttaccggcctttgacaaaaaacgactttcccaagagaagattttcttctgtattttgtccttaaggaatcccaagatggcatttttattccttcccatgatacaaggtaaccccaaatagaaactattctccaaagcctccaccatccccaacatctcgctcattctctgtctagtagcaccactagtattattattgaaaaagatggatgacttagcatagtttacctgctgaccagaagcacgttgatacacttgaagcaattgtagaactctagaggcttcactctcattagccttacagtacacatagctatcgtcagcgaatagcatatgagaaacacgaggggctcctctagcaacttgacaaccagtcaaccaacgattacgttcatactgttgcaaaagagaagagagaccctcagcacacaccaagaagaggtaaggtgatagcggatcaccttgcctaatacctctccgtggaagaataggccccattactttgcctccataagtaacattataagcaac

SEQ ID NO: 171656 - DNA, 502 bp, Cannabis sativa
atatactgtgctagaatatattaaggttgtcgatataatgttgatagtttgtcgacatgttgtcgacaccttttatgcattaaatatctgatttattttgttgaatattttattgtattctgttatttttttaagtgtgctaatatcgacagattgacattttgtctacaaatttctataagggtatctgtaatatttttgttatatattttttcaaatggctccacgactcatagttccagcatccgagaaatttactggttgcgtgacatatagaggcaccggtgtttttgcaaaaattaagtctcagtttgaggggtacaattgaataacacggcaaaagaaagtagcttcggcaacttttagaatgtcgtacctctgacattttcctcagtgttatttcaccaagccatgttgcacaagatgaaggttgatgttgaggaggatttgcacatgcatttttacattggtcggaaggagctcagatttggagtggttgagt

SEQ ID NO: 171657 - DNA, 784 bp, Cannabis sativa
atctctcagtgcttgtccaccactacactcaacatctgtctgaatggaggaaaggttgggtcgattaaaccctcttgtgggcttcggcaagggatcctctctccccctatctcttcatttgggcggccgaggttctctctaggttgcttgggaatgctctggcccagggagacattcttggtataagacttagcaggggcggcccggtcctgtctcacatcttttttgcggatgacttaatccttgtggggagagctaatgtgagggaggctgaaggtgtttggcattgccttcaacagttttgtacttggtcgggtcaacaagttaataggctaaaaataacaatcttcttcagcaacaacaccccccagagtatgaaacgagggattaaggaaaagttgggtattggttctccgataggctatattaaatatttgggtcttccattgtttcgatcgaggcaaaaggatgctgactttaatttcatcattgagaacctgacttctaagttacaagggtggaaggcgaaaaccttatctaaggcagggcgtgctactctgatcaagtcagtgggcctttcaatgccgatgtatgctatgcaaaccactaaattatctaaccggctagtttctaaaattgatgggatggttagggatttctggtgggggtttgataaaggcaaccatggtatgcacttaagagcttgggacaagctttgcctaccgaaagcccatggtggccttggtttcaggaagacgaaagagatgaatctggcgtttctagc

SEQ ID NO: 171658 - DNA, 764 bp, Cannabis sativa
tcatcacctgacatcgatcttatcatcaccgagtaggtgaaatgggctcccttatgcgaattgcatgttcaataggcctgggcgaggccgggagtttcttcttcctcttcaatggagtcacttgctcttcctcggcctcatctttaggattcaaaggctcctgagcatattttttggccctggcaccacccttcaacttagcctcgtggctgagttgaatgagctcatcctcctcataagctcgttcagtccggccagcaccagacttcctcttcttccccgccacagaattaggaggaaagtcctcgggataaagcccgtacctcacaagattatcatcggaggtcaactggataatattccgatcttttcccagcaactgcaagtttttgagctctatcccttagagcaagagtgaggggaggacggtgatatgtcagaaactgctgaaactgagttcgggtaatgctcagattcttcaccatgaagtattcattagcgaagtgccctattttactgatggccttgtcatccgtgccggtcaaccacttgaagcctggctgagagaaatagaagtaccccgacctgccttgtttgggggtggacttcaaatcgaagaaccaggcaacctcgtgagcagaaagagcacccccatccttgggaagcggaaaggatgaagacagcagacaaatacttaatgcccttaggagtgatttgggccgggcagagaccaaagaagtcagccacatccttgaagtacttat

SEQ ID NO: 171659 - DNA, 558 bp, Cannabis sativa
gtaggcccagaaaaatgatagggactgaaacttgagtgacctggtatccaagggtcattagcacaactaattctacaaccttcaccaattttccaccacagaccagccagtaaaagagctcgaccccaatggattgcttgccatgttaaacaaggggagtggccaagtgaaacttcaaggaaggtggaaggtgttgtttggataatatcgactttttaagagccttgcaagtagagagtcgggttgttgaagaagtctccaagcttgtttagcgagcatagcttgattaaaatgtacaaaagaatgaaaacccataccaccattttctttcctttgacataaaagtttccaagagcgccaacgaatcttgctaccattttcattcaaaccccaccaaaaattggccatcataggctcaagttgattgcaaaaataaacaggcaaacagaagcagctcattgcataagttgcaatggattggacgacggctttgagaagaacttcccgccccccagctgagaagattttttcactccaagtgtgcataagcttccaaat

SEQ ID NO: 171660 - DNA, 638 bp, Cannabis sativa
aattgtaaatttggtaatattgtggctgtttgaattgtaatattatttacactgtaatgaaaattgtaatttggattgttcttattgtttgtgagaattatattgctaattgttatgttttttaactggatttaaaatgagaaatgcctaatttaagctttttaaattttagggttttctttataaattttgagtttaagctttttaaattttagggttttctttataaattttgaattcttttatttattaattaaaattttatttttcagcaaattttatatttatatttatattttattttaaattttatttttaaatatttatttatacaggccaattatattgtgccacgtgtacaatatcttcatgtggacaataccctgagtaaacatagatagccaacatggtacttaactctaaaagatagatgaaaatagctaaatgctaacagagcataagttttggaggttttactgctaaaatttaaattttggaggttaattgctaataaagttaaagttttgagaattttgctgcaatttaccaattaaataatttttaccctcaaaaggaaaatagatgaattgttaatctcactttagatgtgaagaagtgcattgactctattcgatttt

SEQ ID NO: 171661 - DNA, 654 bp, Cannabis sativa
tattaatattattattatttttaagtattggttatatcgatcttactatttatgaggattaatattttgaaaaatagttatagggtgattctacaatttaccatttaaaagggatatattgatgcctttcttacttgttttttattagtttaattttttttttcatattcatgcacgttataactatttaagatatgctataaaattttgaaaaattcagaataataatatagaaaacaatgttcaaacggtatattttacacgcgtataaaataaaatagtcacacgtgcaacacattgtttgaactttcagcatgttaaattaatctgtatttcttaaaattttgcaggatatcttaaataactataatttacacgatcatgagaaaaaaaattgaataaaaaattatttcggatactagaacatatagaaatgtatcaatacatatcacttttaagagggtgcattatagaattttttatagttatattatttaataactacgtttttactaaattttatctattttatttttgaaaattgtataatgcaccccctcaaaaagaatgcgctcatacaagcctattgggtttggtatacgaaagaattttttagtcaaattttttcttatggtcatgtacgttatagttatt

SEQ ID NO: 171662 - DNA, 729 bp, Cannabis sativa
aatggggaacaatgatgaagctgtcaataaagtcattactggtttgagcaccaaatttgcactcaaagacttggtcctcaactatttcttaggaattcaagtcaccaaaactgatcacggactgcttctcgctcaaacaaaatacctacaagatctcctctccaaggctgatatgcaaaatgttaatactcaaaacaccccgatgaacagtggcttgaaattatctaactacggcagtgaacctatggaagatgtcaccctctgtcgctccattgttggcgctttacaatacgcaacaatcaccagacctgagttaaccttctcagtcaacacagtttgccagtttatgcatgctccacttcaacaacattggatggccgtgaaacgcatccttagatacatagctggaactcttgattatgggttgcatttaaacgctgcaactgacttctccattgaagcattctgtgatgcggattgggcagccgatcttgatgatcgaaggtctacaactggctattgcatattcttgggaggcaacctggttgcttggaaatcacaaaaacaagcaaccataccaagatcatccaccgaagctgagtttaggagtctagccagtactgtctgtgagatctcatggattcaatctcttctcacagacctcagaattcagcaaacatctattccatctgtgtggtgtgacaatcagagtacagttcttcttgctgc

SEQ ID NO: 171663 - DNA, 578 bp, Cannabis sativa
ttttacttaaactatttttttaattattcaaaattatggaattttttaagttgattaattaacatatcatacatgtttcattttaaataaattataatgactattatggagaagtatttaattgttcatatttttaataattataaattaattttacattcaattatttataataataaaacttttaacaaaataaattagtttgtattttacatcttacattttttttttcattataaataaataatagcatattatgaaaaattaggcttttagttaattaataattattcaccatatacaaattaaaatataaattatataatcctataaatacaaacctaataaaattgtgaattatttacttaaattttaatatttcaattttttactaagtttaaaattaatttataatttatttttatttttctactacaatttaggcaacataacaactataattggacattcccaaattttttttaaagattaaactaacaattaaaacaacttacaaaaataacaattaaaacaaaataacatttcaaaatacatatttctacatatacgaacgcagt

SEQ ID NO: 171664 - DNA, 703 bp, Cannabis sativa
tcattaactttgctgtttttttttggggggcttgctttatgctttgagaaatagaatgggttttattttagtggtatgagactatttggaggacttatacatattagattagcattatgtttggtgagagggaaggaaatgaggaaggagggaaaaggaaaacttaggtgttgatgcaattttttgtaattgatttaagaagatggtacaaaataagaggattacgatgaatttatttgactaaataaaattgttataaataatatatacaccagagatttataataggtcactctcatgttgcgatggtaatagggctacgtctattgttgtttttattaatcagattcgacacgtcagagttatattctcaagagtgtggacaataatacgaaaatagatttctaggtgaaatttttatcgagatatatgaacacaagtcccatgggagacttaatattcacaaatttgataaagatggtgtgatgcggttttttgtcaactgatttaagatcgtaaaaataaaaaggaccacggtgaattaatttgactaacaaaatcgcaataaattaaattgacattaaggatttatattagttcaccctcatgttgcgatgaaaatggggttatgtctacttttatttttattgattagattcgacacagtagagttatgtttttaagagtgtgtagataaaagtac

SEQ ID NO: 171665 - DNA, 560 bp, Cannabis sativa
  modified_base (520)..(524): a, c, t, g, unknown or other
ctcttcttctgggacggggaccttctgtcatgaagtatacttggctatttttttattgcaagtatattcatcaaaagcaaggaggccaatgtttttcaggtttcgctcgtttagcaagaaatccagagctcgcaacctgtatggcagactcagcaaggtcttgtgacgctcaactatctctagggtagggactggtctctgaggaaccgctgcaaacagataaaagttcagtaaacaactttaaaaactacaagttaatataattattttcacgaggacagaaacttacgtttgattcgaaaggtagatgtgtttattggagataagcccgtcgtccagaagaagtcttctttaaaatctattgttatacccaaaatttggcttccatctaagtggaggaaacatatcaagataaagagaatatggatcgatgcaagtcactttatatggaataactcattaattgaatgagtatcagagtatatttataacctgcagactgtaaggtcttaggcaaggnnnnnatatacaaactggtgcttagtatattagcgagaaac

SEQ ID NO: 171666 - DNA, 587 bp, Cannabis sativa
  modified_base (528)..(535): a, c, t, g, unknown or other
ttctcttgcaagctgatagataatgtactaaatcccagaagcaaacaattataattcattggacgtaagatcgtgtgaagtttggtgatctcgactaagacaattgtgagcatgagatagggtctcttcaaagtttgagagatttgatctacctgagaacataaatagcaaaagagtagtttttacgtttacaatctttaaatgttcaattcaaagatcttttataaaatattaattatttcattttatttaacaaaaaatcaagagtcatgaaatcaacttaaattttgtaacaatcatgcgttttttttaagatagatagatggagaagttatatagctattattataatacttatacttaaataatgcaaaattaatactgcaaatgtatttatttatgagtatatttctcaattgctaaaaaatataaaaggctaaaaaaaactataaaataggaaaattatatatagagtaatttttggcatatatacctaagtttaactcccagttgtaaataaatacctannnnnnnnttttggcggtaataatacctaaattataattctggaacttttgtaggtacct

SEQ ID NO: 171667 - DNA, 696 bp, Cannabis sativa
taataataaataatagaaatttccttaaagcaaaataagctatatagtggtaatgtcattaagtaccaaccctaaagagctatctaaaggaatatgattattgaatttaagtacaatacacaaacaatcagacacaaagcaaatctttttaagaccaaagttgatgcattgaaccacaacgctacggagtgccatggcctccgcagccttagtactataagagtccaccaacacaacgccccctcactgtccatagcctcatcaacattaattttaaggaaatgttaaaatatttcaaactttattttatttataaacatgtatcttaaaaagtcagatcaaaataaaaataatttaaataaactaagattttttgaaaaaaaaaatcaaacttatttatatttataaactcaaatcttcacaaataaagaaaaataactaaaattctaataaaaatataaaattattttaaaaaaaaagttataaattaaactaaaaaattgttatgttttctcaaacaaatctacattttttaagaaaaataaaatatattcaagtttgtttaaaatttagttttacaaaattgaaattcaatatttttttaatagctaaattaatttttcaataaaaaactaattttttaaatagcttaattagttttaaaattttaagttattttttaattttattaatcat

SEQ ID NO: 171668 - DNA, 1305 bp, Cannabis sativa
taagatattaattggttactttttgggataattctataaatatggtaaggaaacttaataagaaaaaatatgctatttaaaataaaaacttaacatatatgggattgaattactataaaagatattaaaattcccttcatatatatttttttttaaaaaataaaacaaatgaactacagtgatcgccagagttgtcaccggtgccggaaaaggcactagaatttgctgtcgacaacgaaaaaattgccgaagatgctgccgacgcaaggaaagtcaccagagttgatgtcggcgctgaagaagtcatcggaattgtcattatcgccgaaaaaatcaccgaaaaaatgccaaaaaactagtttcttatggagaaaccaattttttggtgattttttcgacgacaatgcgaattttgatgaattttctagagttggtgtcggtaccaaaaaagtcaccggagtagctgctagtgtcgaaaaagtcgttggagttgctaccgacgccatcgtcagaattgacattgtcgtcagaaaaattaccagaaaagtcgttggtttcttgatgaagaaactagcttcttggtaattttcccagcgactatgtcatttcgatgacttttttgaagtttactgtcggtgccggaaaagttaccggagtagctgccagtgtcagaaaagtcgtcagaattggcattgtcaccgaaaaaatcaccaagaaagtggtttcttttcttggtgattttttcagtgatttttctgccgacaatgccaatttcgacgaatttttcagtgtcggcagcaactctgatgacttttttggcactgacaactactccgatgattttttcaacaccgacagcaagcttcggcaacttttcgaccagtgacaaataaaactacctaaacaaataaaaacattaaatatggaatttaaaaacctaatttacatatatatggcaatcaaataccataaaaagacctaaaaacaaaaaataaccatataaaatggtcaaacttaaaattgacatatttaacaaaagaacttttaaaatctaatagtaagtgtaattttcttttactttttcattaaaaatttatttcataaatttacatatatatatataaataataaaataacaattttaatatgtgagaaacatatattttttttgtctctaaaaaaggatggctaatatttaaaaaaaacttttttgttttgttttttttatatatatatttttaggctatgttatgttattttattgtttaagataccttgaggttatttttttaatgtaactcatat

SEQ ID NO: 171669 - DNA, 870 bp, Cannabis sativa
caatgaaagcaccaaaatactaacatcacttggagccaacgatagagagtcttaattaaagcgattagataaaataaacaatagaaagcaaagaactgtaagtaaaaaaacaaaatttctaaaagttcgaccccgtgatattggtaatagcatattcccctttaggatgtattgacttatgagacaaagaataaaatattatctctctaaagctcttacaaaggatctttgagtaattctcttttagatcactatttctctcttgagtgttctctctgattcaattcgtcccccaatagtgaggtgagaccaccattttataggggctcattacatataatggttttccttaatctataagaaataaaataagaaattaatatgcttccataattacaataaaggacttatgtaagtccaggttgactacttttattctctgaagatacgaatcaatcccaaaaaagtagggattactgcctgtcatgcaagcttggagataacatcaatcactgctaaaattgccaactcgcatttcctaactgatgcatgtgagttgatcacaagatcgagttggtccgatatcccttgatgactctatctagacatcctgctatgtatgtacaacttggaccttcatatcaatccttgtgagctactagtagtaaaaccatccgcttaagttgaagaatgcaagacacgtgtcatctagctagatgccacgtcatagtgtaaaaaatagaataacacatggagataatgaaattcgaagatgaatccttccctttgaaatatttgggagtcaccttgagaccaaccaaatagaaatatgcagattgtgaggttatttttactaaaataaggaggaaa

SEQ ID NO: 171670 - DNA, 552 bp, Cannabis sativa
  modified_base (466)..(475): a, c, t, g, unknown or other
agtgaaggttctttaacaaattcactttgattgtaaaactgacatcgaagtttcacatggcactttgggctatgaggccagttggtttaagtgataatagttaggatatggattaggcagcaagaacaagaattaaatttctggaaatatattgcaactcttccctgtggagcaaatttaattctatcaatttttttaaaaaaaaaacgattgggttgttgctgttgtacatctacggttggcttttctaaatatacttatcagttagattttattctaaataagaatttactactatttatatctatttctattctatataaagtgtgtctatataaccgaattcttggtttataagaaatttatgggtgattttttattaatattaaaaataaaataatttattattaaaaatgaaatagtttttgaaaaattcacgggccactttttatttatatataataannnnnnnnnnattaaatccaaaaaaaaatatgattggatttttgttgttgtacatctacgatatttctcttcttctcttctagaatt

SEQ ID NO: 171671 - DNA, 907 bp, Cannabis sativa
caacaacaaccatgacataccacaacctgctataccacttgatattattccaaacaaccctgctactagacctgatttacatgacagcagagagcaacaaaaaccagcagatgtttctgctaacagacctattggaaacactaagaggccatcatatttgaatgattaccatgtttttttgtcaactaatagtgtttattctctgggcaactcttccatcacagaacaccctttatctcaggtcattaattttattagggtgtcccccagatttcgtgtcagtatattaactatttccagcttatatgaacctgaattttatcaccaagctaaaggaattctggtttgggacaatgctatggcctctgaaatacttgctctcaagacaaatggaacttggattattgtcactttacctccccatcatcatgcaatcgggtgtaaatgggtgtacaaaataaaatataatgctgatgggagtgtcgaaaggtgtaaagcgaggttagtggccaagggctatagccaacaagaggggatcgactataatgatacttttgctcctgtggctaagttggtctctgtaaaattgatcttagctcttgctgctatccaagggtggtttttacatcaattagatgtaaacaacgctttccttcatggggatttacatgaagaagtgtatatgactatacctcaaggagatagtcctaagggggagcttccaccttgggctgtttgcaagcttcaaaagtcgatatatggcctcaaacaagcatcaaggcagtggttcgaaaagttttcatcagctcttgttgaagaaggattcaaacactctgcctcggatcactctttgttcattaggcagaatggatctagcttgattttgttgcttgtgtatgtggatgat

SEQ ID NO: 171672 - DNA, 1176 bp, Cannabis sativa
  modified_base (1118)..(1120): a, c, t, g, unknown or other
acaaggagatgtcccgattagattgtagagtattattttagttgattgttattaataaaattgcatattcaaaataaatagataaataaatttgctatctttttgtccaagctaacacaggaagagctcaaagagtaatgtagattctacatagttttgagagaatgtatggacaatatattaatttgactaaatctacttttcctttagtaggattgtgaatggtgctattcgggagattatttgtgttattttgaatataaatgaagctgataagaatagtatgtacaagggtctcccaagtacaatcagtcgaaacaactctattgtattgggcttcctgaaaataaaagatgagaaagtgtatacaaagttagaatggtaaactcttgtcgcgtgttggtaaggaggtcttggttcgtaatgtggttaaaagtcttccaacttatgctatgagcgttctccttttccttgcgagaacgtgtcatgatttggaacaacttatggttaatttttggtggaagtcgtctgctaattcccgtcaagaaatttcgtggatgagttgggagaggatggcacataataaggaggttgatggattgagttttcactctcttcatgatttcaatttggttatattaggtaaacaagcttgaaggtttttgactaagcctgattcgttggtttttaaagtctacaaaactcggtattttaagaataagaacttcattttggtagaacttggtaataatccaagttatatttggaggagacttgttgaggaaaatgagttggttcgtaaaggggcgagaaaaggaattggtaatggggaggagactattttatttgatgatttgtggcttttgaatggttcaatttcgagtctagctagtttggatcatagtttggcaaatgagaaggttagtagtctttttgtggtgtgagaaaacttgggatgttgatgtttttaaagacttgtttgatgaggaagtggcaaccaatattcttggtattctcctttctaattcggtttctaagaattattggtattgggttttgactcttatggtgagtatacagctaaaagtgattttaaatttgtgacagtcagtagtccnnngatccgtaaggggaaatactgggtaagctgtacaatcccacaccgcctggggaagg

SEQ ID NO: 171673 - DNA, 785 bp, Cannabis sativa
aagggacccaaatatctgtccttcggcccactcaaattaaaattttatgggaaatattacaattgttgtttcaatgtatataaaaaattgtacattcagttacagacatcaagaaatcttaatagactgtgcttgtatgttatttagtggtaacccatttgacggggtagacaaattagagaaatgacgatatgagttaaattgctgatattcctaagtgaaatataggacacgagtagttaatagacgcattgatctaattgattcaaataacaaaatattctatttatgagtgatctaccattagtaaagttgggacaatttatgagtattgtttggaatcttaagtgaattgaaggtggcgattgtgtactaattttgagattatgtaggcgtaggactaccgatgttagcaagaagcatcttgtgtttggtagcccaccatgaaggaattctatggtttagtgttcttgttttggggtgatttcatttaggaaacttccccatgaagcgtggacgttactgggctagcgtataaaagaacgtcagaaaagtagtggtatcaataaagcaaagaagattacctaaattactttaggtgatacggtaatgatggagagtactttataatttatttgatattcaatatggtatttaaggagaccattcacattattggaaaagatcactttattatgcaattatggaaatgcatactcacacagaatgaggaaaagcttatgaactgagatgcaatttaatagaccacaaagtaggctgtttat

SEQ ID NO: 171674 - DNA, 624 bp, Cannabis sativa
ttttattgtgatattagccactaattctcttatctttttcttctttatcaactgtggtgttttagttcagtcatttcatgttttattttagcttatgtgtcaccaactgttttgacagtagttggtacccgagtttgttgtccaacaaacaaccaactatacctagtactataaatagaccttgtaacacactttttagtcatgttgtatgatcagactttactaagaaatagagtgaaaaggagggatgtataagggaattaagtgtgtttgatcttgattccccattggtgaggttctttgcaatttcttctcatccgttctccattgtattcaagacactgttgtactaatttcaacatcaataaaggtctatgtttatctactcttggtgttaattttctctttgttttgttcattaagtggttggttttatcatcacaatttgtgatcaaactgtgcttgtgtttttggttcaattttaattgctgcattgtgttctcgatcaaggtcttgagagtgattcattcactacaagtggtatcagagccgagggagatcaaagacatcaagaacttgattttgacgatcaagaattgtagccatgtcatctgcaagattcga

SEQ ID NO: 171675 - DNA, 697 bp, Cannabis sativa
ttgatacatggcaagaaaaaaaaacattccagagtcttgagtcattgtaatcgacgtgggaagggtccatagtcatgcgcccaggttgacttcgagaactccgaaatagatgtttagatccctccaagttatttttaactcaccatcctttagtattatgaactaagaagacaagaagaatccaagtctaaggcttgaaaattgaaaagatgtgaaataatatcccaaaaagtcaacccaagcgcctagggttttcacccaacgcccaatttgacatttccgactagggttttagttttcgggtttgtcttagtgtaaatagctcaaactttgtacttatacatgaataagaactgtcacaaacatgttagaggcatcagaatcagaatcgaaaacacttcctgtttgagcactcgggcacctggtgatgcacccagcgcctaggttgacatattgtcaacttggggtgcttccaaccacaatattgaagaagtatcccaagtactttcttcctctacatccaaaacaagaaatcaagtgctttcggaaaagaaacaaatcaacatggaggataaaattgggacccagcgcctatgttgacatattatcaatttgggccattttcaatagcagtttagacaaagtcttccgggcatattctttattttcatcaacaattgagatatgggtgttttta

SEQ ID NO: 171676 - DNA, 599 bp, Cannabis sativa
attattattattattttgtaatgggtattaaatttttacctttaccaaaatcatgtttggtgccgataacaaggtcagctgtaacatcatcttttgatcctttcactttttgcttttggtcatagattgtataccttatagtcacctatcatatattcaaagaaaataagactatatatatttgtcaattatatataattaatgttttgtacgtatatagctatatatatatatataaataccttctgattgataattggatgactttgaccttgaccataatatggtaataacttcttataatacaccacagatttaccaacttgaagctccttaaaatcattagtcaacgacaaagttttgcctgtaaaaaaaaaaaaagaatttgatcaattaattctagacttctattacaggatatatatatatatacattaggaaatgttttgaaaaaataaaacgtaaatcatttgcaaattttcaatataaaatagttaggttgttataggtatataaaataattagtagattccgttaaagagaacaaagattttatttttattttttgaaagaacaatatttcatttcttatataatac

SEQ ID NO: 171677 - DNA, 655 bp, Cannabis sativa
ttttttataaccttttgttgtcttaattttaattttgcgtgtgatgaatgaaaattttatctactactggttttttatatttatgtcaaaaaagaagttgttgctattgatttttttggttatttattgcaactcatttttattttggctatgtcaaaaaatatattgctacaaaaaattttggctatatattgctactgtttttttttcttatattgctactgatattctttttgaattgtagataataaatatatggtcaagagattcccaccaaaagagaagactatcactatgaatattgttgaataatttattttatgaaaattttcaattttattttaagtttataatcattatggacaactttaaatgattttcaagacttatatttaaatttggaatttggatgactataatgctgtaacttttgggtgattatacttatgtatgaaatttatatttttcatatgttaggtatgtatttaataatattaacatctaattttttttatgtaaaataagggttaaggttgggttgtataataaaaagaatatgaatgaattgaatgttatattttgatataatatttttgattgattaaataaatgttacaaaagttacaagtttgttactaaagagataatatttaat

SEQ ID NO: 171678 - DNA, 518 bp, Cannabis sativa
actattaaaatttttgaaaattataattattacgagtaatcttttaagaaatccaatattcttatttacctttaaactcaagtacataattgttgttttcacaaatttattgcctatcaacaaagaggttgatttcttaatatgatttttttttttcaaatttgaatatgatgtggaatatggattttttttagtgctattaatgttcttcaagatagattgagtcattttagaattttaagctttttttttttcttcataaagaacgtggcacatagaactcatgatgaaaaaaaaaaaaaaaacaagaatcaaattgttgattaataaaaaaaatttgacttgtcatttaagttttgtgattggattcatgtgaaatactgaaataggatttaacatgtttaaaaaagtcttctagatgcacatgtgcgataatgaaaaaggaaataaatataatctgttttagggttttttttttgaaatttttacaccaaaaatacaaaatacacactttatta

SEQ ID NO: 171679 - DNA, 1306 bp, Cannabis sativa
  modified_base (1066)..(1074): a, c, t, g, unknown or other
ctattcaattacacaattcataactgttataattatttaaaatagtaaatttcataaattactatttggcccttaagaatcacttctcatagaaattaattctcacccaaatttactcatcaaataaaatcttcccctatacaatgttgtatagaggtgacttggggaccatggacttatatttcaaagctccaataaatatttgattattatcaatctcattaatagaataatcaagtttattaattccattattactctactataaatatggaattacactctttgacaatatagaattatatttatagaattcttactagtagtctattgatataatcaatataagtagttcaccctctaataattagtttataattagagttggtcgaaattatcgttttatctttctaattatctcttgattccttatgtaccattaattcaatgtgaacatttaatctataacattatagatttggatttaattgttagcactctcagaattaacattataattgagctaatattcaattcatcaggaaagcttggattctattattttataacatgttcccagccactcatgttattaagcttccaaaatagaagttgtaagtatcatcttctctcagaaactttaacaagtgaatcaaagaactcagtaaacataattaggagtttatgtatactcatgatttaaattgatctactaatcattgtcattgtgatttgaataactctttcatgacaaatgacacgttaatggaagatgttatttcatatcggtgcagtcatgtataatcaaattacacacaaatacatttactacatgtctatttacatatatatatatatatgatctgaatcaaaattacacacactagagtatagtgtatagtaaaccatacttagtaattctgtactaaagatttacttactttaatacactactgactagttttattcatatcatataatcttaattctcctgcatatccttacaagattataccttctccatatgaataaggaatttttagatatttattaattatacttctannnnnnnnntattcatttatcttataattgtatttcatatattatgtaatatattgtctattaattacttatttttagggcataaattccaacaagtggctgggttttctcgatatcttgtagggaaggtggagccaaagataacagaggtattgggaattaaagaagctctcagctggttggagacttaatctttctcttgtgttgcatgtgttagacaatttatatgtataaactgaaa

SEQ ID NO: 171680 - DNA, 577 bp, Cannabis sativa
cattgtgctgtcgttatctcgtcaaatactgctttcttacactgttggggtcaggagtgcaaataagatcaacggggtgcaggaggctaggcacgggcagagcggggtttgcactcgcacggagggaagcgtaggcgtgcggagggcgcgagtgcaagcacgcagaggtgcgtgggagcgcgaaggggcacgggtgcgtggaggagcgcgggcgcgcggagagacgcaggcgcatggagctccccttgagaaactttcgacataacactaatgactccaaaatattatattaagtatttttttaggggtcaacaatttactatacaaaattataagcttctaggtttacaaacattcaaaattaattaaaacattttatttttatcatgattcatcatgtccttaaataagcaaactaatgacctcaaaaaagtaaacaccttaatcggaaaagtaaatccgaatgcttaaaatgtaaatcgttataattttaaattttctttatcaaaagaaaaattaattcaaacggtacacttatgaaagaatacaaaacataaacttcttgttataaatatta

SEQ ID NO: 171681 - DNA, 557 bp, Cannabis sativa
ccatgtcatgaggacaaaaatggggataacagattcatccgtggatagaaagctaagtgggggcttggaccttgacaacccacaaaatagggggaaatatcaacaacttccctatttttgagatataattatcctttttattatttattatttaattatgtaaataaagagcattattctaacccaaatggactaagtctcaagtcctatgcctcgaagctctaagtctctagctctctaagctctcaactctaagtatgaaactcacttctctcctctcctctctctcacatgcccaagcatccttctcactagagatttgccaacttttgtactcacattgtaatcttaagagtgccactcttgatcacactactattgttatttaagtggtattatttctggtatcaatacaaccaaaaggggagtacgtcactatccgctaactcagggggcaaaacctctataaaatttgatgtctactttaattttttgctctaattgtgcaacacgtggcaagcatcatcattaaatatgactccgctatcggttggcca

SEQ ID NO: 171682 - DNA, 619 bp, Cannabis sativa
  modified_base (551)..(551): a, c, t, g, unknown or other
tggccaacttttgtagacaattctaactagctaagcaaagttgcgggataagtctaaaaacccacaaaatacggttttaatttcaattatttacctattccttaagaataattaatagattgttttctcatatatttaatgtgttaaaaataggcgatatctccttattttaacactactacaaaattgattttttccaacagttaataactgtcatttatactatttcccaacgcactactacaaaaatagggttcagtgacccattttaagagactttaaagatttttagtgacactccactgcgtgtcactaatgtgggtgtcaaaaaaagtaatatttagtgacacttcagtgcatgtcactaaaaccttttagactctctcaccgcacgtcactgtagacatttagaatctcacattgtcagactctaaagataacaactacatccacagagtgtcactgtatctactttttttttgttttttaataattttcttgacaatggccacacttatagttggtcactatatcataattttttttttaanaaaaaaaaaggaaaaaaaatatatggtatatcaaatttgttttagttttattttctttttttttttta

SEQ ID NO: 171683 - DNA, 520 bp, Cannabis sativa
ttatatagaatagatatatttaactatcaaaatgtataattatgatctcatatcctattttttgtgttctcttattctctttcttcatgcattacttttttatttttttttaaaatttaattccaatattttggtatatattataatgtatttaattaactcattatttgatttattttatatacatggcaaatacagtgataaaaataactttaaatataagtattgacggacccagaatttttactttggggggcttatttatcataaaaaaatatttataactacattataatcactcttattaaatttatctaattttatgggggctattctactattttggtttataattattaaattgaaaaatttacatttaattttaatatttttgttagtgggggctatagcccccacattattgtaaatgggtccgtccctgaatataagtaatcactacaaaggagatacaatgatgataacggttttaaattatcaacttagttttatatttttatat

SEQ ID NO: 171684 - DNA, 1427 bp, Cannabis sativa
  modified_base (542)..(545): a, c, t, g, unknown or other
  modified_base (1107)..(1108): a, c, t, g, unknown or other
attgaaatgagttttatttaggcgtaaaacccaacaataacatgtgcatgatattatactaatcttacctcaattctgaattcgggtgtgccagccaacctgagtgaaacaactgctcggcgaattacaagctcctaaatcacatcgataacaacacgaataagtaatacgctaaatcacaactggggacttaggttttaaaccaaaaacctatctattgtaacttaacatggcaatactctaaactaacaaggaattaaccaaccaaagctctgaaactagcacgaatcgacaacacgatttctttggggaacccagcaacaaattcaggtaacttgttttacatgccctgtaaaattggttagccagtttacaccagaaaaccataaaaaaactccaaaacctaaccaaattgattccaaactttaccaaaccttccagacctccatattataccccaatagacatattccaagtaataaaacaactacccaagctcagaattaaattttaccattaaagagccaagcttgagttctaannnncaaagcttgctcaatcaacaaaccagccatcaaaatatgcataactcaacatgtctaaacataaataaactttagaaaacaatatgaaatactaacagtagctacagaactgaaacacccaaaatcatgcaaaattattaacttgaaacttaagaaaaccaaagggaaagttgctaggagcttaccttggcttggattcacttagagctgctagaaatcacatgatttgaagaacaaaattcaaaaccctagttggttctatagggttcaaataagagagattttgagagagagagagcttcatttcaacctttgcattttttgtaaataaagaatttaatgaattaaataaatattagcttagaattaaattaaaaatctgattattaagttaaaacaaagtccactgaatgacaaaacacaaatgggaaaaaagaccattttgcccctcccacactaaaagtcgtaaaaggtcacctaggggtatttttgtcaactctaaaatctcaactattcccgacattttcaatgtttaactatactgtcccgctatactaaaaannctaagatgtgattctaatagccaagcaccgcgttccaatgttgctgggcacgaaacatgcaaaattataaaattctatatatgacatatgaaatgcattctaaattgaaataaatcatcataatttaataactccaagctaatatgcaagtttcacaattaaaccctaattatctactaatgtctaaattaaagctaagcggtctttacaattatcacctccttaaaaggattttgtcctcgaaatctaacttgaacaaccctggatattgagctgtcatgtcggattctaactcccaggtggcttcctccaccttgct

SEQ ID NO: 171685 - DNA, 837 bp, Cannabis sativa
taaaatggggctagaggatgtaaaattaacactgtgcatggtgaatggtttcataggggacagtatatcaagcctggggacaattgaactcccattaaccatgggagaacctccaccatcctcaactcaaatgtaggagttccttgtggtggatattctttcagtatataatatgctaatgggtcgcccaacattaagtggaacgggggcagtaagttcaataaaacatgtatctctaaaatttccaactcatcctggagtaggaactgtgaaaggtgaccaattgaaaacccaataatactatagcatcaagatgaaaggaagaagggcaacccacccgttaatggtaatcataactgaagaaggtgaagtccatgagatggaagacttatatcctaggattcaaagcgagcaaaactaacttgaaccaattgaagagttggaagaggtgaagttagacccaaacgacccaacaaaaggtgtcaacattggaaagggtttgggaaagaactaaaatagcaattaatcactttttcaaggtgtttacgcaaattttcattaactaaatatatagcattttatgtaataaatttactacaaaattaaataaaaataataaataaacactagatattttacgtggttttgtagttaaaatttacatactctacgagtccttcttattagttatatttatttgaatacagagtacaattctaaatgaaggtaaataatattattttctcttgaggtgtgtttggaagtaactgtgtaattactaagtagggtaattactagggtagtagttacacagtctagtaattacactatatttta

SEQ ID NO: 171686 - DNA, 618 bp, Cannabis sativa
gtattaacctgttctttgagccaattaagtatagggtattagtctatatagtgcacctcctaaaggagtatttcaggatattccctatttgttttggcattcagtacaattttttagcctaattttttttgtaaccatatacagtatagtcatttaaatttttttagaaaattccaagtaatttataatactaaaaataaggtttaaatattttgttgcacgagcgactattttttttatacgtgtggtagataattgtttaaaccttatttgtagcatcgtaaattattcaacttttttttaaaaaaaaaaaattacagctaattctaaataactacaacatactgattataaaaaaaaaaaaaattagactacaatttttctaaataccgaaatagatataaaaaaaatttatgtgtactacataaatttctgtaagtatattccctacattttattggtcattctcttgtactattaatacttaaaagaaattcaaaaaaaaataaggagagaaaaagaaaagtactaaattggtaatagtggaagacatgacccatatattttgtattttgtatttgtatgtgaacaccgactttatatatatatatatatgta

SEQ ID NO: 171687 - DNA, 610 bp, Cannabis sativa
ggttcttcgtcggggttctggtccaatctgagtcccacttctatacaccgacttctggtctgttccagttcctgttacccgaatcctgagtcaagatctagatcattgtcatgggtctcggtcttgttcagattcaggtccaatgtcccatttctgagtttgggttcaggatcgagactagggtgcggttctaggtctaggtccttggttctgatccttgactgggttcgagtttgggtccggctccgggtctagctttgggtctgattataggtgtggatgtttgagttttggtccgagtctgtgtccgggtttgtgtctagttctggaccccgatttgggtgtaggttcaggtccaggtcaaagatcgggtctagagtgtgggtccaagttttggtttaggtaagcatctcggtccagatctaggtcctgtatttcgatccaagtttgggtcttggtccgagtccaggttcgtatccagatcctatctaggtccaagtctgtgtttgggattgtgtccaagatttacgtccaagtcccggtctcagttccagtctgggtacacgaccttgtccgggcccgagttccagtctcagtttgggtctgaggc

SEQ ID NO: 171688 - DNA, 803 bp, Cannabis sativa
ctcaaggaaaaagaaaaatctagcaaacattgatcaagctaccactcacactcagcaaagtcaagaatataatctgattccattcattcttgaacaaacacaggaagatgctcacgctgaacctattgtggaagatgtgtctgaagatctaagcattcccattgctctcaagaaaggggtttgctcttgcactcaacatcccattcacaactatttgagttactcaagcttctctcttacctataaagcttttatcaccactctggatcaagttcagattccaaattcggtccaggatgctctataagatcccaattggaatgctgccacaatggaggaaataaaaacacttgaaaagaataaaacatagatcatcacagatctgcctaatggtaaacgtgcagttggttgtaaatggatcttcttggtcaagtataaggctgatgggagcattgaaagattcaaagcccgattagtggctaaaggattcacccaatcatatggcattgattatcaagagacatttgctcctgttactaggttaaacaccatccgagttgtcttatctattgcagtcaacaacgaatggcctttattctaacttgatgtaaagaatgtttttcttaacgacgaccttgtagaagaagtatacatggacattcctctaggatttgaggaccgattctcaaagggaaaagggtgaaaactaaaaaaatctctctacggcctcaagcaatcccctcgagcctggtttgacaggtttataaaagtgttgaaaggagatggttacactcagtgccaat

SEQ ID NO: 171689 - DNA, 604 bp, Cannabis sativa
ttaattattattggactacatgttctacataaatattaaaggtaaaaatattaagtcataacaacataaattactctaatcgttactaatttattctgagtcatgccatttgtcctacattgattattttatttttaaaaaaaataagttaattagaaatttagaattattttaaaacaaaaaaaattaataaaaacttaattttaaattttttaaaaataataataaaaaaaacatattaacacagaactgtttttttttttaagtaaaacactaataatcaacattaaaactaaaatacaaatctataaactagtattattatacttgaaataaaaactaaaaactcaaatattcaatctcaacaaaaagttaaaaacacaaaaaaaaaaaaaaaaaatggatgaaattcattggctgaataaaaataaatttagttgatgacatgtttttattaaactatgttttttatttgttattttcaattattttttttactaaaataagtaatataaataatttatttagtgttgttgtttatatatgtgaaaattacatgaaatatgggatttcataacaaagttagaaaaatatggcattttta

SEQ ID NO: 171690 - DNA, 693 bp, Cannabis sativa
  modified_base (141)..(142): a, c, t, g, unknown or other
ttgttgattttttgttatctgtttttttttttttgatgttatttatatgttacttttatgtaattttcttattgtatttgtgttgtttgtatagaaaaccgtaaaaatatatatatatatataaaaaaaaattaaacgtannaatataattttttttttttacaaaaaatggtgtcttatgtaattattcatattttatatgtacaataaaaaaaaaaataaatttaattgttatacttattttatattgatctctatatttataaggattatattagaaaatatttttgacaaaattgacaaaatttgagtttgataagaaaaataagaaaattattactttcaaataaaatttatgtattatgttcaaacatatattttttaaaaaataataatagtgatagattcattatcataatttgtaattaggagagtttgattataataaagtgtataaattattagaaacatatatatagggacacgattttgtcccgtgatcggcagccattagatggaagagttatttaatctgagagctgggactgatctagggttatttgggttaagaaatggtaacataccctaagacccatctaatgtaccttgagacccatctaatgtatcacggaatacattccgtaaaagtacatcacaaaatcgtgtccctatatatatcattaatcatttttt

SEQ ID NO: 171691 - DNA, 696 bp, Cannabis sativa
tagagaaatagtatattcttgaaatatcacaacgttctctgcaatctccagcaatggcttcacgttagtgcttccactcatcttttatcatcttcttctttaatttagcaaatattctatagatttaggatttaaaattttctatattaaagcacttttaagaatatatttagatctgtgatatatattttttgagtgttttataaatcctaacaaatggtatcaaagccacctttgttgaattaattgaagatttgataattatgtttataaaatcatgatgtgctatttgacgttccttaatatttatatctgtacagtttatcatacaaatatatataaatatatataacttattaatttgctgttattgatatgatgatttgatgacatgagaaaatttctttggcatataatttgtctcttatatccatttggcttcagtttcggatcgtattgttaaggcttggggcttctttttgaagaaaagtgttagaccttctggtcattacaaaagagtttatctgggatagaggtaatcggtagggaacggaacctctggtgggaaaatgcccagttagccacattatgggccacaaaattacactgtctacaaatatattcgaaaatacatccaacaataaaaggagaggatctaatacaaattgagacatagttttcgagctcccaaaggga

SEQ ID NO: 171692 - DNA, 693 bp, Cannabis sativa
actttgcaacacttgttctttgactgtcccttctcgtctaattgcgtaaggaaaatataaaagattggctttcttggaggatggcttccaattccctgcatcgaatagtaaggtggatctaaaaagcaaaggttagtaaggttaaaaagatgattcttgctgctgtcttggcagcccttgtgtactccatatgacgagctagaaatgacattctatggcaaaactcaatgccgactatagatagtatagtgtgcaaagttaaaaatgtgtcaaagaagagaatatcttgtacatggccaaagaaaggatcaattagtgataaagaatggttagaagcattgtaaagttttaaaagtttattgtttcttttttaggttcttctacttggagaatgctatttggttgtataaaaatagtttgagcaatgaaattcacttgattcataaaaaaaataaaaagatactgttcggtatatattttgaaattgtatatactaattcatatatgtttaaaattttatatatactaacaagtaatagatactattagatagtcaaacataaataaaaaaaaaaaatcaaatgatactattgtgcaatcaaatactaagtaaaataaaattatattaatttttcatgtagtatatgatacacttttgttgaatatgatactgtggtgaaaaacaccctcaat

SEQ ID NO: 171693 - DNA, 892 bp, Cannabis sativa
ataaattgtaattaaattaataaaactttgatttaagtttttaagaaataatttgttaatataattttatgttggaataattttattatcatacaaaattgagaataatgaaaaaaaataaaaaaaaaagtataatttaatataatttttttttataaagataaacttttaattttaggaattaaataaaagttattttaaattttaataaataatataaattttttaataataataataataatttgtttataaaataattaatttatatttattttattttagaaaataagcttagtaatttttaattttttaaataaattaataaataacttaaatattaaatgagtaaaacttttatttaaatttttaagaaataaattgttaatattattgttatacttaaaagatgaaataatatgtgtgtaagtcaaaaaatattcataatattttacaaatacagttgataagaaatggttgaaaagcatatatcatagctttggtatacttataaatatataccatagctttatttttttaaaaaaatataccatagcttttgtatatttacaaataaagtctagaacaaaattgttctgaagtttatttgtaatatacaagagcgatggttatacatgccaataaaaaatttcataaaactttcttaacactttacaaatcattcaaacttttaatactacatttattacctacattgtagatggcgactgttataccaaaaattcggctaccacatcagaggaagacacgtgtcaagctgggaaaatatgaacccagacacgtaattataattacatttgaagaggaataactcgttaaaagcataattgacagagtatatttacaactcgggatgactgaatagtcttct

SEQ ID NO: 171694 - DNA, 511 bp, Cannabis sativa
taaaaagttctcttgatatgcatttctagcatagttacacgaccactccaaataggtgtgcagtcttagaattcctttagaaacaataatttttacagcattttttggccaagtcttctattttttcatatttcaacttatacttgctgaatttttattccaaagaagtaaatttaatatttcatatctttgcattacttaccattctctaccaatgtagacaactcttgttcaaaaatcaaaattacttttttagacttgtgacaatagcttaggtatgggtaggtaacaacgtaatttagatgcaattatacgataagcactacaaaatcaacacgatatcactttaaaacccaataacaatccccaaactgctttcatttcttagatttaaaaaatctattcaattcaaatatttttttctctcttaattacacttcttgaaacttttttttgaatttattttttttaacaaggagtgtaacgccctaatgctaaggcacgctacagt

SEQ ID NO: 171695 - DNA, 502 bp, Cannabis sativa
tgttgcaagtaattttttaataatttacttcgattagattcattcaaatcgtaagttgagagtgagttacttatgaaacaatttgtagaaagtagaactgttcatataaacaactatgtaagtgagaaaaagggaacatcactaagcattattaacatttgtaagcataaagtaaacttaccaaagagtaaagttcaccaacacggttctgaagaggggtaccacttataaggctcatttgtataaagactctaaggaaaaagtagctttggcagtattacttcatcaagatttgatccggactctagataggaggaagaaagaaaatctcagggattagatctggacttggggtgtccgtggtgggcaactagtaaggtgcttgaagttagagatgaagacagaaaaacctcatggattacagatctgaagattgcacaaacaaaaacaaaaagttgttggaaatattttaccagggtctagatttactaacaagtatgtt

SEQ ID NO: 171696 - DNA, 595 bp, Cannabis sativa
caatcttaaacataaaaataatatatatacctcaatcaaatatatttatatctcaaacttaaattaatattctacgttttttttaatagtgatataccttacagaaatataaatataccacaaaattaatattagtgatgcacttaattttttttattttctccatgatatactaaatcacgtaaaatagatataccaattaattaataggtttttttttattctttctcttaatattcataaaagacatatactatttttttatttatataaaaatatatactactcttatataccacaattcaaattagatatatcaaatttttttgacgtaatcacatttaaaaattaatatagcatcatagtgagaaataaaaataccaaaaaattagtttaatattaataaaaataccaaaaatttagtttaatattccataattttttttttctttcctttttcatttaccatagaaaataaaaagaatatgtcccaataaatataaccatacctcaaacttaaattactattccacattttttttcctctttcgttcttcatataccaaccaagaataatataccacattattaaagt

SEQ ID NO: 171697 - DNA, 532 bp, Cannabis sativa
  modified_base (321)..(327): a, c, t, g, unknown or other
ttttctcctttctcttcttcatggagcaaagacctacgatttggttagctttatttttttcagaagctctttgttccttgttcaccttccaccaccaccatgagcttaaccaccacccatttttcttcttcttcgtggagcatagaccctcattcttcatggagcatagacgcacacagacaactcttgcataaaaaaatacagaccacgctttgagcttgcaatttcccatcatttatcaataaaaaaaataaatttattttaagtacttatttattgtgttatttagttcatgtgatcatttatttatttatttgattnnnnnnntcatccaaattcttatcacattgatattcttgtttattatgttgtcaacatagtaaaaagtaatcaagattgtgtgattttcttatgatttatcagtacacagagtttaactaataggattatctacaatgtagtttacttgtaccttggataagtgctatgttggatgtatggagtatgaatcgaaagggaccgatactgaact

SEQ ID NO: 171698 - DNA, 659 bp, Cannabis sativa
tggtaaaataattccaacacttgtcagctgagaggatggaattttgggaggaggcccaacagagggaggttcaggcggaggcgaagcaccgggaggagctgaaggcggagggcgaggctacggccaaggctaagcgcgagttgcgggaagccagggaggctatggatgagatggccgcctagttgaaatccttggaggagctgccccaggcggacttgctgttgacggccaacttgaccgtggaagggaaggagctgagggacttcaaggaccaagccttgaagaaggctaaaagggatgagctcctaactcccgctgtctgtaagcattgcgtcaagcgttttgacgatggtgtttacatggcctggcagccgaatggccagagcatcaagcttgaattttatcccaaccctaaggaagccctcattcgcttccgggagaagaagaaaaggcttgacgctttgcttgaagaatgtaaaggccctcgtctcctccccgtatcgattaggccgaccatttcaactagttcaccactacaactatttttttcttttacattatatttacagtcccttttcctttttttcagacaatctaattattatcttctaaggggagacagtttctagggcccgtccccaggcccttaatatattttt

SEQ ID NO: 171699 - DNA, 581 bp, Cannabis sativa
aaatatatttattagctaaaccttccaagatctcttaataaataaagaaaccttgaattctctttttttctcaattgtgccatttcttggtggaaattcacaaacaatacacaatcttatttagaattctaattaattaattaaaactaattaattaagactacaaaataatattatcttagtgtagggaccatgatcctatgtaattaagctcctaataagtagatttgaaatttaccaagtaaatttcctaacttgtttcaagtttaaccaatttatatgatattttttttttagtattttgttagtatttgatttgatatcatgtataatgctatttaaaaaatttagagtttatttatgtggcataaacataaaaaacaacataatttctaccagtagaattataatatataattaatagggatgaccattcaattcaatccgcactattttgctcatagtgcattcgattcgcactaactgcggattttattttttttatccaatccaatctgcatgttgtggacattgtcccacatagaataaatagtagagaattaagccatatataagaacat

SEQ ID NO: 171700 - DNA, 2151 bp, Cannabis sativa
  modified_base (296)..(303): a, c, t, g, unknown or other
agcccgtgcgttaatggccatgcaagtctatcctggtatagtgaacgctctagaaattttttccccaaattccataagaagcggccccactcccacattcacatagatgagtctatcaagtgtactcatgtatagctcggtattccactcaacgtagagtataaatctcattaagagtttctattaactcatcctcttatcgcttcaggacttcatgcttctcatattacaatagcatggtcacatatcacctcataacttgttattacccgttgaacctaattcttgggatctcnnnnnnnnaggttgggttaccattatgagtgagtcatctttctaagggcaatagtcccatccctttcgaagttttatagactttctctctagctagtcctttcgtcaaaggatctgctaaattatcatcagtgcgtacatgatccactctaacagctcctgttgagagaaactctgtaacagtgttgtgcttacgacaaatttggcctttcttaccgttgtaataactgttctacacttttgcaatagtcgcggtactatttgcaatggatcaacacaactggtatcggtttttcccataaagggatctcagctagcaggcttcttacccaacatgcttcttcactagcagaggctagtgctatcatttcaaactccatggtggattgtgctaagatagttgctttctttgacttccaagaaacaacgtcaccagctatgctaaaaatatagccacttgttgctttggagtcatctaacaaactgttccagtctacatcattgtatccttcaaggacagctggaaacctttgataatgtaatccaaggttcatggttctcttaaggtatctcattaccctctcaatagcatgacaatgctctgtactaggcctactggtaaacctgcacaataatcccacaacatagacaatatcgggtctcgtacaatcagtggcatatcgaagactgccaatgatgcttgcatattcatattatttcacactgtcaccagtgttcttaaatagctttacacttggccgagcatatggtgtgcaagcaggtttacaatcagagtaattatatttcttgagaatcttctcaatgtaataagattgatcaaaagaaattctctttccagacatagttatcttaataccaaggattacatcagcttctccgagattcttcatatcaaagttagcacataataatgatttcaaagcattcacaacatggatatttgaaccaaatataagcagatcattcacatatagacatataatagtgcaaatgtcattctcagatttatagtaaatgcatttgtcactttcattcactttaaagccatgtgagagaactaaattgtcaaatttttcatgccattgattaggtgcatgcttaagaccttacagagatttatcaaacttgcaaacttatgttcctggcctgggatcacgaacccttcaggttgatccatgtatatttcttcttctaattcaccattaaggaatgatgtgttaacatccatttggtgcacaactaaattatgtgtagcagctggtgaaattaaaactctaatggatattattctactgacaggtgaaaatgtgtcaaagaaatctacattctctctttgtctcaaaccctttgctacaaacgagcttcgtatttgtctacacatccatcaagtttcaatttcttttttcagaatccacttacaccctatagttttgcaacaaggaggtaggtttgtataatgccaggttttgttcgtaataagtgagtccatttcatcatcaacgacctcttgccacaggtcagcatctagggaagacaaggcttcttggaggttggcaggatcctcctctaaggtgtaagcacaaaaatctgaaccaaagtctttttctactctagctctcttgcttcttctaggttctatttcactgtattctcaatgtgctcactattcctaattgtaggaacattgctagtagatgcacccccattatttcttaatttagtgggaaatctatgttcataaaaatcaacatcattagattccactataacatgtgcattcagatcatagaatctatatgctttgctattcaccgcatatccaataaatacacattc

SEQ ID NO: 171701 - DNA, 899 bp, Cannabis sativa
  modified_base (163)..(165): a, c, t, g, unknown or other
tatattatattataaataattgtttatattatataatatattttttctaacaaaatatttattattaacttacctcagttaatacacataaaaaaagtgtaaatataaaaaaatacaatttttaaactatcatagatatcacaaagtttacaatatttgatannnatatatacataacaaaattaacaaatattatattaaaaaaaagaatatatatttaattgatattgtaactaaatatttgtcatgaataatttttttttaaaaaaaaattaactaatgatccataatgcgatgactctgcaagtgtggaagcatatctgtcgccctcatctcgttaatcatagcttttggatatgactttttgtctattagctacaaaatataaaagagaaataaattaattatataatatataaataaacatacatttatatttgataattatcttacaaatattatgtacctctttcttaatatagtcacgttgattaggcgactgaactagatcttttatcatcctcataacataatagccacactctacattacttggttgatgaggacacaacaacaatctataatttaaataaatacattaataatttattaaaaccttaaattattattgaaatttaaatatacttactacggttccttgatagttaagttttttgggatctccatgctccttctcattaagtatgtgtcatacgcttccttgatcgttttcagaatgacaggacgatttgttatgggtgcattaacagggtccaaataatatacgtggtatgcttggggtaccaatagagtacacacccaatgcttcgtataagaaaaataaattatatatattgaacatatattatattatcatacgtataatatgtatatatata

SEQ ID NO: 171702 - DNA, 678 bp, Cannabis sativa
attgaacaactagtactatatatagttcatacatatatttattagaaactatatagttcttgatataatccttattttaatttatgagcattattatatattgagtatatttagtgcttattatcatttagaaatgaaactttagattagttagtaatattttatttaaaaattattatttacatgatgatacttgatacttaatagtactaataataatatgatactaaaaatagttttctttgaataaaaaataatacatcttcattaaaacaagttatttttgtttttattttttaaatcattaaatcaagttattcactataaaaaaactgcaacttttagtgataattttttagttacaatataattttttttgtgactaaatatgatttaatcacaacaaaacttgtgacaaaaaataaataaattgtgactaattataaattatattaatcttatattatgactaaaaggtccgtgactaaatttattagtcacaaaaattacaatttattgtaactaaatgtatttttaatcacaatatttgttgtgattaaaactaaattagtgatagcttataactaaatataatattttagttagaagtaatttttttgtgataactaaatactatattttgtcacttttgcaagtacatttttgtgctggcaaaag

SEQ ID NO: 171703 - DNA, 504 bp, Cannabis sativa
ttacaaaaatttatataatttgatgattaaaaaaaattgaaataaatttgttagttagcaaaatttatatattatgtaaaaaagtaatgtcatgccctcattcacatttggctgcccaatcaaatattataatttttatttttcctcaagcatgcaagaatttctaattacaatttattttcttaaaactagtttatcatgagtaaattttgctaattcatttctatttttgtaatttataaacattcttctggtacaatgataaaagtgatatgattgttttttcaattacaaattttaaaggtttattgtttaataattctcttaaagcatatttcaataaaaatatagggtaaatagcggtaaaactcttaaaactttcattttggttttatttaactccaaaacccaaatttagacgataaaacccctaatactcgcattctgttagcaatttaacatttccgtccattttaggtgttaagtgccatgttggactggaca

SEQ ID NO: 171704 - DNA, 885 bp, Cannabis sativa
cctataaatagtgatgcatattctctaggcaaagggttggaaacattttggtcgtgaaattttgtctaagaatccatattcagagacactattgtaagagttataagaaaaggaacatttgtccttgttcttaagtcagcacaaataacgaggattaagctattaccgaactgctcggggctgaacttctataaaattcctctatctttagattgctttactatatttcagtcgttataaactacttgttgcttataaaattagactcactgtcgttggctaaaagcgaggtcaacaatattgttattcaaaatctatttaacttttccatttgatgattgtaattttaatatatttagtaagaattattagttgagaattaaagcaaccctctaaattaggaaaagtatgagagaaatagctatatatatgtgctatattaaagaataagaaaaataattataaatatattcttatcccaatttttgcactctgatgtggcatcacacgatggtgacaagtggaattaactctatgtatctgctcgcaataaatatgccgaatagggggcaccacttcgctcggatgaagccctctcaagcgggtagcgagcaatccgcacagcatgccaatacttagcaaattcagctttcgcatcgtgagtcaccgaagaaatccctataactttgggatcagatcacagcgatatggcaagctcttcgaatcccttgattagtgtattatatatttaatatgcaatcattctacttatatcaatggtaatccaaagggaaattcttccttcccaagcttatagccctataaatagtgattcatactcaatgggcaaagggtcaaaaacttatctaagaattcatattcaga

SEQ ID NO: 171705 - DNA, 718 bp, Cannabis sativa
  modified_base (581)..(583): a, c, t, g, unknown or other
  modified_base (691)..(691): a, c, t, g, unknown or other
agggactacagaaagccctttttttcacttttctacaaccgtcgcggcaaggctatttgccgccacggcaccgaattcgcacaggtcaaggataacttcgtcttttctcatttttgggctgaaaaactctatttaatgaaagaaggtcgcgaattatagaaggagagacaaaatggaaccctaaaaatacaagaagaaggctcttgaagcgaacatgggcgattcgtgacaatcctccatctagtttcctctcttctctagattttttatatttttatttgtgtttagtttaattatggatttgattatgagccaaactctctatttagcaatttgatgggtattgactgagattattctatggatgaatgttatttgattattctttttttctctattattgtgatttattcatatttgtgcttattacatgtgtttgattgaccaccttatgcatgatctatgatctcaatacaaaatctaaaaagtgagtattgagaaagctctaaatcaatagacataggttttgatgtgaaacgagattattcacatagcttatgtgacttttagattattgcttnnncaaattgtatgttgttctatctcagagatgcggtagttgacatgcaatttatcaccttttatgatctgaaaagagtttaggttaatttataatctgtcatcacatagnaggaagaagaatggttaattagtgtta

SEQ ID NO: 171706 - DNA, 623 bp, Cannabis sativa
agaagtacttaaaaggctgcaagctcttttggaatatctagaaatagcaacaattctatacagagagtaagtatccattcctaacccttaaataactgatttcccaatattagcacaaagcttagaggagttggagaagagcttgaaacctctaagttaaagagtattcgagatatagtctcctttgcaaaacataagcagatcatctgtaaagcatagatgaacaagattcaaacttttacatcttggatgatacttaaagttctcttttcctgcaacttttttcaaaattcagcctaaatgatgactaataaaaattagatggatgaaatctaatttaataaaaaaaaccaattaatgcatttgatggttaaaactgatccaatttaatgcatctgttagatcggattagattgattgactcaattcgattgggttagatcgattgacaaaatacaacattcaataaataattagattgcatcagttgggtcaaaatacattggatatggtctaatgaagggatgggcaacatccaatccaatccaattgaaccgaaccaatccccaatccaatccaattacaaaaaattaaatatccagttacaattggattggattgga

SEQ ID NO: 171707 - DNA, 573 bp, Cannabis sativa
agtgaaacaagtgtgggacagagtaggtattggcacatatgctgtagcagctgcaccagagaattttctgggctggtttactgctatttttgctgctgttgatgcagaaaaaaaactgcttctcccggtcctttgttgggccatttggaacgcccgaaatgatgtcgtatggcaacaaaaaagtgttactgcagctgccattgtagtgcaagcaacatgttaccttcaacaatggaagaatgctcaaaattctcgaattgagacgtcttggtcaggccttagagcggacgacggtgctgagcattggactgtacccagtataaattctattaaggtaaacgttgacgctgctctctttgacggtggtaacagatacggctgtggcttagtggctcgagatcattttggtatgctaattgaggggaagatggcgctctattctggttcggttacactggaggtagctgaagcaataggcattcgtgaagcgttaagttggatcaagagacataattggcagcaagttacactcgaaacggattgcctaatggtggtccaagcgataagaagcga

SEQ ID NO: 171708 - DNA, 1133 bp, Cannabis sativa
  modified_base (694)..(715): a, c, t, g, unknown or other
gagagagagagaggaaaaaaaagaaaaaattttggaaaataaaaaaaatattttttattttatttacaattttttttatttttttaaataatcttttacgtggaccaataaaattgtaccatgtatacactgtgctcacgtagatgtatacgtagacagtccaacatgacacttaacacctaaaataggcgggaatgttaaagtgctaatagaacaggagtattgggagttttgccagcaaaacttgggttttagaggttaagtgcaaccaaagtgaaactattggaagttttgtcgcaattaacccattataaaattataatattcagtataatatttaagtttcattattattttaacttatttataattaatcaattagaattattacatagaaaatataaattgacactttatttataaaaatatatcgataaggtgtggacaacatttataccttttatgtaattttaattactaaaataccacttacattatcacttacacaatcagatgattgttacagggtggttgctgcgtagttgcgcgatggttacatcagacgaaggtttcaatcagacgatggttgtagggtggttggccgaaggttgcatcagacgaatgtttcaatctcaaacaaaagtttatgggtagttgttgggtggttgaccgaatgttgcatcagacgaaggtnnnnnnnnnnnnnnnnnnnnnntagcaaaatatttatgcaactattgtgaaacattaaaaatcagaacagtgttttcacgtacatatttttatctacatgtctctttatgatttaatatgaacaaattcaccattaaaaatttggaaaacaacgaaaatacaccaggataaacattttactatagtattgacgtgattttttttggattatactccagttcaactttttgagatctgccttttatagatctgaaaattgaagtcagaacattagttttatgcaaattaaattggattttcggttgaattttagtttcgtagtagtttttctacacttttttttttatgaatatgaaacagcccctgttttgattaattctggttgtcttctcaggtgaagtcgccgaaattaatggtggttctctttctggttgaatttt

SEQ ID NO: 171709 - DNA, 1104 bp, Cannabis sativa
ttcttaagttctaccagagccatcatgtatggtgcattcgaaacaggtttttccccaggtgccaaatcaattacaaagtctatctcttgctgtgacagaattcccaataactcctcaagaaaaatatcaagaaattcttttacaactctgacatcctcaggcccaaatttttcaggtctgctggagtcaattacaattgctaaaaatcctacacacccactgtgtaattagtctttagcctttgaaactaaaataatcaggatttgacatccctgaacaaatccaacataaacaaatggatcttcgtcctccggctgaaaagttaccattttctacttgcagccaatacttagacaaaaaatccattccaagtataatatcaaactctgctacttccaactctactagttcaacactcaattccctattttcaaccctaaccggcatagacctaatccaccttttagagataaccaattctctgctaggcagtagggttccaaaccgtcttacaatgaaatcataaggcctacccaattgattaattattattgatgccacatataaatatatagctccaaagtcaaacaatattgtaaaataggagttgttgacaagaagttgacctgtcaccacagaaggactagtcgcaacatcagcttgagtgatagcaaacactcgagcaggtatgggttttgcctcttgcttttattcttctttctttgtatgagggaagtctttcttaaaattcccaaccatgccacactggaaacatgttttccaattgcactctccgagatggtgtttcttacaacgtgggcactcagggtaagaataaccctggcatccacctttgtctgggttccctcgaaaccttttgtcctatcccaaaccactagatgttaggaaagtctttctcttttgatcagaaatggaatcaccaccatccctaccatatcaagaagtaggaagagtggtggtcccactaacacttggactctctcggggctcctaaagaaattttactgctctgttagctcgaagagccttttaaaccatctcagcataagttgttgtgtcacttgtagtaattaccagatcatg

SEQ ID NO: 171710 - DNA, 844 bp, Cannabis sativa
ttattgttgatttctcttctagagtataattgatattaattgaattatttgtgatttttatttttttaaatataaattattttttgaatttttatattatttgtggatttgatatcacaagtatattaatattttaatttttgttaaatatatatgcaaataggatgtgattcatgatgaggatatattattattattatgcatgcatgtttatatgcatacatcaatttgtgtggaataaagaagctacatagcaattttctaaaaattataaaaagaacactataatatatattcaataattaattttggaacaagattagaaagaaagcaagaaatcattattagaaacaaatatataattccataaaaagtagtatccatacaacaagtcaccaataagttacttatttatttatattttttaaaagaataaattatttattgtatttaatgtattgattcataatatttaccattagatcaagatctaaaggttataaacaaattactataaatagtaattaaattaattttgaaatcattcatagattagaaagaaagcaagaaattattattagaataaaatatataatttaataaaaagtattatgcatacaataaattaccgattagtaatctatttatttgtattttttaaaagaataaattatttattgtatttaatattttcattcttaatattaaccattaatcaagatctaaaagttataaacaaattactacaagtggtaattaatttaaaaaaaaaacgtatacatacatatatgttaatggaagaaaaactttttgtaaccatatacatgcaaaaaaaaaaaaaaaa

SEQ ID NO: 171711 - DNA, 936 bp, Cannabis sativa
agagtttgggatatgttgaaagatatgagatcataaggtgataaggtggtaagagttttgaaggaggggctgctcaccattagctctctcttgctcttcaattctatgttgttgttttcttggatagatttgatgataaagaaagtttaagatgacattagagaaccaaaatgcaatttatgaggcatgtttattattatataaatgctttaaataaaatatttgattttggaaatctatacatacatcatttatggggtggctatgcccccctagctttttagaaaaagaaaagaagtatacataagatataaatttaattaggataattaaattttacttattagaaaaatgagataattctcttattattaagtctaataataaattgtaaagttaaaattgaaaatatctcaaacccattagtccatttaaattagttatctactttatactaaaaagtgacaaaaaaataaataatataattttaattttgaagagcacttttgtataatatatatttatattagtgtctaacactatataccgatgtggggggttacaagtgattagtaatttctcatattatttatcaaatcaaaatatttgagattttatattattttacaccaatagcagcatgctaccttttgtagtacttgacactataaggtgtccctcagcattatttattattttatatacgttgtataaaactaattatcttcttaaattaaaattttgaaattctacatactaaaccaaaattaagtggaaatgcactttatttggtcccttcttgtttcgtcatctagttccagcactgtttttagcatttctcttttgtatagagtagtattataagtaggggtgtgcagaaagtcatccaatccaattctaaccgaccgatccaatcttaaccgatccaatagaatc

SEQ ID NO: 171712 - DNA, 539 bp, Cannabis sativa
gtgagatttgaatatgatttgattattttggatgctagatttagaacgatagtatctttgttgatgcagacatctagacacacccgctagctggattggcgagaatatattgagttaagaataaataagagagacacaagttcactccctgtatcacgacagtaatgtagatacatgtacttcgagttttatttctcacgagaaggattacagaaaaataggtaagtctggatactctaatttctagagagagaaactagagatgcatgctctgaccttatgagtacttttctgaacatgagaaatgagctactggagctctctttttatagggaatgaggtcttattaaaataataataagctattccaaaaaaatatagaaaaatatatttaggctatttttgaccgtagatgatgatccagcggtgaaattgactgctaaggtcggtcgccaatttttagagcttgagttgtgtttgtgggacccacttcgggtaagtgttggaaattattttactatgatctagatttactaaca

SEQ ID NO: 171713 - DNA, 647 bp, Cannabis sativa
tttggaagtgcctttgcagtctcttctctattgttttgttgttttccatccttgcaaactgctccaaccagctgagtttttatcagcgacagcaccatctgctcgagtagaacaatgttcttttcgttacatacgatattatccacgccatcaaaatttttctcgtcaaatgttggcatttttagttctcttaatcacttctcgtgtctggaacaagttcctgattctcctctttcaaaagatctctcgatgaaaaattgatttccatgaaattcccatgtaggtggcactttggcagctccatggttgtgttctaactgaatgttattggttcttgccataatagatgctcccaggctcctcttcctctccatatcttttgagttggatgtgtttaccacttcttctcccggttcttaaatgattcttgactattctagggcaatttccatcgctcaatccacttttcttggacgttgtacccttaattcagccattagtgatggtactaacccagtaaaaaatgtgcctaaatgaacttctggtgttatgttgtcaaatagagctaagagccggatagaatttttatttttttcagtcatgaagctctcttgcttgacttgcagaaattggtcataaagggaccc

SEQ ID NO: 171714 - DNA, 812 bp, Cannabis sativa
tagtgtctaatacacttaatttatgatatatcatatggctattggtttaatttaatattgaatttcacttattttattttagcattactattagacaccttaaagtgtcctataccacacccatataatgcattatgaatagttaatagttttttatattatttattaaataaaaatgtatagaactaagaccaaagaaaaataattatagaaaacactaactatttataaggtgtcagttaaaactgatcttgaaaactaatggtcccaaaattttacaaaatacatgttttttatttttaacaatctacacaaagattataggcctcaagtttgggtgtaccctaaacacgaatttaacctatttaatttaaaatcagacttagcgttactttataatagtactagacactttaataccttataataatactcaaataattcttatgagatacaaacacacataaacatatatataaatataaaaaggtggcttgaataattttatatatatgatcgatctctagatctatctctatcaaaagttaattgatattgcataattatatatctgtttttgcaataactagcaggagtaataattgtactactttactacttatttatgtaactgtactctctggtaaccccactcaacccccttcaaatttataagggaaatttcaatttttgaccctaattaggggtgcacatcaaaccgctcaaaccgctcaaaccgcccgcaccgcaccacaccgcaaaaaaaatgcggtttgaaattcttcgcggtgcggttgcggtttgaatttctc

SEQ ID NO: 171715 - DNA, 554 bp, Cannabis sativa
tttatgtgtatttttataggaataatgaagattgctattggtgttgcagaacttctcactattgtgccaaatatgatagacaatgttccactattagtcttcatgttctcattagtgtttgtatggtaattaagaatgtaattttgaaccaccaacattttatggaattttaattattgtataacatttgtatactatttgataatagaaatgttgatattaattttgttattattttttttatatgtttaattatagtatacaattaaattaaaaaaatagggtcattaaaatacaaatatcaatttatttttttaaacttatggatataggacaaaaatatatgtatactttaagtttcagttctaaaccgacattaaaatccaaaaaaacacttttaagtgtccgttataaaacgacaccaaaactcaatagtgtcaattttaaaccgacactaatagaaaaaatatatgtatatactttaagtgtcggttataaaataacaccaaaactcaatggtgtcgttttagaaccgataccaatagttgactttt

SEQ ID NO: 171716 - DNA, 606 bp, Cannabis sativa
  modified_base (577)..(580): a, c, t, g, unknown or other
tgggggtaatggtggttatggcggagaggatttggaggagtgacaatggaggaagaagatgggacaaggatgactgctaagaggctcaactgaataagtgctaattaaggtaggaattgaaaatatagagggaaaattttggaatttaccgcctaaatcaaaaggatcaaatattgtgtaccaagtttatttttagtaatgaataattatattttttttaaaaaaaaaaaataattatattatttattatctttatatatgatttaatattttaataaaaatataaacatattataattttattatattaaaaataatatattaaactaggccagaattattgttgtagtaattaaaattaaatattaaaaataaattcaacttaaaaatcataaatcaaattaatttattttgcaacaaaattttagtagtaaaattactttgttatgatattttgttagtaaaaataatttttttaactatatatttactactaattcgataactatatatattttttaaaataaaataatttatgttaatcacatttttttaaagattaaattagtagttaatnnnnattcaatatagtaataattaatctta

SEQ ID NO: 171717 - DNA, 1110 bp, Cannabis sativa
  modified_base (323)..(326): a, c, t, g, unknown or other
  modified_base (425)..(434): a, c, t, g, unknown or other
  modified_base (486)..(509): a, c, t, g, unknown or other
tcccttaagtggccagccactatgtgtaaattttgcccaatattttttttaatctatataattcaaacctaagccctagttgaaactctataaaaggaacatgatgctctcatctcattcaacaatttcaacctaccaaatctagtttctaactctatcaaacaactagtagatgagagacaccttctatagtgatttgaaccctccttcattgttcttcaaccaattaacccttagtgatagagtgccatgcccacacatagcaagtcaaatactcaatcatagtgcagattacggaggtaaccaacccgaaggagagaaannnntctaggctcagatcttgataataatctgcgacagaaaggaacaagggttgtagatctgagcggaaagagtcattattattccactgcatcaatgtaagnnnnnnnnnnctcttatgtgtttaattttatcgtattataaattcatatttaggatgttaannnnnnnnnnnnnnnnnnnnnnnnagatcctggtaaaataatcccaacaatgttatacaatcgtggaatctaggctttcctaacagatcaaatattagttttcttatagtgttaattctaagagtgctaacaattggatctaaatctataataagttatagattaactgttcacattgaattaatagtacataaggaatgaagagataattagaagggtaaaacagtattttgaccaacactaattatgaactaataattggaggtcgaagcacttatattgattatattaatggactacaagtaagaattttgtaaatataattctatattgttaaagagtgtaattctatatttacaccggagtaataatagaattaataaactaaattattctattgatgagatcgataataatcaagtatttattggagcttcaaaatataagttcatggtccccgagtcacctctatacaggggaagatcttatttgatgaataaattttgagtgagaattaatttaaatgggaaaattcttaagggtaaaatagtaatttgtgaaattattattttgattaattatggaaattatgaattgtataattaatagtatttaactatttagt

SEQ ID NO: 171718 - DNA, 696 bp, Cannabis sativa
ttttgttttctctttgtctaattctagaataagtgatcaaactgtttgacactattgaatgggccgctctagttgtataaaaaatcattctatgaataaaactttacaattttacagtgattcctctcctaattttatatataactcactcacaaccttcagtgtagattagtggagatcacctttatccaaatgcttataactcctatctctaagcactaagggaactctcatggaaatagctttggaaattatcaagtcttagggttttctagcaatatacctttgatagaaaacttctcatccaaatgagcacattagactcatttatatagtatttaggtgatcacacttagaattcaaacacaccatctcatttctctcatataaatgagtattaatataatttataacaactatatttcaaaactttgaatcctatcatcaattttgtgtaacatctcttttattacacaaatttgtaatcaaccaaaataagttacaaaagccattaatcttgtaactcatctctatgttacaaagtgtaggttactattttaggttcaatcatatgttacacaatttataactaaacacttaatatatattattcacataataatatatattaccatattttaatctacatattatattattaaataatataacattttacccctatcacttcacaat

SEQ ID NO: 171719 - DNA, 1072 bp, Cannabis sativa
tttgaatgtatagagttactttttgtatgtggattgataaattatgtgattcaaaatttctcatgcagtaaatttggatcagtacatgagctcacttgctaaaattttccaatgtacgtattactaagtctatcaaagtatcttcaaaaaaaaaaagtctatcaaagtaaattgagaaactttcagttaaagaccaagtaataaattatcatatatgtagtttaatttttttaatgtatatttatatatatgtgtgtaattttttaatagatcatttgttgcaagttatcttctccttttaatactcaattttttttttttttaaattgtggtttaatctaattttttatattattctaataataataataataattaatacgtgtttattaaaacaaattgtagttattataaagtgcaatattctatttttctttaaaaactatatgtaattgctccaattaatcaattaagcctaaattttaatgttaatgttaatatttaaattgtggaattattcatagaagaaagaaatttaaaaggcatgcactaattaattatgcttataactgctaataataaaaaacatattaatgtattaatattgtagataaaaaaaagtttaaaagacatgtacacatatatagcatgtaggtgagagaactttagagcattgataccacaagcttcttttccaacttcaaattttatccaatttttagtgatttatgttatccatatatgtatatatcatcttattaacatttataatataaaaataacattaatttaaaaggtgaggagtcactcaaaaggttgtgtatttgtatagtcaccaaatagtttaaacaattttcttatttatttagttgtttgttgcctcttgcttattaaattacatttgccactaatcttcttaaatagtagcatcaatacaattttgcgaagaatatatataaaaaaatttccatatactcttttaagttttatattaattcttaattctattataatatttttcattaacatttcattatttgtagcttttcaaaagtaataaatctcatccgta

SEQ ID NO: 171720 - DNA, 571 bp, Cannabis sativa
  modified_base (262)..(283): a, c, t, g, unknown or other
taattagcaatgagatcaagttggctgttaaacttagaatcctaagttgtagcagcaggtgaaaaagggatttagacaattatataattaatgtaataaaaagttggtagtgtggagtggctgtgtgagctcgggttgtgtttgtatttgttttcttgcttgttttgaataaagatcttttttcttgtttgttcaaaaaaaaaaaaaatacagtcattttatgttgtacatttattagtttgttgttgttttgatgttattnnnnnnnnnnnnnnnnnnnnnntttatgtagttttcttattgtttctataaaaaaaactgtaaaaatatatataaaaaattctttaaatgtaaaaatgtaatttttttacaaaaaaataatacgttatgtaattatgctaataataaaaccattcatcaaactgagcgggctaagctttttcaaatgagaatttttcataaataacactataggtttatgagtttttttttttcatttatatgggtctttttatgctatatttttgtaagaaaaaaaagtggaaatcctatatttgtaaaacaacaataa

SEQ ID NO: 171721 - DNA, 745 bp, Cannabis sativa
gtccctcactatttcacttgagggggcatgataaacagtatactgagttagttgaaacagttagttgttagttagttgtgccacttgtattagttgtcatctttttttgttatttcttttcttgatcaaagccttgtaactaactctgtaatcatctctctacaaaatagtaaagctccattcaagacttgctaacttttgcaaagtcttgtgattcaatctctaattgtgtccttgtagatttgcatagataaattctctggtttggcaaggactaattaatactaacttttataatatatttcttaaaaaaagactaaatatattgaaagtatttctaatgaattgtcaacaaagtattggatactataaatttatactaatcaagagaagataaagactcaaaatacaaaaatttcaatgtaaactctattgaataagtaaaacaagaagaagttgttaaatcttcatcttagattataaataacatataactaattttataaaaattagaataagaacattatccatgtaatatttttaaatgattaaacatctcatcttataaaatatataataaaatttagaataatatttttctatttattaaattaaaatattttaaataaaataattaagcaacccaaaaaatatatatgtataaggtgccttgcatgtagttgtcgcctagtatatatatataaaagaaaagaatgagacagtgacgtgacagtctaaattagct

SEQ ID NO: 171722 - DNA, 526 bp, Cannabis sativa
tttatttggcccctccttatttcgccgtctggttccgccactgagtcacctcatggcagctctaacttttctttgcccttacctgcaccacatagcatccgtgagtcacaaggactcagcaagaaaagtaataataatgattatataatttattattcaaatattatcatttatacgcaatcagaatcaaaccattatgcattgttcataagatgaaatctaaatcactagtggcatctacaatgaataagtatcagtatacaaatatctggaaatacaaaattattataccaataataggaatcatattcatttaaaaatataatttgtatatatggtacctcataaagtaattatcttcattacattacattgctttatcaagaaagtcgatgctttagtctgaaaatcctatattatattgcctaatcaggcaagcctgtgccctagcttggtactcatatatcgcataaatgcatcacctaatcaggtgagccagtgtcaaaaacctgcacccatatatcat

SEQ ID NO: 171723 - DNA, 761 bp, Cannabis sativa
ttagagtatctaacatcttagaggcaaacaatggttcatatccatcatcaaagtggcaaaatcttattatggggagagatttattattaaaaggctacgacagagtatcggcaatggtatgaatactaggacttttagagacccttggttgcctagaccaccttcgtttcttccaagttcgcatcctgcgtatgaggtggcaagagtgtcaggttttattgagtcactagggaaatggaatactgcagtagtagatcaatattttaatgtacctaatgcataatgtattttttccatacctttaagtccgtttaatcatgaggattcgtgattctggcacgatacaaattatggtagttattcagttgggagtggttataacctaggaatgactacagataattctcaaccttcatagtgatgtgttttcattagggtggaaacaattctggggaatgaaaattcctagaatattgttacattttgcgtggaggggttatcacaaaattctacctactcgtaatggtttgtttagacggaatatcgcctctaatacttcttgtcaactatgtggttttggaggagagtcgaatgctcatgctattttttggtgtcccgtttcactaggcatttggaatcttctggaattcttttttctacttgaagtaaaagaagagattaatttcaagaatgttttactttatgcttctcaagtggtggaaagagatgcttttgccaaattaattatgtgttcctgcgca

SEQ ID NO: 171724 - DNA, 1148 bp, Cannabis sativa
ggcatataataggtttcatatattttaaagtgtttttaaaatatatgagataaagttataaagttttgtcttatttacatgtataccacttcgtggcccaacgagtatatgaaggaattgtaaatttcagcatttgttttagattcatatatgtatgcaatatttgaattgatatctcatattgtatatttggggtagcacattattagatatatgctcactctaattattttctatttgaaattgatggtttactatatatatgaaataaagtcaagcctatttgaattaaattttgtttaaatttggcatactaaaattttagtgttagtctctcattctaaatgggttgatttgaaacatgatatcgccaaagcaacctctcttgtgtagattgctcatgaggaatgttagatgtttgtgtgtgtgtttctcatataagtgttgatcggcccaaaaaaaggttatacttattttaagtgcacaaatacctgtagtgataaatatgtgacaattatatggtttccatgtgaacaatatgtccagtccaaagattgacaaattgtttgataggatttattgtcaatatttgattactacaacaggagtaccgcttacagttaatattattgtccaaagacttgatattaatatgtgtttggtatcttgagatgggatttgccattatttgaacttattgtgttatgtggattcttttgtgaaccttatttattttgttctcttttttaagttcatgttttcatttatatctaccaacatacagataattctcatgctaaatgggcaaacttttaactaaaggaaagaggcaagcacacttctttagctacatcttttaaatgaaagataaagataaaactcaggatgttgcatatgaaacactactaaagaatatacaaaatatattagatatgaaattatctatgacttttgcaagaggaagtaaaaataaggctaaagtgttctaagtatgccattaggcatatctaaggaaaatgagtttctgatttgttttgtaaatgatttaaggctataaggatattcaaactatggttaaagactagttattttggatttggaaaagatttatacagtatcatcacctagatgattttttggttttgaat

SEQ ID NO: 171725 - DNA, 1049 bp, Cannabis sativa
agataggctaatttggcattacacaactactggaatttacacggttaagtcgggtttccatctggcttcagacttgaatgataaagagtttgattctgcttctaactcacatcaagaatggtggaaatttttttggaatctcaaattaccctcaaagattaaatctttgcttggagagtgatacataatgctataccgattgcaactgctctgtttcaaaagaatgttctgaattctgcagcttgttcattgtgtacacaagcttgggagtcgattgggcatgccttgttctgctgtaggcatgctaaggatatttggaatcaatttcatttccctattgattttgcaaaggcacgacatttggcaaatggtgattatctcttccatttagcaactctgcttagccaggaagagtttgaactgttgctctgcataatgtgggtgatctggacagatcgcaataagataatacatggagatatgaataaggatgctactgctatggctctatatgcaataacttatatgaacaattatattaaagctaatagcactaaacctcctactgctactctatcttcaccttcagctgccaatccttcacatactgctatagatgcaaatgttgctgcaatgaaggctcgccctacagcaggagttccatggacgccgcccttactcaacaagctgaagcttaatgttgatgcagcgatcaatacagccgacaaaatccttggcattggagccattgttagaaatcatgatggccaggttgttgctgccttatcaaagccagttcaaggatgctttagatcggacgaaatggaagccaaagctctatttcatgcgctaaattggatcacacaactctctctgaaaattgattatgttgaaaccgatgctcttcgtgtttcttcagcaatcaataatgcatcctttgatttatcttctttttctgatataattttagatgttcgttgtcttctttcctttttcccaggcattgttgtttctcatgttaggagaaatgctaaccaagctgctcatgg

SEQ ID NO: 171726 - DNA, 877 bp, Cannabis sativa
tgcctctatagggggtttttgtagaagtggcgagtgagggacaaagccttcagagttgactgatgctcacaaactgtagtctcagaacgcagcagtggttgccacgtggtgaattcggacaaagtgaatttgaacgtgtagggcttcttttttaagcacaaaacaactaaacaacacaaaaacaactagaaaataacttaacaataacatataaatcaattaaagtttatcatattctgcaaacaaaaataaatttataagacaaaaacctcaaaaaatacaatactgaaataacttactagcaatgaataaacaacacgataacaagaaagcaaagagtggggagagagaacaaaaatgttcatgtaagtccaaatcataaaaatgtatttaatgaaaatttaaaaagtaatcatgacaataataaattgtagaaaagaaaaaaatatcgagcacaagtaaaaatgtaaaatactttacattttagttatgagttttaaatttatatacccataaaaattaatatagcatataattttacataaaaatattatataaaatataatttaatttaatactatataatacaatatagtctaatatcactaccaaacaaactcaaacagaatataatattacacattattctagatttttttttaataaaaatcataagatctattgattaataaattcgttcaaaacaatagaacgcactttaaaggaacagtactctaactgaagcacacgacctgtagagaaataagagtcccttgcgaagcaatgagccaacttatttgcagattgttttacaaaacacaaattgtgaaggcataaaataccgctctgaatcgcttggacacactgttagactttt

SEQ ID NO: 171727 - DNA, 557 bp, Cannabis sativa
tttatatataaataattatcatttcccccaaaaagataaaactaaacaaaataaaaaacctctctttcttcttcttcttcttcaacaaaatccttctgtaaatggcaagatctgtctcccaaaccctaaccctaaccttagcacgtcactttacccccaaatccccacacccatcgtcctcctccatcctcctatctcacagaacccaatccagtttgccttctcagcccaacaacgatctcaccgacataaacgacgcctcatcttcttcctccgatccccttctcaccaagctcgaagacgccatccaccgtattatcgtgcgccgatccgctcccgattggctcccctttaggcctggatcatcgtactgggtccctcccccgcgatcccgtaagtgtgggctgacccagctggttgagaagcttgctaatcctttgactgaggaggaatctatgtccaccaccactgttaggggttggccttcttctgattatttcattcaaggtatgcactcttatcttaattatgacgaaaatgataatcgtaaaaaatga

SEQ ID NO: 171728 - DNA, 763 bp, Cannabis sativa
ctgaccctcaagtggctcggcacggcactttgccaagcgccgaataggatccagccgtctaggaggagggggatcatgaaggagaagctgaggctcaggagattgaagagcaggaagacgtacgtcctagcagtccctctgaggcagaggaagaggaggaggctgaacccccaaactacgagggatacaatgaggctggggagctagtcgatgctgatggagacgtcctggttgagggcatggactacgttagtgcggaactcactgctgcggttcctcacagaaggcaaggtgccttgcgtgccaggtgagtgagtcctgcgtctagggttactgaggcgcacctcgggactctcgaccagggtggctacctgggcgaattggactgctacattcccgcccacaataatcgtgccacaaacccttaaagggggatgtgcgcttggtcgggtgcccatgctcagcaaggagcatttttgcgttggcactagtactttaagaatgtggcagactttttcggcctctgcccggcccagttcactccaaaaggcattaagtatctgtctgccctcttcgtcctttatgcctcccagaagtgggatataccttctccccacgaagttagctggttctttgatttgaagtccacccctaagcaagataagtcatggtacttctatttctctcaaccagacttcaagtggttgacgggcaccggggataaggccattagcaaaattgggcattttgttgatgagtactt

SEQ ID NO: 171729 - DNA, 641 bp, Cannabis sativa
agattgattaggttttccattttaatcctgcgcacaaataaggaaacaatagctatcagatctcgacagaagaacatatcgtgctaaatgggtaaacttcctaaaacagacattaagaaattaactcacagttaatttcccacatttaaagtacacggtgttgaccaaatccaaccaaatatgatctgcctagtcagcaaatcctctccttcgtgggctagacttaacgaagtagcccaagtatgttattcactgtaagctccccaatagatggaaagggaaactaaatgtaattcttaaactactaaaaataactatcgaatcctatgtattaagggttgaattctcttgcaaaacttgctcaagtaaacttgagaacatatattcattgtattcctaaaggcttttcaagctaaagaactactgaataatactgactcatggactaaggttaattaacaccccaaccacgtaaacaactgtttgtcactttttattttttctctttttgtttcttcagttcttatcatttataacaagttttcaaaaatctcgataaatattttggtgctttcattgagagctaaaggaagcagtgagaccatttatagattacgtccaagtaataatggtcctcaccc

SEQ ID NO: 171730 - DNA, 944 bp, Cannabis sativa
gaccattttacccctagttttggtaaatgcctaagttataacgtggagggcattttagtcttttgtttaaaggagagtaggtggctgcctaattagatgacacctagcaattctatggcagcaagggattaattagaatcccttttcaaatgaaggaaatcaaaagaaataaagaaaaaatcaaaaaatgaggaaaaaccatctttctctctctctctctcccttgttcaaccatagcaaaaaccagaggagatcacctctattcaggtggttttctggattttcagctacggattcaagtgagactcaagttgaggtaaaccctagaccattggttctttgtttttaagctttgatttggttttagtttgtgattttgagacataggggatgttagggttagaaatgtttagggttcgaatttttaggttcatttgagttgaatttactttctagcagctggttttgaggtttggtttaggttttgtgcaagtttgtgctttgagtttaaagctttgatctctaatggcatgttgtgtttcattgggattttctgtgtaatactggctggaaaatgttgtctatgcattggttgggtgctttggaaggtttggtcgcatttggtggaggattgagcaagaaatggaaagcttagggtgaaatggtgaaaaccgactagcttgttttactagccggttatggcagggtccccaaatgcttcattttctcgactcgtagttgggtgtttccctattttcagagttagagtaacccctagagagtataacagaacctagggtcgtggatttgggtttcccagatcagggttttaatcttgtgattcacccgattttattctgtgattagggcatccatttcgcaccagactttctgttcaggtcggctagcacacttgaatctggaaagaaggtaagaactgtgta

SEQ ID NO: 171731 - DNA, 999 bp, Cannabis sativa
  modified_base (72)..(72): a, c, t, g, unknown or other
  modified_base (378)..(379): a, c, t, g, unknown or other
tattatttactaactagtaaacatctcgcgattcacggtagatatataaaatattttaaattatctataaanaataaattgtgtattttaattaataataattgtttaataaaattatattaaaattttaactttactattaaaaattgtgtgatataaatacttaaaatattaaatttgttgctaataaataccaaaattcgaaaaatagtaacataaattcttatttatggtttaatttttattctgatatgtgtgttaagttctgagttcgaattttattgtgtatgtacgtttttaatgtttgagttttagtgttttactagggttccaatatttgagtttgtgtttatgagatctgttttttttatttatttnnttatttatttatttttatagatttggagaacttgaaatttgatgttgttaatttctttatgattattgggattgaatatttcatttttcatacgggaatgaaagtttgccttctagtttcattgattgaaaaatattagtagaaagtttatggaatgattattttcaatatatgaaaatagaattgaaaaatagcatttgaattgagaatcaaagtttattgtttatcttcttacaaaaaaagtttattgttaatctccttacaaaaaaaaagtttattgttaatcagtaaagataatatggctggaagaaaatggataaattaatttcaattcatttaatatgtacataatgtattctttttaataatatgaatttattttaatttttttttgtttttaaaattatttttctaaaagaattagtaattttgccaatactatatttacaaatatactttattgttcaactaacagaacaacaaattgagtgttaagtttagagatttaaggatatcaataggaaatataatgatgacatcaactttatatgattggagtataaaaataatgtattataaaaaaattcgattcatatataatctcacacctatttcttctt

SEQ ID NO: 171732 - DNA, 546 bp, Cannabis sativa
aaaaaaaaaaaaaactatttttcgcgtgaaaaaaaaccctaccctataatttaagtaaaaaagtcaaatataacaacattaaaaaattattacgcttcacaccacgttataagcttgtacaacgcactgtttcaaccaatcaattgcaagaaaaaatgcccttatgagtatgagaaaatactatgccctctcctaagaaaaatcatataaatatatatatatatatatatatatatttattctatataaaatgtgactatgtaatagaattcttaatttaacgatgttttttttttttaatttccagttaacttcaataaaatattctattatttaacagaatattctttattaattttataataatattattatatatatttaaaagtaaaattatatagatattttatataaaaaaatttaaatttaactttaaaatacttgaaatattataaatatttttaatcatatttttaaatttattagtttaagtttaaattaaaataaaaaaaaaattatgtgaatattttatataaagaaatttaa

SEQ ID NO: 171733 - DNA, 1042 bp, Cannabis sativa
ttgggatttgtttttcaaatggaatgggagggatattatggaaaaaaatcaaatgtagtcatatatgggtaattttaataggtatagatttagggaaataattttagagatttttatggatagtttttcaaatttcccgagaagaattactcaatatgaaaaattaaaatgaaaatgataaggacaaaaagttgaacatattttatagagaacatttactcataatgtgataaaagtcacgtgggtaaatgctacgtagatactggagtaattgaaacatgacagacagccacgtgttgcacatgaatattgcacttgctatgtgaacgtgggtgatttgaatattgggttgggcttctctatacatgagaaattagattatattgaaaaatacctcttttatttatcaattaattaaatttatctttaatttatatttaattgaagcacattactttttatatgtattatacctaaaataccctaacataagtatattgaagtgacaggggcaaaattgaaaaagtattttaaaaaagagataaaaatggtagaatttaaaaaatagggtaaaaataaaagaggacaatataaaaagggtatagagtctaattttctcttgagaagctgtgccgtcattgtttaaagaaacttacaaaaatattgaaatctagattaacttttacaaaaatattattacacgaattttttttaaaaaaaaaatattgtgtttttataaaacaacaatgaaacacaaaatagaacaactaaaaaacaaccgtagaataacagtaaaaacttaacacaatacacagtagttttgaaaaaaattctacccgacaaaaaaaaagtaaaaaagctagaaatttcagtatatagtgtaaataatcgttttttagtgtaattgacaatccattttaagcccaaagtattacccgtattagaggaaattacattgtatacccactttacttattttaatttttacctctattttcatagggaaatttgattttctatacttaaaaattttcaaaatttc

SEQ ID NO: 171734 - DNA, 505 bp, Cannabis sativa
ttttttttttttttgttgagaatatagaatagttaatattttttttacactacatgatcttgcatcttaaaatatatgcttaaattttttactaaaatataagagttacataattatatatattctcttaagttttgtttttttttaccgtaaaattattattttacccttaaattgtaaaaaatacaaaattttactccattttattagaaagagttaattgtaaaaactataattttctattaattctgaaaaaatttaaaaagattgataaaagtattaaattaataaaagataccgaaatagataacagtgcatcaatatacccattttaagagagtgtattgtagaatttctaaaaatatattaaatttacttaaaaaactcaaatttttcaaatatatatatatttttaaatttattttatttaaaaacaatcttaaaaaatcaaaccaaaattattgaaaatcaaataaataaattaaacaaactaaaattttgtgaa

SEQ ID NO: 171735 - DNA, 887 bp, Cannabis sativa
gtagagacattacatttcaggcagcaaggcatgttttcctgcaagtttctccagtgaagggtattaggcgctttggaaagatgggcaagttaagccctaggtttattgggctgtttgagatactcaagaaggtcgggcaggtaacgtatcggctagccttaccaatagtgttatcggctgttcataatgtatttcatatttcaatattgaggaaatgtgttttaggcccgactcatgtcttgagttatgaagcccgagaactacagtcagacttatcctatgaggaacaactagtttagatcctcgctaggaaagaaaatgttcttcgaaacaagaccatagctttggtcaaggtgctttggaaggagagcaaggtggaggaaagccacctgggaattagagtctggcatgtgaacttaatatccagagctattcaagttagattttggggagaaaatccttattacggggggatattgtaatgacctatgttagaatatggattagtaaagggaattagcattattgtcatttttataattatgcatgattttattatgttgtgggttccattattagaaacgagcattagagttataatttctcaattatggagattctattaaactctaggcgtactatttatattagacatgaattatgcaacttttataatttttgcttggcgacgatggaaactgtgatggatggccgttagagtcacatgggtaagtttagaacatatttcttagtgggactaatattggaaatattatgaatacttactcaagatacttatgaaaccctaatcccctaattgggattactaataaaattagcagggaaattaaactttaattataaacggaattaaaataaaacttgta

SEQ ID NO: 171736 - DNA, 577 bp, Cannabis sativa
acatgctttgagataacaggtgtatgagatgtgctccctctcatttctgtgggatgacctcaactcaagcccgcaacattggagaccgcttcacataaaaattcagtgatcgtagcaagggtcatcgctcctcctccttcaaggtgttatcccttagaagaatttctagaagttgggtcagttactgggtcataggatgggtcatcacccagggcatccacatttgggaaagcaaagagagtagactcaggtagggtaacagcggtcaaacccgacctcaccaagtaagtcagtgtagggagattcatgcacgtcctccttccatatggaagatcgtagaatctctatatggcagttagaaagttgttactgagggtaggattccccttggtcacggaagagaaacatatgtgagactatgtcatagttattaaaacaaactaggaatatctagattagaataaacataccgaaagcattaaacttaaagtgaatgttgccaagcatcttttaaataatacaactaagcttaatctaaccataccaggattaagatccataaacctatgatcaacca

SEQ ID NO: 171737 - DNA, 1578 bp, Cannabis sativa
ccccaaatttattttgatttgacaacatttcgttaaaatctccaattaccagccatggtaggagtggagcaacatcctttaatctttctaaaagtgtccatgttaagtgacgattttgaacagccggttcaccataaaaagcagtaaaatgccaagtcggaccatttccacaagccatatagcagtcaaacatatttatattataatttaaaagagttacatttacatcatctttccaaagcaacattaatccaccactaagaccaacatgagggacttcaagtccattattaaaatgtaaaacattacaaaaacgagtaatagaattaggacctaacttagtttccatgagaaattaaacacttggggattgctctttgacaagcaatttgagatgacggaaagcacttgggttccccaaaccacgagagtttcaacttaagattttcatggctgattgcggacctggacatcagactttgcattgctgtcattgacaccagtagaatccatttcatcaatggaaacatccaagtgaggttcattttctgctgacaaaggagaaaagaacaatgttgcttaattgcccctgcatctttttagtgtttgcctaagatttatcccatcagaggttctcttagagagtcgatttggggataaattctctttatccatctgtataccaacatctgttgtgacaataggctttgaaagattaagcattttggttggcaaaggtgtgataagttggcttgtctttcaagctttcaatgagtgacttgttggaggataggttgcaaagacatttggttccaaattcatggcagccagaggagtgagaatcctagttaaatcaacaactgaagcatttgttacaagggtatttgaagtttgttgggtcatggctgcagaatgttgcagcacattgttgagtgctgatgctggtgtgacagaagccagaggcctgatggtatggctgggaagagaagtggctgtagcaggaggcattccaggatgcaaatgtgagttgtttcttgagagttgttcaatgtgtgtttgaggttgagatgtcataacagaggacacaacattagattgagaggattccccccttaacaattgagttggatgaggagagtctctgttttttagacttggtattgccgagatcatcgagttttttgccagacgggtaagtaaatggctaagcattaccatctgagaaatcagttctgtaacatgatcgtaactcgaaactggtaggggggcacctttcatagtaagccgatactccatatttggttcttcaccattatctatcttttcaagatagatcaaacacttatcaaacggatgtcccaaacgtccacactccatacagtattcagggaatcgctcatatctgaattctacccaaaactccccttttgattgctgtaaagtgatcattcttcctctcaaaactggcttggttatatttgttatctttatatattggttaatattttaataaaaatattttcatattatattaaaaataatatatcaaactaacattaatatatccagaaaaaaaaa

SEQ ID NO: 171738 - DNA, 550 bp, Cannabis sativa
  modified_base (144)..(151): a, c, t, g, unknown or other
tgctccacccccaagactaaattggataagcttcttgaattttcattctgtttttaatcttgaaaaattttggtttgccaaatagaattataaatttagtctagtaatattcaatccaactccctgtggttcgacctcacctgnnnnnnnntactacttgattacgtgcacttacgtactatttacatttttcgtaatatgtgttcatttgactacattcaatatttttaggcctatcgagatccgatccaattatatattggatgttatattttaccatctgatttgatccaatcattttcagtcatccaatcgatccaacatccaatggatgttggattggatcggttttatctgttggatgtacttcatatatattattggtataatttgggtttagccaatattttagacctagtatttttttttatcagagcggatccatctaatattttaagtccagtgtgcattgaaatggatttgatccatctaatccaagaaaaaaagagtaaaattttaatgttaatttttatatacatatatattttac

SEQ ID NO: 171739 - DNA, 510 bp, Cannabis sativa
gaccagagtgttgcacctttgggggaaaattgcctatccctcactgttggacaagctccgaagagcataactgtgatggcacaatttttgataattgatgttccattagctttcaatgtcatgttaggccgaccaaccttatatgacctaaaagttgtcacatcaattttccatgcttgcgtcaagttcccaacaaagaatggggtagggtgcctaaaagggaatcaacaggttgcacgagaatgctataacctttccctgaccaaggctaaaaatgaaaattcctctagctagagtttggacaaggggaaaagcatttccaaataggaagtcgcccaagtcggggatgaggatgtcgatccctaacatggggaaccaaacacaaatatcgggccagttgaagaattaggagagattgaatcgacccaaatgtcccgaccaggaaactcgaaattggcaaaggtttgttgcttgaagtaaaattagctttgataaaatttctaagagaaa

SEQ ID NO: 171740 - DNA, 737 bp, Cannabis sativa
taaatagcgatgttctttacgttccccacacgccaacctactctagagtcaaaaagttctttctcctataaaatattttttcaaataaaagagcctctcttagatttcctaatctcgacaaaagatcttctctagaagtataggtccttcaacacacgaccaaaagaatcagcaacattgtagagacgagatgcttgtttggccaagagagcctaattaaataatctaaagtccttgaactcatatcaccatcttttttacgcaagagaagtttatcccaagtgcaccaatacttctttatttttcacatcattatcaccgcaccaaaaacaagcatacaatacacattttttatatattaaagaaaattataaaaaaaataaaaaagttcaataaacattctttagcctattgctaataatatataaataaataaagattaaaagaaaagtatcattatcatcattaacttgaaacatattatttatcaaaatttatgataatacataaaatattaatatatattatatatggtgtgatgtaaatatttttacactttttaatatttgttttgcctaatacaagtgattaaagtggtgataatttcagatttggaaaatagatttcggtgattaattttcactagcatgtcccagttgatacagcaatgacccagcaatgactcagcaatcctggcaaagttaacagatttcaaaaaaaccagcaagctttttcca

SEQ ID NO: 171741 - DNA, 529 bp, Cannabis sativa
  modified_base (332)..(334): a, c, t, g, unknown or other
ataaattaaaataattaaaataaagataagacttgtttattttttttaattatttaaaatctatttatttatttttagtttttttctaattatttaaaatctattcatctattttctcatttttttaattatattttttttattttttttatttttaaaataaaaaacatagtaatttttttaaaactttataaatttttagcaactacgtttcaaaaaaattaaaaattaaaagatctatctatatatctatactagcaaaaactacgtgcgagacacgtatactaaattttatggtagtttttttctatgttatttgaaagtgatacaannnaaaattaaaaaaaaaaaattattagttattaggtgagattatttaaataaagaacaataaaaaataattatttgaataaaaaatttaatatccacagttatatatatgaatctcattaatcaaaaataattattaaatatatgaacaataaattgtcacgctatatgtttcccaataaagaaatccacctcctca

SEQ ID NO: 171742 - DNA, 638 bp, Cannabis sativa
ttgtttagagtagttttatagtatggtcaatgaacaagagaaaggatccattttgtgctcataatttatactttaacaattttttacttttaacatataagtatttcaaatatgtttaagtccttatatttaatatggattggtttttcatcgctctttcacattatttttttttattatattgtgtggtaatagaattttatttttttgtcattttgtaggttattttgtagagggcctactgataagtttaattttaaatatgatatgtttgatattgatttttaacagttttaaattagggtgctagtatattgttactagccaaacgataacacctttggctagttatacttagaaattttgttaatttttttagttgtttagtaatgtcgagctagtgatataggttgtgtgttaaattctatgtttgtatattattttttattttgaagattgtcattctaatataactatgttttttggttcgatgttgccatgtgtggaaattgatcctctaaaccaacattatcatccaactcatttaaaccaactaacttaactaactttcggttatgttagttagttggttggtgctatccttgtttgagttaggactatatataagtctagtcttt

SEQ ID NO: 171743 - DNA, 755 bp, Cannabis sativa
  modified_base (656)..(657): a, c, t, g, unknown or other
atctcttttactatatttcaatcaattatataacatgtttgcataatcttcacgataggggcagaggtattgcttgagttggggtggccatggctccctctcaatctcaacaaatatttaattactttgatgatattattaatttattaaaaaaaaaaaacctttaaagatactgttattttgaattttttggagacatataattaaaatttgtaatttattaaataaaaaatgtcacttaaattatgtattattttgtatttcagattcaatagcattttttcttttaaggaaatattattttataatttttattatctacagctacaaaaaataatatttttgatctccttaaagaaaagaatagtcaaaatcttttttatctagaaaaaaaaaatataataactcgaaaactttaaaaagagaaaagaattttgactaattaattactaatgtatattgaaaaatatttaaaaaatttattataattattaaaaaaattctatgttaaatattaattattacataaatttttgatgtaattactaattcttttgttaaacaagacaataaaaattcatataaaattatcacttttacatctaaatacataatgttatcccaatttctctactctgacgtggcatcacgagaanngtgacacgtggagtccacttggaatatctactcgagaatataggtcgagcaggatgcctcgctggcatgctcaaaacaagatattcagcgatccgcgc

SEQ ID NO: 171744 - DNA, 774 bp, Cannabis sativa
tagggcataaaacccaactgtttctacgcctcacaatattgataatcaccttctaatgtttaccttgaaggcaattgctgtgcctaagtgtgatttctaaagtgcttctcgcactcttctataatgttagtgctgactgaatatatttacgtgagacattgtcatcttgtattgtttgtgattattccgaggtgaatcatattttgtgtataccccttaatctttcaacatactcacgagtatatgggtcaatgagttccaagcttttaaaaactcattatgttgggatttatgccctaaaagtaagtaattaatggataatatattaaagaattaatatattaaatagaattataagataaataatatattataattataagagtataattattaaatatatgaaaattctttattgatatggagaaggtataatcttgtaaggatgtacaagagaattaagattatacgatataaattaaacaagtcggtagtgtattaaagtaatgagaatctttaatatgaaactgctaagtatggtgtactatacactatacttctagtgtgtgtgtgtgtgtgattttgattcagatcacatctgtcaatggacatatagtaaaggtactgtgtataattagattatgcatgactggactgatatataataagcatcttttattaacttatcgtttaccttgaaagagttattcatatcacaatgatgatcattagtagatcagcttgaatcctaagtatacatgaactcctatttgt

SEQ ID NO: 171745 - DNA, 727 bp, Cannabis sativa
ggagttgtcccaccatgtctggccggataaggggcgtatataggctagctaagatgagcttatatggctagcctgggcttgggcacaagctggctagccaaaaggtgactttcagaccaagaaagggaccattcgaccaaggaagcctgacctctacaaggaaaaggtgtacaaaggctgacctccccctacaaaggttagcctccacctacaaagcctagcctccacctacaaaggctggtcatcaccaaggctggccatcacaaaggctggccatcacctactaaggctggccaacacatgcaaagacctggccaactcttaatagagttggcaggaacatgacctgccagaccctgactgaaacatcaccgaccaaacctcaacctgcaggaattgtatgggcagccagcctgcatcatgcaagtgcatggccagccagcctttggcatggcaagattttgatgtgtagctctcatacgtggacagcacgtcaagcaacggtttgggccttgaaaaataaaaatagagggaaaatatctatttttgagggacatttagttatttataatttattaattaattatgtaaataatggctttagttacctatttctaagggatattaggcatgtaagctctactatataaagagcattagctaaaccttaaaaccttaagtcattaagcctccaagctccctaagctctcaactctaagtctaaaaa

SEQ ID NO: 171746 - DNA, 1039 bp, Cannabis sativa
  modified_base (712)..(719): a, c, t, g, unknown or other
gtttgtacactttgaaagcaactccaacgagaaagaactgctcttgggatatcttttaccttgggaattattttaataagtgcaaaattattgtcaattttcccaacaaaaaagaattcaaagacatattcttctggatcactaggctttattcttgctcttacacaaatttagtgttgtttctcactaaaattaattcaacggaacactaaaaattatcttatatgtgggattacctacaataactaggggtaggcatcatccaatccaatccaattaaactaaaccgatccaatccaatccaattacaaaaaattggatatccaattacaattggattggatactaaaagttagattctaattggattgaattagttattggatgtcaatctcaaaatctaattaaaaaccgatccaatccaattatatttatatatgttaaaaaattatttatataataaaaactattgaaaaatataatatatatttattatatttttattagattattttttttgtgtgggttgaatttgtaacatttagttattttgtgtatttattttcatgatattttgttctattttattacatagaaatgttactgttttaattatttaaaacttttgactacattacacttgtaacgataatacgtttatgaagtattaaacttaaataaaaggtgatagtttttacgtatttttcttcannnnnnnnaagttaatattgaaatttaagtgtgtaattaattatccaattaaaaaattgatccatttcaattagtaatttgattgaattaaattaaattttgaggtctgattgaattggattgaatgatgatttttgtaaatctaattattgattagattagatcggatgaggaaaaaaatatcgaattggatcggatgcccacccaataactcactattattagtgagacactctagaccacactaaaattgcttttttatttttatttttttggtggcctttggtaacacttttttaattagttttgtaattttaaaaaataaaaa

SEQ ID NO: 171747 - DNA, 512 bp, Cannabis sativa
  modified_base (264)..(279): a, c, t, g, unknown or other
  modified_base (469)..(471): a, c, t, g, unknown or other
aaataataatttaattattttgatattttgaaaattatttaattgtttaattaatttaaataaaataaatcctatatccaactatccaacttgttacatgtatgtgcgttttatatattgtttaattattaaacttttttttttataaaacctattattgtttgatctaaattgccatggttaacttgttgcagatccaatgatctgattttaaccaattgttcaattgtcaataggtccaataaataatttgtaacaggtaannnnnnnnnnnnnnnntcatctgtgtataaacctagtaacataataggatccatccaaatcagtgtgcctgtgtaagcctatatgttagctttgggcttagatgcatataaggagcccaattaatttttgtaagaggaaattacagttactaggggattttaaaagttcttatgataaatatgacacatttaagtttgaccaattnnnatggtattttttttatttttaggtctttttatggtatttga

SEQ ID NO: 171748 - DNA, 519 bp, Cannabis sativa
gtttatttgagtggattcaagttgattttgttgttagttagtcggatttaacctagtgtaaagctttgaactcaaaactttggtttttaatggtgaaatggtgatttagctgctgtagttgctgttcgagtttgggtttattttctgatattatattatgataacttaaggtgatttaggcaggttatgatggcttgtttttgggatgagcaagctttaagttttgaactcaagcttgactcatcaatggtgatttttgtttccttgcatgttgtggtgttttattgctttagaaatgatctttggggtctaattagcatgtctggaaagtttgaattggtttggggttgaattggtcgagttatggaattttgaaaaattcccgcactgaaacggaattccatttcagggaggcctgtaggaaccggtctaccggttagcttccaagaattttcccagaaccgaaattccagttgaggaaccggtctaccagttggggaaaatttgggaaccctaatt

SEQ ID NO: 171749 - DNA, 680 bp, Cannabis sativa
tagaattttaccactttttttgataaaattgagcttgaaatctttttattacttttttataaataaaaagattatttggctgacattttaattatttattccaaaatttagaaataataatttatcttttagtagatactatcttgaattccaatttaagtaggtcaattaaaatttaagataatattaaagatatttattttataattcaaactcatattcttatttgaattatatatacaggatacaacatataatataagactattaaattttacacactaatatagtgtatatatataacatatattatatattgatcgttgagagtcatatgtatatttaacaattaatcccaatcagagtgttctcttttttgtgaacaggtaaggcttcctttttaattttactcactgacaagaagattaatttgactctcccttacagtatatgcatatgagtgagaccctcttggaatttgatttacaattttaaagtgtaagtcacctactttctcacctcttaaccactcatgtgagaaatgtgtctatacatcacacacaatttaatgtcattattgaacatattatatatgagggctattatggtagggattgggtattttacctatcaatagggatagtgatttatagccgttgattaaatccaatggctcaaat

SEQ ID NO: 171750 - DNA, 502 bp, Cannabis sativa
agcggggacgttacaaagacattagcgatagggcctgccactaataacataaaaaataataaaaataattgttacattattagaaccattaacagcgggccccgccactaataatgttatgtattaaaaaaaatctaatcctttcatttctattcatttctcttcctctcttcctttcttcctcttcctcttcagcccattctctccttagcttcgagcctcattctgcctctcgtcggtgatgttctctccgccgcttgtccttaacattgcccccgaccagcaatctctctgttgttggtatgttttttttaatatgatttttttaatttttcgtttaatctaattttgtttaatatatatgattttgtattttaaaatcctcatacttttttttggtctttttttataaatgtacaacaaaaataacataattacagaaaatgtgcaaaaaaaaaaatattttaaaaacttatacattttaaaaacttattacatgaaa

SEQ ID NO: 171751 - DNA, 548 bp, Cannabis sativa
ctatcccagagctcccacccattaatggcgattccagaattagaactggaatagaaccgatttgtaattgcaacaaagtctccttactctctgccttgtgctgctccaacatttctgcatattttcctaagttacctgtagagaatgcatcaaagttcttcttcatatcttcgaatagagcgttgatttcttcgttcttcattgcaaggaagaacaatgaaagcaccaattgataggaaagggagtcctcttcgagacaggacaagtctccaagctaggactggctaatacatttcatgagaaaaaagaagaatacatgagaattttttttatatatgattcaaaaaccagtagaaacaaaattaaaaaaaaataactgaatttagctgatcttcagccatacttcagtgcgctccatcattacgaaatcctggagccatctcggcttcatacgaactcagctcacccgctcaggaccctctcgaacgactcctgggatagcaactccttcgttggttgaagagcttggttggtttgaacttttctcc

SEQ ID NO: 171752 - DNA, 533 bp, Cannabis sativa
acgagtatacttgcgattctaaactacccaagtatacatcgtggaaaaatgtccccgtcctagaagaagaggaaagcaatgactttgtggctcgtgcacactatctcgagagagtccctcctctggtagatggaagatcccgaggtaatcaatgtgggtgatcaccaattgtgcttagagccgaacataataccttagtgtcttttcgagatagtcggtataattttttcatttggaaacctctcctcacagattacatctcccataggttcgatagttggtacccacagtttcatgttcaattagctataacagctctttctacaggattgccgaacaatatagaaccatgttggatagagcaagtcacctagattcaagctgggacttagatccactaaacccttatgacatattttagatcacaggatctagggagtttagtgaatattataatctttcctcgccatcctttgaagaatatggtaaccctcctaagcgggagctcttccacattcttattcattttaact

SEQ ID NO: 171753 - DNA, 552 bp, Cannabis sativa
tagttagggtgttacaataactcttgtggattggaaccaaataataaaagtaaagtagatgtagtcccattaccatcgcaatatgaggtaagctgttataaattcctagtgtccttttttatttttcgtagctttatttagcaaaattaatgcagcgcagtcatcttcttttttacgatcttcttagattagttgacaaaaaaccgcgtcaataactcatttttcagttaattttttaaatgaattgagatgcaatttaattgatatgtaattgagtgattggtgaatattggataataaagtaggttgtttattaaacaacgagctatataattgagtgtaaaataagtgttaaagtggttaaccaagtacgaagatagtgatgattgcaaggaagcgatggtagcgtatgaaccgaggagtgaaaccttagtggtaatgatggaaaaagagcgcgagagtctcagatgttgatgaatcattattaccaatgcgggactcactataagttggcatggtagtacattacaagagattgtcaataaaatagag

SEQ ID NO: 171754 - DNA, 654 bp, Cannabis sativa
ctcgtacaaagaaaaccacgcgtcaggctgacgcagctgatcctcaagtggctcggctcgccactctgcccagcgccgaacaggatccggccgtctagatggaggaggatcatgaaggggacgctgaggtccaggagattgaggagctggaagatgtacgtcttggaagtccctccgaggtggaggaagaggaagaggttgaacccccaaattacggggagtacaacgaggctggggagccatagatgttgacagagatatcttggttaagggtgtggactatgtcagtgaggagcttgccgcggcggttcctcataaaaggcagggtgccttgggcgctaggtggttaagtcctctatccaagattatggaggcgcgccttcggactcttgaccagggcggataccagggcaaactggactgctacattcccacccacaataatcgtgccaaaatccctgacaaggggatgtgcgcctggttgggagcccatggtcagcaaggagcgttgatgtccttgcataagtacttcaaggatgtggcggacttcttcgctctctgcccgacccatttcactcctaaaggcattaagtatttatccgccatcttcgtcctctacgctccccaagggtgggggtactccttctcctcacg

SEQ ID NO: 171755 - DNA, 641 bp, Cannabis sativa
aaaaaggaacatttaaattatttgagtatattatgatttaagtttttagtttatttattttatattatagtatatatttattctatgttaggatatattaaggaataggtaataaggaataaactcttgctactataatattagattaagattttggtatatttagtttgcactatggtatatatttattctctgataggatatattaagaaataaagaataaagtataaactcttgctactattatagtaaattaagattttagtatatttatatagctcagaggtatatcttttcaatgaggtatggtatatacaaataatttatttttattacatatcaaaattactataatggcattgtttgttaggaacaaacaacaattgtggaggaacaaaaattacagtaaaatattgaaatccaggtataaaaaagaacatttagatcatttttgtatattatgattccttcttgatatatttattttgcactgtagtatatatttattatgtgctacgatatattaacaaacaagaaattaaaaataaactcttaatataatattagattaagtttggagtatattcacattgttctaaggtattgaaaaaccgtgtttttgcaaatgtcagttgtatata

SEQ ID NO: 171756 - DNA, 1230 bp, Cannabis sativa
gaacaaaataatcttatttttctctaattttaatcagacctagatgtgattttctctaaaagattgtattttaatctattatcaaagtttgaaggtatgatttttgacataggtttctatttttttcactcagaattttcaagaaaacagtggagaaagttgatctcaaagattaaaattatgtttgaaaaatcgagtttttgcaaatgccaataattatttcaaaaatgtactgaatataaaattgcatacgtctgcagcagcagaatatatttatgttactgcagaaacaagttttgcagagacaaaccagaacaggcagaatataaaaataattacaaaaaattaaatcacttgacataagagatttgtacgtggtatcagtgttctttcaaacactcctagtccacggggtcacgcccagagaatgaaatcaattaataaagtatcaacaattacaaagacaattgacttaaacaagtttagactccctctaaattattgccacaatcctttgtaatgcacttcatgaacctgatttcagaaacaccttcaaacagcgaactcccttcgtctttgaagtgtgtgtgcttacttcctcctgaagtaaggcttgaccaagtcttctcctgaagacctctctcttgtttaatcaagtgttctaaccaaccctaagacagagtaagaacaaatatgaaaatactagaacctagatgaacaactaggttctcataaaaagaactctctcttcaaaaatgagaaaatgtaaaaaatgaaagctagaagagttgattcgaatggctgttctataagttttatttatagagcatagaaccctagagacagccacaaagtcgaatccacagctatacaaaactttcctaaataaaaccctaatttgcagcatcagaaacagattttgtcgcagcaaatcagaccagaaaaggaaacttgccaaaaacgtgtccgatcatttattgggttttgatacctgctgttgacctcgctttaagccaacgacagtgagtctaaattgtaagcgaaaagtagtataatatagatacgatataatgaaataaatagagacacaagagtttttatagaggttcggccccgagcagttctgtaatagcctactctgcttggttcgtattgacttaagaacaaagaatacaatgattcctcttcttagagctcttacaataatatctctgaatatgatttcttaga

SEQ ID NO: 171757 - DNA, 807 bp, Cannabis sativa
tttttgagttactgctgttgtgaaccgaaattccaaatggtacagggctgtactaatcagaggctcgtgtttgaaatttcacacgcctacaggattgcattgacatgggcctaggcatgggatttccatgcctatgcatgacccttattttgtgtggtgatcttttatttgatctttttatctttttttcatcttactacttcgatattttctatttttcttttattttaaatctgcaaaaataaaagataaaaagtataaaattgctcaaaacaagagtaaaacttaattaaaaacacattaaaattaacctaataatagtactaataacattctaacagcgagatagagcaagagcagtgaaattgacgtcaaataaataaattatgacaaacaactgtaaaacaacactaaaaaaataaaaaaaaaataataaaaacaaaaaaaaaatgatcaagaaaaactattttttgcacaatctcaatactagatgcaatagagactacatttgcaagcaagttctaaaaaatcagttaaaaaaactatacttttattttttccaaaaactgaatgaaaattttaaaaactaaatagaaagaagatgaagaagaaaaatttaacaagaaacaaaataaaaagcttatatgttaatggagagagatagagagaacttgaggaagaagagagtgaaaaaaaagagttatttattatttgttatttgttcaaaaggagtatataaaatgtggctatataacaaaattttggtttatgagaaattattgggtgacttttttttaaataaaaaaa

SEQ ID NO: 171758 - DNA, 782 bp, Cannabis sativa
cctaaaatgaactgctatacaaatgtaactctcttcttttttatttgtaaaatctatacaatctgtacaaactattaaactttgtcaccaattaaaggctttgaaaccagttggtatcttcaatagatacttttttcggccatattgcagtaactctttgaagaacatcacttcttattctttcgaacatcttcgctgcattcggtttactcttttcccacaaactgagattgcgagctttccatagagtataaaccaaacaaacaagagcagctatgtggcacagaccagcgtgttacgctcacacgcctatttatgtctatgtgtcatagacctacgtgttacgctcacacgtctatttgtgtctatatggcatagacctacgtgttatgctcacacttctatttgtgtctataaggcatagacctacgtgttacgctcacacgtctatttataataaggccttagaatatttcatctcggttctaattaccgagcctaattcggttatgccttgctcgcataaccctatttacatatatacgtaatctatatattacgttctttcgatggtttatcttggtgatatatacgaggtctaacccagttatgtcttattcacataactcttaacataaatgcatacccacaatttatactctagcatatagaatcttagggtaataaaccctaacttgcttactaaataatcactcatataacatattacagtatgctcaaaataacatctattgagggtaataaccctgactcatgtcttc

SEQ ID NO: 171759 - DNA, 636 bp, Cannabis sativa
tacttcgagatgctacaggatatgtcactgctgctctctctatgccgattattgggaattttaaatttcatgaaatggaagccaaagctctttttcacagtctcaattggcctctccaacaataattaccaattacacatattgagatagatgctcttatggtggtcaatgccttgaaagctcccttcaattcaaattcagaattctcaaatttaattagtgatgttcttagtcttttatcctttttctcaaatgtaaatgtatcacatgtctatcgttctgctaacaatgcagcgcatgggctagctaaatttgcattagggctggatgaggcttatacttaattggagattattcctccgccgatatactcggttattgtaaacgaatctatattgtttaataataactaagtattttccctcaaaaaaaaagattatcacaatataatttaagatttaattttaagttatcgattacttgggttataaagttatcgatatttttttaagttatagtagttattttaatgattgaattagtgctcgtggatctatcagacactaattgtatttgacaaataagttattttccatttttttataatttttcggttggaaatattttctttatagt

SEQ ID NO: 171760 - DNA, 689 bp, Cannabis sativa
ctttgaaacattaatagcctagctttgagaatatctatttttctttaatttaatcaagctagctagctatcataagttataaccacaatttcttttgtcagttaatgaagcacttagtttaatctattttgatatgtcaacgcatggagaggaagccaccttagagtcaggtggggcaattgcctccctcaaattttacaaatgtgtataaattagagttcaaaaattaattgatagaaatatataaaaaaaaaaaattagatattatacttaaaaatattttatttataaaaatacctttaagaaaattatttgcataaatacggttgtgctacgtcagcatgcatactgaattccaaaaaaattatcgaaatgaaaaaaattagaaaatctcgtttccaaaattttttgctttttgagacttttaaaaaagtaaccttttagttacttttgatgtgaataagatatcaattaattatttttccattaaaaaatttattattttatacgtatataaataataaaataattattttaatatttgagatacatatattttctgtctccaaaaaatgatgactaatattaaaagaaacttttttgtttcttttttatattttcaagctatattatgttattttattgtttaagatacattgaggttattttttttctaatgtaactcatat

SEQ ID NO: 171761 - DNA, 774 bp, Cannabis sativa
ttatttttcttccttgtaaactaattgttagcttcattctgttatgactgttagttgttagcattaattagtttgtttttcttcagcttgtatctgattgtaaaggcatataaataaacatcaaagcaacccattttgggttaagcttttcttggcaatattgttttcttgctctgcatttgctctgcttctttcttttctggttttgccttgataaagtttctacatggtatcagatgccattgacgaatgtctctaatggcctccactgaaaacacctctggcgttcactccgatcctacaatcatggctactgctgctccttcttcaaccaactggaatcctttctcgaactccctctctgcctctctcactgtcaaactagatcgaacagatttccttgcttggaaatcgcaggtcgtccccaccgtcatcggacacgacctagatgacattctcttcaccggtgttcctcctccccaacatctcatcacaggcgaaccaaatgttcagcatcaacaatggaagaagcgtgaccagttgcttctttcttggctgcgctcctccatgatcgaaggggttttggcctctgttgcaagttacacaagttcttactatgtatggaaagccttagaacaaagattcacaagtcagtctcgcgcgcgacttcttcaactcaaaggacaattttctcacatcaagaaaggctctttgtctatctctgactatgtggaaaagattcaaacactttctgatgcaattaccattgctggt

SEQ ID NO: 171762 - DNA, 584 bp, Cannabis sativa
gagagagagagagagagtattttggttaaaaaaaattgattttctagttaattcctaaggtatatgtatatgtgataagttatataaagcttaactattaatttggcaaattatcaatttacccctactcacatacccacataaacttaaacttaaaggtaaatgaatcatttcctaaataactcacataacacataatttttaactatctataatattctcagtacctctaaaatattaatttatacaaatgttatattttggccaattcatcgagtctccactgttgccaaacataaaaatactaattcacatataatgcatatatggctgttaactcaaaaaaaatttcctggtgacgtggacatcaatgtttgatacgtgacaagaaggatgacgtcacggagttgagtagactcgagtcatagcagtcgaccaaggaggggaccctagcgctacgctcaggttgactttaggagctccaaaatgaaagttcagacttcaatagcttgaatctaactcactatcttttagtattatgtaccatgaggacatggagcaacctaatccaagcctcgagagct

SEQ ID NO: 171763 - DNA, 682 bp, Cannabis sativa
tttctttttttttttaacgagaacttttgattttttaaaatgaattaagttaaagctcatcttgcatttaataatatttatttcatatttcttaaattttttatttttattaaatgtcacatttctcattgttcaaaattttgtgtattattaaaaaaaattactagtaacatatttaatttagtacattcaggtacaccttaattaagttgcactttcaaaagtcattaatatttatgatcatgaaaatatcttcattttatagggacaaaacaagtatgcctactataaaaattttctatatatctatgcaagtaatcacataaacttcaaacatttaaaatagaaaaccgcttataactaattgaaatttcttagttaatataaatatatatatatttatatataaaaagaataagagtaatttttggcataatctacttaaatactcaggtttttgcaacaaacctccaattctaaaattttggtggtaaaaccccctaaactcgtgttcacttagcagtttccatcatttttagctattaaccgacatggtggaatgtctacgtggacaaagtgtacacacgtggcacaattttattggttcatgtaaataaatatttaaaaatataaaaaattaattatttgaaaaataaagaataaaaaaaattctttttcttta

SEQ ID NO: 171764 - DNA, 634 bp, Cannabis sativa
gggtggttcgacgaagaagaaaggaatggccagtatgggttttgggatgggaaatttgagagaaaaaagaagaagagagagggacggttgggaaaaatgggaggggtattttggggtttaggaaaaagttatctcattttacaaattatgcatagtattagtttaggggaccaatttatgagtttattaagcgtagaaattcagatttcccaataaaaaaaaaaaggcagtttctctctttcactttttttgaaagaacgcgtttatagcatagaatactaaagagttagacctctcggtcattacaaaatagggttttcgggacggaagcgaccgggatagacccaaaagtctgatgggtgaatgcccatctagccacattatgagcgacaaaattacaagatctactgatataagaaaaacaacaactactaaaggatagagaagacttagtacaaaatgagatatagttctctattgcccaacgagaccccttctcattgatagcatcgatgactactctcgagtcattctccacaataacatacttagagccgatatccaaggcaactgacacagccaaagagcaggtcgccgcttcgccacaaagagcatccgagaaatcttcccgagc

SEQ ID NO: 171765 - DNA, 869 bp, Cannabis sativa
tgtcacttgcgcctggtcaggtgggtgtctcactcgcgatttggaccttcagatcaggacgtggacaactgtgatgggaagctgactttgaccgcaagtgggccttgcataagggctgatgagatttcttttaaaaattatacttttagctccatttctccaatatttcttcaatttaatcccaatctttttcttccaaacacactgaaaaatacataaaattaattaaaaaaaataaaaataaaaataaaaaataaataccatataacatattataacaacataattataaaaacacacaaaaacatattaaattacaataaagctaataaattcaaaaataattaaaaacttaataaattgattaacaacacaatgactaagctaaatttagttaaaaaaaatgtgaaaaataacctaatttttagagttatcattttattgaaaaataattttaaaacttaaaatatcacaaaaataagacaacataggggagtatgcattgcatactacccgcgtgcagaatgccctaccagctgagcaaataggctccaatgcagccaacttaagcgatgcagcttggtcacgaccctcttcggacaacttgtgtttgagaattctcgttcaagcttgtctgaaaccgtgtggatgccgagtgaacacccttgtccgcgcacgcatgtgggttaacctaggctagatattttccaaccttcaaaaaatcatagctaattcaataaaaatctaaattgagttctgtaaaagcctaaattcattatatttttcacctaatgtctagaagaaaaaaaacttctactacaaatataaaaatatttttcattgaaaattcgtaattcacaaacattcat

SEQ ID NO: 171766 - DNA, 846 bp, Cannabis sativa
aaacggggaagaaagaaataggcatgctgattttacaaaatttggtgaccaatgtcaactggcctatattgtcccgccgttattggtaaaataaggcccaatcaagtattttaagggaccaatctcagctagcctatattggcccgtcgttattggtaaaacacgatccaatcaagcattttaagggaccaatctcgacgaacatatattggcccgtcgagattggtaaaatttttagctttcaaaatatctataatcgaggaacatacgatgcctgtcgagattgctacgctcaggatttttctaaaaaaaaattcagttctatctcggcacgcacacgtgggctcaccgagatagggctaccgagataggcctttgttgtagtgttaatattatttaagaataatattatttttaactaaataatatagttttatcagataaaactatataattaaatactgattacataattcataattaatgtaactatttaaaataataatttttacaaaataactattttgctcttaagaattatttctcaaaaaaattaattcttactcaaatttcttcatcaaattaaacttttccctatacagtgttgtatagatgtgacttggggaacatgaacctatatttcgaaggtccaataaaaacatgattatgactgaactcatcaattgaataattcagtttattaatactattcttactccactatatatatggaattacactctttgacaatatatataaaattatatttttagaattattactagttatctattaatataatcaatataagtagtttgccctctaattattatttcataattagag

SEQ ID NO: 171767 - DNA, 595 bp, Cannabis sativa
  modified_base (561)..(565): a, c, t, g, unknown or other
acctagcaattttcatatcattgatgtctgtacctacgccgctaggagtatcgcatcacctaatcaggtgagtttgtacctatgcttgatactcatatgttactgacgcccgtacctatgctcgatatgttgcttataaaatcacatcacctaattaggtgagcccgtacttacgctcggtattcatcatatgtcactcacgcccgtacctacgcccagtacgtcgccaagtaaaattgcatcacctaatcaggtgagcccatatttatatccatagtatcatcccattatcattgcttaactaatcaatcttgtcattatataacaatattaagtgtattaccatacaatgtactacacaatacaatataattttcttacctttaatccaggttcatacatgttagccaacccaagtgggtactatcgctgatggtctaggccctatgtcacaataacggtaaaccaatacgtatttatcccaaaacactgcagaatattcacataagacaatctagggttctctaccaaattccgcagtataaatacactaaaataaannnnntattttggctctaaaacatacaccatattg

SEQ ID NO: 171768 - DNA, 542 bp, Cannabis sativa
ttaataaaatgacgatatgcaggaatttaagagtttcttatcaaaaagtaagacactttgttaggagaatgtttaacaaaaagtacaaaagcatgaaaaattacttcatatactatttttttaatttacagtttgaattgctccgataatttttatataggttgctatgtggactttcgtaaaaatacaaaaaaagaaaaaaactacttttaaatgtaaaaaaactaaaaaatattaccaaactaagaaagtaaagaacgacaatgatcaaataaataaaattgatttttaaatttttagttcacgcttttatttaatatttatttcatgattctcttttaaatttataaccacaaacttgttttttatgttatatacccgattacaaatcaaatcaattcaatctatatccaaaattttctcaagaagtacatataaaattatatacttaacatcctgctgaatttgttgtactgttttttttttcattctccaaatctttgaagaccaagaagcatcattccttacttttttataaataa

SEQ ID NO: 171769 - DNA, 553 bp, Cannabis sativa
tttcagaatctcaattaccaaaatttatttctacaagctgagggctcggaaggatcctttcttaaagcttagactggagggatcactctcagcgacgtactgccatcggtggccatcgagttcctcgcagcaaatcaatctcaagctggaggctaaactcgtcctcgagcaggccgagcttgcgattagtctggcggtggccggcaaccgaaggcagagaggaaggcgacacatcgggcagagcagaggccaaagcggcgctaattcgaagagtctcgcaaacaagaaggcgagaatcctggccagcagtggcggtcaagtggacgattttgaagaagacgaaagggccgcctgttgatcgccagagcaaggtcgaagaggattttacatctcatttgggattagggattttactggtagttgtgttggtttctctctctcaattgtatttagcgttattttttaaagctcccatataacattaggtgagtgttatcaatagacgcaaattgtaaagcaattttttaaattttttgctttattgcgtcggttt

SEQ ID NO: 171770 - DNA, 555 bp, Cannabis sativa
  modified_base (484)..(526): a, c, t, g, unknown or other
ttaacaaagaaatattttgagccctgtccaaaagccaaagaatggcctgagcccttgttcttagccccagcatgaaatgaggacgcaatacaacttagccagttagaaagataggtggtcgacatccattccctagacaattttatagtcttttatgtaaccacctatctttgttactttgatgtcattagtttcgatcagtcctggacgatccaactgagagaacaaaaagtaacttgagcagttatgcctcgagctagacttcaaggcatacagccaattggtatcgcgaggggacagaatcccccatcgctgcttcacgtacagaatgaacaacacagaaaaatatttgattgtctttggagtaaattgcaccaagcaaatcttatagtagttaaccacccttttaaagtaaggatggaaaagcaagagcatgccctattgaccatgtgtccgtgaccacttgttggaaatattttaccannnnnnnnnnnnnnnnnnnnnnnnnnnnnnnnnnnnnnnnnnnatgaattctaaaataataaaataaacaca

SEQ ID NO: 171771 - DNA, 736 bp, Cannabis sativa
gggaaaccaatttcgcctttttttggtgggccttttaatgattttttatataaaaaaaagcacgcatcgctacaaaggaaaatgtagaatttatgatgtgtttactaaactgtaattggaatcagaataatcaataggaaaaatgtatcggtttaaaatagaaaataatcggaaataatattttattatgatgtttactaaactgtctggaaagaaaactagaatcatattattttgtttacataactagaaaaggtaatcggaatgcttttaaggggtgtgtgggtcctactaatttctccctttctaaaatttagtaaacaaggaatcaataccataccaccataccattcattcccattctctttaagtaaacatgccattaatgtaacaatctatactgatgatcttattttccatttgactagatagaattttttaccaacaattattaccgcattttgttggtaaaatttttttcaacactatttctattaaaaccttctcacgttttacttgcatttaaatttttaagtttaaattttggtggtagaattctccaaactattaaactagtagtaaatttaagttatcattcaaatatgggctgtttaatgcttatgtgtatattttttgtacacctaatattattattttaaagttattttcaaaattaaataaattagaaaaaataaaaataaaatatttttaaaaaaaatattacaaattttgaaat

SEQ ID NO: 171772 - DNA, 647 bp, Cannabis sativa
caccaattattaccataacatcaaaattcctacaattatgaatcaaaactcctctttaccaaagaatagacataaaggaagggactagggctccataccttgaaatcacacaccaattttagctaatacccactggtttgagctaagaaaattccaccttggtgctagttcttgtcaattcgagaggaagagggagagagaggtaactttctaggtgtttccttaattctttctaacttaagataagagggtttcattttaaaattataaaacttatattcagcattaatataactcaaataagacaaaatgaagtctttgcctaaagacctttttgcccctctaactaattaaaatggttacaaactcccaagggtaaattggtcattttccgaaccccaaaaattccaacatctccaatacccaacaatgatatctcgataataatattctaaacgtataaaatgcgactctctaaaggcccaacgtcgctttccactgcttccaaacacaatagagcaacgagaaatatatacaaaatagaataattaattatatcaaactccaataatttttcacaatatgcatagtataaataatatttaaatcttataattaaaccctaattatttaataatccatactgt

SEQ ID NO: 171773 - DNA, 612 bp, Cannabis sativa
tagtaaagctgaatgtcaggaactattggagaaaatggtgagtagaatcaggtcttggagttcaagaaacttatcgtacatgggaagagtgactttgatcaattccgtgttgatctccatccacacttattggtctcaaataatgatcttgcctaagaagttactcaaagatatagaagctatttgccgatccttcttatggaaaggcattcaaggaggagcagggcctggtttgatagcatgggagactgtatgtaattcaaagaaatcggggggattaggcttcacaacattcagaactggaatactgctgcacttggtaggtacgtttgggatatagcaagcaagaaagattgcttatttgtgagatggatacatgctgtctatttgaaggatcaacaatggtgggagtataatactcctaccgattgtagctggtattggaagaagattgttggagtcaaaaatcgattgaaagagaagactgatgctgctggttttttactgcagaaatacaaaattcagcagggatacaatctgttattctctaacagtgaggaagtttcttggcatagtctgggataggcttattattccaaagcataaattcat

SEQ ID NO: 171774 - DNA, 601 bp, Cannabis sativa
tctcgtactgacctaacctgacattattgcccaagtgcaatttcgtaggtcttcagcatttcgcctgtgtagcctgagatagatcgcaccttcgattttattaactaaacctcgaaggtgacgttgggatcttgaggagttttggacgtacgtggtttgggaggcataatcttgaaatctaagtcagtggttcaaaagcaattgtgacgttgggtaaaaacaaaggctttgccacaggaataaaggacacgctgagtgttctggccaggctgcttctcgtaagaactgacgtctgccttcggatatttcttgcaagaagtgcctgtggcgactagaaatatcttccttttgggttctcactgtgtgttccctaaccctagaattgtttatctctaatttggaggtgggttttgagggattgtgtttatatgggatggccaattctataggaaactcaaactctaaggcttctggatgataaactcttgaaccagaatgggacattgctaccagcaaaaagtagtcctaatccatggagagaattttatcaaactagagagtaatgagttggagatcttagaacaacctacatattacctga

SEQ ID NO: 171775 - DNA, 624 bp, Cannabis sativa
  modified_base (475)..(475): a, c, t, g, unknown or other
ctaagcacaggcctagcctgccgagacccagggccgggccgggcccggcaggctaggcctgataggcacaaagccacaaaggtttcaagatacaaaagaacctaaaaaattaaacaattaaatcgacaaaaagacctaggtaacattgataagatgattatttcttattattaatcataagagattttcactaataaaaaaatatttaacttttttttttttgaataatgattaaatttcattaaactaaatcatccaaaactaaggatgcaataacaaaaggtaaggagtccctactaaaagtacggtcagccttagaaagagaagatcgtgtcaaggcatgcgcaaccttattagcagaccgcttagcaaaactaaaagaaacaacatcaaaatcagcaaccaaagtcatacaatcataaataatatgtccataaggagaagccatatttttgaacttttgcaaatcattaangacccttaaacaatccgactcaacaacaacctgtgaccatccatttgttttactccaagagagaacttccttgataccaatggcttcgacaatatgaggttgcaaagagccttctctagataaatttctggcccccaagaccaaccccg

SEQ ID NO: 171776 - DNA, 748 bp, Cannabis sativa
gctgatgtggtagtcgatgagaatcatatagatgagatgcgtgatgtcattgatgatgtctttaccccggcatgtgataacaatacacctggcgttgacgaaaaccgtatgggcgagtattacgatgagttgtgtaaagatattgaagcagagttgtatccaggttgcaactggatatcctctctcaacttcttagctaagttgatgcatttaaaaattgttggtggaatatcaaacaacatttttgatcaactactgagtttgttgaaatttgcatttccaaaagggagtacgattcctgaaacccactatgaagctaaaaaaaagcttagcaaattgggtttaggatatcagtccatccatgtgtgttatcatgattgctgtttgttttacaaagagcatgctttaacaaaattatgtacggtgtgtggaactagcagatggacaaaaggtcccgtgtaaggtgatgaaaataaaaaatattatatgctgattatagttttcttcttcttatttaaaacataagatacccgaataaagggtcgtggtccatctattcgtgaacaattggagaaaaaaaggaaggaagcaaaagagccattgccattagtgtattgtccaatttcagagaagatagtgggagtagagcatgcagctttcccacgcgttttgagcgattacattgctgccttttgtcctacacattaccaaaattggaagacagtgccccaacagtacaaggatcaag

SEQ ID NO: 171777 - DNA, 532 bp, Cannabis sativa
gaattcaactttctacagtcgtcgcgataaggctacaaggagaactttgtcttttctcatttttaggctaaaaaattttatttaatgaaaaggggttgcaaattatgaagagataaaaatagaaccctaaaaatacaagaaaaatatgcttggagcaaacgtgggtgatccgtgacaatccgccatctagtttccttcttttttcttaatttcttatatttttatttgtgtctagtttaattatggatttgattatgagctaaactccctatttagggatgcgataaatattgtttgagattatttcatgagttagagtacatagttagggtttcctacaaaaatactgtaaacacatcaaaaacaccttaagaggctaataaactaactcatggactaaggttaattaacacccgaactatgtaaaaaatctccacagtttcatttatgaattatattatttctttagttctaaaatatttagtttccaaaaatctaagtaaacaaatataaaatttaaaaatttaagtat

SEQ ID NO: 171778 - DNA, 760 bp, Cannabis sativa
tttttttttttaaaaatttatgcttttagaatacttatattataatagcatgtttacttaaagcgatgaaattaattaatgggattaattatttgtttattaaaaattttcatgggagaactagtggggcctaattgtgttatttgagttttttgacttgttcgttactagcttaccctaaagactagctcatacttacatcatggaactcggtagcataattgagtgagtgtgtaagtcatagatattgacattgataatctctatgttaaaagtgttaacgcaggtttttgttaacgataatgagcctaatttcgtgataggtttagcacaatcattgaaattgaaaatgaaaaataaaagaagtaaaagtattttttacgtgttttgcaattaactctgcatagtccacaagtcaatcttattcagacttttctgatacagaactagggttcttatttttctctcaaggatttttcgtccccattttctgtacattctgcacctatttctgtagccaacatcatttgaatgtcagcttctttctcagagagctgacgtaacggagcagtatagctcattgaaagatgtcttgagctgattagtgaaggtaccaagagtatgccttcttatggcgagatggatgtttcgctattcgttatccatgtccttccagctactacacttagttagtatagtgtatattatacgttgtgttctaacagcctattcgactcgtcaacacctttctacacatagc

SEQ ID NO: 171779 - DNA, 898 bp, Cannabis sativa
cgagagctgaactccgggtacataacttgtcactctggttggggagtatcctccataagccactatttgggcctcttctaagttgatgtatttttggaccctcttctggaaatcttggagattcacagctccttcttgttgtaattcgttccagaatggggttccggtatggatcccagcttggagaagtgcaagctattgtccgtcatcaactttcttagtttttgaggcctcttccttgaacctctttatgaaattttttaatgtctctgtgggtagttgcttgatgttagtcagggcactgacttcgagattaatctttctcgcaacgacaaactgtctccgaaagctaacttgcaacttgttccagcagtccacagatcctggttccaactttttgaaccattcctccgcagacccacttaacattagtggaaagcataagcacttggcgtcattgttgactctcatgaccgtcattacttggttaaaccgagacaaatgatagttggggtctgtgtccccggtgtaagctgccatttcgggcatcttaaaatttttggggagttctgcctccaaaatgtgtctggcgcacggctcccagtcctcacaatcagagtctgagtcatcccctttttgtctccgggagactcgagcaatatctttgcgcagtatggatagctcgaccataattccttcgttcagcgttcccgcggagatcgccggcgcgtgtttctttttgtccaagtgatccctcaaatcaccatgcttcccgttgatctgatttcttagatcaatgggagggtatcttcagttcttccctcctttctctccgggttcctagtgcacagaaatgctctttcggtcctctcgatcttgagggccaagactccctttt

SEQ ID NO: 171780 - DNA, 1055 bp, Cannabis sativa
  modified_base (300)..(303): a, c, t, g, unknown or other
gagacactacttcaaaactggaggctacgagatccagtagataaggaccaatgaactacttcatactcaataatacttctgagatgaaaggggtgagttatgccattactttgcctgtggccctgatggccaacagtgcgagtacttccctcgagtacatggagaagaattaaacctgagcaaccaattcaattctctacacacttgtgatcctgctgaagactactttaagggaagtagttgttgagagttatgccctaaaagaaattaattaatagataatatattagagaatatatnnnntacaattataagataaatgatatattaattataacagtataattattaaatatatgaaaattccttattcatatggagaaggtataatcttgtaaggatgtacaagaaaattaaaattatacgagatgaataaaacaagtcagtggtgtattaaagttttgggaatctttaatatagaactactaagtacggtttactatacaatatacttctagtgtgtgtgattttaaattggatcacatatgtaaatggacatatagtagaggtactatgtataattaaactatgcataattggactgatatgtaataaatatctttcatcaacttgtcgtttaccatgaaaagagtttatcatatcacaatgatgattattagccttaatcctgagtgtacatgaactcttgtttgtgttcattgagttctttgattcactcgttaaagtttctcaaaaaagatgattcttacaacttctattttgggagcttaataacatgagtggctaggaacatgttatataatactaaaatccaagctttcctaacagattgaatattagttcccttatagtgttaattctaggagtgctaatagttagatccaactttataataagttatagattaacagttcacattgaattaatggtcataaggaatcaagagataattagaaggataaaatgttattttgaccaactctaattatgaactaataattagaagataaactacttatattgattatatttac

SEQ ID NO: 171781 - DNA, 584 bp, Cannabis sativa
tttgaatctttggcctggtatgactcgttgagttggtttatgataagttgagaatatgacatgacttcaaggttttggcattcaatgcaatggataggtctagcccagagatgaacgtgtcgtattcagcctcattattggtggtttgaagtcacatctgattgcccgttggataacatctccttgaggggaggtaaggacgattcttgggccactccccttgttattgcttgatccatctactactagcatccatgtcgagtttgtttgctcgtttaagcataataattctttttcttcttgtaatgtccaacacaagaaaagtaagcaataaaatctgccaatacctgtgacttgatggctatcctcggtttatatgttatgtcgtattcactaagctcaacagcccatttggtcatgcgtctaggaagttctgctttgtgtagaattctacggagtgggtatttggttagcaccactataggataacacttgaaatagggcctgagcttgagccctgctgtgacaagtgctaaggccaattttaccaactgagtgtatcttgtttcagcatctagcaatgt

SEQ ID NO: 171782 - DNA, 627 bp, Cannabis sativa
taatgtgttaaacgaaccatggcttcctgatcaacaaaatccatttgtaagttcttctcatccagccctccatcaagctaaagtgaacaatttattggccatggacatggtttcttgggatattgatgtattgaaagatttatttgaggagagggatcaagatttaatcttgcaaattcctttaggcattcaccaggattcggataggctattttggactgttgaggctaatggaatgtattcggtcaagagtgcatatgctcttcaacaaaatctgaaaggcggaggttctgagattgcagcctcggagttttggaaggcgttatggtccctgaagctgcctccaaaaataaaaaacctgatgtggagagccggttctaattgtctcccaacgctttctcagcttgcctctaagcgtgttcccgtcaacacacgctgtcctttatgtgaggagatggacgagacaattgcgcatgttcttcttacctgcagattggttaaaatggtgtgggaaagagtcggcattggcacttctggtattgcagcaggaagtgcgtttttggactggtgtgtgcatgatttcacacagtttgcagccgagaaacaaggcctggctgctgctctttg

SEQ ID NO: 171783 - DNA, 972 bp, Cannabis sativa
gcatgccacttcgggtctttgagggcggccttaacagactttggttcagtgggtattaatgcttctggtagaggatgtttagtagcacagtacacttttggttttcttatgccattttgagaacgagttgtcatggcatgggatcgggtgggatttggtggatgtaagtgaggtagagattgggagtgagcagaagtatgtggtatatcattgttggtgatatggggatttgtatgttgggggacattggtcgtgggattttggatagtagaaggtggaatatgttgagtaatgagaggtgtactgtgaactgatggagttgcagatggactgtgtaaaccagtagtagcattggttgcaagattgttgccattttgactggcagtgacaccaccaggagtagcaggttgtggttcatgagatgtttccctcgaaatatttccaaaagggacattgttattagaatcttgataagtattttgggtgaaaaatgtagcagatggaaaattaggagtagatgaagattgatgtacctgctggttttgttgttgcagatcagaattatggcctgggaaaaatccttcattaaagatgacattacgagctatgtaaattcttccttggttactttcacacaagtagcctttatgataggaagagtatcccaagaacaagcattgttgagatcgcatctcaattttgtgggcattgtaaggtcgtagatgaggaaaacacgcacacccgaatggttttaggatagtatagtcaggttcttgaccaaatagacaatgaaaaggacttatatttcccaagaccggtgtaggaagtctatttattgtgaaagttgcacaagtaaatgcatgccaccagtattttaagtcaagaccagcttgagcaagaagagtaagtccagttttagtcacatgtcgatgctttctctctactctcccattttgagcatgagtatgagga

SEQ ID NO: 171784 - DNA, 1367 bp, Cannabis sativa
agcttttaataaggatatgttccactctctagcctctgtaatgaaataagaaaccagcattgatggtggcccatcataagtaatggggcagaagttagaaatagcagggatccacggatcagttgcagcagagacatggtaaccattcccaatcttatatctaagacctttgatgagtaactcacgaccccaacaaattccttgccaagttagagacggcgaatgaccaagattggcatcccaaaaagaggattgagaaaaatatttgtgctggagcaattttcttagtaaagagtttggcatttcaaaaattcgccaagcttgcttggccaaaagagcttggttaaaatggataaaagatctaaaccccatacctccttcaaatttggacttgcataaaagattccaattcttccaatgaattttgttaccattttgtttgatccccaccaaaagttagccatcatggactctagttggctacaaaatgtttttggaagtttgaaacaactcatagcatatgtaggaatggattgaacaactgctttcaatcgcacttctttgcccccaattgagaataatttttctttccaagcattgatcaacttccatattcgctcctttatgttgctgaacatttcttttttgtccctacctgagtaagcaggtaatcccaaatatcgttcatggcaatcactaataggcatgttcaatgtttaattgaaaaacatttgaatagcttggtcagtgttgggcgagaaagacatgactgatttttgtatgtttagcagttgaccagaagctctgtgataagtccgaagcactatgttaatagctaaagccgaattcttggtagcatgacagaacaaaaggctatcatcagcaaacaagaggtgggagatagatggtgcatgtctagttaggcgcagtccggcaaggttaccaatgtcttcttcatgattcaacaaacgggacaatccttcagaacaaatcaagaataaatatggtgacaatggatcaccttgccttaaacctctccccggtttgacattaccaacaatttctccattcaaggaaaaggaaaaacatgttgatgaaagacatttcatgataagtgaaatccatctgttcgcaaatcccatcttttccatcacagctgctagatatgcccattcaacacgatcaaaagccttactcatgtccaatttgagagcagagtatcctttctttccttgagtcttatgctttaaataatgaactaactcaaaagcaactaagatgttatctgtgattagcctgttagataagaaagcactttgagactctgagatgacaaatggaagtacctctttgaaccgaagaaccaa

SEQ ID NO: 171785 - DNA, 1372 bp, Cannabis sativa
gatcatcagaacccagaaggtgcgggtaaacgtgggctctgaggaacgagatgagacgaacgacaaggaatatgaagaaaactttgaagggtacgatgcttacgatgaaggtagctacactgagttactggtcctaaagcaaaaagcagctgatcatgagtccgaactggccgcccaaaaagaatagaataagaggatgcaagagataatggttgccatgcaaaacgctatggaaacggctggaatacatgtgcaacccaaagccatgcctgcgggactagaggaaacacaagaggaatcctcgccgagcactcagaggcctaaaactagggagccaagccctatacggtatcctttcgaggaaaaccctaggaaaaattgtacttcgatccctgggagaaacaggaaggtacaagatccgcggaaggtctgctctgatttcccaaatgggaaaggtccgtagaggggcacgctccctcgagcgagtcttggccctcaagatcgagaggacagaaagagcgtattcgtgcaccaagaacatggggaaagggggaggaaaatttgggggtatcccccgactgatctaagacaaaaaattaacgagaagcatggtgacttaagaaaccatcttgaaaagaaaaaacacgcatttccagtctttggaggcgccttgaacaaaggaatcctggctgaattaggaatactttgcaaagacattgctagagtctctcggagacagaaaggggatgactccgactctaattgtgaggaccgggaaccatgcgctggacacatattggaagcggagctccccaaaaattttaagatgcctgaaatggcaacttacacaagagattcggaccccagtgaccatctgtcctgatttaatagggtgatgaccgtcatgagggtcagcaatgatgcaaaatgtttatgctttccactaacgttgggcgggtgtgctgaagaatggttcaaaaaattagagccaggattagtggactgctggaacaagttacaagtcagtttccggagacagtttgttgcgataagatagatcaacctcgaggtcagcgccttgactaaaataaaacaactaccttcggaaaccctaaaaaacttcataaaaagattcaaagaggaggccttgaagaccaagaaggtggacgacagacaacacctagcccttcttcaagttagaatcgtacgggaacccctttttggaatgagctgcagcaagagggagcaactagccttcaggactttcagaagagagtccaaaaatacatcaatttggaagaagcccaaatagtggcttacaggggatactacctgaccagggtatcgggatatgtgcctagagctcaacttc

SEQ ID NO: 171786 - DNA, 732 bp, Cannabis sativa
  modified_base (672)..(674): a, c, t, g, unknown or other
ttttaaatgccaaagtagacaactaatatgtacaaaaatatatacatgttatgttcttattagtttacacaattttaattatttcaataataagtaaattattctaaaattgaaagaataattttaaaaaataaataaaataaaatatttttttccttatttccttgttctctttgtagaaaaattttattctgaaattacccttaagtaattcatgagaatcaaacaatagctttaaagattagcggaagtgtactagaattcataaatcgactttagaatggtatgatcttccagttttgcatcataactttccctggagccttaaataatgggaattcaagagtggaaagatataatgcgatgcaaaaatagggatcagtacctgtttattaataactaaaaaatagtaattaatcatttttgactatttccaattttgcccctcatcaaatcaaaaattgtctttatagtatccccatattaaaatcatgacaatcatgcccttaagtcataaactttatactaaaatagaccacttagattttacacatttatatgatgacccaacacacattttatatatacaattgtgatcccaaataaataaatttctaacaagctctcactcggccacatatgtatatatataaatgtgttaaccttattgannncataactttgtcatcataaccgtaggcatgtgcgatctcatcaattaactatatcaat

SEQ ID NO: 171787 - DNA, 1001 bp, Cannabis sativa
ttaaaaaaaattatgaataatttagtgaaaattaaagtttaaaataatcagttacacatcaaataagtatgtgttagaatatatttaggttttttttttttcaattttaagcaaaaaaaaataacaatattacaaaaatacttctagctagcgaaataaacaaatatacatctcaaataaaaaaaaaaattacacaaataccacttacaaacaccttcaacccaggatccatgctttctgggcaactatcgcgcaatcacacaacaacccaatgcaactgccaaaaattcaaccagaatgagaaccaccattactttcggcaacttcacctgagaagacgaccagaattaatcaaaatagggactttttcgaattcataaaaaaaagtgtagaaatactactacgaaactaaaattcaaccgaaaaatctagtttaatttgcataaaactaatgtcctgacttcaattttcaaatccacgaaaggaatatctcaaaaagttgatctggagttcccaaacaatccaactcaagtatattccaaaaaaaatcacataaatactatagtaaaatatttatcctggtgtatttttcgttgttttctaaatttctaatggtacattagttcatgttaaattataaagagacatgtagatagagttacgtatgtggaaacactgttctaatttttaatgtttcacaacagttgcataaatattttactaacaattctttcgtctgattgaaacctccgtctgatgcaactttcggcgaaccacccaacaaccacccagaaactttcgtctgatgcaaccttcgaccaaccacccaacaaccaccctgcaaccatcgtctaattgaaactatcatttgatgcaaccaccacgctaccacgcagcaaccaccctgcaaccttgtgtaagtgatagtataaatgatagtgtacgtggtattttagtaattaaaatcatataaaaggtagggctgagcatctgtcggtttg

SEQ ID NO: 171788 - DNA, 867 bp, Cannabis sativa
  modified_base (129)..(130): a, c, t, g, unknown or other
  modified_base (200)..(204): a, c, t, g, unknown or other
atatatatatataaaaaagtaagtggcacatatgactatattctaaatattttatcccgaaatgatataaattcttaggaaatttcctacttgtatatgcttactaaaggcaacttaaacttagagttnnattagtagtggtggtccaagctaaaataattactcaagattgtttcgtataaatttaagtctttgacttnnnnntttagattccaaataaaaattttaaatttcagttttccagaatacattagacactacagtataactttcacaagttgttaatatctattttctcaatggatctaactgtatgttaatgtatggattatgagttttgtatctacttgaactattctaagaactcttggttgtaactagaccttaagtcatcaaaagaccacaaccacataatatatatctatggcatttacatcttgttcatgtggttttgacaaaatcattctctacaaaaaaaaaaataaataaataatatccacttgaaagtaagatcatttgtattagaacatatggatgtacatttaggggtggatatgagttatcgtcaaattcttaaaacaatcactctatatattaaccttatgcaaaaaaaaaaaaaaaaattgaaatgtttgagaaatttcatgaatttctggcaaatggtaacaataattaaggtaagtgattaaagatcttgcgaactgatggggtggagaaatatttggttatgcagttcaaagatcattaagttgaactttgaagtatatccaaatttacttccccagaattttggattgcatattgatgaaaatgaaaatgaaaggtctatgattagttactagtagttgcccgagtccttctagggaa

SEQ ID NO: 171789 - DNA, 614 bp, Cannabis sativa
  modified_base (85)..(85): a, c, t, g, unknown or other
ttctttcctcctgagagcggtttgccgtatttttctcaccagggtccgtactatgggttttggaagaacgttggtgatttctagnaggtgacctccgttctcctggttgagtcccaagatcttcctcattccctgaggaatttctcgttcataaatttccggttgtctcccatttggccgctcatcttgattttcagggggtgtctcattttccccgggttgttcttcccaggccttttcttatctcctggtttgtgagccacgaggtttgcctcgtggtcttctcactctaggttcaggttgattttgagcattcgtcccctgtgccgctatggccgaggccgcatcgcattctaactctccgtatcgctgctgcgcctcttctagacggcgcctcaagtagcgggtttccgtttcataggttctttctcccacagattgggcacctccacgatttgtgctcttcatccctcgtcccagtgttttgaccattcccacgctgagttctcctcaagcgtgttgtccgtgtattgggaccaaagttgggtcgagttctctgggaacgcgtggttcgcgcacgggggccaccctcaggttgagccctcctggaatgg

SEQ ID NO: 171790 - DNA, 1075 bp, Cannabis sativa
  modified_base (112)..(121): a, c, t, g, unknown or other
  modified_base (1038)..(1049): a, c, t, g, unknown or other
gattctaagactgtgtatgtatgaaactacatagttaagatggcttaaatgtattgcttggtactacctctataaacaaggtgcatcttgcccatcacgaaagaactccacnnnnnnnnnngcttgacctggggtaattttaagatgagtaatctcttgagaagtttttctaaaaactgtgcgagtgaggacaaagtacgttgaaaatacttgtgtttgtttgtttcgcttgaagcggggatattacaagttgacaacttgaagttgcaacaaattggtctgcatacaagttcagtaaaagtccagagaaatagggaccgattctatgcttcttttattccctataattcttatattaaaagattatataaaagtaacaaaaacaaatgatcatcatccttttataataaaatgataaatgttttatattcttaaaccccttataagttttgaattgactcgagttatagactatatttcctaaatttatattcgatttgttataattgacttattatattggaggataagagattcaaattttggaataccgattatgtttatagctataaaatcacatgttattaatcttgcaagaagttatgcctagctcctttctgaattagaatgttaaaaataattaaaaggataatattttactcatcaactctaatcactacaaagaaaaaattacttttagtaataatattttattcatgatataattttttggtaattaaatatgacttttaatcacaacaaatagttatttgtaactaaaatatagtatttggatgcaaattgtcacttataatttagtttttaagtattgtgactaaaaacgtatttagtcataatatattgtgatttttgtgactaatacctttagttatgtttagttatggatagttatggactttttatcacaatataagaataatgatttataattagtcacaattttatcattatacaagtaaaaaaaaaaattatataatgaattatgtagtattagtgtgatagtcagtagtcccgtgnnnnnnnnnnnnaaataccgggtaagctgtgcaatccc

SEQ ID NO: 171791 - DNA, 606 bp, Cannabis sativa
taaagcactcatccttaatttaaataagttcaattatctaaacatccattaagggtttttacaaaaatattaaattttggacaaaaatttacaattttactgtcacaaagaattttataaaaatattattttttttttatataaaataaccctaaaacaacaaaatagaataatttaaaataatagtagaacaattaaaaaaacaatcgtcgaacaactgtacaaatttaacagtacaaattataaaacttacacagtattttttgaaaaaaaaaatacattatttttgaacaaaattccacaacagtaaaaaatgaaaaaattaaaaattttagtatgtagtgtaaaatttccaaacattaaacgtattttgtggagcatagttggcaccaaaattggcccaagcgatttgagagccttaagcgaaaaattaaaattgagttttttattacaaaaaaaattatcaattaatacttcataaattctaaaatagacaagaattttagaatcatatgtattcggacacaagattttatcatgtttttttttgtaagtgcatatttgtccttataaatatttattatgtataccatacattataaaaaa

SEQ ID NO: 171792 - DNA, 1153 bp, Cannabis sativa
ttatgttcttgaaattgcatgcttatgagatttgagttgattatggtgttgtagttatagttgtgtttaaagttagtagatattactttgtgtatggtttagattgtgaaattatgttctattgaagatttagacctaattgagctgttgttattgtttaattgtgtggttgagcaagctttgagttcttgcaagttttagttcaagaactcaaagcttgctcaacaatggcacttttttgttcttggtgcaattattgtgtttgagctgtaaaatatatttaatatgttatatgatgatgctctggaaagtttggtggtgattgaggaagatttgagtaggttatggaggcttaaaagttgagattattttttcgtgttgtttctgcccaagcaaccggaattccgattggtttagggctgttccaaccggaattccggttggactgtatcggggaagaccgaattttgttttggccataacttttgactcaggattctgttttgaacattctttatatcgctagaaagctcatttcgagaaatatatgttaagatgtaaatgtaatgctaattatgtgattattgaaagtgaaatttgggattaactttatttgtgaaatccaaggaatgtgtgactaggattatcgacgcttgctcaggaacacctgaggatttggaatctccacatttgtgggacgtcaggtaagacagtagttagcacgtagaacgttatgcgcggtgacgcttatgttgaatattatatttgggattcattagaactcggaattaggattattaccctaagtgagcagttttttggtctaggattattaccctaataattcttaaggtttaaattatgccatgctatatatattgaaattaagaattatgcgttcaatgcataatttggttggactcggtaattagaacagtgatgaactgttctaaggccttattgtaattagacgtgttagcgtagcacgtaggtctatgccacatagacatatatagacgtgtgagcgtaacacacatgtctatgctaaataaataattagtgtaatggcatgattataatgtatgtgaaatatataattgtgattaatgatatttatactgtcttgctcggcttgactcacgggtgctctact

SEQ ID NO: 171793 - DNA, 802 bp, Cannabis sativa
tcgaagctgaaattgggtttttctaggttttgaacccaagggccgcggcccagctccttgggcaccgcggcccgtcccttgtttttggacagattcgaatgcaattttcgaatactcataactttgtgatcaaaactccattttgagagttctatatatcgttggaatgctcgttccgagctctatgtgaatatatgtgatttgaatgccaattttatattatgtgaaagttgaattaaggattaaccctatacttgtaaatcctagaatttgtgactatgattactggcacttggtcaagagcaccaggggatttagaatctctacgtttgcgggacatcaggtaagatagtagtttgcatgtagagttaagcgtagtggcactcatattgtatattatgattgtgattaggtgagaactaggattagggttattaccctaaaatgagcggctgtatggtctagggttattaccctagtaattaaaagattttgagtgttatgccattcttattatattggaataaagaattatgcgcctaaggcataattaagctggactcggtaaaccagtacctcgagtttaattaaatgtggtctaaggtaagaaagcgatgatgtatggtaatagtgttaatcaagggaagacattagttagggttattaccctcaataggtgttattttgagcatgctgtaatatgttgtaggagagattatttagtatgcaagttagggttattaccctaagattctatatgttatagtatatatcgattgcacgcatttatgttaagagttat

SEQ ID NO: 171794 - DNA, 665 bp, Cannabis sativa
  modified_base (478)..(482): a, c, t, g, unknown or other
tgagtgacctcctaggaagtttttttgaagaagtgtgcgagtggtgaggacaaagcaagctggaaacacccgtgttggtttgtagggtcagtcgtcattctatgaagcaaccaaagtaacgtactcgtgtataagagccatcattttatgggtgtaaggacccaatattaatagagggttgaagcggggacgttacaaatggtatcagaatcttaacccagtcagaagtgtagtcgacgaggatgtcggatccccaaagggaggtgattgtgacatttagagtcctgtgatctgaaggggaaagatcgggagctgtacaatcccacatcgcttggggaaggtcatgtgtgatgattctaagactgtgtaggtatgggactacatagttaagagggcttaaatgtattgcttggtactacctatataaacaaggtgcatcttgtttttcagtaacccatcacgaaagaactccacggtnnnnngtgcttgacctggggtaatttcaatatgagtgatctcctgagaaatttttccaagaactgtgcgagtgatgacaaagtacgctgaatacttgtatttgtttgtttcgcttgaagcggggataatacaagttgacaacttgaagttgcaacaaattggtttgcatacaagttcagtaaaagtcc

SEQ ID NO: 171795 - DNA, 865 bp, Cannabis sativa
aacacagagctatggcacaaaaaattttttttggaatcataaacatagaaaaccataaatccatataaaaaaaacttgagactacaaacatctcccccttcattgaacatgagctgattgctctagttctttgtcagactctccctgggaaagtggcccagacaacaccaagtgagttgcagtggttactagagacgggttagctgtatgaggtagatcctgttgtactagactagagactgtgatagatacagacagctccccctgaacatgtgcgttactcccagacccatatgatgatgcaccaaataaatctatatgaaactcaggcagagaaatatcaattgatggagttaaagaatccccagaatgattttgcagtacagtagacttgatgatgcaaacagttttacacatgggggcctcaaaggcaagctggcgcttttgatccttcttatagcatttgacaaaagatttaaactcagaaaacatttgtacctgccagctagaatctgataaccctttgaacataggagacttgcctttgctcacctttgaagtaaaaggagtggtcgatgagggctacctattaacaactgagagaaaactcttactgagaacgggattttgaacttgatagtcatgcattgttagaggcgggtgatcagccatgagcactcgttgaacaaggcttggatagggtagtttgttacgagtgccagttgtttctgaggcttcgaggatcctttcaaagatgagagatggcagatcaatagaaacatgagttcctacagctattgagaaatgcactcttgacatccatttggaagagtctaatcttcataaaacatgcaatgatgagtaa

SEQ ID NO: 171796 - DNA, 1494 bp, Cannabis sativa
tcatctacggatcaaccaagcttcacagcgtgagtatagtaaaaaatataaaataaataataataaaattaaaaatataatatattcattcatctagctttgggtataggaggtaagtatcatatttttatattatttttctttaaattttttattataaattatgtttttcactcaataaaaaattgtagatcatatataattatatacactatgtaatatgcacacacacatatatatatatatatattagttggatacaattataatatatataactaatctcatacctatatatataaatatatttttttatcaaatatcgaagaaagtttctactacattgtatcaatttgatgatatcttatcatctagatctgacattagaaataagcatcatattttttttgttctaatatatattaatcagatacaaatataatatatataaccaattttatactcttatataaatatgtttttatcaaaaattgaaaagaacttctactattttgtatcaatttaatgatatatattatcatctagatttgatattggaggtaagcatcgtattttttttttttatatattttttttaaaaaatattgcttatttactcataaaagcttgtattaaattgcatgatgtaatatatcattatatatattaacactatttatagctatttttgataatgatacacatagaatttaccttttaaaaaaattataaatacatacttttaaaattttatatttgttatttaacgacacatttgtattttttttttatattgaatatttaactatattattactcaattgtttaaggtggtgatgtatgtctctataatttaaaagacaaagttattacttaatatttatctcttgagaaattcatatataatatattaacagtttagagaatgattaggtatattaatgtgatgcagtaacatatatttttttctttaaagttatttatttagtgattatattttagtattttttttatacaaaaccctaagaggttataatttaatttttaacatcatattattataactttataatcaattatatttttacttgtgtaatattaattattaaattttttaactaatataaatatcgatctatatttatctatatattagaaaaacattaaaaaaaaatgaaaaggcaacttacattaattttattattattattagtgttgacagttataaaaatataatttgatagatatatatttttttattaattaatataaatattaaattttaagagttaaattataattaactgtctttatttattataacagtcactatgattattattataggtttttttctaaaaaattagtagtctatttcagaataaaaaacacaataatttttaatagtaaaaaaaacataaataaaatatttgaatagtttatattaattttgtaacattctaaacttggtatcttaataataataataataat

SEQ ID NO: 171797 - DNA, 1207 bp, Cannabis sativa
gcaaaccaaggggcaggagacaactcagagatatacccagaactctaaggagaagcaacttgaggaaactgaggaaaatctagggacacagcctcagacatggggaacatcagatggaaatcaccaaccctctcttcaggttcatcagaaaggatctcacacaaacccttatagggaaaccaaggtgtatcaaaccttaacaaaaagagcaaggtccgacggcagtcacaacagcggtgacctgcgagagcatctaaacttgaagaagcctgatctttgtcaacgactcggtccaaaacacaacgattcactctatttgcgaatggacgagttggagaataagttcagaaagaaacaagtcatgaaacccagaagacaatcggggtatgattctgttgaagagttcgagttagaagcctcaagatcaaaaagaaaagacgattccgaaaggcttcccaaggatgagaaacagaaagaacacaacaaatatatccccctttatgctgcatataccgagctcaatgaaactcgggaagatatctacctcgcacatgtacaagaagtcgcttttagcgagccaaagcctatgaaacaagcgagacataaaagggacccaactaaacgatgtgaatatcatggggatattggtcataccacagaagagtgtcgtcagatgaaggatgagatagaaggtctcaaagcacgaggaaactttcaacaatatatgaaggggcagggcaatgcccataatcagcttgatctgcccaataactcgagcgaccagggattataaccctcctctgcaggaggaagggacacctcggttatctcgagagggagcgcgtctcaagaagacaaagggcagttaatttggaaaatcaattttgatcataaattgcgatatcaagctgccacgttgaaagctggtcgtcaacaagtaacagtaaaagacaaacaactaaaactacaatttgttcacctcgatctctgagatatgccagggattgaccctggatattgaaacaattatgagaatatgttagggattgaccctgaacatcaaaacccattttatcaaaaccaaatgctcctgggagattgataaaataaataattgaactggggaagttcttatgagattaatgattgtaaatcacattgttgatgtaatattttgaactttagttttgaataaaataatcatttc

SEQ ID NO: 171798 - DNA, 832 bp, Cannabis sativa
tttttttaaaaatatataaaaaaagtgaaaaaaaaatcctaactctgacgatataatttataataatcaataaaaaaaaataattacaaatatataattgagtagagaatataattacaaatattgtataatgagttttcaatcgatttatagatcattcaacattggatagtgagtttttttttttttttaataaatttctcaatatttttagatctattttttataactaatttttttaaataattatgtaattataactcattattttatgtattgaataaacttattggagacaataatttgacgatcgactataagtagaatgcggtaatgatatcgtgtgaaatagaatgatgacaataattttaaataatcgagtcataaaaataatattgattatgagaaagaatacagttcacttaaataattcttagcaaataataataataataataatctaatttttttctatatcaccatacttatttatttttatattaataattaatttttaatagaacaatttaaaattctagatattatttataaatggtataaatattaagcatcttaataactaataatatagcttttcgattctcctattaaaagaattttattatttaatgaacaaattattaattttaatattattatgtatatgatcaatttcttaagttattatttattaattgataaatacttatttgtatgattgtactgtgagattattatgaatcatacattatgaattgaaccaaaaaaaaaaaaaaaacaagtgtgagattatgtagaagaagaaattggtgtgagattatgaatcaaattt

SEQ ID NO: 171799 - DNA, 701 bp, Cannabis sativa
taaatgatacgaaagggaaaatgataatttttaatcaacgcagcctggtgtaggttacaaacagacacaaaattcacaacccaaacaaatgtgtcgattctaggtgttggtcgtcccgttaaaccgacggaaaaaatgacttttatagtagtatctattgatggtaaaatctcatcaactaaatcacaaccagaaaatcaaagcttaaactcaaaactttgaacaaagatgaagacgacaatgaaaatttttgaaagtgttcaaagcaactatgaagaaaaagtattgtttgtatttctgtatgccaagtgttacaataatttttccaagcccctctcaaattaaagaatggggtatttataggctttaacgacttgtaatacacttatggtccccatggaacaagctggcatcctggtgctgcgagctgcaggcgtaggaggtggtcttgtgccttgtatcattgtctagtgtcaggtgacttcaagttgcagaggtggtggccgatgtgtacccttcgtcaggatttcagggcctgcaggcatggtgcctccactactcgtaccctctcttattaacaaaccatgtaggaggcatggtcgtcttactcctttcacatgcatgccttgtccttgagattgtacgcctgctaatttcattcccaacacttaggaaatttttactaagtattggttgcaccg

SEQ ID NO: 171800 - DNA, 608 bp, Cannabis sativa
cgcactaaacagacaatgcgtaaactcaacacgtctaaccctcacgtggcccagcacgctacattacccagtgccgaacaggatccacccatctaggaggagggagatcatgaaggggacgctgaagtccaagagatagaggaatagggaaatgtccgtcctggcagcccttccgaggtagaagaagaggaggaggctgcacctcttaattttggaggatacaacgaggtcggggagccagtagaggcggacgatgatgtcctagttgaaggagtggactacgtcactgaggagcttactgttgcagttcctcaaaggaggcaaagtgccttgggtcccaagtgggtgagccctccatccaaggtcactgaggcacgcttacgggatctcaaccagtgcgactatctgggcgagctggaatggtatgttcctgcctcaaacaaccgagccacaaaccctaatagggggatgtgtgcctggttaggcgctcattccaaacaaggggcactgctgcctttgcccccgtactttaggaaggtggaaacttcttctgtctctgtccgacccaattcactcccaagggcatcaagtatctgtctgccatgttc

SEQ ID NO: 171801 - DNA, 509 bp, Cannabis sativa
cctgccaccataacagatgaaatgaaccagtccctaatctgtcctttcaccaatgatgaagtagtgtctgccctgaaatccatgagcccagataagagtcctggaagtgatggaatgtcagcgatgttctatcaaaattattggaacattgttggaaattcagtcactgaaattgtccatggagttctgaatgaaggtattgatgtgtctcaacttaataagtctataatcactttaattccaaaagttcccaatcctattggtatgactgattatagacctattagtttgtgtaatgtcatctataaggtaatatcccagacaattgttctccgatttcaaaaagtattaccgtttgtcatatcagaaacgcaatctgcctttttatccaacagacttatcactgataacatccttgttgcttttgagcttgttcatcaccttcggcataaaactcaaggaaaagttggatttgctgctctcaaattggacatgagtaaagcttttga

SEQ ID NO: 171802 - DNA, 615 bp, Cannabis sativa
taattatttaaattcaaaattgacatttttaattatcatttttattgtataaattatgagttaagaaaaatgataacatatacaaatattttagatatataattatttttaacttattagagatttttaactttaaagatatattgaaaaatgcatagagattttgagaaaattttcaaatcctaaaattcgtgctccatatatatactatcagtttttattgtttttaacattaaaaaaaatataatatcttaactataaatatctaatttttttaatttggtctattttattagtttaatttattaaattatatggtttagaaaatttatattagaaatatcttaattttgaaatttagatatgatattattttatcttattagttatttaattcattaaaaataagctagagatttgaaagttacttgaatatttattttgaattgagatattttaggatattgttagatttaatatttttaatattatctaactacttaatttaaaattcaaattatgatatttatttttaataatattttatttattaaaaatataaatatctcaatcaactttttttatttgttacatgtttgtttgtttaatttaaat

SEQ ID NO: 171803 - DNA, 651 bp, Cannabis sativa
atatttcgaatcaatcaaccatttgatgatcattgggcatctttcatgggagcaaatggtgaaaattataaatctagcaaccaaattgttacaatataatgatcaaaggactaaatgtgcaaattattattagaaaaagaaaaggaaaaaaaaataagaaagaaagtaagtttattggaaatagctaattagttatagtgggtacacctacttgggccgccacgcaaagagataacgtatgtatgtggttgtgtggtagacttggtcacgataataatgttattgtttatcccttaaaaaaaaagaaaagaaaaagaaataccaccaattattagattttatttgatctgattttaaaatttgtttaacttggtagatggtcaaccacaaattttttttttggtttggggtaacagtagttacgaaagaaggaaaatatattataaaatagacttcttaccgaggcatctttccggtttttgtttttaagtaataaatagagcctttacaaatattaataataattaaaatgagctcatttattctatttttataaatatattatcaaaattttaattgtacattataattttatattacactatatattaatttttttatacttttctttacatcatttaaatattatat

SEQ ID NO: 171804 - DNA, 885 bp, Cannabis sativa
taaaataatttccaacacaaggaacgtctaagactcgcatatatcgagatatatgcgagtattcccaagatcatcctgcgaattgtagagatcgattctttactctgtgagctggtccagatgattcaataacctcgataacctgataaggactcgcacgccttaggttaccgacttgccataagattttcatatcagtgacttgaacaggacgcagacatcttagactcgactagtctcgaatgcatcttaagcctgtgagcttatgcaagaatacgaacagccaactcgcactataaaagtcacatacgttgttgtatttaataaattaagctaaaattgtccttcatttattatgtttacgttttttagtttaattattgtgtaaatcaaaggacacttgctttgtatataaaggagtgatccaacgtgaaatgaaacaagtcaaaaatccttccaacagtagactaagcagaccgtgatctgattgaaccactatactctcttatgctctttatatttccagtttctattcagtattttgtgtccttagtttgaatactcgccactctaggttgagtcctcgcatatattctccttatattattgctatattatttattttggtgttgttaaaattccttcaacaacagttggcgccgtctgtgggaaccgatatactttgttgattttgaaggaaaatcactatggctggaaatcagacaacaagagataacaacaatggatcgatcaatatcgggacgatgaatgttccactcctagggaacaaaatgcctcctgccgacaccatcaatggaggagtggaacgaacaaacattacagctcttaattgttgggttttgtgccctaaataaaacccattac

SEQ ID NO: 171805 - DNA, 953 bp, Cannabis sativa
  modified_base (691)..(701): a, c, t, g, unknown or other
aaaaaaaaaaaaaaaagtgtatgaatccaagttgtatagatagtagaattaaagagagcttcaaaagtagacttaatcttgtacaagaaaagaagttgtctagcatagatagaattgttcttaaaaatgtaaaagagttgtaattttattttttgaggggggattcccttgtaaatgtaattgaatcagtttgattaataaaaattaatttttttaattaaaaaaaattaataaagcaaattaatttaaaagataattattatagaactatgtatctaaataaattggtggcgaaagtacttaagtaattaattttgttatagtttattagtatgaaaatttgatagaaaaatttgtaagtaaaattatttcttaaaaataaatacctatataaaaaataattcaaattaactttaaaataataataataataattcaaattaaaaattaataattttttaattattcgtattattttatttttttaaaaaaaataaatttgtaattaaatattattataatatgtataaagttttaagggaaattacttcatatacttttttttaattttttttttcaaatttacggtttgggtttttaaagtggctgcagtgctagttgcaataggggtttctatacgatttttttgttgcaatttaagttgcagcgctagttacaataggagtttctnnnnnnnnnnncgtaaaaatgcaaaaaaaaattatcttgaagtgcaaaaatgaaaaagccccaagtttaaattgtatataagcagtcatatcgtacgagtatactccttatatcttaatgaccagataatttaaaatcaatgataaaaaaagtttccctagtaatattatgctaagtcttactttaagtttgccctatatatgagaaatttgacaattcatgcttaaaaattgtctataatcttttagtatgccacattaaaa

SEQ ID NO: 171806 - DNA, 1182 bp, Cannabis sativa
gtggtccaatgtgtgagtcctcactcttgcccacaaaactgggtagtctagcaaccacggtgtccccaggataaaacatcctctgtatacgatatattctacaccgaacgatattgttcgattacaccatgaattgttgttgtgaggaaaatcgtatggaagaagaattttttttttttttttgtagttaaaaggatgtgttcttttgttgttttgatacgagttggatcatggcagtgaaaagaagatcattgactgatcgcttttttctaattcatttaacgttaaaaataaataaatatttattaaataatttttcttttaaaaatataagtgacacctcaccctcccggctcgatcagacagtggcgcgcatgtggtggtccaatgtgtgagtcctctgtatacgatatggtctgcatcgaacgatatcgttcgattacaccctaaattattgctctgagaaaaatcgtaagggagaagaaatttttttgtagttaaaaggatgtgttcctccgttgttatgatacgacttatatagttagatcatgacagtgaaaagcggatcattaactgatcgctttttactacttcatttaacattaaaaataattaattaataaataaataaataataaatattaattaaataatttttcttttgaaaaaataagtgacacctcaccctccccgctcggtcagacagcgtgcatgtgtggtccaatgtgtgagccctctgtatacgatatgttttacaccgaacaatatcgttcgattacaccttaaattattgctctgagaaaaatcgtaagggagaagaaagttttttgtagttaaaaggatgtgttcttctgttgttctgatacgacttatatagttggatcatggaaatgaaaagcagatcattgactgatcgctttttactatttcatttaacgttaaaaataattgattaataaataaaaaattaaatatttattaattaatttttcttctaaaaatataagtgacacctcacccttccaactcggtcagacagcgcgcgtgtgtggtccaatgtgtgagtcctctgtatacgatatgtttagcaccaaacgatatcgttcggttacaccctaaattatttctccgagaaaaatcgtaagggagaagaatttttttttttgtagttaaaaggatgtg

SEQ ID NO: 171807 - DNA, 576 bp, Cannabis sativa
ctaattttgtaatttacatagttcctttcttgatcaaactgtccattgtaaaatatgagaaatagaattacgttcctttcctgatattttgaaaatttatttatagtcagtctactattagaaaactgtaaagaaaatgtagtgcaacaattatatctgttgcgaaccaactgacataaaactacaaaacaactaataatttcacatatttaataaaaacaaaaattacaacaatcgtgttttgtctgttcaggtcgcgtatttgacaatttcgagccctatttttataatactatgatattgtagaagcaaaattattattcaatacgtacaacataattgcaactaaaaatattaatgtaaatttgtatctacaaaaaccatttgtcagtattttttttgtcattgttcaataattaattgtaccttaatagtaatatgtgaagaaacaaatgttagacctctgtaaactaaatttatatcaactaatttagtatattaataaaactaaacatgttataaaagtttctttaaagagctttgtattgtatgacaatatgaaacacttgtatatat

SEQ ID NO: 171808 - DNA, 505 bp, Cannabis sativa
tatataacgaataccgacataaaaaaaatattaatttaacatgtgtttttggacacaaaaattaactaagagattataatatataagaagttaagggtagaactttatgtgggttatggtaatggtaatgttactattaatctcaatacatgtgtcttagtttgaatttaaagatataaaatacaatggcacgaaatattaatttattagatcaccatgatttatggaaatagctgtgaaatgatgaatattttcacagttttagaatacgtttcttcttactttaaagtgaagtagggggtatacgtgtgaatatatgtatggtacgaatatagtgtagcattatacgatgaataattaatcagtgctaccaattgtatactaaaatatacataaaaaatacactaaaaaaatgtgtcaaaaaatagacaaagttttgataaaatggctatgttaatgttggctacactactacaaaaacaccctttagaggcgggttttaagc

SEQ ID NO: 171809 - DNA, 581 bp, Cannabis sativa
gacaatatttgaaagtgtagctacaaaactgtccaacttaacttacttggatataagtcactgcagtggaattggagttgaagctattcgggccattggtcatcactgtaagaatcttgaaagattggatatgaactgtcttagatgttattacaatggtcagagttgggctgttagagttggcattccatctgaagtggctttagctatagcctccactatgccaaagctaaagcaccttgagatttcctatatgcaacttggtaatgaagatctgctcaaaatactcaatagctgtgctcaacttcaatatttgaatatttctgagtgtcgttttttgaaagatgttgaaattttgttgaagaatttctctgctttgaaggttgtgcctccatttaacgatgattatgattactacagtgatttcgataaagtgtatggctataatgatttcgaagagtcttatgactacttattccaatagtcctatactttttcatgctcttaaatatatctaatatatatatatatatatatttatatatactagcaaaaaactacgtgcgaggcaagtatattaa

SEQ ID NO: 171810 - DNA, 693 bp, Cannabis sativa
aaacaaagtctataagtaggacgcagttaatgagtaagacgagatctgccagcaattactcccaaccagatctgcgagagcacttgaatcggaagaaacctgatctttgccaacggcttggtctaaagcaagaggattcaatccaattacggataaacgagttggaggacaagtttaggagatatcaagtgggggaaatagggaaattgtctggatatgactctgacgaggagcttgatccgtatcatccagatattatgaataccctttttccttcaggattcaaaaacccgcatgtctcgtcctatgacgaaaccacagatccggtcttgcatttgaataactttaacacaatactgcgagcgagtaacgtgaagaacaatttacgttgtattttgttctccacctcgcttgttagagcagcgagtaactggtttaacaatttcactcgtcattcaataaattcctggcagcagctgtccagcgagtagtgatgtacttaaacgaatatttttaatgtaaaacatgaactcatacaaacactttttatgttaaatttcactaaagtatttgttttacgttaaaagacttcgtttgagtacatcatatgtgttggtgtgaatcatagtgataaatgattgtgtttggtgtgtcatgcaagtgaaattgacctacgtgttgtgtagtttgacg

SEQ ID NO: 171811 - DNA, 1996 bp, Cannabis sativa
  modified_base (1931)..(1938): a, c, t, g, unknown or other
gggcataaaacccaacaaaacctttggaagattacattcaaaagtttaaggctgaggccactatggtcaaaggcctaacagaagaagattgttatacttccgtactgggaggcatccttccattgagttacttctggaaagatatcaggaggatctcaacaaacaatatgcaagagttgctagagcgagctattggcttcataaagttggaggaagcttgtaacaccctactagtctaggcgtgttaacgtgatttttaacttaattgtgcagctcgttgctaatcaacgagtttattgaaaattgtgaataattcaaattttatttatatatttatacataccaaaataacatacatttatgaaaccgggatcctgtttttacaaaatatttacaaaacttttctagtacataagtttttgcctagcgactatacaaaaaacacctagctatcccaaagaccgtacgctccaagtctaaccgccccaacatgtacaatcttcatccgctcactctcacgactgctcaaccttagccttgcccttacctacacatgcaagcaatatctgtgagtcaacaacactgtaagaaaaacataatcataaacataaacatatatctagtgcgcaactaggcgcccatacacctaatcaaaatctactaactgcgtcaggaacattctcgacaaactatgactaaccgcgaatccagcctatactcagtactctagtcgtactgatgtggtagcaattagttcatactatctgtttcctagcatatatctattagcatttctatgcaactctatgtacatctcactgatgccctgatatgccaatctcattgctattgatttccctaacatatatctgttggcatctcggtgaaactctatgtacacctcactgatacactgatatgttactctgacggtaactaacatgtacgttaaacatgtatacataaatgcaacaattatactaattttacctcacttccgaattcaggtgtgccagccaacctgagcggaacaactgcttgacaatttagaggcccctaagtcacattattcgtaaaacttataagtgacacgctaaatcacttttcagggacttaaacacgaaacgaaaagtttccctatcgatgaacaacatggaaataccctaaaaatacaaaaatgaaaaaaaaaaggttccctaaaatgccccaaccggtagactagttccccaaccgaaattttggttctgtggggcttcctggggacaaactgaaattctgattcctatgggcctcactgaactggtcgaccggttcagtgcaggatacactcaaaaccttcttcgcaccttaattcaattccaaaccacacaataacatctagatcacctatatacatcataataaacataatccatgcaataaaacaacctaacatatccaaaatcaaaatccaccattagagagcaaagcttgagttcataaacttaaaccttgctcaatcaccacaacaaccaacaagaacaactaagaccatctcaaataacctcaatatatcatctaaacaaaaaataaaacaactataaaaggaacatgatgctctcatctcatccaacaattgacttttcaccctatcaaatctagttttcattctctaaaactagtagatgagagacaccttctataaagttttcaagcctcctgcattgttcttcatagttgtcctatagtgatagaatgctatgcccacacatagcaagtcaagtactcaatcatagtgggtaagacagtggcaaccaaccaaaaggagagaaagagatctaggctcagatcttgataataacatacgatagaaaggaacaagggttagagatctagcagaaggagtcatattattatcatgcaacaaatgtaagattttctaaactcttatnnnnnnnntttcattgttttagagatattcatatttaggatattaattcaacatacttattagtaa

SEQ ID NO: 171812 - DNA, 666 bp, Cannabis sativa
gttaattttaaaaaagaaaaaagactgagtcacaacatgtgactgaatagtgctctgctagggttttggggattttttagattacttctgttgctatagcggaaagacccaaaggctggaaaaatgggacgaaggcagcgattcaaaaatagaggggattgtcgtcgaagaacggtgagaaagacgaggtccatggcagcgatcttagagatcgatacgatggaattttctgattctgagaaagagaagattaatgaggatgcggtggaacgatactgttcgaactttgatgaatattttaacaaaatatactagtgttctagtgtgtgtgaagtggaaagagtcccacatgggatatgaaccattatttacaagggtatatagagtgcaactttggcattcgtttgatctgagcagggctgggtttggtttgttggtgtggtatgacactttattatttttacagaaaaattatttaagaaaataatttttttatttttttaattgagaaacgtgtttaatttaaactgattacttagtcgtatcagttaatgggacacgttcaaccaactacaccccacgattcagtttacgtgcttcttcccgttatgatttttcaatccattcatctatataatgcaattgaactgatgggaagaatacaac

SEQ ID NO: 171813 - DNA, 606 bp, Cannabis sativa
tcgggccacttccaagtatcaaataaaaaaatagaaaaaacgtgcatcttctttgtcttcataaaaaaaaaaagaaaataggtacatttggggaagaaacaacacatcctgggtgccaaaacaatgacccagtgcccaagtttacacattgggttggcccaacgcccaggttgagacctggggctggcccagtgcccaggtttacattttttcatcatgggccaattctgaggattgtttcccatacgtctttcagacatattctctattttcagcaaagattaagattcaaccttttttggggaccaaaacaaaacttccagatggccttaaactggacccagtgcctaagttgacatattatcaaccttggcaatttccaatcagtttcttgaaaaagtattctgggcatttttcccttcataattaataatagagatacgagcaaactcgagaaggaaaccacaatcacaagggcatgaaagttgaacccagcgcttaggttgacaatcaagctggtacattggtttcaatcattcaaatgataatgctaatgcaagcattctccctagaatggttaagaatggggtaggagacctcgtcctt

SEQ ID NO: 171814 - DNA, 761 bp, Cannabis sativa
aattaatctttatattttgataaagggaaatttaatatttgtactttcattatctaatctgttcctttttttattatgttttacttttgaatgctttaaaaaatggtttttattctcctctctccctattttttttcaaccctttctttctctttttttctcaaattttttttatctttgtatatacatatatttctttgttttttaatacttttacactctctcacaaatattattttaatatttttttagaaaaaaatatacaaacatttattctattttttctctctttttcattttcttattattctcactctaactactttaaactatttttctttaattaatcacattttttgaattaattaattttttttaacctttattaaaatatgattcttttacttttattttttttctcatatttttttaactcttactctctcttacaaaagaattaagagcacgcttcttatatttttttttatctttcgcataattaataaaagtagtattttttttaaaaaatattttgtagtttgtttagagttaatttatgaataatttacatattttaacaagattgatgtcatattaattttctattttttttttaaatcagtaaagagttttattgcaaacagaacactttacacttgaacacaattcaaggcacaactaataaattgtacctaaactatccaaccaatcaatatctatgatactagctctctttttttttttgaaaatgagaaagcctt

SEQ ID NO: 171815 - DNA, 766 bp, Cannabis sativa
attggaatgaatagttgagttaggctttaaggaaatgagtgcataagtgtggtattggtgcttaagttgccggggttgttgattacagggttatttgtaaaaatggaccctctgtattcatctagaccacatggtgagcgtgtagagcctggtgcaaaccagaccaatccaccggcaccgcttgcacctccgtagaattcaggggataatgcgggggttagcaatgataatccgcctattgactggcaacagatgtttcaagaaatgcgaggtatcatactttgtcaagaggaatagtttcatcagttaaggaaatcagtgccacttgcccttgttgagcaagtgttaccaccagcacctgtgcctgtggtaggtaactaggggtttatgttgccgcgtagagactcggtgtttgagtggtttgtgaagctgcaacctccaacttttctgggaggtactgacttaattaaagttgagtagtggatgagtacaatcacccgtatctttgataatatgtgggtcacgagaatagagagagtaaattgtgcaactttcatgttacaagatcatgcacgcatctggtgggatatagtggggcagactcgtgatgttagtgtgatgacttgggaagagttcaagagtttgtttgaggaaaaccttataacatcgctgtgaggacttcacatagggaagactttgtgaaactgactcaggggaatgtggccgaatacactctggaggttgatcggatgtccaaatttgttgg

SEQ ID NO: 171816 - DNA, 733 bp, Cannabis sativa
  modified_base (531)..(534): a, c, t, g, unknown or other
gaatattttaaagtgctagaatattatttaaaaataaaaggaaaaatcatctcaatccaaaataaataaaaataatgtggtatagtctccaaatgaaaagatctccaaagttattttggtcatagaaagatagacgtattctaaaaaggagtttcgggtggctagttgttctctcgtggaaggaagtttcagatggtcgactccaactagcatctttcctattcaggacgtcctttccgcgtacgccttggtcttttgtccaggaagcgtacatctcatccgaaatcacttcttcttgtgctgatgtggagcaactgttacaaggagtttgttaagcttgttatgtcgtaactaacttaacaacttagcatgtgcagctaccagctttaggatccatatcctagatttataagtaccaccaccacttatcattttaaggaggtgattcattagaagagttacgagaggtgatcttgagagagaaagattgagaggtagagagagtatgatacagagagagagagagagagnnnnagagagagagagagagagattgggcttcggttttctatgaagaagattcttgggtaagagtgtgagagtaaacactttaagagaattcaacagagaattgatctcgactgtattgtaccatataaaagattttgtggtgttttacaactagagtggagccatagattacattgatctataggacttgaactagtaaata

SEQ ID NO: 171817 - DNA, 1085 bp, Cannabis sativa
tcgcagaaatgatgggatttatattgtcaacctcagaaagacataggaaaagctccagctcgctgccagggttattgttgctattcaagttcccagcgaaatgccccagcgagatacactttgcagcatatctaaataaacatcagcattgacccattaaaagctgatgaatcacagctgtgtgattttcaaataataaccacatttagttacgtgggacaaacgtaattaaagcccacaattttggggaaatattgttgtgggatttgaatctgattgtaattaactgccaccctatgtcactataaaaagggacaggatgtacagaaaaacgaacgaaaaatctttgagagaaaaaaccctagtttgtatcaaaataatgtaaataaaattgactcgtggactatgcagagttaactgtaaaactacgtaaaaactttgtgttgttcttacattattattttttcttaaattacaattaatttttgtgctaatcctatcacgaaataggcttattatcgttaacgaaaatctgtgttaacaaaaatatatgaaattaataattgtgtagaattttccaaaaaattagttattcatatattctttaaaatatttttaagttgaaaatttgttcattttagatcaacttaaatagggatattttacaaattaagttgattagttcaagatacttaaattttttatttaattaatactgaaaaattgtttaagttgaaaattttgctattttagaacaacttaaattagatattttttcaggtatttattttattatatttgaatatattttcaaaattttataattatttataaatggatttttgaaaattaatttttggaaattaaattaaagttgaaaatgaatttttcaagggattttttctgttttaagctaaaatttctcaaaataaaattttatactactataataaaaaataaacatttataggatttaatgtttactaaaatactatctttaaaatttcttatttacaaaaatacagcaaagacaaaaaaaattgaaaatgatagtgattaggcgggcaagtgaaagacacactcga

SEQ ID NO: 171818 - DNA, 873 bp, Cannabis sativa
  modified_base (824)..(836): a, c, t, g, unknown or other
ttttattatttatttcttcattcattttctttattaattcatatttatattaaattaaattctactaatcaaataaaggagaagtatgatgcggtgatgtagcagtttaaaattactttatttacctttatatattctcttcttaattctctcaaatatatattttttatttggtttaaaattttcttatatctatttctccaatattttttattttattatttttaaaaaataattatttaatgttcaccttaatttatatatataataatacacacataaattatatatagctatatatttattaatcctaatttatctatatatttatataattctcttgctaatcaagatgacatgacaacctaaccatctaggattctaatttttcttttttctaactttttttattttattttatttttgtactctaaaaaattctatttacagatatataattccctggctaatcaagatgacatggcaacctaaccatctaggattctaatttttcttttttctaacttttttgattttattttatttttgtactctgaaaaattctatttacactatgaattagtaatttaccaacttaatgacatgcattagtaaaaagaaattcattaaaactaaaaatcactctttaatttacggacgttcacatgcattagtaactcaaaagactaattcatttaattttttttaaaaaaaaagcatattatttcatataatatcaataatcctaaaatcctaataataataatttctatgtatttattctattctatataaaatgtgcctatataacagaattcttagtnnnnnnnnnnnnnttgggtgactttttttttaaataaaaaaataacaaat

SEQ ID NO: 171819 - DNA, 724 bp, Cannabis sativa
tcttaaaagcaaaggcattaacacggaggaggttttcctttatgcatctttaattattgatactatatggcggacgcgcaatgacaaggtacacaataattttcccattgatattaaaaagtgcattgactctatttgtttatcttttgcagatcaccatgcttattttctcccttgcccttcttcgagtttgaccgatatctggcatcccccaagattagctgaagctgaattgtgacgttagagtggggctggatagcatgtgccctgcggtagttgcaagggatcattttggcaaggtgatctgggtcattacatctaaactggagttttttaatgctctgtgtggggaagcagtgacttgctgtttggctctagagacggctatggctcgcgactcaaaatttattatggttgagagtgattcgagggtagtgatcaacactattaatgggaaggagtcccgttgggagcttgagaactatgtctcattttgtattagatcatctccttcttttgttggctgtactttcaaacatattagtagaaattataattttgcagcccataatgtggctaggtgggcgttctcccacctgagatttggttgtattccgcattcctctatccttgaacaactaatatgtaacgaccatgtggtctagctgattctatttatatatgaatgcttttcttcaaaaaaaaaagtaccttgccaagagag

SEQ ID NO: 171820 - DNA, 1048 bp, Cannabis sativa
aacatcaaacaagaacctggtgaggcctttacaggactattttaagcgttttaatgctgaagtaacaaaagttgagaaggctcccgagtcttcgctagtctgtatgttaataaccggtgtcctgccgagaactaatttttggaaggaactgcaggctcgaagaccagaatcgctggtcgagttctttgccatggcagaaccacataagaggattgagaattccctggcagagttggagaagggcaaagataagcgtaagtcaccagtgccgcgatcacgatcccgcaatccccaagggaagaattccagaggacgaagctcaagaagacgcagtccacggagacagcgaagtccgaaactggccaagtcccctccaaagaaggaatcctcgccgaaaaggaaaggtggaccgcgcttcgtgaactataccgagctcgcagtaccacgagaccatatctacgccatcgaagagaagaatggggtcttcaagaagcctcccccgatcaagggaaaccgtgacaagagagatcctaaaaaattctgtaagtaccataaaaatattggtcacactactttggattgttgggttttgcaggacgagattgaagagctgatcaggagaggaaagttcagcaaatacaaaaagaacgaggaaagtcatccccgggcgaatgacaaataagaaaatcaaagcgtgagtggttcgagaactccttgcaacatcgtgaccatcataggcggaccccatatcgtaggtgactccagaaagtcgcaggagcgatatacaaaagaagccaaagagaagccgctcgccaatgtgaacaacctaagcgagcgaccggagaagttgttcaagagagagtgtgatgacatcgcgttcatggaaagtgatgcgagatgggtccaccacctgcattttgacgcattagtcattattgccaatattggcagagataacgtccaccgtatactcgtggacaatggaagttcagtgaatctcttaaacttccaagcctttaaacagatagggttgcatgagaaggatctg

SEQ ID NO: 171821 - DNA, 543 bp, Cannabis sativa
  modified_base (276)..(285): a, c, t, g, unknown or other
actcatataaagttttttttattttacaaaatgctccaatcaaactctaaaactcatcctaataagaatctactgcgtttcactaataatagtaagatattatagtaaatatttttgttatattaataaaataatataataataaagtttatactttttagtgtaattttaatgttgtggttaaaattgaaaaaaaaaaaaatagggttcttataaaaatattggattttggacaaaaatttataattttactgtcacacggaattttttacaaannnnnnnnnnttttataaaataaccataaaacaataaaacaaaataattaaaacaatagtagaataacttaaaaataattatagaacaaccgtcaaaatttaatacagtacatagtataaaatttacacagtactttttttttaaaaaaaaaaaattaccctacagtaaaaatataaaaaaaaaattgaaaatttcatgtggtgtaaaaattcaaaaaaaaaaatagtgctaaaataatatcttttagttgtaaatttaacatcaaat

SEQ ID NO: 171822 - DNA, 716 bp, Cannabis sativa
cagccgatatacatatcaaaccagtcttccggatctaaaaaccttggcgctctgataccatattgtaacgccctgtccaaggaagtcacgtgtgtgtgtttctataaaattcttatatgaatactatatatatgggtaattaaattttttataattaaagccaagcatattaaaacttctttatagtaaaagataagtaatgagaactacggggaccccctattttcaaaatattacaaactagattatcagtgcttttacaacatgaacattgcaatcttaaaatactatcaaaacggagcatcctgttcactgggccgagccaatgcgggtgatatatacattgctactacgacctcgaactcatggctgctcaacctttgctttccccctacctgcacaaaaagcacatgtgagtcactgagacttagtaagaaaagtgaattaaataataaccacttatatttagcaattcaatctcaaattaaattgcttacacatttactcaatattatacacaattctagtactttataaagtacccctttaccactcgttgatcacgagctgaatatgtcactatcgttgcctgataaagcaaaagataagtaagaaacctaaccgaagtttgacgtgtaattactcgtaacggtattaaccgtttccaaccctaggtcataacctaggctcaacaaatatctaatcaaagtcttgat

SEQ ID NO: 171823 - DNA, 722 bp, Cannabis sativa
ccttttctctttggaatttcttttttaaaaaaatcttcaaaaataatttagtatagaataatttgaagtgtaaatacttggggtttagatttcatgaaaataaacatatcaaactaaattaaattttaatgaccaactagtttatgttttcatggttgtaatgttaatcttcttctatacttggattttatattctctcaaagtttacttcttctaattctaccatctcaaactcaaactcacataacaaacattctattagacggtatttagttgtaaggaatgaaaacatagttagaatataaatgacattctaatactttaaatgaaattaaataatgtaatagaataaaaattgtttcatttttatagtattctattttattacctccaactagctaaacgtcaccttaagtttaactttttgatggtaatattactttcggttaagttttattattcacgtgtcattttttattggtacatataaattaatttttaaataaaaataaaaatttaatgatttgaacactgttatatgaacttaacatttataacaacaatttacttacgaaagttccagaaatataatttaaatattattaccatcaaaaactaaatttaaacatttaattgtaagtgagagttaaacttaaatgtttatataggttctttttttattattatttttacacttcaaaataattttttttttttgtatt

SEQ ID NO: 171824 - DNA, 670 bp, Cannabis sativa
  modified_base (600)..(603): a, c, t, g, unknown or other
aaaaaaaaaaaaagaaaagatattacgagactttatatcagtcaatgtattttcaactgcgtttttactcgggaccccgacctataagactatatgcatataatataataagattaattttagttagcaagttttcaaatacgggcattacaaataggcaatctgacagttgcaccttgacgtctcataaactggtcgaacatgagaaaagacaaaaatttgaaaccaacaaaattagtactaaaattgaaaagaaaaaactaaattagaacaaaattaaaattttaataatattaactaacaatccccaacaacggtgccaaaaacttattctggtattttcaacacgcaagtattacgtatcgttaacaagttatagactaacaaagagtgaggtcgatcccacaaggattgtagttaagtagtttaaaattaaatctttacttctatttggctatataaaatttaagagaaaattaaaattagaaaacaataaaaacagtgaaaataagaagcatgtaattaataagaaacttaacgatgaataaaagttagggctttcgatttaaattgcctctattgattatggtttaacatgannnnttcctattatcaaattctatgcaataacaggtttactaaggtcatttatagtcttctcagatatata

SEQ ID NO: 171825 - DNA, 723 bp, Cannabis sativa
  modified_base (73)..(76): a, c, t, g, unknown or other
  modified_base (194)..(196): a, c, t, g, unknown or other
  modified_base (469)..(472): a, c, t, g, unknown or other
  modified_base (545)..(545): a, c, t, g, unknown or other
ccgagcagatgctccgagtggattttacgtgtcaccattcatgcgattccacgttagagtgcaaaaattgggnnnncatttgccccccaagtctgtacgggacttctgaagttgtgtgtagacttcatctgagctgcttctacctttggatggggacacgtgtcaagcacgaccgtccgagactcgatgtgagnnngactgggcgtcccttcggttttcagctcataaatgctctaacaattaatatttcgaaatacgattttctctctccacggttgacggctgcacttgattattttttcccatattcgcttttaaggggggaaactgaggggatgattacctcttttcatgacttgcctataaatatcaaacagcattggcacataaactcattttcatcacccttctttgctaagtaagcttcagagtgaaaagagaagttcttggcttcaaagttgttgaagtnnnntcatcaaagctgcttgttggattgacgttgcttgaacccaaacatctgactcttgagtaagtttctgatttcntttatgcttatctttgcatgtttaaattttgaatgcaccttcgactttggtgtagaaaatgtctaggaaaacataggtccagaaacttcttcgattcttctttgtcatgtcttcatgcgattttacagtttataatgcttgttttctgaactgcataacgtctgtctttcatcttgct

SEQ ID NO: 171826 - DNA, 578 bp, Cannabis sativa
cgaaaggtggacccgagctaatcagaaactggtttgaataagttaaagctcttgccccacccttaatactgaacatggagaccaaaagaggcagagacatgctcaatcactacgtgagccggtcggtcccagaggtgaatgagtagttggctggggcagataatggcttatcattggagatggttatgggaggagtcttgaaagagctttcacgagtaagtcttttctgacatttttcttttgttcctctttgactagtttggatttctaatgcctttttttttcgcacagactggtttgaagatggcatacgcctattcccgtgctaagtcagctactgctaaaaaccttgccatttccaacacaatgtgaacggaagtggacttggccaaaaaggatgccgaggatgcgcgggttcaacttagggctgtatggatagagctaggagaggttaacaagaaacttctagcggtttaaaccaaagttattgagtttaccaaggaactgtaggagacgcggtcaaccgttcagctcaaagctaatattgcttctttgtctcgggacgttaccagtcttca

SEQ ID NO: 171827 - DNA, 786 bp, Cannabis sativa
gagtgtcaaccgaggtgtggagacaagaaaatgcctcttcgatattgaaatgagaagcttgaggcattggaggtgcttgaggtagagcttcttcttcttctttactctcacttgcggtcaagttaatatcctcctcttggtcttcatcatcactttctaggtcaatttgcattcgttgtcctctttttggtgtgaaaacccatatatcatttagtaaaagtgtaacccacatccttgaaagttttggatcctaaaagatgaaaaaggtagctaagaaggaaaccaaaagggagggtcttgaccatagcgggtttatacacaccaataatgaactttagaatgagatagcctaagttgatgggtgtagtttttgctatgatgaggtccaagagtaattgatccatggactttatctcatcttaatgtccactcctaggtgtaaggttagccacaatgaatttatgaagtattttggcctctaaggtaagttgatgtctctttgctttcatgataatgggaccatcaccacaaagattcctagaatactcatcaaagttaaagattctatcattcttaagagaaagtttaggttcaagcaaaataccaccattgggtgatcctagcaaagtattgagggaatcaacattaaggtcaaaagttactcctctaagtgtccctttaacctctaaaagtgcaaaacaaggttgaatgcaagtataaaaaccttgtacaagtctaggatataatggtgtgttaatgttaataaaggaggtccaacctagaact

SEQ ID NO: 171828 - DNA, 600 bp, Cannabis sativa
atattatggattattgaataattatggttaattaaaatattgagttattaattatgatttgaatgtttgtggagatttatttaaattcagaatgtattaattatgctatatgtgaaattctcattttcgatgaatgtgttcggtggtagtgttaagcgacattgggctagtagagagtcacgtttcgtatagtatataattattttaatagcagggtattattgttgaatattgaaggtgtcgagttttattggatttgtaatgaccaaactacccttggattttgttttaaccttagatttaggttaaagggtaaaaaggtcctttcctagaggtctctttttgtcatttagtaaccatttagatgttgtttattaagaaaaggggttagtaaatatttaaattagaaatagctagtaagttagggatttatctaaaagtcaccttcttcctcaccacactatctctctccctctctcgaattgtcaagaatcaacaccaagctgggatttttctcagttcaaaccagtgggtattagcaaagttggtgcttaactttaaggtatggaaccctagtttcttcctatgatatattttttt

SEQ ID NO: 171829 - DNA, 660 bp, Cannabis sativa
tggtaggaagtgctaaccgttaagttccccgaggaatgaggactccaaataagagtgtcatcttgggatgggtctatagggataatgagaatggtattaacaatatcttccgtgaagtaagtatgaagtttttgaatatcccaacatcctaactcatttatgaaaaaagacacagtggaatcagggggaggagtattagttttaaaattaattgttttgaatcctggaacccaataatggtggaggatagaaaccgatttaccattaccaattttccaaatgagcccctgagagagtaagtcccgaccccataaaatactactccaagaataggaaggtgtgtgacccttagtggctgaaaggaagtcattatgtttaaaatacttggctttgagaagtctagaaaccagggaattaggattcttaaaaatacgccaagcttgttttccaagaaaggcttgattatgaagaacaaagttacgaaagcctaaacctccatgaaacttggaaacacaaagggaagtccaacttttctagtgtgtcttagccttattaccagtagacccccaccaaaattgagcaataagtttatcaagggtcttacaaatggaaagagggagtcgaaaacatgacatgacatatgaaggaattgcttggata

SEQ ID NO: 171830 - DNA, 590 bp, Cannabis sativa
cattggttcaaaaatttcctccaaaaaaaaatataaactatatataatatataatacccttttcttgttattgttcaatttaataaattataagtaatttgggataatacttggggataagttgaaaactacccattatttattacacattaattaaatataactctaaaataattttaattaataaataccctcttttataatcaaagtaccaaatataacctcacaaaacttattaaaattagacttcttaatgcacataatgagaatataacttataaaagtgggtataaattaaagaggaagatttgtggttgtgaagctatgaacctcaggacatacaactctgattattgttgatgactgtgaatctttgagagagagtgtatagctccaacgaaggagatggctaggaagttatagggagatttgtttttttgctgaaagtttcaggcagagaaatgttaattcatatagggaaatttttaatgcttaaaaaaatactttctaacaaaatttagactcctaattaatttatacaatttaatgctattgttttcaatttttacccaaaataccctccctttcat

SEQ ID NO: 171831 - DNA, 692 bp, Cannabis sativa
agcgggtgtttgtacaagattacagtttttttttcttgttcaattcattaagatatcttttttgagaatttcttgggctttcaacgatatgcagacctccagatatagttttcacatgaccatctaatgcgggcagagcaactctaggtggatacggattccttggtgtaggagaattaataggtcttgccactgggacattttgtaccccctaagggccttcatagctggtgcatgcattctgggagcttgaggaagtcttactccctgaggaggatttacggctccttactatttaggaatgaaaagctattcatgtgctactccttgtccaggataaataactagtatccacacccaattggatagatgaccatttcaaactaatcattcgatttttaccttcaaatagtcacactcatttgtagtgtgttcaatattgtcgtggtattcacactttttgttttggtcccttttatgtcttccacctttgtacattggcagaggctttttgtaatgaaccatattgcaaatagcatatttcaagtagctctccaaacattctctcgagtaacaaccagggtggtatacttggagtatcttgattcttgactcttccccttttttgaggcttcattttgactcaaagccttagaactttatttgttccatgaatgacttacatttgattt

SEQ ID NO: 171832 - DNA, 721 bp, Cannabis sativa
ttaattttttcttttatagttatgtaagttgtagctagttaagatattttgtaagattttgagaaattctaaaaaatttaacacgctgaaaatagagttcaaacagtctgttgcacgcgtaactcttttattttatacgtgtgtgaaataaattgtatgaacattaccttttatattgtaaattatttagaatatctaaaaaaaattataagaatcaaatgtaacgtacacggtcataaaaaaaattatactaaaattttatattgtttgaatttactatttattatttaatttattttaatttattattagagacataaaataacaataattaattttttttattattagttatttgaaaaaaaaaattatttcataaataataaataatttagtattaaaaaataactaatctaatccgcaccgttgtaaattagattagatttgagctattgtgcgaattagattggatccaaaatatgaaatttgcacttaagtgacatttagttggaggtaataaaatgaaatgggatggaaaggaaataattttcattctatttctttgttttgttgtatatttaaatattgaaatgtcattataatgaaatgacatttgtactatttattttagtggaatgactattctatgaaaaaaaaaattaataatttttttatttatttttaagtattttaaattttattctattcttattctcattct

SEQ ID NO: 171833 - DNA, 555 bp, Cannabis sativa
  modified_base (518)..(525): a, c, t, g, unknown or other
tctttcagtggcttgcgaatttactggttcccatagtttctcgatctttagctcattgagtacgttctcctctttgagttgatcgactatgggttctagatcacctcaaagtcacacttgcttcttcacgctcttttccttcctcccaagagcggtttgtcgtatttcccccatcagggtatgtacgagtcctcgctctatgggtttgggaagaacgttcgtgatttcttacaggtgatctccgttctcccggttgagtcccaagatcctcctcattttcatgagggatttctcgttcatccttttccggttgcctcccatctagctgttcgtcctgattttaaaagggtgtctcattttccctgggttgttcttccaaagccttttcttgtctcctggttcgtgatccacgaggtttgccccgtggtcttctcactctaggtttaggttgattttgagcattcgtcccctatgccgcccttgccgaggctgcctcactgtaaagcccgcttagttannnnnnnnattagcagttgtttatgtttaattatgaaa

SEQ ID NO: 171834 - DNA, 615 bp, Cannabis sativa
gttataataggttattttatttctttttcattcatattgtcattccctctcccctctttatcttcttcttcgttttttcactttttttttattttttgtttcattttttcttcttcctctttattttttttcctcttatttttttagtaaattaaaaatagataagaaatatttcaaagaaaacccccgtagccctacatcttttatagcttcgaacccaaaagaaaatcagttgttcattctctggaaaagaaaaatcaaaacgtttgtaactgatcattgaagattcagactctcatttcaaacttgatgagaagattttaaaatactcaaagtgtgaaaggtatttatgttatttttcagttattttagagtttttttctttttttgttgtagatgttctgagttttttttctctgatctattttgctcattttaaattatttgttattgttatgtattttgtattttttgtttcttattgtatgaatatatttttagtgttttttaacagtttggcgggttcttttgagtcagttttttttttcttaaaaaaaaaaatagccgaatacacgttactccaaactcattacttactgatcttctcatctccat

SEQ ID NO: 171835 - DNA, 686 bp, Cannabis sativa
atataaagtttgcttgaataaacaaagttttctacctgtgttattactactagtggagtggtggaggtaaacgtggggccaactagaaatatgggtggtctctcctctaagaaattttctttgttttgttataaattgtgaaggtggtggtgctgattttactgtgatttatagtattattgtatgtgtaatgaaagctatatataattgtaatagtgactatatatagtgagctatgtatataatatcctttcttatcaaaatatataagattctttattagctttattcctttaactgactgaacaatattccttacgttcttttcagctttgatggtcttttaattactcgttcacatttgcttttatcttgttgttgataagtattcatccaatttcacatttgctttcacattgtatcaatcttcatggaattctattttacactatcaatattaattaattatgtttatggttttgttatatgtctgttgactgaatttttagtcaactaacgcggagtcgtaataaatgagatttaaactaaaatcgtagtaataaatacaattaataacactaaattttgcaataaatgtaaagaaaagacaccgaaatttaaagaggttcggcctcggatgtcggtaatagcctactcgccttgtattttattaatctgagttgcaa

SEQ ID NO: 171836 - DNA, 748 bp, Cannabis sativa
cctaggaggaacaaccctagatgtgcgaccattgacagccccttagggcagtggtcgcatatggcattgtccctgccatgtggcgctatatttcgttcttgtcaattggtcaaagtcttttttgttgaccttcatgtgtattcttagagcatctcgaacggtaaaactttagaggatgcttggtgagatggacatattatgtgacaaaatattgagatgctatactattggtgagaagaggatgtgattctagaaatttacatagatgctatgttgtggcattgatgctattcatttcttaataaaaaattaaaactaaaaagttattgcagctaaaaattaggatatatattaaataataatgtgtgagatcaatatatagcatttttaaagagtgctatacattggagtgtttttaagagtaagaatgtcaaaaatgatgtggaagagaaataaaataaaatgttatatttttagatgatgtgtaaatttttagcattcttaatggatgctaccattggagatgctcttatcttgtggccttttatgggtcatgagagatgatgaatatttattattacgtataagaataacaatataaataattaataatgattgtctttttcaggaataataaatcattgttaaaataatttgatataaatatttttttttttaaactaaaataattcattaaacagcaatattcgctaacacaatagactgaagagcatgtggaacattgctc

SEQ ID NO: 171837 - DNA, 855 bp, Cannabis sativa
cttttaacacatgtaatgttctatgtgtaaaatttgcaaattttgttcgaataaaagtaaacactaacatttgcagatgaaagtcgaagcatactattagaatggcctaagcgcttccagattatatgtggaattgctaaggggcttctctatcttcatcatgattcaagattgagaattgtacatcgagatctcaaagctagtaatgtgttacttgacgatgacatgaatcccaaaatttcggactttggcttggctagaacttttggtggagaccaaatagaaggaaacacacatagagtagtaggaacctagtaagtcatcttcaaaaactcctttttttgggatgaatttaaggtaagaccttcttatattttaatttttatacacttaactcccttatctttttttagtagcgaaaccctcttaagtttattttctttgcaaatttaaggtgtcagttagatattaccgttaaatatcaactgaattactactgcatcaacttcgaggttttattgttacatatacacaaatgtatacagtggtcattcagttgatatttaacagtaatatttaactggagtgttaaatttgcaaagaaaaataaacttacgggagttttgccacgaaaaaaaaagaataagagggttaagtgtataaaaattaaaatataaggaaatttggccgcaaattgttctttttttttctaatgtatgtttattgtgtactaataattattatgatgtagtggttatatggcgccagaatatgcttctgatggcatattctcaataaagtccgatgtattcagttttggcatattgatcttagaaattgtaagtgggagaaaaa

SEQ ID NO: 171838 - DNA, 622 bp, Cannabis sativa
tcaatctccacctaaagtagtagaacattgttattgtacatcagtggtgcctagtatttctagacatatgtcgttttgcgattgactaacgatattctctaaaagttattacattaaactatataaaactcgatatttaattagaccaatagcaatattgacatataaaaaagtactaagcaccactgatatttttagcatttctcaaagtattattaagtttgacatgaatataaagagttttttttcatatgagaaatgttaaagtgtactagtggtacctaacaccctcctatgtgttaatatcgctatcaatttaattaagtatttggtcctatataatttaatataataactgttttatggagtattgcatgccaattacaatgcaatatgtcgagaaggtactagacaccactcgtacttaatagcaatgctcttttcatatttaagatggagatgtaaggtttactggttggtgagatataggttctaagtaattattaaattaactttgtaacttaaacctaattaatcctacctattattattcaatgcacatgtaattgtttgtactagacctagctagggtcggttgaagactaatatcacttagtaaaga

SEQ ID NO: 171839 - DNA, 589 bp, Cannabis sativa
aatggtatttacccataaaaatatggcacttacaaataaaattcagtcatttcattgcaaagagaaataaaaattagttatttattttatcgaagaaaaaaataaaaaataaattaataactttcagtagaattatcgtgtaaaagttatttatttaaattttaaaaattaagactatatatgacattgttagaatttttattagtaaaaaaaattaaataattattatttgcacaagagtaattagtatttttgtctcttgaattttcgacaactacctgatcttgtcctctaaaaaataggacttgttaaaaattcatcttaaaatataacaggtacataattatgtcatttatgttatattttgtttcttttaccgttaaaagttagcatttttaccctatgaattttgaccaatacaaaattttttccccttttattaaaaaaataatttaaaaatttataatattctattaattctgagaaaattaataaaaattattaaaaaacctaataaaaatattaaattaattaaaaatttaagtttacataaaaaccttaagttatttcaaactttattttatttaca

SEQ ID NO: 171840 - DNA, 504 bp, Cannabis sativa
ccttacatcagcattgttagtatcatatctttgatacactttagacctattatagatctgtgactaatcaaacaatactcacccataaatcacatgaacacaaccagtaattgaccacaaaccaaccatgcaacaaaaaattcctcaaaaccttttaacttaaaatagaccaagttcaacaaaaggcagctgaagaagataaattgtcaaagaacacaacaagcctcaaatgtgtcccaagtcataaaatcactgaaaaactcttttgcaaatccactcaaaactaacctaaactcatccatattggaaatgaaaattacccatactcaaaaaatttccaaaagaactcaaaccaaacccaaacccaaacccaaaaccaaaaccaaaacccacccaccacccaaaatcaaaactttttctaaaaaaattaaaaatcctaattaaaaaccaaaacccaaatcagaaaaatcagatttttctttcaaggtttctgttggaaaattg

SEQ ID NO: 171841 - DNA, 634 bp, Cannabis sativa
gcggttaataagttaagtcaattcttaaggagtccaaccaccatgcactggagtgcagtgaagagagtcttgcgatatctaaagggcactatctatcatggaattcatattaagtatagtgaaaaattatctctggttggatactgtgatgcagactgggcgtgttgcccagatgataggaagtctatagccggctattgtgtgtattttggagactcccttgttgcttggtcatcgaagaaacaatccatggtagcacggtccagtacagaatctgagtataggtctcttgctcaactcactgctgaagttacttggatcgaatctcttcttaaagagatacatttcaaccttcccgcaacaccaattatctggtgtgataacatgagtgctaaggccttagcttccaatcctgtctatcacgcccgaacgaaacatatagaacttgacattcatttcataagagacaaggttctacaaaagaaaattgagatcagatacattcccagccaagagcagattgcagattgcttcaccaaaggcctcactcatcctaaatttcagtacttcgtggacaaacttggtgtgacaagttcccccctgcgtttgaggggtggtgtcaagacagattagt

SEQ ID NO: 171842 - DNA, 509 bp, Cannabis sativa
aggtggtattgtttgatattgaaaagtataaactaatctagaatatatgttattgtaattattattggtgatggaatgtgaacatggttcaagatacacttagtcatcgatatacttgattaatattatttttgactctgtatcgtcaaaatgttagtctatgaaagtgtagtgtttgtaaaacatgtcgtttgaaggatttgatgatataggagtttacatgcgtttcaccccgactatgattgagggtggtaaattggtggcgttgcattagatagggggcatgctcgggtgcagcataattgtcaccccgcagatcccgccttcgacggggactaggatgcccttaacctcaacattcttggcccatccttggccgagccgtctgcacacgttcatagtcgaaacagacctcagatttgtggtcttcgactcgcctgtacggtccagttggacagggacagcgcggggtggactgctcggagaaggaggcagtgcggggtcggttg

SEQ ID NO: 171843 - DNA, 629 bp, Cannabis sativa
ttcgccaattctttcatgaatactgaccctaaacctttctactataccaatgtggattactcagattttctctctagtgagtcttttttcctttcctgttctgtttggttgctaagaaaacatgggaaaatcaatacgattttattactatttcttttgtactaatacgaatttgaattatatatacattaacatcttagtttttataaacccttttcttttctttttcttttttttttttttaaattattgttttgtgttgatgtataaattataaacaaatcatatattggggagctgattatggcataacaacagctttggttgatagtttccagccttagatgcatttcttattttgtagagcattgtgagccttgtccaaagtaatggacaatgttatcaaggcaagttgaagtgtgataatggctatagaagtgtgactgttggatttatgattcaagccatattggctggaatcaggagaaggtgtggaagatgattgggcttgtacagttcgaggtacccttaagtaagttttccatgaaaggaggctaaaacaggttaggggtggttctgttgataggaagaagaagaagaatggcagaagaagaggaagaagggttagg

SEQ ID NO: 171844 - DNA, 512 bp, Cannabis sativa
aattaaacctccaatggttatatcttcaaaatactaaactaatcagatcagttgatatatatactataataaatgtattttttttttttcaatactaattggaattattgatagttattgtattataaaaacataaaccaattaatatacacacactataataaacgtatattcgatcaagaactaataattatatattagttacatgtttttcatcgtattaataatcgatgatgatgatgaatctatgtaaggttgaatacatttgtaaatttcttagcagaccaattgtgcataaacagattaatgaaaacatatttatagaaaaatataagaacatatacctaaatactgatactgatagatgagaaagtaaagagaacctgcggacttttttacattatctcatttagaagctttgatatatcatttttcaaagttccaatctaccaatagaaaacatttgcaagatttagaaataaatattactaacaacacccaatcaaaagaga

SEQ ID NO: 171845 - DNA, 697 bp, Cannabis sativa
ccagccactacaatcaacttaattcaacctaagacaacatgaataacatcgagaaaccaaactcaaacacaaacaaaagtcacagcagcaaaaacaccattttaccattaaaattcaaagttttgagtttaaagctttacacatgtttaaaaccaactaactaacaaaaaaaccaacttgaatccactcaattaatcatatctaaacttcagaaaacagcaacaaacacagcagctacaatcatcaaaatccccaagcatgcaaccattttcttcgttaaattacaagaaactaaagagaaggtgcaagagctaaacctagagcttgaatttccctcaaaatctacttgaatccacaaagaaaatatcaaacccttgctgctcaaaggaggccgaaagagagagtcctagagagaaaatgaaattttgctttttcttaattttttccaattttgtaaaatgagtgataaaatgaattttaatacttacttcagccaaatataacataacataaatccaataatcaccaaatgctaagtccactaaaggacaaaagcttatggggtaaaatgacaattttgccaatcccatactaaaaggattaaaaagcactaaagggtattttgggaaaactctaaattcccgactaatctcgacattcccaatgtctaaccatacagccccgctatactaaaata

SEQ ID NO: 171846 - DNA, 748 bp, Cannabis sativa
tttattattatttaacatttttatgaaatttatttttccacatatgagaaacagaaaaaaaatcaacaagaacaaagaagattattttattatgctcagttactgaagctatgatacaatatgcgttaatataaggcaggcagcaagaagaagaccatggttagttaaataaactaaccatagttctaacaacctgactaaggtatcccatctaacttaactaaagaaaactaacttaactaaagttaagtctaatagccccgttcaagatggaatgtaaatgttaataacacccatcttagatacaatattagaaaagtgagtgggaagcaaggctttagtaaatatgttagctaagttgtgttgagagggaacatggagaagcttgagggaatcttgttggaccttctcccgaataaagtgtcaattgatctcgacatgttttgtccgatcgtggtagacgggattctcgctgatatgaattgtagcggtgttgtcataatataagactgctggtgttgtgtgaggaatgccaaagtctttgaggataacagggatttatgttaattcggaggttgcattggccatggcatgatattcagcttatgtagaagaacgataaataacttgctatttttttttatttccatgagacaagggaactgccgaggaataaaaaatagggagatatggagtgtcgtgtgtcttgacagccaccctagtctacatcagaaaaaaaaaaaaaaaa

SEQ ID NO: 171847 - DNA, 1238 bp, Cannabis sativa
tttttttcaagcattattgggagtttgttggtgacatgggcagatgtacgttatacaatattggcgccatggcccccttaaaatatatatgcttagatttatatatgtaaattgagctcttttttttttgggtaattattgtatggaattcctttgaaaaagtcaaactacaatttataaatattaacttctttctgtctatatgtatttactttatttatttattttatataaaaaatttatttgtttctttttttttttctttgaagcatttatttcttttttaataatattgatttgctaagcaagacatatcattttttatttatttcttctttaataatatatattaatttgcttagcaagacataccatttttttaggtacaactttaaattgtttaattgtatataaagtggtaactcttataactacacttttataactactacaaaatgatctttttcagttatgaatatagtaaaaactacacttcgcaacaagatgaaaaataaatatttaagtagttgttcgctagtattatatattaaaaaagaaaaattatcaaaaaaaaatttagtatagattcacttatggataacttttatgatatgtaaaaagaggctctgcattttaatttaaattataaagttaataaagtatttttaaaacatttatcacctaaatttagaaaatagtttggccccccttaacttcatattctggctccgccccaggttggtgatcatttttgtgaagcagttttcgatttctttgtgaatggcaatatgcataaggtcataaacgctacaaatattgttctcattccaaaaatccagaacctgaagagaccgaatcactttaggcctatatccctttgttacgtgttgtataaggttatatccaaaattgtggccaataggattaaacctattttacccagcctcatttgtcctactcaagctgcttttgtcccgagtacaaatattcaggataacaatgtcattgtacaagaaatcatccactcgtttaacaggaaacgaggcaaagaggggttttgtgcaataaaaattgatcttgttaaagcctatgatagattaagctggagatttattgatcatgttctctcgagttatggttttcctcagaccttctgcagttgggtgtctcagtgtataactatcattactctcaatatatgtcttaatgggggtcaggttggcaagattattccttcc

SEQ ID NO: 171848 - DNA, 580 bp, Cannabis sativa
ttttatacattagattcttttaatgggcttctatggtaattcaaaccagactttaaggaaggattctcggaagcttttgagacttataaaggtctattgtgggagtgtgtttttacaccagggatgtcaatgaaattatggaaaataatgaaaagagagggggcaaagatcgtggttgggcgactatggagaggttcagaagttgtgttgattattgtggtcttatagatttctgtaaggtaaaacaagagttgacatggagtagtaattatgagaaacggactgtaatggattttagactataatataatatgaatgataaactatatataaacgatatgtaatgcggaattaactgtaaatatatcgaaactgtatatgcaatgaaaggatcgaaatacctctagcaattgatgtttgagcttcaatccctacgatatcttcggtattagaggtcggtctcttaactctctttagatggaatttcattgttttgaacagaatgagtgaagagctcagggaccgagaccctatatttataggtgagatactccatcaatatctgcgccacattaattgt

SEQ ID NO: 171849 - DNA, 544 bp, Cannabis sativa
tacacctaataaaataaatgtgaagaaataatataaaaaatttagtgaacaatatattctttatttattgtattcctattaataaattttatttggataaaactttaaattcgacaccaaaaatttatttgttgtactcgtattgaatttaaaaaatgttaaaatttgtaaattttgtagtttattagtaatatttaggtaatttaaaattttatttgaactcaaaaattttctaacatgatccattaatttctttagttgataattttgatatacactatataaaaaattatattgttattacaatttattatttgatatatttaaatgatgttgtacttgaccaatgtaaaattatttttttctcaaaatttaaaattttattattatcacattatatattattggcttttaaattatattgatgataatgatttttacttatttgatagttgcatgagaaaggtaacatgttatagggtaaatactatttttaactttatgttatacaaaagttatcgattaaactatttgttttgttaaa

SEQ ID NO: 171850 - DNA, 828 bp, Cannabis sativa
  modified_base (714)..(725): a, c, t, g, unknown or other
  modified_base (774)..(781): a, c, t, g, unknown or other
atttttggcctcaaatcaagtctctaggattgctgaacttgaaaatatttttatatcacaatacattctaaataaatctccaaaataaataaattatacttatttatccacttatagcaaaatttataatttatgctaaattaagttagcaggatcataatcctactcattactacctaattaatctgtaatatataataaaccctaattattcataattaagtttatgggatattacaactttgatagttgttattgtaagaaaattctatcaaaggtaagtatttactccatgaaccttcaaagtctatgacacatgctcataataagtcttctaatctttttattgttcaatctgactacgcgtcagtttgaggatgaaaggttgtaatgaacttcagcttcgtacccaaaactatctaaagacttacccagaatttcaatgtaaactttgaatccctatctaaaacaatggattttggagttccatggagatgaactatctccttcacatacaactctgcatattgatccacggtatagtttcttttactggcaaaaaatgtggtgactttgtgaaacgatgcactataaaccatactgagtcatacattcccgtggttctaggtaacccaacaacaaattctattgtaatgtcttcccacttccactcagggagtgttaatgattgtaataactgttgggttttatgcnnnnnnnnnnnntcatttcatataatcagatttacccattaataaagatcagaaataacannnnnnnntgcatggttcacatgatttttttcatgattatatgtgtatataatgt

SEQ ID NO: 171851 - DNA, 675 bp, Cannabis sativa
attcttttattttggctatgttgttattgaaactcgagctgtcgaaattctacgttttctaatttttttcgtattttagtgacattttgcgatacatttttagcgacataagagcatattgaatgtttgggatgatttttaatgatatttagcgacaagtttcacgatatttagcgagattagggcatactgaacgggagggatgacttttaacgatatttggcgacaagttgcgactaaatttacaacacgatcattttatgctttctaactacgatagtcatgatgtctatcgacattgttcgcgatgtttgtcgattgtgttaaacttatgcattggtgaattaggaaatgatatttatgttgcaatatatagcgacgagcttatcgacacatattatgataacttgcgatgtcacttttgatatttctcgatatatttttgttaactaatgttgtagcaaccgcaatatttaaatatagattagtaagattataagtgctaattttattattaatatcattaatattggaatttttatgtgaatgattatgttaaatgtaaaatatgttatctctgtgattttagcttggcgacgatggaaaatgcaacggaggatattttagtcacttgaggaaatatagaatttggtaatgttagaaaatatgtcatgt

SEQ ID NO: 171852 - DNA, 799 bp, Cannabis sativa
  modified_base (243)..(243): a, c, t, g, unknown or other
tatttctaagtgaacaaataatttggttaaccatgaaaataaattaatcaatccgaaatgattcctcagtatactttactatctcaccatcaccaatattttcattacattattttttctacgaatcacacgtttttcaaaaaaattaggctcaattctcatctcatttgaaatttctttagttgtaattatagctaaaacaaatcctctttcttataattttttaaagagtaatttgcggcntaaatacctaagtttatcattcggttgcaatttaatacctaaattaaaattttagcggcataaataccttccgttacactttcagacattttgtaggtacctgctgttatcttacacactagacaccagctggcatgccacatcatttaaaataatgccacatcatcttataaaattgccacctaatattaactattaaaataaaaaatgtaatttgattaaaaaaaaatgtacataaaattaatttattaaatttatgtaatataatctgatattaaataataataaacattaatcaaatgttacattaaaaaacatatattcttcaaagttttaaactgttccaaataaaaaaaaataaaacaaacaaaccctaaaactgtggaagcataatcggggagagagaaaaaggtggggctggacgataaacttcgacctcgaccaaaggttctcgcgacaccttcttctccgaccacgggaggagccatcaacgtcggggagagagaaagtgttgggcgatagcttcttttctgaccacggcaaccaccaacgtcgg

SEQ ID NO: 171853 - DNA, 1070 bp, Cannabis sativa
agtttttcaggttcgatgaacaaccctaaaccaatgtgcctacatttggtggtaattatttgtttgataatcataagatactattctatattgttattcttattattttcaatgaagttctacaaaaatgatgtaaatgtattttttagtcaatttcattaaattaaactctaataataatatataatgtagtttaaatttgacatacgctaaaagttgtgctaaataaactaaatttcataccataataaatattattttttatttattttttttaccattcattaatgctcttaataattttttacattttatttagggcaagttttaattatacagttgtcactaaaaaattattcataaatacagtaattttgtttggagtcatactgttatacctgattttcgcaaaaaaataaaaataaaatgactacttttgcataagggcccacatgctaaaagtaccttaaagatactcaagtcaaccttgcgactttgaccaagacttataaatgtcaaatgagttaagaaatctatcttaagggcccaatgacacttctagaggacacaaaaatattaaccaaccatttggtgccagaacccacgcatccaagtgtgcccaaacaagagttcatgggctcacgcaagcattttcaccctacagacctcaattcgccaaggaaaccaacaaggacttgactcatttaggcataaaaaggcttagatttgtgcataaactcaaaatggcataaaacccccatggaaaaattattcaaatgtgttccaagaccactgccattttgactttgtgctttgtaagtggcgaccactaccatcaccttgtggcagtctcaggacccccaaaatatgactccccataaaaaaaagtcaaaacacaccccaaggggtttgagaacatgcatggtcgagcactgaccattttgccatgtcagtgctcgcaactgagacaaataacacaaagtgtccttagtaaaactggcataactctctcaacttttatccaaatgatcgcattcaaattgcattggaaatataattttaagatggat

SEQ ID NO: 171854 - DNA, 584 bp, Cannabis sativa
taaataaactatatgtctaggagttaaaagactccctttagagttacccattagaaaaatgctccaacatcttactaaattaagttgcttgcaccagagaaagtacattaccaggtatactataatccaaaggttcagataatctataacttatgatactaggattgggaagtttgctcaagtccattcaatagacttattatcagaattttccttcttgtcattgtaacaaaaaaagttggttgatccatgtaaatagtttaaccatatttctcttggctttgattcttagtcccttattaggattattcattgcttgtttaaactaataatgaatttttatcacaagtgttgtcgaagtcataacagggtgggttctttgaaactctcccactacaatgaggtactatggctttctgtttaggaaaatcagtgttattgaccctattggttgtgcaatataacagaggtagtgagaccatcttatattgtatcagatgatggaacactttgggatttaatcaaatagtatctcctctactttgctactttattctcaaatttagtcatgttcttagaaaagt

SEQ ID NO: 171855 - DNA, 719 bp, Cannabis sativa
ttccttttcctatatcactttctctctgttttttgttggaatgttattatggtgcatgagtttaaatatggagctcttaaaaccatgccagaaggactgcaggctcgtgtgtcctctacattttattaaagatatatcacaatcttttgaaatggataaagaccgatgtattgtgtaatacacacaatgtaaattgtaatgcatatatataatggataaattaagacctacattttatcaaaccaaattctcgaaatatctataatacataaatgtattgtgtcagtcagattcttctttcagttgttcatgtcgtgtagaattttaaaataggctacctgctagccttatgcctccagattggatgaatgggggattcatataaatatatatatactttaaggtgtgattttgtaattaaattattaatatatgaaatgtgttgatatagtaatcaataataccaataaagttcaagtaatgaacatgagttagaaccttgagttcaataagaaattcatttgaacctcgcatattcatcttcttcaatgttgctttttaaaggtattcatcaaactgcacaaaccgtccgaccgtatcgcatttcaaattttttgcagtacggtcgcggtttgaatttttcttaaaccgtgcggtgtgtaacgtgcgtgctaagatggcacgttacaagctaggtaatgcccacaagttggccaagt

SEQ ID NO: 171856 - DNA, 501 bp, Cannabis sativa
ttgatgtggccagtgggtcttctcgtccggtctacatcttccatatcgatatttttaactatggcaagggtaaggaatttatgtatgctgagaatagtgatccccttgaccgatcaagtttaaggtctgaaggcttcgggccagctattccttagatcatgttcctgagttggtctaactatgcttgcacagaaagatctgttgctgtggagacttgactgactaaccctccttggggaggctccaaattctaaagagataaggactggctggccataccctgggagagtgtattgtgaaggtcagccagacccgtgttgaactgtagaccctagccgcccattcctaagaatgagagttggccttggccggccagacctacacctgactgttgtgcttagccagctagacctgcattgggtagggtctagccacccagtactcctccatggccaaccagatctacaaagggcaaggtttggccgcccatgatgcttctat

SEQ ID NO: 171857 - DNA, 781 bp, Cannabis sativa
tttccagaaaaaaaaatattttcaggacaaaactaaaaatattttttgttgtaaaattgtaatttacaagcgatcatcaaataatcacataaacaaccatgagcacatccaaattatcataatcattatttttaattcatatttcatgaaagtaaatcattaacctagctctgataccagttgttggggattattttaccaagatctagatttattaacatgtatattatttaataccctaaatatgaatcttctaaaataatagaatttaaacacatataaagttcaagaaattttacattgattacagcggaataatatgtatccttcaactcagatctctaacccttattcctttccatcacagattattttcaagatctgagcctaattctccttcaagtgtttgattcttcatagtcttacacactatgattgagtatttaacttactatgggtgaacatgtactctttcactataaggctcgaaaataataaagaagaagaggaggagattcaaattctatagagagaggttctcaagtttctagttgtttgacaaagaatgaaaactatgtaaacttaagtaagacagaatgagaaccatcttattccttatataggatttctcccaaggttagatttaaattatatagcattaaaaataataataaaaatttggctaaaaatctccttaagtggtcggccataagatgggccccactagttagatttttgccattttattcaacaattcatcttttcttttacaaatgtcata

SEQ ID NO: 171858 - DNA, 549 bp, Cannabis sativa
  modified_base (517)..(518): a, c, t, g, unknown or other
tacaattgtacatgattgtgatgtctctttcatccaagtttctccattgatcatcaagtttgagtgattttctgtaaacacatcttttggtttttgtttattactatcttcatattcaatggcttgacctgcaaatgtctcaacttcctacatatataattgatagaaagtacttaattagtttcaatgagatgattatgatcaaatactataattaattgactaattatgatttttgtcccttgaactttgacatgtaccaaattatgcctcttgaagttttaagatcgttaaaaatgcccctaaactattgagattgttggatataaggatttttgtctaatttcattcgattttactatttcagtgattgtttatgtactaaaccatgctctcctgagtttgatatatacaaaatcatgcccctctaactttgaaatgtactaaatcataccctcgaactttcaccaatgttagatttttttactaaaattggacaaaagtccttaaatccaannatctcaatagttcagggggcatgatttggta

SEQ ID NO: 171859 - DNA, 1552 bp, Cannabis sativa
aataagttccttctagactaagttcatcatcatagcattctagtactaatattaatgtaaaatacttgcttaagattaagtaatcacattaaatctcataaaacatttcataaggattaggtattttgcctaagtcattcgaataggcattgaaaatttttctatcttatccttattattctcataagttatttctatccatatgaatggttagatttactttctaatttttattctaaagttcccatcatgatcataacatagtaggctatcactagagtcatccaaatagtgatgggctataattttaaaattctcccactaagataaggtactgtgatactatgtccaataacttcattggtattaatttctattactacagtaagatgtgaatcagaacaattataggaacaagaatgagttctaataatttgctagtttgtttattatattgtatccatgtctaatcaaaatatgtgtgctatagagattccgtggtgtattgagtatagtctagagttcaaagttaaagtgtttgaactacatatatcaataacttttccacccctaattgttatagagatactgtggtgttatgaatataatctagagttcaatagatataaaagatcattgaacttgatatattacttcttaacttcttccacccccatcagatcaaaagatctttttattaaacaaaattttaataattgcttaagaattaacaattattcataaaccttgaatttaaattctaagtgttatgtggtattatttgtttgcagatattaacataccatagattttgtatcataataaaacacaaaacacattaaacatgataaacatataaatataatgtgtattggcatacaagttaaagtaaatatgaagctaaatttcataaaagcaattcataatgaaaacctcttaaagagaaaattttattaacattctcaaaaatatcataatgaattgtctgtaaaaatataaaatagggaataaaatcccaaacaaacaattgaaactaaatttttcacaaactaaacaatcaactcaaaaattaaagaagataacgagtttcatcttcaacttggacaatctccacccttctgtccaaccatccgactcaactcgctaggataccaatcaaagattaagcagctggagttgaaataagaagaaaataaatatggttagtagatccataattaataaccaaagaggataataataattctctaaaacacatgagtttatagcaaagatagaaataccttgtttctctgccgaaaacataggacactggggtttccagtggccctttcgttgcaatagaagcactttcctttttgctttgcctttgaatcagtagccttttattcttataagttatgttaacagctttaagaggctccttactattcttccacttcttcttctgcctgggtcgtaccattagtagtgccctaactaggagctttgtttcctcctttttgtggacctccaatcaaattctcaaatgtctgagggttgttgattaact

SEQ ID NO: 171860 - DNA, 870 bp, Cannabis sativa
cccaagtctgtagtgccataagtctggtttatccaaaaatactctgtgacatttcacttgattggttacaacatagcagtgatcagcaattctgttccctgtgagaactgatttcccttcagatgtaactaagcattgagtcttggtgaagctcacatcataattggcatcacacagttgtctgatgctaattaagtttgcttttagtccttttacaaataaaactccagtcagagggaaaacatctgagagatccagatcaccttgtcccattatctccctattatttccatcaccaaaggtgacaaaaccttctttggacgaatgaaagttgcgtaaatcagtgcaggaaccagtcatatgtcgagagcatccgctatcaaaatacaagcagttatctttcatggctgatagggaggtatgagcaacaagggcatgattttcacgtttggattttctcttcttcttaggtccatgttgaggagcaaagggaaatttaccctgaccagatttcttattgataatgtttgtcaagtaagttcagagtttgtagcatcttggcctgatatgacctcttttattacaaaagtgacacgtaggaacaaatcgatctgtctgcttgacaccagacttttcactaactggaccttttctatcaagattagtcttaggttcatcagaagctttctcaggttgttcatccttgtgaattggagaggcagacacaaactttattttatcaccagaagaggaagctgagttatcttcaatacgcagatcatgaccttgattgtataacagtttgtatccaattgaggttctgtctccatatggcttttgattttggagagcttgattcagggcagcagt

SEQ ID NO: 171861 - DNA, 880 bp, Cannabis sativa
cttaatgcaactacaagcagtttgcctgtcttttgtggtcttagctgacgcagccagctgtttggccccattgcagcatgcgtctgagggcttcgactccctcccagtcacgtactggacgcatggggtcagctgctgcaccacttggttgcattgtggctggctagacccttcctgctggctccaacccacctgtatcaacattagtagtgacactgctacagctactactttcactctctttgtactcattttggtatagtaaaaaggaagaaattaatattaatataaggagattatatattgtactgttaataattaataataatgtgtttgttttgaatgatgatatgaaatggggtgttgagttgctgattatataggctctctcggatgatgggttggctgggcatgacaatttcgtgatgagtttttctactcggggactcgggaggttaattttcacacgcattagatcttttcctttgttattgttcagctgttttataggagaaaatatatcattcggtggtttttattacgtgtgggagaaaataggtttttgtcacaatatttgtgatgagctttttttgggcaggaaaataagaagtggatgagtctgatctcatgaagaacaagtgagcatgtgttttaggatcattaccgcagaggaaacaatcttgcacaccttgaattcctatcagccgttttcaatctgttccaggacaccaactaagacacaaatctatatttctcctgtgcctttttaataaaaatgttgattaaacattaagagcatgtttggtattgttttttgttttttgttttcaaaaaattatttttagaaatgagaatgaaaaatagtttttgaagcttttaa

SEQ ID NO: 171862 - DNA, 702 bp, Cannabis sativa
ttttagactattgcttaatgcgaattgtatatttttctatctcagaaatgcagtagttaattggcatgcaatttaggacctttatgatctagaaagagtttaggttaatttataatatctgtcatcacatagaggaagaagaatggttaattagtgttaacagttgggtaatcagagcaattgaaatcgtatccctaatttcgcatctattgttaaaactttttatttgtttgttttgttaaattttacttagtttatttagttcaagatttatttattcgattgccaaatagagacaaaaatttaattgattggtacttaactacagttctcatgagaacgatctcacttaactgagtattacttgttaaaaagatacgtatacttgcgtgttggatttatcacaataaattttgagcatcgttgtcgaggactgttttagttaatatcaatatagttgaattctaatctaatttgttttccttttatttaattttactaattttttaatgaatgtgtttgacctgcaaagtaaatctaaatgctataccttgtgaattttttccaacaacagaatgagagccattctattctgcttggggaatatttaaggagctcggagagagatgctatcccaatttctcaagtgggtgttttactctattcttttacaatggacttgatgatgaaaccagaagctgg

SEQ ID NO: 171863 - DNA, 683 bp, Cannabis sativa
taattattattatttggctgcttggaaaattacttgcatgtgggataagactttattttccttctatctatttgttattaagtacatcgtacttggatcattaatttaacttaatctaaatcactatcattaccaaaataaatatatatgaattttcaatacctatatttcacaatatatagatattggatctaattgtaatattaaattgtcataattaattgattaaatcttctttatatttatatggatatatcctatatagcatgctagagttcatagtaatccctaaaatgtctatagataatgccaaatttcatgtcattattagtataagtaagaatcaagaaagtaattattattattatataggtattaataatactctcaatcaactaaatcaaatataggtatctacaattttagtggaaggaataagaaatgtgtaatttatatatgtatggattacaaagaagcagcctcctagaaggaacccaaaataatgttcataaagtattattatttgatatcagtgtgtattatcgttttgtaaataattagcaatagttcataataatttttaaggtaaataggagtataagtatccaaagttttaaatttgtaagcggtataaaatttttttagtggcataagtaccacatgtttgtaaaactgtaattttt

SEQ ID NO: 171864 - DNA, 635 bp, Cannabis sativa
gccagttataggccctctcatttagttctttcaaatttttcattttcctctcaaactcagctggtgttgtggctcttgctgtagcccataataactgcttcaaaataatgccagggtaatccttcttgaaattactatgcatgggtcttatacaaaaacgagtatcaccaccaatgaaaatctttccaacagcattctgcaaccccttttccctatcactaatcacatcgtaaatgcaaacctctcttggatgtaaatcttccttcaaaaactccaaaaaccaagtccaactctctgtattttctttcccaaccactaaatatgcaatgggaaagattgaattagatccatcaaccccaatggaagctagtagtattcctttacattatccttttaagtgacctccatctaacccaatcagcctcctgcatcctctgataaatccatccttgcatgccttgaaacaaatgtaaaccttctcaaacatcattttctcatcaattagccgagtttgtagctttatagtactatcaagattggttgctaatagttgtttgcaataatcttctaagattacatattgatcaagaacagacccctctaaaagcagccttgcagatcggaagagcgtcgtg

SEQ ID NO: 171865 - DNA, 735 bp, Cannabis sativa
gtctgtacttagcgtttttttcctacaaaaatagtaaaaagggagaactcgtactcagagagaaataaccttcatagtcagcataagcgtttaaggacaaagataaaagagcggttgagtggtttatcccatgtgcacaaaaatgaaacgtgaggaatgtccatattttatgagcagttgtaaatgaataaatcccaaacaaaataactgccaccctatacaccataaatgagggcaaagtttagagtaaaaggcatggcatatttgagagaaaagactatcttttacatttattgagagaattgtactctatattcagattattatctctaataatatggactcgtggagtatgtagattttgactacaaaaccacgtaaaaaatatctggtgttcatttattgttgtcatcaattatgtattatatttattacataaaatgcttatatatttagttaacaaaaatctgtgttaatagtttggtactttcattgagagccttagtaataaaaactgaaaaaataccctccttgtaaacacaattaccaacctatatttatggcagataatacccctcacgagggaagccatccagaggagactactcatcgccacggaaaagaacctcagggatcacaaagaactaaccaactgaaaccccgttttgggaggaacgatggaaatttcaattcaacttgagaacagatcctagagaggcaaagtgaagatgccta

SEQ ID NO: 171866 - DNA, 580 bp, Cannabis sativa
ctctgtgcaatctcaggagacacaaagtttatcaaccatgatattaccatgttattacatctattccaagaattgagtaagggattaccagaaaccggccgaggaagggttccatcaataaaggcagacttgttctttgctgtcaacgccattgttatacctcttttccatgaccggcaatttgcaccattgagcacagtggagacgagaactagccctgggtgatctgccgtgctgagaaaaaaggggctcgaaacatcttcatcggccagtcgatcgagagagggtctgcgagtagaaacagcaggttgactgggattaggaacgggttgaataggggatgacaggtctggttcgatggtgtcttcttcgtgggaagggcgaggtctggaaggtggaggtcgacgagaagccatgcatggattggcaattggtgcggaagtggaatcgggattggattccgatgttgtctgctttgctataggcggtggaataccgtcttgcgagcgagtggagggcctagccattgaaacttgagcaagatgttcgtctgataccatatgaggagtgaaacctgaac

SEQ ID NO: 171867 - DNA, 769 bp, Cannabis sativa
aagaacacaattcactcactcacgtgcattgatggctcaattatcaccgatactcagagcatttctacaattattgaacaatacttcactcaactctttaccattcaaaaacctactgctgagcaaatggattatgttctttctggaatcttcaacaaacttaccgatgcggggaacacctttcacgtctgatgaggtctaacaagcagtcttccagctagcaggcgataaattccccggactagatggcttcaatggaacattcttccaaaaaactgggatttgcttggaactgatgtggttcaagtagctcttagcttcttgaacaacaatgcagatttatcgcctattaataataccatcatcgttcttattcccaaaagagtcaccctcactccatcactgattatcgaccaattagcctctactctacaatgtataaaattatttctcgcaccttagtcaatcgtctcaaaccaattatatgatgcattatttcaccagcccaaagcgctttcttacccaatcgcttaatctccaataatatcatcatcgggcaagaagtcactcactctttaactcaccgcaaacatggaaaagtgggttggatggctctaaaactcgacatggccaaggcatttgatcgtgttgaatggaactccattaggaaggttatgacctgtcttttcactacatccttcaccttttatatcaatcagtaacttcttggatcttgttgggtttttgtgccctaaataaaacccattac

SEQ ID NO: 171868 - DNA, 703 bp, Cannabis sativa
ataaggttcaaagtaatttaatattaatttataaaagtatgttgtcgtaaaagtaaaggataatttacaccccatactgttttttttccatttctttcaattttattgttgtaagaaaaatattacttgtttactgtgttttcttgtactgtgtattgttttttttttatacttttgacagcatatgcacagcctatccacattatatatattatgggatacgattttgtcccgttattatactttcacggaatgtaatccgtgatgtacgacagtcgttggatggggtagttatttgatctaagggttggggttgatctaggggtaattagggttaaaaaatggcaactagctatgtttttgaattttaaatttattaaatttgaaaaagttgaaactgacatccatcaatcacatcaactgtcctccactcttccatttcattcttcactttctttttgtttttcattttttattttctctatccatttttccattttcgtttctgctagggcaaaactctcattttcattttctattttctttttcattttccattttccatttttgtttcagctaaggtaaaacccatattttatattttcttcacttttcatacttcgttcttcactgtggtgtacattactcgtcttctgccattgttggggttgttacagtcgtgggttgtacaagtaagtttctc

SEQ ID NO: 171869 - DNA, 1078 bp, Cannabis sativa
tggtccattccctggccaatattgtaagcgcattcacaaatcaagctagatggaaaggctcgagctcttcatctgagtcataaccaggcagtttcccatattccccatcttggtatctcttaaatttattttccaactcattgatttgcaattggattggatcctcttgcttccgattggcattgagttattggtgtaaattaggtgcattttgatttaagcactcacgcaaatcgggttgtttctgatttaaatgttcacgaagatctggctgtcttcgttcatggttgctcatagacctcatatctgagtaactctcagatttactgctcctcgtattactcatactttctcgatcatcactatgtcaaggtctatcctctcctcgcgtatgtctttctaatcgactgtgatcttgggatcttaaacgtcccaagctagaacttgcctcgtcctgcatggtccttctcctttaggagaggttagatgtatgcccccagctggggtatgtgtatgcctcatccctattagtgcaaaaaggacgctgaggatgcctcagtggtaacccacttgccctaggtgtcccaggatttctctcgttattacgagagatctcttactccctagttatgggctgccttatgttctcgttcctacaagaggattctggaatgtcgttgttttcattcccctggtttgtgaatccttgggatctctgatttacctctcggcgaggtgcctgattgtttggttgttcgtcttctagaacatccctagtttccccaagttgctcctcttaggttttctggggattttcctgagttgtctccagcctcctggttcttgaaccccgagatctacctcgtggcctcctcactccaagatcatgttggttttgtttagcatttccttgagtcgctctgggtgcgactacctctctttccaactcagtgttttgttggttagactcagccagacgttgttagagttggcagttttccaattcaaccaacgatacatacctagtgggatcataggcatcctcactcctaggtacataaccaccagtattagtatt

SEQ ID NO: 171870 - DNA, 758 bp, Cannabis sativa
  modified_base (226)..(227): a, c, t, g, unknown or other
tccaattgaaaattgcatagaaaacaaaaacaaaaaagaaagcaaaacgaagaaaaaatctaatttgaattattatgttataatttattgattttctattaatgatatcgtttagagtgtttgtagtacacttggctaccgagtaaactacattatagaacactcatatacatacaaattttgaatctaaaatattacttttagtaatgaaatatatatatatatnnatatatatatatttataggtttaaaattgtaaaaatacataaaccacaaaaaataaaaataaaaatggagagtaatataactttaagaaaattttttaaccagattaaaaaatcttgatatcaatatataatagtgatcatgattataataaaagtgatcgtttatctttttggtttacgttaataaattattatgtatttcctttttttcttttaaaaattcttttgtactgaatgtttgtttattaaaatatattttttattacattatttttttgttagtatcttttagaatatattaaggggagggagaaaacaccaaaggactagctctaatgccttttgacatcatatcatgatttttcaaacagaatcatgtacagcctatgtgaatttatttcttaatcttctttcaatttttaataatttattagctttttattttatttttctcatttaattatctttaagtttactaaaaaataaataggtaatcaaccaataattatacttatagttgataataattaa

SEQ ID NO: 171871 - DNA, 560 bp, Cannabis sativa
  modified_base (228)..(236): a, c, t, g, unknown or other
agttagttgctactgtttgctctaactgatttctgttaactactagcttcttctccttcatgtaatcgttggctatataatgccaacacgcatgttcattcaataagattgccctttgtctcaatcttctctttctttacctttctctctctttcttcatctttctctttgtctctgtttttcctctgctttctggttattgttgtttgcttaagtgttcatcaatgnnnnnnnnnttcaacatggtatcagagctctttccccctctctctactaacatggcaaatgttggagttactaccaacaacactcagaacagttcgaatcctaacagacctggtgtacaacctaatggagcttccaatctgagtcgatcaagaaacaactccgatgatttcaatccggtatactttaatcacaatatgtccattagattaaacgatcaaaattttcttttgtggaaacatcaggtccttgctgcatgattaatggtgaaaaatacataattattggtgttaaagtttaaaataaataaagtttaaattaatattttcatgaaa

SEQ ID NO: 171872 - DNA, 810 bp, Cannabis sativa
aataagttttagtttcacaatcctcgagctaaactgtcatacatgggcagtaagcttctatggagagaacattatcccgtggaaagggactttttgagagtcagagggaggtagaccaggttcctacctatgaagaggggtcatcatcagggacacatgacgaggattcaccggacccacctatggaggaggtggccagccaagacattgaccaccaagtctgccaacatgctgatgatggggccaacctgaactctgtggatctcaatctcggggctccagattcagctctttctgtccctgcacacatttagacagtaattttattagtagcattaaacattatatttgtattacacatacaatgttttcatgttctgcatagtgataactcaatgaaaatagagttatttatatctttttgtacattaaattagctttgttctcaagtatttttagtttattttagtagtctttttatttagatttgaataaataataattttagtatttctttattagttttaattaatatttgttttaatatcaaatttttatttatttagtctcttaattaattaaatataattgtgtgtggtgttgtaggaatttaaatgcaaaattggcaagtagtgttatgggcccatccatttaaaaagagacaaaaaaaaagcaaggaagagagaagggaattgggccaagtttatattatgtatggtcaaaattaagtccaattcaaattgatgtataaagaaagcaaggaagagatgagaggagaaaaaagacttgggccaaacaaaaatgtctttg

SEQ ID NO: 171873 - DNA, 1056 bp, Cannabis sativa
acgaatactttccatgctgggggttgtggtattagtacgtttgcgctagcttctgcttcgttgcactctgttatgaggtcagctagcgcttgtccttttatagaagtgtgcggtatgtagtgtatgtcgaactggcttaactcaatggcccacttgaggagtgttccggacatttccggcttttgtaggacttaccgaagtggatggtttgttaataccttgatggggtgagcctgaaagtagggtctcagctttcttgatgccattagaagatagaaaactaacttctcaatcaatgggtaccgtatctcagcccctatcatacgcttgctgacataatacacaagatgttggactttttcttcttcctagactaaggctgcgctgatagccttctcggagatggccaagtacagtaacaagtcctctccgtgaattggctttgataaaaatggaggtatgaccatatgttcttttagttttttgaatgcctcctcgtattcttcggtccactcaaatttctggcacttctttaaaatgttaaagaagggaatgcacttgtttattgattgggaaataaatcggctcagggtagcaacttttccggtcaagctttgcacatctttgtgcttcttgggagaaggcatgttcagtaaagcttgaattttttccgggtttgcctctattactctttggctgacaataaatcccaaaaatttccctgatttgaccctgaaagtgcacttcttcggattaagtttaattccatacctccggaccacttcgaagcattctgcgaggtcatccgcatgacatccgcaagtttttgatttgaccaacatgtcgtccacgtaaacttccatattttgtcccagaaggcctttgaacatctggttaaccattctctgatacgttgcactagcattttttagcccgaagggcatgactaaatagcagttatacccctttatcggtcctgaagctagtgcattcttgatccgcaatgtgcatcttaatctggttatagccggtgtaggcatccatgaaggacaatag

SEQ ID NO: 171874 - DNA, 544 bp, Cannabis sativa
  modified_base (490)..(512): a, c, t, g, unknown or other
tgtatatctttggctagacaattaccttgttgactggaagtttctttgcgtcgacgattatcatagtgtgatttagatcactctctctcaaaaaaaaaaataacgatttttttgatatttatataatttattaataacaattgattcaatattcaaatatattttaaattgttcaacttatatttattatcaaaatgtctattacaagtttttcggaaataaatcctaacaatattagacatctatagtttctatatgttagaagtgaaacaatagttttctttgagataggttaaatgcgctaactaattgagtactcattttggtaattatattagtttattaaaatatcatttaaataaatgttttaaggatcaaatctattaagaggtttgatttaatataatacgcattttcatctaaaaaaaaggggggaattaccccatatactcttttttttattttctttttcaaatttacggtttgagtnnnnnnnnnnnnnnnnnnnnnnnttgcaatagaggtttctatacgattttttgtt

SEQ ID NO: 171875 - DNA, 758 bp, Cannabis sativa
aatctggagttcttgttgaatgtatgtttatggaggagtctactccatctaaattgttgttttaattttgagagacgactccaattaatgaagaccacttgttccaaaaatatgctcattgtgtattaaatgtaacacatggaggctattctttaatattttaacaacagaaacttcattttatataatttcttaaaataaagggttcaatttaaaatttaaccttaacaaggaaacctttttatattaacttagatgtactctaataaatatttttttagaacgattgttatttttaattttgtcttattttggttcataatgtaaattttatctaaccattgatatttttcttttcttatgtcttatagttttttagttatgcagttgggattcgatcccatgatcctctcaaaagaaaaaaaaaatatttttatggccagtacttgaactaacttcaagtggttatattattttgaatgataaaatattttttttacatatgatattgggaaaaaacaggaaaataaaaaaaggaaaaaaaattacaaatatactatgagccggctctttaaatatttatacagtccacatataaatatttacaaaaataccacatgctctaaaccttcaaccgcacggaataaatgatcaagaagaatagacctcgatcgttcaaatcagcaacacaaccaaaatgaaaccataacaagggaaataccacaattaattccgacgaaatcaactggaaaagaaga

SEQ ID NO: 171876 - DNA, 628 bp, Cannabis sativa
gttgctcaatcttcttgcatctcagcaatcgggcataaacactatagatccaagcacttcatcaggtaattcaggtatcgttttatctcataattctgaaactcctttgaacaattcatggattatggactctggagcaacaaggcacatttgctttaatataaaactctttcaaagcatatttaaggtacctactaccaaattgattttacctaatagtgcatgtttttatgttaatcaaagtggaacagtggtgttgaatgataaaatcgttctcactgatgttcaatgctgatgccttttatattcgggacaaaaccaaccagaggatgattggaaaaggtagcaatgtcaaagatctctacatccttgatactgcaccagatccttctcttgttctctctgtgtctactgaaacttggcactctcggcttggacatttgtctcacaaacgcttagatcttcttaaagatactttacattgtaacacttcaattttgtataaggataaaccctactatatttgtcctattgccaaacaaaagaaactcccttttcaaaataataataaattggatggacatgtttttgatctaatacattgtgatgtttggggaccttatcacat

SEQ ID NO: 171877 - DNA, 879 bp, Cannabis sativa
aagtagcattgacacaggtaagtttccatcccaatgattttcaaggaaatttgaattttgtagattgaatacattcacaattataaatagcttcacccaatcctttatattaccaacaacagtccataattttgaattaaacagaagaggaaaacatatatttacttatcccgtcaattttactctgttttaatctttttgaatttatttgtaatataaatcaaatcagaaggaagtaattgcatgcacagtaaacataattacctacacatatgatatatctaatctatcattgatttcttgtattgcgtagcctaaacttgttcaagaggttgcatccctttgtattctgcaatatattatcaagataaacatcataagcgttcattttaattttatttgaaaataaaagcaaacattagacattgacgtttctacctcattttcttcttctttgtttggatctggacgtaagtccaagcgtatatgagaaatcttatcccaatcttcacctgtattccttttgcatctcttcaataaaatgggacatttaaaaatatgtaagacgttcaaagtggtgaggcttcgaattccttcagggaatgatgtcagattggggcagtcggataactcaagacacttaagtgatttgaggttgtggatccactctggaattgttgttagatcatcacacgactcaacttgaagttgttgtagacttgtaagatgttggatacccttaggaagaacagtctttatatttggcaacttccgtagttgtaatgattggagtgttccatttagggattgccacataaagtcataatcatcactaatcagcatgtcccctaaccactcgcatttgctaatctgtagatg

SEQ ID NO: 171878 - DNA, 589 bp, Cannabis sativa
aacatttatattcaaactttaaatgtcttaggttgtgaagaataaaagcaaaaaccattaaaaaaaaatatttccaatagtgaatacagatatattaatttaaaagcagaaacaaatacagatatatattaatttaaaatagtaacacgtatattaattttcataaaaaaaaaaagtaaaagaagataaagatgatatatacaaatatctctggagaatttttttaaatttaaaaatgtaaatgtcctattatacgtattatacctaaaaatatcaaaacccacaaatttagaacattatagttataaacgtaacaataattattttaaaaatttaaatttgaattttgatttttaaacaatactgtatctttagatatactatatatatatatacacatcgtatatttttttttctttattttgttcactcttcactttaatattttgtttctcaaaagagtcttaattggcctcaacaaatctgaagagcaattgagagtcatatttgttaaggtatgagctaaatgaaatttgatatatatgagtttataatcttgcattgcttcgagtgttaattaaaaaaatct

SEQ ID NO: 171879 - DNA, 919 bp, Cannabis sativa
acaagtctttattgaagtatagtataatgtcaacaagtaaaaaatactatgtgggtcgatttggtcggtttatgctatattttattcaactcaaagatggggttacaaaaattaagtgcaacccgctcaattaagaaaaaagaaaatagtaactcacccaattaaatttgtcaatttggttgcgttaacccgtccaaaccgaatactaatatttttttttacatacaattattatatattagttaattgtaataatgagaaaaatatatatagattgaatttgatgttcaaattagccaccataaaaaactatattagtttaaaatttatatttttaaaatagtaatataaattatatgatatataaatatatataataaaatcatataaatatatatatatataaaaccctcttaatcgggttggtcgggttagttcgggttaattgggcgggttatattttcgttaggtttttcggtttatatttttcgtcaggttatctcggtttggtttgagcggattattcggattgggcgatttacaaaagtttatgtacagccctaataagtacctctaataattttaaaatagaaccctatattttttttatcttggtctttatgagtaaaaaaaccatatcactcaatataattataattatgattagagatagaaatttattctgtggatgagtggtgcacccacattgaagcgagggacagttgtccttaaaaaaatatatatattttaattagttacaatatatatttataataaaaataatatttataaacataatattagttttggcgtaatggttaactagactgcatatatataatagaggttaggttcaaatcacaattttttttctttttaagtttacttttgtctctacattataaaaaaaaaaaaaaaa

SEQ ID NO: 171880 - DNA, 517 bp, Cannabis sativa
cgatatggatctcatccgagatggaaacaaagcacaattaaagttgaatcgcagttcgccggaggtagaggaaaaactctctgctcgaatggagattggggattcaagaatctcgccagctcttgatcgaacaatctgatcattgcgtgtacatagaagaaggtgatgttagtggagtgtttgcagatcgtaaagtgatgctacgagagattgttttcagtgttgatgcaggcacaccatgggaatggttccacatgctactgacagaatggaggtggatctttgatcgaggacgaggagcaaagttgatccacgatggactgagcatggcggttactggtgggcggagagatgcatggtcgcgccggattgcagaattacatcggagaggtggagttgacaacgatcccttactttgtattcactagtttgcagaaaaatatatatatatatatatatatacatatatacatcttttatgggttaagttcttcaaatatatatggttcagagtgtg

SEQ ID NO: 171881 - DNA, 900 bp, Cannabis sativa
accggctcggggttgctttttggtgtgctttctttcttgcctttgcattccaccacaaagtctgccaaggcttcgcctttgattgttgttcggggttggaaagtaatttcatactgacccaactctaccgcccacttatgtagccttccagaagtatctggcttttgcagtatttggcgtagtggctggtcagtgtatacctgaaccggatgagcttggaaatagggcctcaacttccttgttgctagaataaggcagtagtcaagtttctctattaatgggtatcgaccctcggcctcaatgaatcttttactgatgtaatagactgggtgttgtctggtgttctcttctctgatcagcacggcagttacggcatgttctgtgacaactaagtatattccaagctcttctctgtcaagaggttttgagagtacgagaggttttgcaagttgtgcttttagctcttcgaaagctttttcacactccttcgtccattcgaactgctcacaagatgttgaagaatcgaacacacttatctgttgattttgaaacgaatctgctgagtgcagcaattcgaccggtcaagctttgcacttctttggtttttgttggcgatttcatatccaggaggtcttcaatcttctctggattagcttcaattcctcgggcattgacgatgaagcctataaactttcctcagctaacttcaaaggaacactttaaaggatttagtttcatattgtactttctgaggactttgaagcactcgtccaggtcgtctatgcgccccctagtgtttctggattggacgagcatatcatccacgtacacttccatatttcgcccgatctggtctttaaacattttgtttaccaatcttttgtatgtagctccagcatt

SEQ ID NO: 171882 - DNA, 1087 bp, Cannabis sativa
gttttaaaatcacaaaaatactatatttcaggtgtaaaataaaaatacaactaaaaaataattgtagaatacctaaataataacatgaaagcaacaataaataataaaaagatagttataaagcagtgaaaaaataacaaaacatcgacctcgttgcacaatatcaactcctcaacttatttaaggagtaatatataataaaaaaaaataaaaaattaactagataatatgtcaatatttattagtgcacattgtgccaattaataaaaaataaacttatcattgtattttaaaaaaaaaaaaacgtgtcaaaaaaataaactaaatatatgtatctacatctacaaaataatacgcatacaacaaaaatttattaggaataaaataaaaatatacaccataacaaatgcacataaataaataaaaaattaaaaaataattgtacaacaaaaaaaatatttaaaaaaccactaaaacacaacataaaaataatattaaaataaatgcacatatatacaacaaaaaattatcaagaataaactaaaaatatacaccataacataacaaaaacaactaaaaaaataattctcaaataaaaaaaaaatacataaaaacaactataacacagctatagaacacctaaaaaaatatgaaaacaactataaaacaataaaaataccattttatagcaacagaaaaataacaaaatattaactttattgcaatattcaaatcattcatagatcaactttaaataaaccacaatttatctaaaaaatattatttttattaaccaaatattaatcactaaattcaaatataaacaattaaaaaaatagatgtgtgagagccaaaacaacaaaataataatgacaaaaaaaaaattgggtaaatatcattttggatcttgtgttttgtaagagttatcaaaaaaaaaagaaggaaaaaaaaaaaagtgagcggagatagataaacagtgataacttgaagaaaaaaaataaataaataaaaagaaaattaataattaatgccactgagtgactgcgacaagacagaaacagagagggaagcggatcctctgtctaga

SEQ ID NO: 171883 - DNA, 1320 bp, Cannabis sativa
tattattattattattataatatctctttttagtgtggacaatgcttatacttaaaattataccacatatgactcatatattgttaactcagaaatttttttctagtgacgtggacattaatgtttaacacgtggcatgaagaatgacgtcacgaagttgagtagacccgagtcatagcagtcaacctaggaggggaccctagcctgcacctaggttaactccgggatctctgggatagaagtttgggatcacttaagatttcacccaccgctcaagttggcatcctcaattaaggttttagatttcaggaccatcttagtgaaaagtggtcaaaccttgcattgggacatcaactagacataccatgaacatatttgaggcaccagaatcagaattagaatcagagtaagttaacttttgagcacctgaggccccggggccccaagcacccaacatctaggttgacaatctatcaatctgggttccttccaagtttctgatcggagatccaacttttgcatcaaatttttcttcatcaatcggggaaacaggtccttttggaggaaaaacaacaattcatgggcacaaataccaaggcccagcgcctacgttgacattgtcaacatggccatttaaaatggagtttttcaggaattcttttgagcatcttttctaccttcagaaaatattaagattaaactatttccagggactgaatagaatttctgaaaggccaaaagagggacccattgccgaggttgacacctggggctgggccctacgcctaggttgacattttgtcaacctgggtttttttcggtcaagttcagcaaaaagtgttctggccatttcttttgtcatcaaaaataatgaagattcaagtaaactcaaggagaaaaccacaaactcaagtccttggaaatagggcccagcgcccaagttgacttatgactgggcctagtgcccaggttgacaatcagcttaggacgctgccttcaattacccaaagatcaaatctgatgcgagcattgaatttgacatggtaaaataggggaggagacctcgtcctcaagttcagaagccttggaagtatcaaaaacaaaatcttgggagctcggtggaaaaggctcagtgcccaggttaacaaaaggcttggtgcgctgggttctgcttattcgaatatgatgtcgtttcgaccatctgtatagtttttcaaaaatacaatgatctatgaagttagaaaaataaaattcacaactttgcatttctcatttccagcactatcgaaaatgaaaagtttcgagtctcccatttccgca

SEQ ID NO: 171884 - DNA, 842 bp, Cannabis sativa
tcattcaccgttgattatctttcaatcggtgagagggacggtgtagattcagtgtctttctttcaattattcccgcgctaagcaacgtacaaaaggccaagaagcccaacttataagacgagcgagcccagccttcttctgtactgggaaacatctaatttcaacttaaaatggggtatgccatctaatttcttctaaacaaatcaagttgaggctaagcccaatagctcgctcgtgaaatcaaatttgggcctttttaatattttttttaaaaaagaaaaattatagtaaatgaccaaagaaaattatattatatacccactctattttatttattttaatttttactttcatttttatattctttaaaatatactcacttttatagatgatgtgtccatatttgagtgttaggatctttgtttgttcaggtgctgacttgaccttccttttatagagttgtactaccacgtggcactagttctgtccacgtaagcatgtcacgtcacgaggacaaaaatttgagataacatgtctcatattaggcttagttttataaataataataataatgatatgataaattattaaataaaccaatatctaactttaaaatttaaattgtaaattctctattccgtaactttagggcttagttttgaccaataaaacttctgaattatgatacaactatttctacaaaatttatagttctttgaatgtctaacactaactggaatcacctcaattggaattccacaattgtagatatgatcattttactaaaaaaaattctaaacttacgattttcttaaccttaattttataatatttttttattt

SEQ ID NO: 171885 - DNA, 990 bp, Cannabis sativa
tggatctgggtcttgtcaaagttcgggtcctgtcaaggtcccgggttcgaattgggtccagatctgagtctaggtccaagtctgagtttgggtctctggtccagtcacgagtctcggtctggatttgggtctcaatctgaggtcggggtcgagttcaggttcaggtctcgggattcgggtcggagattgaggttgagtccaaaccctttgtaaatattataatacaagctaatacgtatcatttgttgtatattaaataatataacttacattgtattaaaaaaatttgtcgtaataattaatgcaatatattaatttatccaaaaataatattatttattatttaatataatacgatcttgatataacctatcaaacgagccaatatgcatatattttatatcctaccaaagctaataagattatttataactagaaaaaacactttatcttttttgtatgttagaaaatgtcttcaaaattttaaaaattcataattggaaactattgaagcaaaaataaatatatcgtaatagctgaaaacataggagtgacctttgtcttctgttattagaccatttccaataaaagaaaattaagatattataactttattgcaatataatataaggatcaacaaagagattaaataaatattacaacacataatatacaatatatatacactatatataaatgaaaggtagaaaaataaaatacaactaggggtgaaaatcagtcggttatggtcggtttttacaattttataactaaccggtcggttacggtttttattttacgaaaactgtaaccgaccgtttagaaattataaccgtataaagccgaccgtatagtttttggcaatttttcggtttggtggttttggacggtttttggcaatttttcgacggtttttggcgattttaggcagtttatggcggttttgacggttttttggtttagtcatttttttattttaaaaactgaaac

SEQ ID NO: 171886 - DNA, 900 bp, Cannabis sativa
tggtccgtggaccagtcgtcagtcgaagaaacagctagacagatgcactcgtgtataagagccatcattccgtgggcgtaagggcccaatggaggcttgaagcggggacgttaccggggtaaagtataaaagaatatcaggaagaatagtggtatcacaaaggtaaagaagattatctgaattacttaaggtgacacgatgtaatgactgctttaataatttagattagtaaaggcaataaacaataatttctattatttttataattatttatgaattgaattatctgtgggcctcattgtaagaaattggcattagagttataatttctcaatttcagagattttattaaactctgggggtattatttgacttatatgtgaattgtgctatttttgtaatttttgctctttgacaacggaaaatgcgatggatgactagtttgattacatgggtaagtttataaccttatttcttagtgtgatatattttggagaaaataaaatatcagagttgagcggggttatgaaatttgaccattttacctctaatcttgaaaataccctagttttaagttaaagggcattttagtcatttgttaaaggggagagttaggtggctgcctaattatttgacacctagaaaagttaattttagcaaggaaatttattttcctaacctttatccaactaaagaaaattagagaaattagaagaaaaaatgaaaggaaaccctctctttcctttctttctcttcgaaccagccaagaccaagggaattaattgctggagtttgtgttttcaacaagggttggaggaggattcaatcaaggtaaaccctagttactctctagttatgtttttctcaagattttagttggtttcatgtagtgattttgaa

SEQ ID NO: 171887 - DNA, 847 bp, Cannabis sativa
agatacatccattttctttaaaaataaattgcacctaccaaatttttttctatttttatattgagtaattagtaaattttactcctgaacttttgacaatactgatttcgccccctaaaataaatgttgttaagacttctccctgaacctttacatttacagaaatttagtccctctgttgggtttcgtcccattatttcgtttaaatgatgacatgtctttgtaaattagtaattttgccccctaaattttaacaactatcaaattgtaccatctcaaaataaacatgagaaagatttaacactttttttaataaatcttaaaaatttaatttagatcttaagaaaaaaattatttgaataatttaaaaaaaataaaaaaaaatgaaaattttaaaactaattaagcgatttgaaaaattgtttattttttattaaaaaattcatttatatattttgaataatatattaaacatttaatttattaaaaaactaaattttacgggaacaaacttgagatattttgtttttctaaaaaaatatagatttgttcaagtaaatagaaaaaaaaaattagtttactctataattttttttaaaaataattttatatttttattgaatttttaattaactttctgtatttgttaacatatgagtttatcaacataaataagtttgattttttcttcaaaaaattcttaatatatttaaattatttattagattcctaataattttggtttgatttttaagatacgtgattataaataaacaaaagtttgaaaatagttttttaaggaataatttaagttttttttaaataaaattaatattttttaattaat

SEQ ID NO: 171888 - DNA, 552 bp, Cannabis sativa
ctacaatgctttatgtaaagactctaagtcatgttgaatgaaattagtaagtacttgttgacgaaacatcttaagtaccttgcaagaaaaactcaaacaaaacaggcaaacgtaaaagcaaacaataaaaataaaagaccaaattgattttaacaagaattttttttctaaatcaatccttgacaacgacgccaaaaacttgtgctaaattaatagatatatatatatatacaagtgcacgtagtcacaaacaagtaatataataataagtaaaagaatatcgtatccacagggattgattagaaattaactatgtaagaattaatactaaacaatttgggtaaaacaaataagaagtgttgatgatttgaactaggataaaaactaaataagaaagtaaataaaatgagaaggaaaaatgagccaagtgatgagctagaacaatccaatccgcttagaatgcaaattcaatgtaaatgtcatagaggaatgcattagtaattaaattttgtcaaccgaaaatataaatgaacatatgatttttccaaacct

SEQ ID NO: 171889 - DNA, 625 bp, Cannabis sativa
tacgacctcatcccggactatctccatgactcatggcctaggccatggacttaagaaatatatattaatcacagatctaattatatttttaaaagtactttaatatagaaaattctaaattatattttataaaacctttgctaaatcaaagaaaaagaagaagatgataatgaggtgagcaatagcactaacttaaggttatgatcttccaagaatatactatttctctaaagtattttttctgatgggaaggaaagaatataggaaccctagtgtttcttggggaccaatacttatttataggctcattatataataaattttgggtatttataatttgatccctcaataaattacaaattaacttatggtatttacacattattttcatgataatttagtaccattttgatacccataacataattggtcacttaaatttgtatcactatcactctttattagcatatacattatacatatgtgtccacaataggattttaattcaacaagctcccaattgggcaacatatatgaccttataaatgtataactttatgagctcaaaatttgttattatgtaaaggtattcacaacaatctcgtccatcaactatacccatata

SEQ ID NO: 171890 - DNA, 949 bp, Cannabis sativa
aaaagaaagtttagtatgacataagaaaagaaaaaaagaggctgacgcaagtaaaaagggaatgtcaaatgtttttacggtaaagaaaatagttagagttatttattttttgaatttctttctaatatttttggcatcgagacaattttatttttttatatgaaaatgtttgtattaagacgtgcgtgttacaaatttttgaaaaaaagaactcaaaataatttaacatataaaaacaagatctaaaggtaattgattaatttaaccagattagtttaaactgttaactttaatgaaaaaaaaaccgttaattaataattttctttaaataattatatttaatatagaaaaatatatactttttaattttaatgtatatggtatcatgtgttaaataatgtatgcatataatttagttatatgtttttagtttttcttttgtttttatatatatttttagttatataattaaaattttttattttatttaataaataatattatttttattaaaaaaatattaatttaaatactatttatataaaaaaaattgtaataatatttcaaatttattattaattataattttaatttaaccctaatatttttaattttataatacttttcattaattttttttttaaattattgatcatacatttttttatagtactggaaagtttttttttttctttttttttttttttgcaagtacaataggtaagagcgtcatcacaatattgattgggcaaataatagaaatatattttccattttattgttaaaaatgaaaacgatggatttggtaaaagaaaataataatagacaaacattcttttaaatatatgtaatgtttattaaaaaaatctaaaaaaaaaataaacacctactcatatagttacatttaatataacatacctgaatttcgtccgagttgttggtctggaca

SEQ ID NO: 171891 - DNA, 547 bp, Cannabis sativa
  modified_base (192)..(201): a, c, t, g, unknown or other
aagttaaacataaatatttatactactaattatttaaaatgtaaagctaatatatacactgtatgtttcatatttaagtatatacctttagtgcacatatcattacttattttacttatatgtttcaatacctatatattatatgtacaaaaatattaagtgagtatatttacttaggtggcgtttggtaannnnnnnnnnatcagttttctatttttaaaattgaaaaaatttaaaaagtgaaaatatttttcaaaatatgttctataaaactgttttcacttttcaattgtttaattgagaatcaaaattttaaaaacagaaaaagattactttcaatatttttttaaatatttttttttaattaatattttagacttcgaccaacccgacctcaaacccgaacccgaacccgaatctgacctcagacctatatccgacttaaataaaatcaaaaaataaaaataaaaacgaattttacagtacacttttattttctatttttaaaattaaaaaacaaaagtagttacagaacgcatttttgttt

SEQ ID NO: 171892 - DNA, 580 bp, Cannabis sativa
  modified_base (216)..(232): a, c, t, g, unknown or other
atgtagattttaactacaaaataacataaaaatatctagagtgatctaattatttattattaaattctgtgaagtatttattactaaaaaagttaattttggttaacgaaaatctgcgttaacaactaatttgaagacaatttaacacgaacagatacaaaaaatataaacagtttgtcataacacttatagatcaaattattattaaattttatnnnnnnnnnnnnnnnnntcagggtcctatttgtatcatttttgaaaaatacaagatctattttgttatttaacaaaatagaaggtccaatcgataatttttgtaaaacacaagatccaaaatggtatttacccttcatggtcatgtaaattatagttagttaaaacatcctgtaaaattttaagaaattcgaaaaagtttaacacgccgaaaaatacgttcaaacagtgtgttgcacacgtgactatattttattttaggaatattggcggctaaaccacttgaactttacggtttgtaacagttacctacaaaaatcaaaattttggcagcataactacctaaaccctggttccgtttcgctct

SEQ ID NO: 171893 - DNA, 609 bp, Cannabis sativa
acacgacgctcttccgatctagtttgtcgactcataattatgcttccatatgtaagtaaaggcaaagcaaaaattgaacaacagtgagtaatgagcttggtgaaaattgtacatatctggacggttagatttggaggattgcaatcttcgagacaacgcatgcttagttttgttatgtcgttagatggcacttttgttgtcatacaaattatgtatgtttaaaatagatttcggtatcccaggctacaaatgttttttttttttttttaaatatgttgtatgtttagcaaagttttaattattataaatttttttattaaacaatacactttatgataaaaaaaatttgattaccaaaaattagcacagtacttaaaaatttttgtagggcattacattatggtggcgttcggttgggaggaatgaaaacatgtataggaataggaatagaatagaataaaatttaaaatacataaaaaattgataaaaaatcattaatttttttctcatattacataatttacattagaataatctttcattcattttcaaaatagaattgtctttccaccaaaatagtaaaaagtaggggtgtacataaaataccca

SEQ ID NO: 171894 - DNA, 541 bp, Cannabis sativa
ctcttctaaagattgccctgctttatcaacttcctcaattcccacatttccaaactatgtcaacatcattattatcccccagtgcaatgaacttgttgcgaactatagtagcagtaggtgctgcttcgggtctggttttccatccatttgacaccggttggaagccctcagcatccactttgctgctaccaggactcgctttcgcttccttttgttgctacacaatatcctttcgaacccattgctgcttcttgggttctttcttcctacaatctacagttaaatgccccaaaccttcacaatgagcacaaatcactggtttccattcataagaaatagcaactgaagtattacacccattctcatcttcaaaatatatcatctcgggcagctcttgtttgatggcaacttcaatcaataatcttgggaaatttagcttctctctattctttgtggcctcatccaccataatcggcttcctaatttgcccaataatcttgtacaatgacttctctccccaatacttgagctctagatcatc

SEQ ID NO: 171895 - DNA, 624 bp, Cannabis sativa
taaaataatttccaacaatataatagtaagattataacatctattctattttcaatatttgtgcagtccaatgtaaacctatgtattcgatacaagtctactttagcaatatcctagaaaatacataccacttttcatggtgtaagtgttggattttgtgccctaaataaaactctattttaatgtaatcttatacattcatttatcaataaagaaacaaatttatttcattacttgtttaatgtgttatttggttcacatgtttattttatgatcatttatttgatttataaattcatctaaatccgtatcacattgatatttttatttattgtgatgtcaacacaatagaaagtaatcaagatcatatgattaaatgaattcttatgatttatcagtacacaagattttttaatataataatctacaatgttgtttacttgcactttggataaatgctatgtccttttcagggaattggtaaaagtaagcttgggttggatatatggacgatgaatcggaagggatcgatattgaacttggataagatataataaacttaccataatatctatctaattcaatatcaccttgttaatcttatatcaaatgatctcaatcttg

SEQ ID NO: 171896 - DNA, 650 bp, Cannabis sativa
tgttataaccaactggaaataacaaaatacaacagaattcttaactaactcccttgacataacccgactaaaccgatcgacgtatgcccctattatttggcatgaccagaagggatgcagtggcatgatccaaattgtgcatataggtgtgtggaatatgggtcaaatttgatttcaaaacaagggaaggtgttgttacaaactttttacaaacctaaaaaacacaatcaaccagaccaatatatagtattggtaattattattaaaattattttttaatatatcacataaattgtatttgtagttaaattaaattatttgtatttaaagtttgtctatttgtaattggagtttaaacttaataatttttatggtatttaaatattaaagtagatatttagaatttttttttaccatggatttttttacgtagttgttgacacggtttttcgtcaacggatctaagaagattgtaaacgagtaagatgaacaaaagtaatagttaattaaagtaatttgcaaaagtaaattcaccaaagacgaacacaaaaattttatagtggattttatagtggttcaccccctttcagcggtaataggctagtccacttagagtgttattgatctcaatacttgaggagagttctcca

SEQ ID NO: 171897 - DNA, 717 bp, Cannabis sativa
tatcttttttttaccaatactaaattttgccatcttatattaaaaaaagttggttttaaaaaaaaataatttttctattaattttaaaaaagttaaaataaaatactaaaaaacatggtaaaaaagttttaaattaataaaagtatattaaatttacttaacaaaccgaaattgtttccaaaaaaatattttcaaactttattctattaagggaaaattacagtaaaagttcctaaaaaatttattttgatgcagagaagtctttaacctcgaaaaattgcgataataatcctcaagcccaattcttgttagtgcattagtcttcattttaattggtccattaacttattcaaaaatgtcacgtgttgaagcatttttggtccaaacaataattttcattaaaaaaaataaataaattatttaaaggaaaaattgtggcataagtcctcaaaaactttaacttgatgcagataagtctccaacctcaaaaattgacagtaatagtcccatagctcactatttttgtaagtccgttagtttttttcttaacagacccgtttactaattaaaatcattaattatatagattgaaataatagataatttatagtgtatctatatttagtatatagagcattctatgtaattcagagtgcgattccaattctttagtagagtaacaaaaaattaataagttagaaaatttacttagtaaat

SEQ ID NO: 171898 - DNA, 850 bp, Cannabis sativa
gttatatgggaactgagaacactggcatatgtcgtaaatggctgggtgtatcacagtacttcaaggaacatgcgatcgcacacatgaacattagaatatggtgacacacccaccatttgaaagacttaaccagtattcccacaacaaagtaaaaccctaagttctaaataacgggtaaaaatgataaagtctctaggaaaacctaaaggaggcagatatgcgagtattcgaagtattcatccgaataccagcgagtattccagaaaataaacaagtgaaggtgcgaatattcaaagtgttcttcctaaaagtacacggttatacaaatttcgggtctatttttcttctaaaattgcccagttctaaacagaaaaatacaaccctatgtgtattccctacaaacctactttttcaaacctctcaaaatgtcaaaaaacccagaaaacacagttctatttttcaaaaatcagtaaccaaatacacaaataaattcgaaactaacctttagtttagatgattgtccctgtgattagtttcgatcacttctgaaatggaagagattcaagagaaaaaggcaggggtctggatgaacgatgaaaatctctaaaagttcagaaggaagggagaagaggaagttggaaatgagagggaaaatgggaagaccatttcatatcagagcgcttaaataccaatatccctcataaattgggattgtgacacgtggccgcaggaatgcctaaagtcatcctatcaaacggtcagccatgggcacgcctacacgaaaaccgaagagtttcgtgacgtggcaccataaataagataaaacgtaataattacagccgtcattttt

SEQ ID NO: 171899 - DNA, 524 bp, Cannabis sativa
gacttgccataattcaccatctgccctgatgcattggtgtagttattcagcaactccctgaatgtttgacatccttccatcgtagcatcaaagaaaaccaagctgtcatccgcaaagaacaaatgcgagacaaaaagatccgttcttccaaacttaataccttgcaatagtcctcttcgttcctgagcttgaattaaacaagagaatgcctccgcacagaaaagaaatagaaatggagacaatggatcaccttgacgtaatccgcggtccggcctcactcttcccttcacttccccattgatcagaaacgcaaagctaaccgacgtaacacatttcataattttttccacccattgactttgataacccagccgaatcatcatcatctctaaaaatttccactccacccgatcatatgcttttgccatatccaactttagagccaccttttgtctattttgaaactgatttttccgcatacaatgtaaagcttcatacccaataatagcattatcatgtatgag

SEQ ID NO: 171900 - DNA, 833 bp, Cannabis sativa
aagtttttgttttacaaggtatatttttatattaattatattaaattttcatttttaaatttatttattagtttaatttaaatttatttttaccgtaaggtccataacagttcacattatgtggctatttaataaaataatgtggtattgttataattgacgtgtctcgctatctagtgaataaaatgatgtggtattgttataaaggctaataagaatttttgcctctcgaatattgacatgtaccaaatcatgttctcttaactttgaagaccgttaaaaattctccttaaattattgaaattgtttgatttagaaacttttgtctgattttagtaagaaaaaactaacatgaatgaatgctcaagggatataatttggcacatgtcaaatttcgaggaatatgatttggtaaatatcaatattcgtagagtatggtttagtagatatcaaagtctgtagagtatgatttagtagatatcaaaatccgtagagtatgatttggtaagtatcaaagtccgtggggcatgatttagtacatgaacaatcaccaaattagtaaaatttaatgattagaaaaaaatccttaaataattttaatagttcaggaagaatttttaacgataaaaaaatttgaaaatataatttagtacatgtaaaaattttaaaaaaaaattctaattagatatctaagtatctagtgcttagtgtactgaaaaatatacttaatgttcgtcgtattgtattgtattgtattatattgaattaaattatatatcatatttttatatggtactatgtcaaactttaatttatagtaaaatattatatat

SEQ ID NO: 171901 - DNA, 575 bp, Cannabis sativa
ggtatgtctgcaatgttctatcagaactattgggacattgttgggagttctgttactgaagttgttttgggagtacttaataatggtcaggaaatggattcaattaataatgccattattactcttatcccaaaaatcaattctcctactgagatggctgactttcgtcccataagcctatgtaatgtaatttataagcttatttcaaagatgatcgtgctgcgtttcaaagaagctttacctcttgtgatttcagagacacagagtgcattcctctctaatcgattgataacggacaacatccttgttgcttttgagctcattcacaacatccaacacagaacccgtggtaccaaaggtttctcggctttgaaattggacatgagcaaggcctttgatcgagtagaatggacttttctatgggctgttatggataaaatgggattcgccaaacaatggattgacttaatccacaagtgtttagcctcttcaagcctttctttctccattaatggtgaggttacgggatatgtcaagccaacaagaggacttcgtcaaggtgacccgctttcacc

SEQ ID NO: 171902 - DNA, 782 bp, Cannabis sativa
tatgcttaactgtcagcttctcgatgcataaatatagagaaacttactaaaatactgaattttgagtaaaggtttacatttatactgtcacacggtaaaaattacatttatactgtctttgtctttttttttcttttatactgtaaatgccaaaaatcacatacaaagcctatatcttccacacccacatacagaactactccagcaatacgacaacacctaaaaacaaccattaattccaacaaaatggaacaaaaatagagaaatctacatcaaataaataattatggcaaaacaaaggtaaaacaaaaataaaataaattaaaaaaatcaaaagaaaaaaatgattcaaaaaaaagctaaccatcttctgttcagcctcaatactagatatgatagcagctatatttactagtcgagtcctgaaaaattagaataaaaaaagtactaaaacaacacaaaaacaaatgtaaaacaatgaagcagatgtacacacttaaaaaaaatatatataaaagaaccacacccctcaaattttttttcccaataagctcgtcaaatgtatttatagaagaaccagaataaaaaaacacaaaaacaataatatagaaggaagaagaaatatattatagcctccatcttctacacaaacgtatagaactaccacatcaacacaatgtaatatccagattaaaatagtatttaattttttttttttggatattaattgagtgaggataattatcttgtttctttgtgttgttagtgagttgatattattg

SEQ ID NO: 171903 - DNA, 769 bp, Cannabis sativa
tgatatatccatatcacctcacacgcagattgtgtcatagctctatatttagactctggactaaatcttcacacaacattctaatttttactcttccaagaaaccaaattccctccaacaaaaatataataacttgaattgtatcttctatctaccttggaacctggccaatccgcatctgagaaacactcaatatgagtgttcccatgattagtgcacacgatgcctcattcaggtgcttcttttaacacaaaatttgctctaacactgcccagtgatgaattgttggagatgacataaattgactgactacactaatagagaatgcaatatctggacgagtcacaataagataattcaaatttctaactaacttgtgatactttatattgtcttcaaatggttccccatcttttgtaatgtgcacaacaggattcattggagtactacaaggttttgctcccatttttattgtctcagttaacaaatcaagtgtatacttcctttaagatagaaaaataccttgtttactcaagtgacttcaactcccaaaatatattttagcaccctcaaatctttcatgtgaaactgggtatgaaggaatgataaggaatgagatgcctctagtattatctcctgtaataacaatatcatccacatacctagctaacaaaatgataccagcaattgatcttttataacatataaaatgatctgacttacttttcaacaaaccaaatttctcaacagcctgactaaatttaccaaa

SEQ ID NO: 171904 - DNA, 935 bp, Cannabis sativa
aaaataatgatttaaaatatgtgtggaatttggtacatattaatagttgttaaatttagtataaaatataacatttccgactacaattgcaaaaattaagccaaattagttttacttttgaaccaaacttgacataaatttacaccatctctagtcttacattggatgaattggtgttgcatgattcagattacttctgttggctgaatgaatcttgattggcttgttgaatgattaatgcatttatattgtctatttcaaagtgctagaaaattatgctatgttgaccctcctctcaagaggaatttgtcaagacttagacaagtagtttgcaaatgttggtggacgggcacttctgatagaaactgttatttggctgtgtgactaattggaattccattagccttccccttgagtgggaggtctcaatcttaagaaatttgaagttggtctggggtgaggatacactatggtgccaaaccttcttggctaattggctaagtaatatggtgagaacaagtcctctggtttaatttcaagccaagaagtgcctcttttggggcgacgggaattttttctttgagagatcttatgaaagatgaatcttgattcattattggtaatggaacatcaattgatctttggctccccatggagcatgtggatgaattaggttcaatataggggttatcttcaatcatttcattgtcaataattcttttcttgcctcttcattaatattattaggagataatggaaaatttgtgccgaatttagctagctcgattaatttgggtataacattaacaaaatgaaagtaaaatttttttcttttaaaaattttgcttttgaaaaacaaaaatgcattatgcaaccacttttgtttttcaattcaaaaaacagaaaatttgtaacgtccccgcttcaagcctcca

SEQ ID NO: 171905 - DNA, 521 bp, Cannabis sativa
  modified_base (417)..(424): a, c, t, g, unknown or other
aagcctgggcaatgaaaaggtccgtggcaaaggctgtcaagacagaagggaggccaacgaagattggctcctccgtaatgatctaaaaggaatggggccatgagcgtatcttgattggttccattcctaatttcttgcccactgtcgcctcggtgatggttatctcagcggaggaaactaaggcaacaccgacttcttaaactcggagaggtaggaacgcaacaaaaggcaagagggggaaaaaaacctcaccttccccaaaccctcttgaaacgaaggaattagtaggaggcacgccgattaggcctccgatcataatccctgttaaccgctaaggtcaacaaggggcatctactgagatcaatgaacaccctttattagatgaggggtataggatgttggaattattttaccagnnnnnnnnatctactcacaagtatgctgattaacaacctaaatatgaacttctaaaacgattataagtaaacacatataatgtatgagaaaccttacattgggtg

SEQ ID NO: 171906 - DNA, 715 bp, Cannabis sativa
aaacaatacaagaagagtgagatcatcactacaacaatccaagagtgagattggcacttcaacaatccagtgaggttaatagtccttggaagaaaattattgtgagaggtttgagaaaagccttggtgaaaaatttcttgattgtaagggttagtcaagtccgttaacttggctcgatagttgaactcaaagctaggtccatagctttgaagaccaaggacatagatggcttagttctaccgaaacttgtaaaaattgagtttgcaatttctatccctaaactctttacatttcaagtttattatttgcttatactagtgtttatctatgtgattgcattaaatttaaatatttgcataaattgcctttgggatttttaaatttttaaaagtagtttaaatttccaattcacccctcttagaaacctatcttggactaacaactaaatctataactctaaaagaggtgttgttgttgttgaagagagatttcccaatagttagtaaagttaagaccgattgcctggtattaatccaagcagttcgtagtcctaaggtgatgttatttacgtttagagatgttgtgaatgattccaaatatcttttgaattctttagttaatgttttgtcaaattttattaaatgttccactaattaagttgctcatcaaattacaagagcttctcatttaaatgttgttagaatagttgctacaa

SEQ ID NO: 171907 - DNA, 546 bp, Cannabis sativa
ggttccaatcttgtggcatggcaatgtaagaaataacatatagtttccaaatccagcacagaagttgaatacaggagtccttctcaagttgtttccaaaattacctggatgcattctctattcactaaactaaaaatacagcttcctcgagcccctgtatcttgtgtgaaaacttaagcaccattcttttaataactaatcctattagtcatgctcgtactaaacatattgagctggatctgtattttgtttgagaacagctcactcaaaaactagttcccatccaacatgtccttccagttgatcaaaatgttgatgggctcacaaaagccacctccattgctcgattttctctattcaagaccaaacttggtattggtcccaataccaattccaagcttgagagggagtttcaagacagttagttataactgtttttggtgtttgttatttctgttggctttcggttacacttgttctattatgctttacttcttttgagcttgtgtatataaactagtgtaacactctcatttcaatgcaatg

SEQ ID NO: 171908 - DNA, 506 bp, Cannabis sativa
tagaaagtaaaactcagcagtcgaatttcaaatgtagaagtgaatcacgtgacattacattacattcctaaaaagtagaaaaatattaaaaaaaaaaaaagaaatacatataaattttattcattttatcgtttggttagatgttaaaaagtatacattgtctcgtgacaaaattgttagaacccaaaaaaggaaaccacttattttaaatttcatcttagataaataataatttcatttaatttttaatttttaattaaaatttttttatttttacactctaaattaattttttttttatatttttacggaattttataatggaataatctacggtcagcaactcacataaaaactataaaaaaaattaagaaaatatatgaagtaatttctcattttaattttacttaattttatatatttttttttgagatttttacactagatgctaaatttagccttttttttacatttttattcccgttagtttttttaaacttttttat

SEQ ID NO: 171909 - DNA, 592 bp, Cannabis sativa
gtaaaataatttccaacaggccattggaaccaagttattgtcgagacatcccagaacactacaattaaagacatgtttaaacacacgatcattttgacccagtaatagtgggaaaatcacagttgtgtgattttaaaataataactgcatttatactacatgatatgtaattaaaccccatgattttaggggagaaacgttgtaaagatcataatcaactttgtaattaactgcctactatgtgattataaatagtggcaagttagataaaaaaaaaagggacaaaaaaatcatacaaaaaaggccctgaaaaaccatcagaaatctaataagattgacccgtggactatgcagaattttaattgcaaaaccacgtaaaaaatcctttgccttcatactttttattttacagtttttatttttctgtgttagattgtcactattaggctcaaatttggttaacgaaaatctacattaatagtttggtgctttcattgagagcctttgtgaaaaagctcagaaaaaaaatgctcctttcttttgaaaaaaaaaccatctccttcatggctgaaaacccagaagatgttaatac

SEQ ID NO: 171910 - DNA, 713 bp, Cannabis sativa
aaacaaatgtacatatataccaccagaaaaaaaaaattctagaataaactaaaatatataccataaaaattgcatataaataaacaataattgtacaataaaaaaatacaaaaacaactataaaacaacaatagaacagttaaataacaacataaaaataactacagtagaacatctatctaagaatatacttaggaccaagaaaattttattctaatagagaggttataactaaatagagttacactaaaaaaaaattaaaacaccaaaaatatcaatttaacaacaataataataaacaatccttaatattatatgataataaaattatttttgagtaaatataatatttatatctttattacaatttgaaataaaatattaattttacataaataaatttataaactatacgtatatgttttatttatatataattattcttatatagagacatactttcttaatacatgacttaaaaaatatataaccaattacaatatagaagttattcttatttataattgacccaaattggtacttgatattttataataaattatatgttattcttgaatagagtattcttaaatagaggttttattatataaaacaataaaaagacaaatacaaatcaacagaaaaatagtaagatatcaacctcattgaaatatgcaaatcattcataaatcaactccgaataaactacaaaa

SEQ ID NO: 171911 - DNA, 578 bp, Cannabis sativa
attttctctgtctttcttttcttccatactttctttctctatagtaatgatttactttcataaaatatggatttaaaacgatgtttgtgttgatttggatggattaatgttggtttatgtgcataattgatgaatgtatggaaatcgcaatgtatattataaaatattttttgttttgttatggaaatatttttactgtaaagagacaaaaaattaataaatttagatttttacagaactcaatttggattttttataaattagttatgattttttgaatttagatgaaattatagcaacacatgtgcgcacgcggacaggggcttgatgcggcttcagacatgtctatgtccaagtttattcggacaagggctgtcctaagtccctctcccctgaccgaggtttgccccccacaaggagggtgctagcagccctttcctcgcccaaatgcagccttgtgtacgcacggggagtatgcatttccagtgcaatcttgtttttgtgatatcttttgattcaaaaatcatttttcattgaaaaaaaattcaaattttggtagaattttttgtagaatctga

SEQ ID NO: 171912 - DNA, 756 bp, Cannabis sativa
ttattaatggattactcatagtcatcattgttaaatattcattttaattaactaaatctattatataaagcttttacatattattgtgacaacaaaaattaatcatttactttttatttctttattttaaattaaattacatagaaataatttataataaaccataatagaatgaataataaatatttattttttaataaaaaaatatttgttatgcttaattttgtaaaaaaatattctaactatttagttaattttataaaaaaaattattttatatttttaaataggcatgctatattataaataataaagatatatgttggtaaaaaataaagaataattatagatataaaacatgtttataacaagtaaaattatttgtacacttatttttttttattataattaaatacatataacttattaatacattattatttattattttaattaaatatttttttaaaataaacatatttataataaaacatactaaagtgaataataaatttttatattataataaaaaaatagtatgttctattatattaaactgtttattatttatttatttttttttacaaaatatttatttatttaaagaaaacaacttatatttataataaataaattctaaaataaacataaatctataataaatatgttgagttcgcttttagccaacgacaatgagtctattttataagcgataaacgatatgtagtaacaaataataataaaacaataataagac

SEQ ID NO: 171913 - DNA, 609 bp, Cannabis sativa
ccaatcagatccatgactatgcatttgaagaaaatgaggccctatgtgcagttggccgaaagcttacgccacaacaaagaactccaagagcaagttcgaaggcatggggaccaacctcttccatcaagagagccttctttccctagtagaaggagaggctgcccatcaaaaaagcatgccattatggcacaccaagggatccaactccatggtgtcccaattcaccaaggagaggggaccaccagacctgccaaacattggagtacatgctacacatggacatacaacccatgcgccatttcatggagacgaccatggtgctttatcccacaatggaggtacccataacaaagcaaaccaagccacgatgctcttcgcaatacaaatttgtcaatacccaccattggagtacgtaaccgacacactcatgcaccattgaatggagatggcccacatggtaaacaaaatttgtctccaagtccacttgttagagacttgggcatgggcagagaagaaagaagataactctctaattcaaagagaaacagaggatgtcccatgggtagttgtgccatatatgatcccatatcaaggaggaccaaatcaaca

SEQ ID NO: 171914 - DNA, 1792 bp, Cannabis sativa
  modified_base (1730)..(1741): a, c, t, g, unknown or other
ttttatgagcatgggttaaaaatacatttactctatatttatagttttctattagagcatctccaatggagtgcctaaaatatggtatacttttatattttagcacacttccaatgatgttctaaatagtatgctaaatttggcatatgcgaaaaattgtgtcaaattgggcacaactgcacaagatataacattgtgccacatttagcaacaataaatactaatttttttatttaccatattactattatctatatatatctatatatatatatataaatgagagatataaaacggtgagatgtcgttctaaaatcactttaaatagcaatatcatttctctccttaattctctcattttttttttaatttttttattaagtttaaataatactttaataaaaaatctatatatctatatatataaaggagagatatgaaacggtgacatgtcattttaaaatcacttcaaacaacactattttttctctgcttaattctctcattttttttaatttttttattaaatttaaataataatttaataaaagaaaaccagaaatacttaattattatctaaaaattattgaaaatttctacaaactattattctatttatttatttttatttttttattatattttaataatttatactttaattaagtttaaagttttcacaaaattttttagtttcaaattttactttcaaacggtaagtattaatctattttcttaagcatatattaactaatttattaaaaaaaatatatattaactaataaatataaactacaattaataattatctgtatacttaatatgtatataaatatatattcaattctagatgagtgttaaagcctttatttatataaaactaatttaaatatctcactgattgatactatgtcttaggacaagatatattcttaactaatacggtgagataggatgataacaatgaatggaatacaatgataactacatgtgagatatggtgagacaacaaatgagatacagtgttatatgattagatataaaaataatgtattatatttatggggaacactctaatttttttttacactaccctattaatttacttatttttatagtaacaagtgtttttaataaaaaaaatttaaaattctctatctatacattagtataatttcaaatttcttaataaataataaattatagaacacagtaatgaacttttcaataatcctcctaataatgataattaattattgtgaatagacataattttttcttattttatggagttttatttttaataaatttaatcagtaatattaatatgtaattatattatataatttcaatatcactatttattaaaataatttttattatattaataataattattttttattataatactaaaaagattaaattaggcacgcgaagagtgattgtctaatttaaataataaaaaaataaaaaataataatttttatatattctcaataaaatattaaatgatcaaatttaacacaaattctcaataataatttttttttattttaaatcttgtacaatataaatagtaaactaaatagagtataaacttatttttttaatcaaatttaacacaaattttaaatttccttaaagtgtggctgtaagtgctgttggaattaattttagcaggatcttagatctactcacaagaatgttgatttaacaacctaaatatnnnnnnnnnnnncgataataaattaaacacataaaagtataaaaaaccttacagtgatggcag

SEQ ID NO: 171915 - DNA, 706 bp, Cannabis sativa
aagtgtttaaaataaaattatttagattaaaaacaaacatcaaatctgcaactaagatttagaacaataaactaaataaactgtctttaaaattttaaattatagttgactttttcattgctcttctaaaatcttcttccatcacaaactttgtagaagtctcacttttttgaatcatctttgtcttctgttcacaaatttacaagtaagagagaaaaatgttagtggtttagaacaattcaatccaccattgtttaataagacaagaagaaaagtaaatcatatttaccttcttctctagcttcataactctgtcaaaatatccatcttgttaggatgagtatttctctcataggaaaattgatcatgagcgacaatatacttattatgtactgccttttagatgtgacaggcatacactaatagtcataccgatctcttatctcttccttaaatgaagcagcaagatatacataggacgatcattatcatcatgccattggttaaaagctctcttgactatgtatccagaatgtttacacaatttgatccagggagttttaacagcgacaaggtgaagaagattttctccttacaagagaagctctataaatttggattggaagttaccatcaaattcagttacatagtaatagggatatgtgtcaatattgaattgttattccattttatatcgttattagac

SEQ ID NO: 171916 - DNA, 504 bp, Cannabis sativa
tacatatctatatagtagtactgaagcaaagacctgtttaattaattgacttctaataatttctatatagaaagaaaccaattaattagatgtcccttgttggaaaatgttcaacaaaagcttgagcttcatctgtttcaggatgggatacagagcggtggtattagtacttgaaatctcttgcaagcttacaggatgggatgcaaagttaaagatttgaaagtcataactaattgtgtttgaaacatatcaattatattgtagaaagtttgaaactaagtgcaagtacacagtgattggatagttaacattttttatctacttcattcattaatgtatctgtaagctacaccgtatatcaacttggtgtaccaagtagcatccgggatcaaaaaccccatggaaaaatgttaaaatcattttcttatatccaaaaaataaaggtgcaataaccaaaaaaaaaaaaaatacaaaaccggggaacaagcgtctccattaagttag

SEQ ID NO: 171917 - DNA, 654 bp, Cannabis sativa
aaaaaaaaataggtatatttcgcgtaagcgtctttatcaaactgctcaaattaaataaatcgctcatactatatcacactgtataaaaaaatacaatttaaaattttttacggtgcggttacagttcgtatgttttccaaaccttgcggtgcagtgcaatttgcgattttaaatctaataattacggttcaaaccgcactgcactatatattacaaaatcaccgacttttacaatatgatttttatatatataagaataaatatatatataatatatgtgtttattactaattcaatataattaattgatagttaatatatatcttataatgttaaaactttaatatataagatttttttttgttttgtattgttaaagctttgttagtttgatttttaaatttttactataatgtttgataatgatgatagtgtaaactactcacatggcactgcaccacaccgtatttttgcagtgtgatttttgcgattttaagatctcgcagtgtggttgcgatttgagatattataaaaactgcatgtgtggtaggcagtgacggtgacagaaattcggttcagtgagggcttgaataaaaattgaatgaaataaaaaagcatgttaaatagagtgttacatatgtgcttagaaaaaaa

SEQ ID NO: 171918 - DNA, 822 bp, Cannabis sativa
aatggaagagtggccatgatctcttttaggcctcatattggaggaaccacctggaacgagttgaagtgttacgctggagccctaaaacacgatgaagtgtgggaggtcactcaactcccagcacaaagacccagacttatggaccaagctatcactttcacggaagaagacatgaaaccagtgcgtttcccccaccatgaccctctagttatagaaactcccatcgccaataaggttatggctagaatattggtagataactagagctctataatgtattatttaaagaagtcttcatgaccataggtctcattgacagggacctgtcaccaagcggctcacagctcataggattcaatgggatgacactcatcctaatggaaaaagtaaggctctcggttaccctatgtcctaacaccccacaaagcacttttaagtaccgcacctttgttgtggtagactgtcccaccgcctaccatgccacccttgtccgaccgccttggtcgacttcggagcaattacctccattcgacacttatgccttaagttccctactcgagaggccaaagtgggaacggtcaggaggcgagacaatgttacaattgcagtacgtctgtcagttttgatggtacaaagagacaaagagcccatggtcatagaacaagacgagttggatccatgtgtgggattcaaaacaactatagaacctatggaggacattgaggaagtaagcgtgtgtgatgtaaagaccgcttagtttaaatttggaaattagaagataattagtgtttaattatgaaaaattatttatggatatttaaa

SEQ ID NO: 171919 - DNA, 532 bp, Cannabis sativa
agagtgtgtgtgtgtgtgtgtgaagctatacatgagttcgtctccaaagctaccaacgccagtctttccaagagaaagacgatagagagagtgagagagaatgagggaaccttgtaatacgattcagagagagagaaagatggatttaaggttttaatggagcggggctctccatttcgtgctgcattttttttttcaaagggagtaggtgctgcgtttttttttccagagggaggaggcggtactttttttttttttgaaaggagagaggaggcgctgttctaaaggagagatagtagagttttgttatttgatatttagggttgtgtaagagaatataataggttttattttattatttcatgatggtacactttttttttattaattcaaattatataattataatatggggacaataaattagggctgagggattataattataatttttattttttttaatatgaggctatatggggacgcacattgtgtgtatgtaaaagtgtatacccacacgctatgcgcgtca

SEQ ID NO: 171920 - DNA, 785 bp, Cannabis sativa
aacaaccctcatacttcaaaattccataatcaagctaaacttcaagcttaagaaactatagaattatggtgctaaggcttacatccacttggaaactcctagatttcttgctaaattctagaaaaagggatgaggattactgatttccttctggtttttgtggtggtcaggcaagtagaatgaaggagaaatgagtttctcttgattttttgtttttttacttctaaatgggtgaattccttgttgaaataaataaccataacctcgctcaaacccagtattcaatttatctctaatacccttctagcactcccactcaatcatactctcccatgcagccacctaatccccttcccaaattaccaaaatacccttctagcttataacttaagcaatttaaagtataagagtaaaatggtcaaaaaccataacctcgctcaaacccagtattcaatttatctctaatatttatcccaataagaaaaaggttctagacttacccatgtgactcaaatggatatccattacattttccgccgtcgccaagcaaaagttataaaaaatgcatatttcatatataatacaaacaatacatctaagtttgatttagatgtcattgacagcaatcgatgggatgagtattgttggggtagcgagtcgtttgagttgactattaattctttgaaaggcagaatagagcatggtattaaaatgaaaaataaaagagaggagaagggaggtcagtcctacgatggttggtacagagcgttgggctgtccttgggt

SEQ ID NO: 171921 - DNA, 660 bp, Cannabis sativa
  modified_base (591)..(602): a, c, t, g, unknown or other
agttttataccaattatcacaaaagaagcctttatattaaaaaaaatcttcttacctaaacaataaaatgaacatagagcctgagaatgcttctaaacaagaccatatgtatcaaatttataaaagaaagcttatgaacatgttctttattctaaccttagctcctaagtcattgaattctaatgcaaatgcaagttcaaatctaaatattcaaacaacagagatgtcacaagatatcaagagtggagaccttgtacattacactacattcttttttgaattgataattctttattatcatagatatggggctataaaaataaattttactgatagaaatttatatcttaagttcattaatcaccacacatataaattttaactaagttctaaaattttttatttaaaatttatgcatttttaatgtattttatccttattcaaccgaaatttcgcaacataacaactgtaattggacgttcccaaaaatttctaacatacaaaaacaaaaaacaaacacacaaaacaatacgaaacaatgcaaaacaacattaacaatactaaaactatccacccatccgaccgcagtannnnnnnnnnnncagaacctacttcactacggataaatatctaagatattcaaactccactaaataaaga

SEQ ID NO: 171922 - DNA, 645 bp, Cannabis sativa
tcagtttttgttgcttagttttaataagtatatcatggtgttctttctatatatgattatttatttgattctatagtagaagttctttcttttatttcattgtgaatcggtatgtgttattttcttcaaggtatctttctaataagtccaataatggtattctaaatttataatatttatggatttttcaagtgttttaatttttggttattagagttataaagatattgagttattgaaattatagagttactggaattgaaattttcgagttttgcgacttcaaatgatatgcttgcttcgctagagaacaatatttttagcagataagttttatttttggtacatttagtctcattagaaatagttttttgtgatttatattagttgctaatttaatttttttgtattttatgcagttggattatcttattttcatttggaacatttggagggagtagaacaagcatcgactggaaatgtaggtgtggaagatggagatttttagcatttcaagcatattttctggcaattttaatgacattggatagtaattttccttcaaaatttgttgttcttgttgacttttaccccttagcaattgtgtctacctttgctaggagacattctttttttttttttttt

SEQ ID NO: 171923 - DNA, 693 bp, Cannabis sativa
attatgcccaaggttaacaataacaaatatgaaagatacatgaatacaaaaataagtaaacagccgatcacagtacatttctttcaacgaatcaaccctgaccttccattgctttcacattttctttcaatgaaacattttataatatgctttcaagatggccataggaaccagaaagaaggacgatatgatgtgtggaagtcagcttaaatatagaattgcatggcctatttcgatgcatcaaagtataatgccaaaagatgaagatacttacattcaagtagacagtaacatcaatatttattatatcaccatcctgcaaattcatgaaacataagtcattgccattcttcttttaaaaatattaatttagaaacatagagttcagtgatgagtaaaacatggacctcaagtgcacgggaatctggtattccatgacaaatgcattcattcactgatgtgcatacactcttaggaaagccaccatatccaagaggtgaaggataagccccgttatcaataatcatttgatgaacagcttcatcaatttcatcagtctttatgcctggctgccaatacaagcaatgacgaaaactttcacacagtacatccttacacaacaaagtcacagaccatgtttacaaagcagtcatttttttcttttttttcttttctttttttgttttttttttt

SEQ ID NO: 171924 - DNA, 2017 bp, Cannabis sativa
ggtatttcaaaacaatctcatccaattattatactaacataggatcaaaacgactttcgcaacatttagcgtggctaaacccatcaaaggtcacatatatcaatacaaccaaatgacatagatcaatcatggatgtatagcatagaaattacatgcaaatgtgatcttagcatgtctatctccaattggtcttccttaattgagatcaattctttattctttctaactttataattaaacctcaatagaaagaatacattcagagtactcaaaacttaaatccatactttatctgcagaatcaaaccataaatatgtgtcaacttgatagaacattccaaatacaaactcccactaaaccaatacaattttaaaaatatcacatccatatatgagaaacaagctcttgaaaagccttaagtggtatatccttaatgatctagatcagaaaatataaagtttgtccttatatattctatagacaccttattattttgaactttattttaataacaattagcttgaagtcaatgtgcatttgaccttgtaaagctcatgttgttactaaaaatataacctgattgatttattgtcacaacatatatctttaatagttttcaataccattcctaattttatagtcatatgtgataaaaaatttcacaattaaaatctttataagatcagaatcagaattctgaatgatctccaaaaattttttgttttctaatttctgataagtgaacatatagtattttgttcttcataaattccttataacctatttggttgcataccaaaagttctttataggtgttatactcgaaatttggctgtactacagagagtgacatgtgtcaaacaagaggaatatgaaccaccagatataataatgattatatcagttaatgcaaaatggaataactcattaaatatagaattaatagactatattcataactcgctgactgtaaagtcttaagcgagacaaggatacacaaactatcaatttctgtattgacgagagaccatctaatctcggagggcaaaattccgaagagactacggatagggtatagcaagacatccacctcgctacatataaggaagtgatgacgaggtgggtcggcccttgaaacacttagcgtattttccacattataataactaagtataacaacttgagaacataaaggacatgattgtccagcctgcgaagccttatggtcaaagagaagttcttaagtttgctcagtaaactagtgctcatgccattggtggaaggcatatgaacaaagcaggtcacattggtcatccatgtataaagcgagatacctctaatctatgtacagagcgagatgtctctactcacgtaagcatcaaccgctttgaagataagaaggataaacggttatgcaatttttcagtattaattacacgtgtttacgtgggatgtgatcaaagcccatgaatttatgaaaaactgttatgtaattcaaatttaaatgtaaataactgccaacgtatgttactataaatagaagcaacttagaaaaaggaacgaaaaaatcttagagagagagatcccaaattgtaatactcaatatccaaaaatatcttgaataagatagactcgtggactatgcaaagttaactactgcagcaaaaccacgtaaaaaagttgttggtgttgttattattatctttattaattttcttatatttgtgttgaatttattacaaaatatgctcattaatcgttaacaaaaatttccattaacagtttggtgctttcattgagagcctaacaaaactaaaaaaatccaaaaaatccctcctaaccaaccaaatatttcctccatggctgatcacgatcaaaacgataacagtggtcctaaagagactaatcatcgtcgtgggaaagaacccatgggttcacgaggccacctgttaggctattttaagcttatattttggatcgattttatgtgcgcttttcactgtgttgggacagaatt

SEQ ID NO: 171925 - DNA, 659 bp, Cannabis sativa
aggtaaaggcaggatatttaacacgtgagagacattgaggaagccctaaatatgtggtaataaaagccctaccctccaactgaaaagtttggaaaaagagactcctaacctcagtacgggtattaggagagaataaaatagaggatttagcaaaattaaccatctgacctgacgctttagaatagatagataaagcatgatgcagggtttcacaagaacgcttgtcagcagtgcaaaaaggaaaactgtcatcagcaaacagcaagtgagtaatagaaggtgcccgcctagaaattgcaatacccctcagaagctccctattctgaaaattttgaaggagagcagagagaccttcagagcaaaggataaaaaggtaaggtgaaatgggatcaccctgtcgaaggccacaagtgggcttaagggacccatgaacttgaccatttatagagaaagaaatggaagcagtggtcaagcacctgaaaatgagggaaacaaagtgaacaggaaaatgaaaatggaacatatggtgtctcaaaaaatcccattcaacacggtcaaaagctttagtcatatctagctttaaagcagcccatccccgcgtacccacagtccgatttttaatagcatgcacaagctcatttgcaataagaatattatct

SEQ ID NO: 171926 - DNA, 659 bp, Cannabis sativa
tgaagtcataacatctaaactcacctaaattaaaaagtactaatatatatacaccatataaattcatacgaaattatgatatttgtacctcgaacaacttagttcactcaactgatcttatccgatgatgatcatgctcttgtgcttcctgttgaaacagtcactctttcaattgcacatcctcctgagtacccttgcattcctttatactttgcttccttttcttcttcactctctcttgctccttcacttataaataatttagaatcaattaattaaacaaagaaacatacaagggaataaagatttcacttaacatatgctaacttagtttagacacccatcggactgttaaacaaaaaaaaaaattaaaacaaagttattagtagttgaatcccactcaaaataaaccttttttttttatcatattattgatgatctttaacaaaaacccagttcaaaaaataattcaaagtacttacactattcaaaacaaaaattaactcatcatcatggaaacagtcaacttttcaatcaatagaaatatcagagtttatattcttctcctccatttgttcagtaaaatcagtttatggaaaaatttctagatgttatacattaacaatgatatatagttgctttaaaaaaaaaaaaaaaaa

SEQ ID NO: 171927 - DNA, 553 bp, Cannabis sativa
  modified_base (219)..(234): a, c, t, g, unknown or other
actgatatatctctatctgttttaacctccaaaataaatttttagtcaaattttttcttatggtcatgtaaattatagttatttaagacatcctcaaaattttaagaaatttaaaaagagtttaatatgttgaaaattgcgttcaaacagtgtattgcacacgtgactattttattttatacgtgtgttaaatggactgtttgaacattattttctatnnnnnnnnnnnnnnnnaatttctcaaaattttgtaggataccttaaatagctataacatacatgaatatgaaaaaaaaaatagactaatttttttttcttgatgccgaaacaagtatagggcgcatcagtatatttattttaagggagtacattgtagaatcaccctgattctttatatctaaatgaaataggggttttgtttggatatttaagttttagggtgcttctacaatacaccccattaaaatgggtatgatgcaacccctaactgtttcggtatttataagaattttttagtctaaattttttctgtacgttatagttatttaagaca

SEQ ID NO: 171928 - DNA, 1504 bp, Cannabis sativa
taaaaaaaaaagattattattttttaagggaagttctcttacggtcttaccaagtcaaataaaaattgagaaatgctaaagttacctaaatattaagtcctatagtttaatataataacttttaacaagtatcgttagtaaataataaggcgacatatctaaaagtactagatactactagtactcaataagagcatctccaatagtagcattattaaaggatctaaaaatttatacatcatctaaaaatataatattttattttatctctcttctacattatttttagcactcttacttctaaaaacactctaattttagtattttttaaaaatactataattataatctcacacattattattaaatatatatcctaacctttagctacaataactttttagttttaattttttattaaaaaataatgaatagcattgatgctacaacatagcatccatgcaaatttctagaacaatattctcttctctccaatagtataacatttcaatattttgtcacataatatgtccacctcaccaagcatcctctaaaattttactattagagactattccgacactggcagttactctgacgactttttcgacaccaacagcaaactccaaaaaattcgtcaaaaatggctaacaacttatcattgatcatttctatgtcaatttctaaaatctattttcaattctattattgtttttaagcaaaaaaaaaaaaaaataaataaataaaaatttattgttgctaatattattttttttttttaaacctttcatatttttttttctagctatcatttttttgttgtattaaatcaataacaatttttataaatacattggagttttttggtattttgtaaaatatataaccgtataataatatttaaaaatattatttataaattgtattttttttttgtaggggaccaatttttaaaattagaacatgacgtccgaaatatttaagatgaccctgttagtaaccctcaatctaataactttaaatactattttggatgttgtattttgtaaaagttattaattggactctctatttcgttaaatgacaaaataaatcttgtattttctaaaatagcacaaataggacccaaactgattttttgtcaaaataaaacttaataataatccaatctagagatgttatgacaaaactggttacattttctgtatctatttgtgttataaattgtcttcaagttagttatattaaaaaataaaattgtcaaaaattgagttcaggttcttatttttaccattttagaaaatatacgatcgattttgttatttaataaaatagaaggtctattggtaatttttacaaaatacaaagtccaaaatagtatttaccataactttatcataatattaatactttcatgtaggggtgggcattatccaatccaatccaattgaaccgatccaaaccaatccaattacaattggattggatgttaaaagctagattc

SEQ ID NO: 171929 - DNA, 612 bp, Cannabis sativa
attatatatttattttaaatttgagattatttttattagggaaatttcactttttatgattaataaaacacctcatatcaattttgactccccttactaatttgtaccaattaattcttttgattatacaaacttcccattttacccttttgtttttaatataattttcgctaaaattgcgagatctcattttttggagtattctgcgtgttcatatttttctcgacaatttctcgatggattctcgatgcgaatgtctcaaggtcaagaaagacctttctcgatgggttgtcgataagttcttgaaaggttcttgactcaaatgtcccaaggtcagggaagacatttctctaaggcttttcgataggttattgaaaggttctccactcgaatgtcctaaggtcagggatgacctttctcgaaggcttttcgataggttcttgacagtttgtcgaaatgggaaatgattttacatttccaatcatgattgagatgtgttttagcaaaaaaaaagtcattaatcttggcatgttatctttgcgttctcaattgtttgtcgatagttttttgatagtgtgtatagttgtgttttcaaactttcttgtcccatgt

SEQ ID NO: 171930 - DNA, 531 bp, Cannabis sativa
taaggtggataatgcaaatctcgtggcttttaatctagaaacataacaccctatctgacaatcgcagtttttggtgacaaggtgatctttaacgtgagcatgtcttcctatggcgaggtggacgcctcgctatcacttgctttgattcacccgtctgctatacttagtttgtataatgtagattataagctaagtgttttcatagtcattatatcccatccacgtgacgaggttagtgtctcttcttgtacacctgaagttacatggtttcttgttaatgcacaaggcaacagtttgtatatctgtatctcgcagaagactattcagtcatccgagtggtaaacatactctgtcaattatgttttttacgagttatttctcctcaaatgtaattatagttacgtacctgggtttatattttttcccagcttaacacgtgtcctcctctgatgtgctagctgaatttcgggtataaaatttgccccttaaaaagtttttttaataaaaagtgctttttaataattacaaagg

SEQ ID NO: 171931 - DNA, 637 bp, Cannabis sativa
tttcaaattttctttaaaaaaatactgtaattaaaatttaaggtaaaaatttcacatctacataatatttttatacaaattcctcatttcagttttctaattgtttgatacacatttctcatttaattgttcatatctaacgattaaattattttataattgtttctttttgctaaagaaaagaaaaaaaaattctaaatgaaatttaaataaaatgaaaaaaaactactttattataaaaatacatactatttctttagtaattctactatttttaatatttgtaacaaaatcattaccaattctacatattttgaaaataaattatgtttataatttttaagctattatacatttatttatttatataatacacatcattcaatgagtccaatatatatatatatatatatatttttcttatatatatttttcttacaaatatttttcttacaaatattgagcaatatcgcgcgaagcacagattaattccctaattattattttgagactacgcaacaagcagttatattgcctagttaattaatattacctgaacaatttacatataatataaatcatcaatacataaatttaaatattgtcctgttagaggagtactttaaaaaatatatat

SEQ ID NO: 171932 - DNA, 511 bp, Cannabis sativa
gtgtgatttcaaactcgaactcttttgaattttctcgtttggtcatggtttaaaaattctcatgtgcgggaccaaaccaaactgctttatttttttttatatatgcttaatatgtttttttttttattgaatattaatatttatgaacaatcttagacataatattgatagtaaatgctattttaagaatatatattttcattgttatctacataatataaaagaatagtaaaaaataaagtagaacatttacgaattacaaactacacaattttgaatcaaaccaatctattttttaaatgaatgggtttgatttagtttaagcatttaattgatctagttgaattttgaattttacaaaccacaaaattttttatttttagtcacaataagtattgtgactaactgtaaatcatcatttctatgttttgattaaaaggtttgtggctaaaggtattaatcacaaaaatgacaatttattgcgactaaatgtatttttaatcacaatact

SEQ ID NO: 171933 - DNA, 729 bp, Cannabis sativa
taattcccgaagttgaatctttaattcctttaactctgctggagtcattcagtaaggtgcttttgatactggttccgcttatggaaccaattttataaaaaatttaatctctcggggaggtggtaatctaggtagatcctctggaaatacatctagaaattcacacaccaatctcgtatttttaggtctagttgaaataggctgactagtatccactattgtaactaggaatcctatgcaacatctacgcataaggtctttagctttcaagattgtaattctgggtgtgcgtgatccttgtcagggccgtcttaaggtgttgagaggcctaggacaaaatttgaaacggggcctttttttataaaaaatcaaaataaatattattgttttttatttttcctctaagatattatttattattgaaattttgacacaatataattcactattttatctccatataataaataatttttctcatacataacctaacttaaggtaatatttgattatacttaatagcataaagtgttatatattttaagacttttataaaaaaaataatagtatgtacaaaattacgttaatttttttctaatatatgttataagtttttataaatttaagaagataaataataattattaaatgactttttatttaagttataatattcttgttagttattttttaaaggctaattaggatttttgcccctgaactttgaca

SEQ ID NO: 171934 - DNA, 1137 bp, Cannabis sativa
  modified_base (1110)..(1111): a, c, t, g, unknown or other
aattgcatacaccgcacaatcttccatgttataagaaatttttgaaatcaataatacatacatgtttgcagtaaatatcgactaagaaaacatgtatgaatagacttataaatatactaccgttgaactttgaagaacatcaagtaatcaagaaaatcttttccacctgcaataaattatgtacctgcaataaattaaacataatctttctactatttgaataacataagaaaaataataataaaataaagtgaacaaattcaaaaaatactggatgtgttttctctcgtgacattgatgaaggctctaattgttcttgtccatcagattcttcttactcttctccatcaaattctatttgttcatctccaatagattaagcttgttcttctccattcgattctgtttcttcttatccacttgattctgatttttcttctctatttgtttatatgattgttcttcaaaacttttcattgactgatttaaataaaaagaggtaatattatatcaatcgagtataaacatataatagtcaagctttacccacaagcggttgagctcaagtcaagacagttgagctttatactaacattataagaatttagagactacatctcaaccataaatggtcgagctctactccgtatagtcaagctctacactaatattttaagacttttgactacattggtcgagctctactaaaagtaatcgaaatttatactaacattttaattataatctcgaccatttatgttcgagctctactaatatcaatcaagctatataaaatatcaaatagactttagaaatctcaaacatatttggtgaagttctacccatttacctcatcatttaattgagttgttgtgcatgtgggaggagttggttcgtttaaaatcaactgttgttggattggttattttggatctataatacttggtattttgcttcgtgccattgaattaccaaaatataatatgttagagttgaacttcggtgattgaacaattggatagcctgaaaatgctaatcataagtaaatatgcataagagtcaattggtgcaaaattgagaaaacatcactctgttgggttttatgccctnnataaaactctttacaatctgattagt

SEQ ID NO: 171935 - DNA, 1238 bp, Cannabis sativa
  modified_base (1191)..(1192): a, c, t, g, unknown or other
gagttgaacgagtcttcgcagccactgtacatatcaagtcagtcttcaggatctttaaaccttggtcgctctgataccatgttgtaatgccctgactctcagtttgccacgtgtgtgcttttacaaacgcattattacaggtttattagttaggaaaaagtgtggtttaattaaaatctttcagtaaatctaaaataaaaactttcatttcaaacactgtcgtaatatggagatcccctgctaataaaatttctttacaactaaattacaaaacgactattacgaaatcaaggttacattttcaaatatagagaaaagaagtcgatcttacttcctagaagccaaaacaccacggcggatatgtacattgatgggaaaacctccaactcatggtcgaacacaacttctaacttcatacctgcaccatgaagcacccgtgagtcacattgactcagtaagaaaatctactagataaaagaatatacataccaataggtcatactctttcaacgtacatatacaattcagagtctatacgagcaatcttattacaagattatacataaccaacaaccttagtgtttcataaaacattctaatcatacattatcataaagacttactttcaatgcttcataaagcattctacttcacacgttagcatattcaaacaacttcagtgtttcataaagcactctaattatgcatcattataaatacatattcttacatccctaggtcactgtgattgcaagaaaagtgactaatttcataagcaatataacatctatttaatcatactataacaaaaatttattcaattacaactcatcacataataacacacttgatccatttcacaacatcataaccacacaatctcgttacttcataaagtaccattaccactcgttaaccacgagatacgtatgtcactattgttaaccgatacatcgaacgataagtaagaaacctatccgcagtttcaagagtaattactcataacagtaatgaccgtttcttttactcgatcataattgactcagtacgataataatcgtttcaaattactttcctcaatcataatcgagtcacaacaatgataatcatttcctattattttccctcgatcatagtcgagtcacaacgttgataattgtttcctattatctctctcgatcataatcgagnnacactaatacatactaagatctcgatcataatcgagactaccacaa

SEQ ID NO: 171936 - DNA, 692 bp, Cannabis sativa
ttttttttttttttctgctttttcggcttataattcctctattggattttgatcatttggagtttgatttttataatttattttatatttatattgtataatcttttatatatcaatatatatgccgggtaatattatagtaggatctagtaaaatttttttaccggtattctgaccattaattttagatcatgtggttattataatgtaaggtatgtactcttacgactacttgtatataatgaaaattttatacatattataataatatttaataatatttacttttttaaaaaaataaaaataatattaataattaaaaattttattaatttttatttagaattattattatttttttataaagttaatttgaattatttttatattagtatttattttcaaaaaataattgcttctcctaaacttatttttgttggcttttcattttttggttttccataatttactgctatttttgtttttatgtttatatctagttttttctttgttttgcttttaggcttgcatagttctggtgttatttattgtttgttgagtgttcagctttcctaccggtagaaaacttttttttgaccattgattttagatcatgtggttattatgatgtaaggtatatactcttacgataggactacttgtatacgatgaaaactttatacatattataa

SEQ ID NO: 171937 - DNA, 504 bp, Cannabis sativa
aacatcaaagtatattgtctactatttagattaaaaaatccaagagacattacaatagcctctattcaaagggaagaaatgagtttgaatatttaatgatttagagaaatgtaaatcttatagaattggttaaaatggaaatattacttattcaacatgttcgtctatctctaaaaaataaagggcaatttattgtatatcaaattataggtcattggtgcgtcattggtgcgtcataagagtatatacacgattaatcaaagataccgaaaaaaggaaccggttgataaactttttttgatgaagtcagtttaaaacattgaaagatagctgaaaatagagacaaaaatattcctgtagcaattgtgttatagattttcagtttatgaaaagtagtatgggatctgtagtgggccagaaaataacacgttcgatcgagtatgctaggggtgttcacaaagtatccgatccaatccaatccgcatgatccaatccaatccaatc

SEQ ID NO: 171938 - DNA, 1343 bp, Cannabis sativa
tcagcctggatgtggccatatccgccacactctctacacttgaatcctcgattcttttgatcagtagatggttctccttgtttgaagtttccacctttgtttttcttgagagtattttctttatcagctggaaaatttcttctgtagttctttttcaagactttagcatagtttctcgttaacaaggtagcagtttcgtcagtattgccattcaattcctctagaaccggtttcttgttttcttgatgaataagggcaatactgcatcagatttgtccttcactatatccttctgtttcttggttttcttccacctggacagtgacaactcataattttgaaaggacccaatgagctcatcaagatcaagttcctcaatgtttctcatttcttcaattgaggttactttggacatgaatcttctggggagaacaccaagaacttttcgaaccaattttgaatttaagtaggttttccctagagcataggattcattggagatatcacacaactttgcatgaaattcagctactgactcatcttccaccatggtcagattctcaaaagccttggccaagacacgcaatcttgatttcttgactgcatcaattccctcgtttttaattttcagcttctcccatgcttcctttgcaatttcacagttggaaatgacctttaactggttcgtggagacagcattaaacagagcatgtagggcctttgagttcaagttagccctttccatttcgtctgtggtccatcggctcatgggtttggggataactatttcattctccattaacgttgtttcgaccacccttcttctatggacatccatactccttcatcaagagctctcaagaaatcacgcatcttcatcttccagtatggatagttagcaccttccaacatcggaggtctcgaggttgaccctccttctctaaacatttccattctacacaaaggaacaaagaacaaacacactcttgttttgtagttcttcgagaaagaactcaaaggtggttagtggtgacagaatcaatcctcaaacaagtatcaagagatttcaagaatcaagaatctgataagtctaggatctaacataaatttttagaaaatttcaagctctgataccaattgaaagtactacttgtcaattttcaagactcaaattaccgagttgtttatctttgaattgattgatttcaacacttgcattcaagactcgaattgaaaataaagtagtaaagcacacaatgatttacaagcttcatctgcactgagaacacatctcagccgactagtgcttgggttccccaaaccagggtaatctcatctactaa

SEQ ID NO: 171939 - DNA, 631 bp, Cannabis sativa
  modified_base (217)..(219): a, c, t, g, unknown or other
tggtgactgttagggttagaagtgcttcgggttcgaattctaagtttgatttgagttaattttagcttctagtagctggtttggttgtgttgtgatgaatttatgaaagtttgaacctaggaactcaagctttagtctttaatggcattttgtgatttagtgagtttttctgtgaatttctggttggaataggttgtgtataccctaattaggtacnnnggaaggtttggttgcatttggtaaggttttgagcaagaaatggagtttttgggtgaactcgtgtaaattgtctagccgattttaccagtacttgtaaaatcggttagccggtttttgcagggttccccgaatgttccattttctcaattctcgtgcatttaagtaccgtagttgggtgtttccctatttcctgagttagtgtgatccttaaagagtatagcagaacctagagttgtgggttcgggtttcccagattagggttttgatcatgtgatttacccggtttcattatgtgattagggcatccatcaagcgcaagactttccattcaggtcgaccagcacacttgaatcttgaaagaaggtaagaattgtgtataatgtgtgatatcaatatctgagtgtatgtatat

SEQ ID NO: 171940 - DNA, 585 bp, Cannabis sativa
ggatcacgcatcaagatctgagacctaacaaggctgtaggaatcatttaatccaaccaaaaactcaagcaatctatcctcttcttgatactcttgtatcactttcactgcgccacaggaacaaacaggtggtgggcgaagttctcttatctgatcccaaagagatttcagtcgagtatagtatgttgtgactgaattagatccttgaactaggctttgcatcatcttctttgcttcaaagattcgaggtgcgtttctttcattgaatcgttcatgtagctcagcccagatttctgctgcattatcatgatagacaatactgtctgcaatttcatcagaaattgcgtgcaaaatccatgagatcacggtgctattacatctgcaccagctatcgtagtcatcgtcatcttcatcaggctgtggtaatcttccattgacaaatttcactttgttcctagcaaccaaagcaatcaacatagatcgtctccatgtgctgtagttctcactgcctttgagaattttagggacaagcaccgcacctggattatcgccatttgaaagaaagtaaggattcgacaaatcatta

SEQ ID NO: 171941 - DNA, 803 bp, Cannabis sativa
  modified_base (705)..(705): a, c, t, g, unknown or other
agggcataaaacccaacagttaacctattgagaagtcctcctttggtttctttttatcttgaggcttctttgtcttttctttataattagtctcttgattatcttcattggagttacaagactcaaccatattgcatgtattctcaatattcgcttgataagaatacttataaatgtaaaacttgatttctttatcattagcactcaagcttaagtggcctcttcaaacatctataagcgcactaccaattgctaagaaagggcgcccaagaatcaatggcatatccttgtcttcttccatgtctaataccacaaaatcagctggaaatactaacttacccactttaatttgatcatcttctattattccccttggataagtgaatgatcgatctaccaattgtaacgaaattgttatgggttgtaacgccctaaataaataggcacgttacccaagatacttaggaaaccctaatgccctaaactggattactaataaaattagcgcgagaattaaactttagtcagaaaccatttgaaaataaacttgtaacaatttaaactttacaaactaaaagttacaaaagtcgggatcccaaaaatatttacataacattattacaagtctttttccattggccgacctaagcggaaaaatagagtcacaaacatacatctccgatagaccccaacccgcttggtctngtgtggcccgaacatgtacattcgccattcaactctcatactcatggctgatcagaaacagctttaccctttcctgcacagtagagcacccgtgagcc

SEQ ID NO: 171942 - DNA, 1106 bp, Cannabis sativa
ttcatcaaaaacaggaaaataagtacttttggggaggaaacaacactttttggatgccagaagcaaggcccagctcccaggatgacacattggcctgggccaacttcaatggtatttttcgagaactcttcccagcatcttctccggttttagaaaagattaagattcaactaaatctgaggaccaaacagaacttagaagggcaagaaaatggaaccagcgcctaggttgatgttggtttttatggtccatatcagagttataaaagcggaagcaaaatttaataaaacaatttttatctaatatgaaccataagttcaaggatctcaacataatatatatatagattaaatctaaactactgaaagaaagattatacctcttgaagcctatcatgatattcttgtttctttttttataattatcgaacatctaatctaagaaatttattgaagaattcacaccttaatcttccaagccaacctcaacactcaggaatagagtgggctattagatcttattggatgaacaaatttaggtattacagtgtgtactcaactcatgagacattgtaatagagttatggttttgatctcacacacacttgaataggtgtgtacatgtgtgagatgaagagagaaagagggtgggagtgtcaaagagagagagtagggagtgaaaaatcaatcctatttttccctgcttttagttgcttacttttcgttgctaggcttgctttaacttgttgatttatgtcttcttatatcttatatatagtgttataaacaaagccttttaattatttatttaaaataaaagtaaatatctaatttgatttgaattagaattcaaatttaaatataaataactaataaatgaatatcaaatatcaatatatcttttattttaataattatccttttaattaaacaattattgaataatttatttaattaataattaaaagataattaatttaaattattttaactaataaaataattaaactaaattaatcatgtacttttatacgttaccctacacgtgtagaatgggtctacacgcactacaaaaaactgctacctttagtgacaattttttagtca

SEQ ID NO: 171943 - DNA, 594 bp, Cannabis sativa
atgttcgtgcttggatatttttcttgaaatgctgagtaaccttttgttggtatgttggggctctgatcaaggctttctctattcatcatcaagtgagtcgagcttgaggttcatactttgccagttctgaccataagtcaaatgttcatacctagaagtgggaattcctatctctgctgggatgactgcttctattttgaaagtgagcgagaaaggggtctcaccagtagaggtttttgcagtagtgcgataagaccacagaacaccaagcaattcatctgcccacattcctttggctttctctaacctcttttttaatgtgttgacaacaatcttgtttgtcaattctgcttgaccgttggcttgtgggtatcttggggtcgagaatgagagttggattccccattctttgtaaaagaactctaaacttacaaattacaaggcattgtgtgtgactatctccttttgcactccaaacttgcctattatgtttttccaaacaaaattcttaactttgagatctcttacctttgcgaatgcttctgcctcaacccacttggtaaaatagtttgttagtgctagcataaagactcg

SEQ ID NO: 171944 - DNA, 572 bp, Cannabis sativa
tatgaagacccagagcatataacaaaggccttcctagatttctacaaaagtcttcttgggacgaaaatggagaataggaagcaagtgaaaaggaggaggccttatttgggatcccgggatccaagactcctgggctagatggttactcaagtttcttctttcaagacaactgggaaactgtaggagataagctatttggaactgtttcatcctttctttagactggtcaacttctcaaggaaataaactccactgttattacacttgtccccaagatgaagtgtccaaacacggtgagtgattacagacctattgcttgctgcaatgtcatttacaaagtagcaataaagatgatttgtactagactcaaaaagatattgcctgatcttattgctcagaaccaagggggcttttttactgggaggttcattgctcataacataatgctttgccaggatttagtgagacattttggggggaaagttaccaaaccaggatgtgtgatcaaacttgacattcagaaaacttatgatacactggattgggattacttggaggaaatcttgcatgcc

SEQ ID NO: 171945 - DNA, 1260 bp, Cannabis sativa
tacaataataataataataacttatgtaataaaccttctaaagggttatttgatttagtaaactcatttccatatctaagaaaattttttagtttatttttttgtatgatcgcattgtatatatttaagattatttataaatttttaaaaaataaggtttaaacagttatacgagaaaaacagttatttgtaataaaatatgtaaattttattttaattatttaaaaaaaatttagaaatttacaactaatattaaataattataacaattataattataaaaaaaataaattaaaaaatttacttgtatgctaaaataaataatgagtttatcgaaacacttttttttaaatttcctaataatatatgtgttgttttcagttttgtgagctgtggctgaattttaaaataatttattttagtggggtacgtatatatatgtagataataatatatatcaaatttatataatatgtgtgtaagagaaggaagaaaacccaccaaggaaaaaacaaaaccagttcaataagagaatatatcagatatttgcacgatttgtatatatttattaattatatatattatctaattatataaaaaataattagttgatgaagtgtttaagactcaccaaaaattgaaagcgtgacaataataataataataataaataaaataaaataaataaaataaatatatagagaagactgaagaaagggttgccgtttttgaactaattaagcaacatagatccatttgtagaccccaaaatattaattaacataattaattttcttcttaatagaaagatgctcaaacaacacaattgatattaacctaatataactaattaagaaacataccaaataaactaataaaaaaatctacaatgcatcttttagaaaagatgtaccgatttatttttatttgttttggtatctaaaataattttttagtcaaattttttctcatggtcatttgcgttatatttatttatgacatcctgtaaaattttgagaaattcaaaaagatttaacatgctaaaaataaggtttaaataatgtattgcacgcgtaactattttattttatacgcgtattaaataaactatttgaacactgttttctatgttgtaaattatttaaaaattctcaaaattttacaaaatactttaagggtgcgtttggaaagccacaatgtaattggatttgtatgtaattagaggtaattacacaatttgacatgtttttctgaccatgt

SEQ ID NO: 171946 - DNA, 919 bp, Cannabis sativa
cgaccttattcatggtggtgtatgcttcaattggattcggaaaccctcgtcggagctccgccgggcccgtagagaaggccaaatctgattccgtacttccatggcttcggccgttttagcgaaccgaaacgagaccaattggccacaacccagagcgaaattcatggggaaagttcctaagcagaaaaaatctaagaggcaattccaatttcatgcaactgcaggtgacgttaacgggggatgtcagatcgatgagtcttcggccgtgacccagacggcgtcggacgatgcgtcttcgatcaatcatcggagatcgggcgagctcaatttgggtaatcctcaatatgtatcgtttaacatggcatcgttttctaggaaagagcttggagagctgaagaatcggctaataatggagcttgatcgaactcgacaattgcagaaccgaattgatacaggagaattcgttactttgcctaagaaatctggaccagggaagaaatcgggtttaaagcgtccttttccctcgaattcgaatcaattcgctaaagaatcgagctccaatttcaagcgatcgcattgggataacccaattttgatgaagaattgcagtccgatattatctaaactgatgaagcataagcacgcatgggtctttaacaagcccgttgatgccctagctgaggggctccacgattaccacgacataatcaaacgcccgatggatctgggtaccgttaaatcgaacctcgccaagaatctctacacatcgcctgtggattttgcatctgatgtgaggctaacgtttcacaacgccatgacttataatcccaaagggcacgatgttaacgctatggctgaacaacttctggctaggtttgaggagctgtatcagcctctgaaagagcaattggaagaaggg

SEQ ID NO: 171947 - DNA, 1118 bp, Cannabis sativa
gaggtatacgtggacgacatgctgatcaagtcgaagggatgcgcaagccacgcggatgacctagaagaatgcttcgaagtggtccggagatacagaatgaaactcaacccgaagaagtgcactttcgggatcaaatcgggaaagtttctgggcttcatcgttagccagcgggggatagaggcaaatccagagaaaattcaagctctcctaagcatgccttcccccaagaaacacaaagatgtgcagagcttaaccgggaaagttgctgccctgagccgttttatctcccgatccacggaaaagtgcattcccttcttcaacatcttgaagaagtgtcagaaattcgaatggtccgacgagtgtgatgaggcattcaaaaaactaaaagagcacatggctaaaccaccaatcctatcaaaacccgttctcggagaggacttgttcctatacttggctgtctccgagaatgcggttagcgcgaccttagtatgggaagaggaaagaactcaacatcccgtgtactatgtcagcaagcgcatgataggagcagagacgcgatacccggtgatcgagaaactagttttttgcctcctaatggcctcgagaaagctgagaccttacttccaagctcacccaatcaaagtattaactaaccacccactccgaaaagtcctacaaaagctagaggcacccggaaggctcctcaaatgggcaatggagctaagccaatttgacctacactacaatccacgcatttcccaggcgttagcagacttcatcacagagtgccatgaagctgaggctactgcaaacatacccacaccaccagtcccagcgtggaaggtatttgtggatggcgcctccaacgagaacgggtccggagcaaggttcgagatgatatccctgaacggacttcaactccaagcagccctacgattcgaattctcagcttctaacaacgaggctgaatacgaagccctaatagtagggatgagattggcaaaaactgtgggtgccaagagagtagaagtctacagcgattcgcaactggtagtaaaccaggtgtcgggagaatatcaaatgcgcagagaaaagatggccgcatatgtagcaatagt

SEQ ID NO: 171948 - DNA, 586 bp, Cannabis sativa
atatatcatttatttaatagttatgaaaatttgaaccataattataacctactaaatgaaattcattaaatgttatttttatcaaaaaaataaaaattattagggcactctcaagtcctaataatttctctactttattattattatttttttaaaatgcatcaacaaaacaatatttattttatttattttacatcaaacttttacaacacatcggtttctatttttttttttttctatatatcttcttcatatcatttaagttagatatcttttaatatataatacatattaataagaatagttttgtgaattaacacacttcaagaatagattcgtttcaatattattaataatgtgaaataacacaaaatgacaattaaagaaaaaaattagaaattaactaaaaacaataaacatatactatgacaacttattgtagcatcaaaagcaggagacaacttattggccaaagaaaattggcccaaaagatagagattggtttcattcattgtaaaaagatagagattgatcaagaggtctttaacataaagatgctcttttctttgtaaatgtttgtacaaaa

SEQ ID NO: 171949 - DNA, 916 bp, Cannabis sativa
tgcctccactcgtaaaaggaacaattccattcgcctcattaccctacctgatggatctatatctcatgatcaagccactataactgcccaattccttcattttttcaactcccttttcacctcccaaggagttagtgaagctgctgtcaatgatcttcttcaagggatccccaataggctctcaactcatcaggttgattttctagccgagccttacactgaagtggaagttgaaaatgcgttatttagcctctctgtggacaaagctccggggcccgatggccttaactcgctcttttataaacgtaactggtccactcttggcactgatttcactaaggccgtgcttcatatccttaatcatcagggggacatctcttccatcaatcaaaccatcattgtcctcatccctaaaaagaaaaacccaaagagtgttcgtgattttcgaccgataagtctttgcaacactttctataaatgcctttccaaaattattgcaaaccggttaaagcttgtgcttcactccattatcagtatcaatcaaagtgcttttctctaaggtcgccaaattactgataatattctccttgccaacgaaattattcacgctattcattctagacgatcggggaagatcggttgggcagctattaagcttgatatggagaaggcttttgacagagtggaatggccttttttaaaccatttgctcaatcatgttggtttcccatgccagttttcatccctgataatgcgctgtctttccacggttcaatttcgtctctccattaatggctatcttaccgacccttttcattcaacgcgtggtattaggcaaggggatcccctttctccctatcttttccttctaattgccgagggtctttctgctgcaattcgtttgcaagaaactcag

SEQ ID NO: 171950 - DNA, 779 bp, Cannabis sativa
ttgttgcatactcttccctggcactctgttcttgcatcatcaaattttcattccccgggttctggttcaaatcaccttgaatctctgctaactgtagtcttgctgctgtttctgccttatggatatcagaaaaatccgttctattgagttgctttaatactgcttttaatctcctcaacttatggacaattctaaacattttcgtgccactactctcctcttcccaagcgttagcaaccagtttgtcatactcaggagccatcttccacatgttgtagtacctaaatggttttttcccatagttcttatcttcataaatggataccaagataggactatagtcaaaggtcatttcaggcaaaaaaacggcttcagagcaaggaaagacattcaaccacagcgtattcaccattgctctatcaatctttgaaaagatccgttcctgtggtttctgcttattgttccatgtgaaaaaagaccctgaagatttcaggtctaccattttgcacttctccatactatcccgaaatctctgtgatggtacattctgagctcttttcccaatcctttcatttgcattcaaaatctcattgaaatcacccattagtaaccatggatcatccactttgcttgctacttcctctaattcctcccataattcttctctctttttcacatcattaaatgcatagactaatgacacaaagaatttccccacttgttgctgagattctacatagcaatgtataagttgactcgagcaatatcgaatatccaca

SEQ ID NO: 171951 - DNA, 532 bp, Cannabis sativa
  modified_base (157)..(158): a, c, t, g, unknown or other
tatgtaaataaattcgaaatctaacgtatttaagaataaatatatttttgaaattagaaaataaaataaaataaattctaaaaaattataataatttatgttgatccaaaattaattaataaattaattttcatcacaaatataattttcctatttnnttaaatttctaagaaaaatataaaatatttaagtatcttgaataaaatttacttaatcattaattttcttattttattaaagataactagaaaaatactacatgtatacagaaaaataaccatctagatatttcactaactaatcacttattgtctaataaaaatattatatattttaatctatttatttaataaatcattattgaaaaatttatttgatttaagttggtctaaaaactaattaaattaattaatttttaactttaagctatttttcaaaatttcaaaatatctgcatttaaatatcaaaattgtaagaaaatgattaatcaaataaaataaaaattttaaaaattattctaacttaagttgat

SEQ ID NO: 171952 - DNA, 850 bp, Cannabis sativa
  modified_base (799)..(811): a, c, t, g, unknown or other
tgcccctccaccatcactacccatgaatctatccattgggcctcttacacctctactaggcatgagggcagaatccttttgagaatagtaagcacccgacccaattatcccttcaaaattcatttgactcacatgctttgctatttttttttttttgtttcaagtgcttcacaaattcatcctttacttctttgggaacctccgaacacggtttaacatcttttctagtttgagcaaggtgttgtttcaatcttgtaacaccacccttaataatttgtttgcaataattacactcaagataagcataagtcttcttttttttagtatctcctcctgaaatatcacctgcctaccatgtttccaagctggatcttttctattttcactgttaatacatgttgaaatttaagtatctaaatagtaaatgtagataaaaaaaaaagaaaaaaagaaaaaaaactaaataacatttatctaagagcagcaaaaagagatcaatagagagaacttcaccaagcagctagaaagaagaaaagaaggaggaggaaggcagcaacaacaattttctctctatatctctctctctctcttttcttttcttctcttgcagtgcgattgagaagaatgatgaaggaggggtgtctcacggctgctaaccctaaagaaatatagttttgttcttattaatataaatggtgtaggtttagtttctagttgggcttttttttagttatttgtttgagttttattgggttttattgtgttttattgagcccttttcttaagttaaatgttattnnnnnnnnnnnnnagttgttgaatgaaaataggctaaaaaaaccctaaaatc

SEQ ID NO: 171953 - DNA, 784 bp, Cannabis sativa
tggaagcttttgcaacttactctcttggtggttcgcatgcttctgtggcagagattatgattataaaagaagtattaagtttgctggaacaatgttgttgtggaaactaactgtttagtggccattcaagcactaaaaagttcggttgacatgccatttatctttagtcttcttgtccaagattgcaaaaatctcctactttctttctttgcataatattaaaatttgttatgttaaacggtctactaacaaagccgaacattgtctgactcgtagctctatattagtctgaccgtatcttctttgggagcaacgatccttctgctcttcacactattagcgtatttagctatttaataaaatatctacttttattaaataaaaaaacatattattatatgcttctttaaagtatatgtaaatataaataatgattatttaatgttatgaataatttcttttttattggatgcaaattctttgcccaaaaatgttctcatttcatgtttagtcatacccataaagtacttttaaagaaaaattctattatgatatatacccaaaaaaaaatgcactattaatgttgtaaataccaaatgtgttacatgacaatgtatactgtattagcaatatatcttttatcagttttttttaaaaaattatgagtaatatactatgaaaaaaaataattaaaaaagtcaaaatcatgtagctcgttgttaaatggatatttgttgagaatcatggagttccatctcaaaaccaattggcaatgagtggagta

SEQ ID NO: 171954 - DNA, 801 bp, Cannabis sativa
cggccatgtgatttgggcagagaggcattttttggtgcctacctggctgaggcgagaaggaggcccgctgcggcgatatctcctgggcagagagcttattttttcgtgctatctggcagcggcgaggccattcttggccgcggcgaggcgagtcagacgggatttaaaaggcaaaaattcaaaacatttcaaaacccaaatttttctcaaccctaaccacctccatgccgaaaacacctcttccacaccatttttctctatttcatctcattccaaaccctttttcttcaaatccaaccataaaccttcatcccaaatcatcctaaaacattattcctctcatcaaacactcttctccgctcaaaatcaatcccaaatccctaaaacctcaccaaatttcaaaaaaccactattcatcttcttccttctcaagaacttcaagttttccttcaatggaggttgaataaaggtggattctcattgaggtaacaattctaagactctctatacaatttttggtggataattttgaattgttggagaacttttgaattttagtgtggatttttgggatttttgctcaatacattgttcaatagagttgttgttattagaaattggtttgtttgtgagtgggttaattcccgggaagtgatttttaaggggaagtgctgccaaaaattttacaaattttgagtgttagaatttttgggtgagatgggtcctaaaagatctagagtgagtgaacaagggggagcttcatcatccaacccacctaggggtcgctctaatcttgataga

SEQ ID NO: 171955 - DNA, 547 bp, Cannabis sativa
  modified_base (219)..(221): a, c, t, g, unknown or other
tatttcaaatacataaaatttaatataatttaaaatttatatataaaaaatttatatttaactaattttattaaatattaaaataagtaaataaatttaaatattttaaacaatataaataataaatttattatatagtaaaatttatatatataaaaaataattattcaatttttttgatacttttaaataattatctaagttatattttaataaatnnnttaaatttaaatatttaaaactaattattttttcaataaaataattaattaattaattagccgtattaattttaactgttaattttaacaaaaaaaaaaaaaaaaactattaaactaacaatttcatttaaatagttatatttaatataaaatatattgtaaaggacaattctactaggacctttaaaaagactcattaatagagactttgaagatccaataaaatgcaacacatcagtacatcagttaataagtatgaattttgtctagtaaagaaacacttgattattttctattttacatttcagatttttttttttaaattt

SEQ ID NO: 171956 - DNA, 781 bp, Cannabis sativa
aaatggacaataaactttctcaataaactttaccaatcacatgttgttgttatctttttattagattatctccgatattaaataagtatcactaaaaataacagtgtttcttgaattttattattccacttgttattttgtcatggtataattagatttgagtgtaattggaggtaattacataatttgacatgtttgtctcaccatgtatataattacactgtaattgtgtaattaagagtaattaagaggttccaattacactctatgaatctcatggctcccatgagaattgagtgtaattataccatataattattaatttttttttttattttaaatattaactattaaaaaaaatattatattcttgtataattactaattattttgtcaaacaaaatattaaaaattcatatatcattaacaacacataccacattatattttaaagtatagtataattaatacaccgtaattattaacttacacatgaatttattcttttagaacagtttcaggcaccaaaaaacaattttagtttcattaatgtgtgggaatatatttattaaaataataaaaatagaacttatctattttaataatttcactaaacaataaaaatatattttaacttttttctgaaaataaaataaaactgaggtgtactcataccatcatacttattttttagtcttttgagttttgagtgcaaatataactcccatttttctatattcttttaacttttttttccaaaaaaaattccataatttttttt

SEQ ID NO: 171957 - DNA, 1435 bp, Cannabis sativa
aaagcaacagtgatgcacaactggaggaagctgattgctgctaaggggcttaaggctacttatctcaagctcgtgagattaaaacattgccttagaaaatttaaccatgattctattggtgatattggcaggtcttatcaggatgcaaagtccaaatatcttgatgctagattacaatctcaagctcacccactggatcattcttttcttgctatggaaaaagaagcaacagctctctttatttgtcagggaaaaatgtatcacaactttttgaggcagagaagcaaggtcacttggcttcacaaaggagatgaaaacacttcttttttttttcatgatatgctgaaaaagagaaagcttgaaaatagtatcacttcgttcatcaatgatcattgtgaagttgtgaatcattttcctgaagtggtcgatcatttgtgtctcattttcggggtatcatggggagtagagatctgatttataataagttgaatgctgattgtatcatccagggcactagacttgacctgaatcagcagctgggcctcatcaagcctttctccaacaaagaaatcagagctattttttttagcatcccagatgttaaatctccaggttcagacgggtatagggcaggtttttggcatgaaataggagcagaactttatgcagcagtcaaagatttctttaatacaggtataatcccgaatgagtttaactcgactcttatttctctaatacctaagattgagaatcctactaaagctgtagatttcagacctattgcttgttgctctacaatctataaaatcatatccaaactgttatgctctagactgtctgtggtgcttccaaatttgatcaatcaaaaccaaggggcctttatcaaaggaaggtctattgctcataatgtgattattcttcaagacctcttgaaaaattacaagagaaaattaatttccccgaggtgtgcttaaaagatatatatcagtaaggcttatgatactatcatttgggagttcttggaggacttgttggttgcctttaactttcctcaaaagtttatacaatgggttatggtttgtttgagagcaacttcttattccattgttatgaatggccgagttcaaagcaggtttaaaggagaaaaagggttaaggcaaggggaccctatttcgcctttattgtttgttttaataatggagtatctcatgagaagtcttcaaagggctgctaataactcagcctataggttccatccgatgtgtaaggagttgaaaattataaatctctattttgctgatgacttgattctgtttagtaagggttctactccctcttttctgatattgaggtactcgatgaatttagtcaggtgtctggattacatatcaatgctagcaaatctcaagtctattttggaggcatgagtaatgtt

SEQ ID NO: 171958 - DNA, 560 bp, Cannabis sativa
gactcaagaaaatttgatcgtaaagcttccaaatcagaagattggccattcccagtatcctgtgactgccccaccagcccttctccttcagtcgattctttaaaaacctggttgtctatcgtttccttccccctctcatcattatttagatcattaatactaacagaggagtgggaaggtagttgggaatcatcaatattcatttcattctcaggggccccatgagaatctccctcagctccttattgtgcacgtgaggcctccatgttgtctcccatcacgccaaaagcaaataaatgaaaatactgtagagaaaaacagaatcgattgtgcaagttgaaaagatggaaataaagctaaaaggtttaggttagtgcagattttcaaggttcaatactgaaaagttgacattgagtcaagttggacttccaacactctcaaccagagagaaaagtaccttatctattttatccttcataaaaatgcaatttaaaaattaaaattatctacacaccagccgacagccaccagtagataaaaaatttaaggtggcgtttggt

SEQ ID NO: 171959 - DNA, 536 bp, Cannabis sativa
agcttttgtttgtatcgaaccccttatcgagcatgggatgttgaaactatccggatcttttagcttgggtggtagtttcttttgtaggaccgcactacactcttcattaagtgccaccatctcaaattcttccaacttccttttcttagataggatatctttcatgaactttaggtaagttggcatctgttccaaagcctctatgaatgggattttgatgtgcagtttcttgaatatttcaaggaatttcgaaaactgcttatccatcttattcttgtgaagtctttgaggataaggaattttgatgtgatgatcaatgctgatgggaggtggtgttttttttttgttgaagaccgtcagtagtcttcttcttctcttgtgttggtgctggttctccctcttcttcctcctttggcttatcttggtttggcccaacataattcttaccacttctcaagataattgcattgcaattctcttttggatttacttcagtagtactaggcaagttaccttgagccctgttagtgttttga

SEQ ID NO: 171960 - DNA, 665 bp, Cannabis sativa
  modified_base (564)..(567): a, c, t, g, unknown or other
tggtaaaataatttctaacactaccaacggagaccatgaaaaatttcatgaaaaggttcaaagaggacgcttcaaaaaccaaaaaggtcgacgacaaacagtagttagctctgctgcaaactagaatccggacaggaactcctttttggaatgaactgctagcctccaagactttcaaaagagggtccagaagtacattaacctgaaagaagcacaaatagtggcttacggagggtattacctgacaggagtgtcagggtatgcagcaggagcacaacttcctacagctgcactccctgtcgcccctcaaataagtggaatacagttctctacaactctaggatacaattaaaatcttactctgcctcttgcactgtcacatttgggggccctcgtaagcaatcccctagggtgagcacgccacttccaaatcaatccaccccagcgacaagcaggggaggagcacctcaaagttcccagagtaagaggtcttttaaaggtagtacgcaatctgaggacaaaagacaaaggacagggtctttttgggctttgtgccctaaatannnntctatttcaatgtaatctttgtcattcaattatcaataaggatacagaaatattttcatcacttatttagtatgtcatttggttcatgtgatcattta

SEQ ID NO: 171961 - DNA, 1380 bp, Cannabis sativa
aaagcgaagtcaacaccagggttgccaaacttgaaaatttttttaatttacaaataactcatattatatccacgtatttcaaataaatttctgtaattaaaaaattacgcttatttactaacttatagcaaaatttaaattttatgctgaaataaattagtaggatcataattccacttattacccgattaacccataatatagatataaaccatgttatttaccattaggcttatcgggatattacattttgagagcacatgaggttttgcgagttgcgtttttagctcttgaaaagccttttcacattcctccttccactcaaattgcttatttcctcacagaatgttgaagaacgggacacacttgtctgttgattttgaaacaaatctactgagtgcggcaatccgaccagtcaaactttgaacttccttggttcttgtcagaaatttcatatccttgagggcttgaatcttttctggattggcttcaattcctcgggcattgacgataaagcctagaaacttacccgagttgactccaaaggagcacttcaggcgattgagttgtatgttgtatttcttgagaaccttgaagcattcatccaagtcatctatatgcctcccaaccttcttggatttgacgagcatgtgatccacatacaattccatgtttcgtccgatctgggctttgaacatcttgtttactaatctttggtatgtagctccagcatttttgagaccaaatggcatgaccttatagcaatacatacccatatctgtttggaaacttgtatgtttttggtctggtggatgcaccttgatttgattatatcccgaataggcgcccatgaagcttaatattttgtgccctgctgttgcgtccacaagttgatctattcttggaagtgcaaaatagtcttttgggcacgccttgttgaagatagcgaaatcaataaacactcgccatttcttgtttggcttgggtaccattacgggattagcgatttaggccaggtagaaagcttctattatgaaattattgttacacagcttttcgacctcttattttagcgctatggctcgctccttgtccaacaatcttctttttggttgaacatgctggaaattagggacgatatttaggacatgtgaaattatagaaggattgattccgaccatatcctcatatgaccatgcaaaaatgtctaagtttgctctcagaaattttattaatgctgattttacttcgagcaacaaacattttccacttttgagctttctggtcggaacatttgggtcaatttcaatttcttctagttcttccactagaccaacattggtatttggttccccaagtcggggatccacatcttcatcc

SEQ ID NO: 171962 - DNA, 575 bp, Cannabis sativa
taaatcggatcgcccgaaactccattattccattttaaaacttgcataactcctgaaattctaagacaaaccttacaaaattttgcagggtatctgaaaacatcacaatgaacatttttcatgaagacacctcaataaaattctcaacagaaatcaaaataaatggccgtccaaaaactgcctaaattggatggcctgaaacctccttatccgagtttggaaatcctataactcatccaatactgatccaaatattaccaaattttttcagaaacctaaaaacatcataattaacatatttcatgaagaaacctcaatcaaattctcaacagaaatcaaactaaatggccgtcctaaaactgcctaaatcggatggcccgaaactccttgtccgagtttggaaatcccataactcatccaatcaggatccaaacattaccaaattttgtagagcgcctaaaaacatcataatgaacatatttcatgaagaaaccttaacccggttcgcaactgaattcaatttatcataaccaagttaagtttgagtttttttgaactcaaacttgcataacttt

SEQ ID NO: 171963 - DNA, 658 bp, Cannabis sativa
ttctctctttctctctctgtctcgtatatcttcttttttaaaaaaaaaattcattcaatttttggttcttaaattgatgaaatagattaatatgttgcaattttctgtaaaatctgttagttaaggttagatttaagatgagatctgttagttaatagggttgaaatcggtatgagttttttgtcgaaaatagattttttaggtcaggtccgatggggtccgatgcccgtccgatggggcccgatgtcagtccgatggtacacaaaattatttcatttttgggttttttggaagtcggtttgctgggggtcgatgcccgtccgatgtgtgtccgacaatacacacatttagctcaattttttggcttttgaaggtcgggcccgatggggtccgatgccagtccgatgtgtgcccgatggtacatgattttagctcatttctgggctctttaaggtcaggtcgatgtgatgtaattggagggttgggttttactaaaaattatcccattttacaaataggaaattttatttacacctctaaattttctaaagccacccaattttaataattttaatttaatataaaatttatatctttagttatactaaattttttcaacttttttcttccatttcataaacttaaaaaatatacctat

SEQ ID NO: 171964 - DNA, 543 bp, Cannabis sativa
ggaagtgcatgtcgcggctcgcctacctaattcaaggcaaaataggatgttcatcgtgtgctatcttttgtgtcccccattggctataaaagaagtgaacttcacataatttcatcaagcaattcagaagaaaatcagaagactgaagagactacgaattttggagatcaaattcaatacggaggcatttttaagagagtttttatcattcttttcttttcgatttgcttctctattcttaaattaatatgtgtgaatttactacgatgaacatgagtaactaaacaatttattagggtctagaaggagattgtctgacattaattcatagttttaatctgatttaaatttcccttaatttctatgtattctatttcattcgtacttaattacttttaattatttgatcaccaattaactgtttacgattttgatgcgaaatctgaaaagggggtgtcgattatgctatagtgaaatagaatcgaatttcaatataggacgagagtacctatatggtttggatagcttataggatttctgtgt

SEQ ID NO: 171965 - DNA, 575 bp, Cannabis sativa
tattatgtcattttgatctttcaataaaatagcattttcttataggtaattgattaatgttttatttgataaggatttttaaatatatatatatatatacaacatattatttatatttttagaagtaataatttttctaaaataatatctacttaggctaaatttatttataaataaatattataatttttattattatttatatatttatagattaaattcattttgagattattttttctattttacatctatatctttttaatttataaaattaaaaacgattttagaaactaatttttttttaagtaagtctatataagtatttttctctaaattttatttgtccaaaagttgaaaataattttttattttatttataaatagtaatcagataaaaaataattgaatgaatatatgcatatgtatgaaggtataagtttataggttattatatgacattctaatgtttgaacatttttttttttaatttttcaatcttcgttgtttttttcttcattatttgaattttatggaatataatgtcactatttttgtaattttttttgtctatt

SEQ ID NO: 171966 - DNA, 764 bp, Cannabis sativa
  modified_base (477)..(491): a, c, t, g, unknown or other
aatataaatagacgttctgaaacccacttatcgacgcagcccagccttcaataactccaaagaggcaaatatactctgtcagataaagctagcattcacccccaactcaactgaaagaaggtctccatgacaataatacctagcccgaaacactttccccactagtgactctggtcttgttaacaacgtccacccttgtttcccgaacattgccagattaaaatccctcaaactctggatacccaacccacccacatgcttatgtcaggacatacaatcccaactcatccaagaaatacctttcccattaccctccttcaaacgagctttccaatagaacgttgccatcatttgctcaatctactcacaaatacccacctaaaacaagaaaattcgcattgcaaaagacggaagagcttaataatttttatcttttccttatttaattattttgaaaaattatttatttattacaannnnnnnnnnnnnnnattttgccaattcaaaatatatttttctaaacatctttatacaacttttcattcctacccttcacagtgtttcaaggtagaaatttcaaggaccatggacctataattctaagctccaataaagtagattattttagtaccattaattcactagtggaagtataattcaagatcccatttaaatttgggcataacattcgagttcgaaaatcaacacttaaagagaactaacattcgatctgttaggaaagtcaagattctataattgtacat

SEQ ID NO: 171967 - DNA, 788 bp, Cannabis sativa
ttttaaattttaaaataaataatttgattcctcactacctattttcaccatatatcactaatttggcaatgtaatagtcatgatattctgcctccagtttatggttgaggaaggttctcacaccttgctcattcattcgtaaatcctggaaagagaaagtgttgagcaatctctcaattgactctttatacttgttatgttttgaaatataaccgattccgttcacttgtctccatattcgatctaggtgagctcttgcttcctcaaaccttagtgagtatgccataactatataatttctcgtgtgccattaacaaccatacgctctctcttcataattatccccatgccttgattaattttatccatatcctctattattttcctaagtttacttctctcgatagatgtcgacaagcgtctcaagcctttaattgtcttaactacgtttggattcattattaactctgcacaacccaaaataaatattagattgaatttgaccaaacttaacatataagacataacataaataatgcatacatacttgatgacaagttgatcctttgcagcgatggtgtgtatgtcgcgtgaattcaagatcaatgtaaatgtggctctgataccatttgttacgcccttacttacttaaaataaagtgacataaataaaccagcgttaagatattaatgttgctttttttttaaaaaaaataacaattttcaaaatatgggtacccagctgaaaataaagtaatactatttaagtaaatgtaatagaaaattaaa

SEQ ID NO: 171968 - DNA, 542 bp, Cannabis sativa
tataaacagaagtgcgacacttcatatgaacatccaatagaacaataagaaagaaaaaagattaatgtaataatttcactgactataaacataagtaccgcactttaggcctaaaaattaaaatacaacatttatggatagggtgagctgcaaagtgcaaagtttaagcgaacaactaaaaggaaaacagcaagtgagaattggaaaattcaaagcaaaagagaaagaataataaatatcattttaagtgtggtcgatgaaagaatgaccggtggttaaaagttgaacatgacctaacctctttttgaagagccaagtgtagactgtagcccacaccaaagaatctttttgaatttaaaatattgaatagtaatagtagtatatgtatagagtactgtattctattaatgtgaatatctcattttttaagtaatctctcagcatgaaatttgatctgacaaaccaacaaaaataaaattgtcaacacttttgctgccttgtcaaaaatgatatctgattaattgaaattttgaactaagatg

SEQ ID NO: 171969 - DNA, 514 bp, Cannabis sativa
ttgtacattgacgtgaagagaggatcgagcgacacgtgtcctacatttttgatacttggccagaggaaaatgtcgctagttgtctgcccgtaattcgtcaacatctgtaattgtcgattacctgaatagagctgaagagaagacatatgactaggtacaagcttgttatgtcgatcaacttacaagagataattactttagaataatcttcttttgactagaacgaagacaatccctataatcatgggattgagtcagagaaatatggtaatctgctttagttttctatttcatatatcgttattatgtaatcattgtaatttcttattttatgcactgtaagcaaaagggaaaccatccctcatgcattaagcccctataaatatagacgtagcctcactatgaaagggattgaaaattttcttcaaagagagattcttgtgagaaaatagtgatttaagagagttattcagagatcagttgtaagagctttcaaagaggaagaacactttgt

SEQ ID NO: 171970 - DNA, 918 bp, Cannabis sativa
  modified_base (851)..(869): a, c, t, g, unknown or other
aaaaaaaaaaaaaaaactacgaaaaacaaacgtaaaataaagaagcagatatagctacttagaaaaacataaaagaatcacacaccttaaaactcttttgccaatgagctcgtcaaatgtatttataggaggattaaaataaaaaaccacaaaaacaaccatagagaagaaagaagaaatatatttatagcctccatcttccacaaccatggacaaaaccaccacagcaacacaagaacacctagaaaacaactattaattctggcgagatggagcaagaatagtaaaatcaacgtcaaatgaataaataacgataaaacaattgtaagaaaacactaaaacaaataaaaaaataaaagaaaaaaaggattaaaaaaactgaccatcctctgcacagcccaacaccagatgcaataacgattatatttgcaagcccacacctaaaaaatcagaataaaaaaagcacttttatcttttccaattcttcttcttcttcctcctccttcacatactcttttttttttgttacctactacaaaaagatacggttagcttttatttagctaatgttgtagacttgggaaaaaaagaaaaaaagtgaagaagaagatgaataggggagagagagctcaaaaacaatgaaaaataaataatatgtgtgtttactgatttgctcaagaggaatgtatatttaaacacatatatgttttcttagaaaggaggagatcatctaagttgttgtcaatttttttttttttaaaaaaaaaaagataaaaaacacaaataagaacgtgtattagaaggtgtttcagcttttcatcatcaattttaaataaaataataataataannnnnnnnnnnnnnnnnnnaataataataaaaaaaaaattgtctcaaaagtgacatgtccaatcaaat

SEQ ID NO: 171971 - DNA, 551 bp, Cannabis sativa
  modified_base (357)..(357): a, c, t, g, unknown or other
aaaaaaaaaaaaacctatcaaaattatccaatatttattatttaagaaaaaaaaaattaacatcaccaaaattaattgggcaccggaccacttagtatgaacaatatggagtagtaggtttgaaaatttttgactgaaaaaattgttagaatatttgatgtggattaatataattaagtactaatcactcattatcagtattatagtataaaataataattatatgatcgatattttcaataaacccattatttatcataaaaatcgcacaatcccttttatgtggagtaagaaatagtgacattagaaggttctaataaaaacaaaagtagtggatgatatatatatatatatatntatatatatatatatagtgtttaggatgactattcaatggttgcatttttattgtaactatatggttacatgttttttttacctataatataaggttatcaataggtaaaaattctatttttagatttaattaattataatttactatattttaagtaattaaataaatatttaagaagatcttaattagcaat

SEQ ID NO: 171972 - DNA, 571 bp, Cannabis sativa
  modified_base (509)..(511): a, c, t, g, unknown or other
aaaatattgtgtaatgataaaaactaaattagtagagtgattgaaaataaaaatataaaaaaaaaaaaaagaagataaagtttaaagacaccaactaaaaaaagtatacaacctaatttttattattatatatatattttttttgttaaatgaattatattttaactatatacttaatcatttctttattaaagatacaaataataaaaactcaaatttatgagtaatacacatactcttaatttacacactatatatttaattttaattatatataaatagacagtgctccttaaaaatagtaatagttgatattgaatgcacattatagctagtttatagagtgtatatatagtgtgtgtaattgctggtattaaatactcattatagtatgtaattagagtgtaaataaatatagaatgtcaaaatctttgagttacttatattatatacagggataatggttctacactttataatttatatagagtcatttttttaaataggtnnnattatttcattttatttccatatttaattttatttctttaattagttattttttataatt

SEQ ID NO: 171973 - DNA, 643 bp, Cannabis sativa
ccctgctgtaaatatttgtaaccctaaagctataaatacaactcgtctccctcagtctcatttgagctgagcatttgtatttctcaatagtattataatctctctaatggagaggaagagagatatagattaattgagaaggatggagagaagattgaaaatcttttatgctgcttggtcagttaggaaagagagaagataatgaaaatggttgtttggtaagttaagaaggaaagaacataattctccaatcctttgtttggtatgagaagtatataagaagagttttgcagtgaatatttgtgatggaagagactttgtttataactcaacttatgtaattttaggattcgtacaaaatagtgggattatgtctgtatttagggcgtgtttagaaaattttagtgtaattggaggtaattctataatttggcatatttgtttgatcatgtaattacactgtaactgtgtaattgtaagtaattgaggggttccaattttactagtcatttctcatggcccttatgagaattgagtgtaattactaaagacttttcattttaaacatacaattttcccgtgtaattactaactattttgtcaaacaacgtattataaattcatatgtaattaccacctcata

SEQ ID NO: 171974 - DNA, 792 bp, Cannabis sativa
gttagaaatttagaaaaaatatacgtaaattatttttaaattttattattatttaatgtcaaataagattatttcatgttaaattaaataaataaatgatatttaaatacctaatcttataattaaaattcaaaataaccataatagcaaatttgtagaaaaaactatttttcaaatttaaagtctactaatatctaaaataaatttaaattaataataaaattaataaaaaataattttaatctaataattagatttatatttgtaaaataagattctaaacaaaaattactaaaagttatattttttatttcattaaaaaataatttttaaaaagttgaaaaaatttcaaaattggaaaaaaaaaaatcattgcttactcctcagcgcgcggatgagggggttggatcgagggaggaggctgtgtgcagggtcccttgtgcggcatttctcgatcaggctcgagccttgtccgagaaatctctgctaggctcaattttaaaccgaatttgtccaaaaatcggcccaaaaaataagccttgcgcacgcggataggggaaaccttaatctgatttttctaaaatttcaaaaaatcatatctttttcaattttaatccaaatgaagaaagttcacttttaatccttcactaggggttacatttagaatcaaaatgaaaattgaaaagataaaaaatagctttaattaagggcattttacaaaaatactgaatttgggttaatacttttcaattttactgccacatggcagatgttacatttatactgtcctcc

SEQ ID NO: 171975 - DNA, 834 bp, Cannabis sativa
catctattttggtagcttaacaacatgaggggctatgaacatgtcatacaatagtggaatccaagctttcctaatagaacgaatattagttcccttataatgttaaatcttggagtgctagcagttggatcctaatctataataagttatagaataactgttcactataaattaataatacataagggatcaagagataattagaagggcaaaatagtaattttgaccaacactaattatgaactaataattggaaggaaattgcttatatttattatatcaatagtctatgagtaagaattctataaatataattctatattatcagagagtaagagtacaattctataattatagtggagtatgttatgcccatattttgagcatgtaaaatatggacatggcacatgtcattaaagtctacattcatgaaatgaaaaataaacacaaagaatgaataaacaacatacatcgggttaagctatggttaagaagtgtagtgtccttgcatgacattatcaaaaaaatgatttttggaggataataagatttacaatttaaaattctcaaatcttaacaaagatgaatgaggcaggagataagcataatataattcgatttcaatagactaaatttacaaatttttttaaaaggccatagtggggacaaacactctgctcaagtgtctcacaagacacgattagctatccttaaacaccatcaaagaaaagtgagccatgattgaaatgtatgttgggattttatgccctaaataaaactcatttcaatctaatatgatttcttattaataaaagattagaagtcatttatgtt

SEQ ID NO: 171976 - DNA, 504 bp, Cannabis sativa
  modified_base (463)..(479): a, c, t, g, unknown or other
caataatgcttaattaattttaatcccataatttaaagtaatgttgtccttacttgatgatataaatagctaattatatgtatacacattattgtgtacaacttaagtatgtatctagcattactctattgttgttattattagtgtaatacaatatagaattttatatattttaatttaataaagaatataaaaaactcttttattttgctattttgcatataatttattaaattaaaatttataaaatttgatattaaaatatattaataataatatatcacgtgttgtggtgcttttaataagggaaaagagagagagagttataaatgaacaaaaaaaagaaagtaaaaaaattgttctttgaaatttatatatattttttaattttaattattttaattattttttatttttttaataattatttacgttaattaataaaagggtaaataccattttnnnnnnnnnnnnnnnnnaaagttaccaattggaccctgtgtt

SEQ ID NO: 171977 - DNA, 634 bp, Cannabis sativa
  modified_base (607)..(608): a, c, t, g, unknown or other
gaaaacacaccttgagatttatcgattccttctttgatcagttccaattgcctctgaaacttagaaagttcaaatttctggagaaaggaggataggaatttagaaatggattttgaatctttgaaacttcaaagaaagaggggaagaggagaatgaaaatgagagggaaagtatggaatgggttcgtattatgaggtttaagtaccattatccctcattaattgagattatgacacgtggcaaaaggaatgccataggtcatcccatctaacggttatccatgggcacgcctacacgaaatccgaagagtttcgtgacatggaaccctagataggatcaaatgtaataattacagccgtcattttctaaaaccctcgatgggacaaccaaaggtcaccacctcgtgacatctcttcgcccgtctctcgactatagtttccctcatgaccgcattagtcagtcgcgaaactaggggcatgtgttatagtgagatttttttcacctagaaactcgagactggactcctattaaaaagatacgcgtactcactttcctcgaggaaagctgagatgtcgatgagagaccttttgttaggttttatgccctnnataaaactctttacaatctgattagt

SEQ ID NO: 171978 - DNA, 745 bp, Cannabis sativa
agataatgttgaaaatatgaattatattcatttatttgtatctttctttcttataggtctgacttttagattagatagacattattaaaactgtaataatgaatgtatttgatattatgaatcattatatgtttgttgaattgcctcagtgaaccttaatgttatgtgttcaataatattcatttagaattgaagattgtacgtgtcaaagattataagatacgtttaaacttttttatacaaagatacatttaactttgcatagaacaaattacttgatgagtatggagatattagtgctcatagtgtacttgttcaagataactagccatatttgaggttgttgggacatatatataaggaccttgtgatctcttgctattttattatactaattgattatagtgcaatttacgatatatattttgagttatgttttagtttgttactttctttgttagtgatatggtttgatttttagtgatgatattctttataaattagtatgactttatattatcatatataaacacatatttttagatctaataatcgttaaggttgattatattaatgtaagtatttgataagtaaggttgtgtctgctcataatcactacactatctaatgtggaaacatgtataaattaatatttattcctctaaaggccattacttgatattagtaatccttacaacaatcatgttagctactcaagcttacacgacaaacatgttagcaactc

SEQ ID NO: 171979 - DNA, 971 bp, Cannabis sativa
atatattaactattgtgttaattttaaaagtagtaatgaacaatgattagtttaggatgatttaacaattttattaataattttatattttatatatttgttataaatttattatataaaaatacacaaatctaatctctaaaatacaaaaaatacttaattcatttttcgattttgactatttaaaaaaccgaaactaaatttatgaaaaactaaaataataacaaaacatttaaatagacaaataaattgtaaaaatactgatagtatattctttaaaattcaaataatgaagaaaaaaacaacaagacggaaaaattaaaaaaaaaaataaggaatgttcaaatattagtgtgatatataataacttgtaagcctataccttcatacatatacatttattcattcaattatttttttatctgattaatttttataaataaaataaaaaattattttcaatttttgaacaaataaaatttagagaaaaatacttatataaacttacttataataatttagtttttaaaaattgtttatatataaattttgaaattaaaaggatatagaaatgtaaaatagaaaaataatcttaaaaggaatttaatctataaacatataaataataataaaaataattaatatttatttataaataaatttagtgtaagtagatattattttaaaaaaaaattattacttttaaaaatataaataatatgttgtaaataattttttttttaaaaaaaaaaactccttattggataaaatattaatcaattacccataaaaatactattattttgacagataaaaaatgacataataaaaatgttatccctcaaaaaattcaagataattgtgcatgaaattttgttctatatatgaaagtccaaccaaatgagcattttggcttattgcactcgtaccaatggagtactttggcacatatggagcactttggcacaaag

SEQ ID NO: 171980 - DNA, 517 bp, Cannabis sativa
cctacacagattcaacacagtactcgttgcttttgtcattgatcatatggctgctgaattggttgctggtgctttgctctctgcttcacttcagattctgtttgagagattggcctctgaggatatacccaagctgttccaaggaaagaaacccattctgaagctgctggacaagttgaacactaagatgttatcagctaacaaactgctcaatgatgctgaggacaagcaacttcgagatgacaatgtcaagaagtggcttttcaagcttcaagatgtcgtctatcaagccgacgacttggtggacatgatggactatgaagctctgcgatccaagcttacaagctgcaagaccaaggtatttcgcaaactgaaatcgatgccaccttttgtgttcaactttaataaagctgtacagagtgatgctactgagatccttgatactctagatgatcttcttgctcaaagggatgctcttggcttgagagaagatcttttatcaaggtcattgtttcaa

SEQ ID NO: 171981 - DNA, 750 bp, Cannabis sativa
tggcacagttttgtgtctagcaattccactttgtttgcagaatgagttgaacaactcagaacagtattcaagtccattatcagtcctgagccttttaactttcttccctgtttgagtttctaccagtgttttccattctttaaatgtactcaaggcttcatgcttatgtttcaaaattgatacccagacatatctagaatagtcatcaattatggttagaaagtacctggctccacctcgagacacaattctggaagctccccaaagatctgaatgaacatagtctagagtgccctttgttgtatgtctccctttcccaaacttaaccttggtagacttacccaaaatgcactgctcacagaaatccagatcttgtagggcatcttttcccaacagtcctttcttgttcaacacttccaatcccttcaagctgacatgtcctagtcttttatgccatagggacattgaattggttatttcctttgaagccactgaagccaggttgcttgaggtgattccttgtagtacatacactccattgatcattgaacccttcatcattaccattgatcctcttagtaccttgagaattccaccttcaacccttatagaacacccttctttgtctaacattgccacagaaatcagatttctcttaatgtctggcacatgtctaacttgatgaattttcatagtggctccccctgataattgcaattgtacagatccaatcccaactattgagcatga

SEQ ID NO: 171982 - DNA, 517 bp, Cannabis sativa
aataaaaaaaaatagaaaattagaagatatttagcgtattatataattccttagtatttataaatctaataaaaaaaatgagagaattaaagatctttagagattttagagtgacatgtgaccgtctaatatatatgtctcttttatatatatattgatatttaaaaattaaattaaatagaaaaaaaataatatattaatgaaagcccccttatcaactgtatatatagtattttttttttcattacaaaaaattattaactgagattttttaacataccacagtcatatataatttttttattagcaaaggaaaatatttattcaaacaaaacctaaattgtgcttaagctcaaagaaaccttttaataatacatataacttttaaattaaaaaaaaatgatataattaatgataaaataaatagatgtgttcttaagttaatttatacacatatgtcagttatatatatatatatactaggtaaatgtacgtgccgagccacgtattgctagtt

SEQ ID NO: 171983 - DNA, 828 bp, Cannabis sativa
tcctaaaatatctcaattcaaattaagtatccaactaattttaaatttctagcttatttaaataaattaaattaatctatatatctataatataatatcaaatctaacaaaatcctaaaatatctcaattcaaatttctagcttatgtgaggtggcttttcacatgattttttttctaattttgttgcgctctcaatttttcacaattttgttatatttttattcttcattaatatttatttatcatttaacaaattaagataatataatataatatcttgatttgaaaaataagatatttctaatattatatttcaaatcttataatttaataaattaagcttaacaaaataaacatatttaaaagtaagatatttatggttaggatattatcattttaaataaataaaataaaatacccttaaaattcaaaaaatattagggtttggaaaactctaaatatctattctatataaagtgtggctatgtaacaaaattcttggtttaacagagtttttcggtttctacgtcaactttaacagaatatcctaattacttaacagaatattctttattaattttataatattattctatgtatttaaaaataaaaattatttacatattttatataaaaaaatttaatttaattatatatatctaaaaataaatattatatctatatataatcacatctatatataaaatatatatatttaaaccttaatttcacttacaatttattataaccatattttcctaattacaaattaaatattgtatctatcactatcaatatatattttttaaaatatatatttagacata

SEQ ID NO: 171984 - DNA, 1478 bp, Cannabis sativa
  modified_base (763)..(763): a, c, t, g, unknown or other
  modified_base (1428)..(1444): a, c, t, g, unknown or other
atgttatttttataagggagaaatatcgcgtattgcgtattggctgggaacgttcaagaagcttctacgataacccaccgtcgagtccaggagcgttgccggcgtcttctattcggttcagttggccggcgtacaggcgagtcgagtcccggagcatcgccgacgtgtttttatttttgtccaggagattctgcgataacaagtcaagaagagagttgtacgcctgcttccgtgttcttgaatgacttggatgaaggaatcggatgactttgtttctgttatttactgttattagttatattactgttgttgatcgaagacagcaaacaggttctttgttttactgttattagtttttgtttttagttcttttgtttaaattactggtttggttttagttttttgatctttttatttttttactgttattaggctaattccaattagtatttttatggggttagaattatcagttatatgtgttgaaactaatgaggttttcccattagtcttgtcttttgacatggttctttagtttttccctttagttttctctggttcgatttttgttggttcttgttttctttgttgcttttgggattctgctggtggtggtacgattatggaggacagtataggggtgcatattcctattgaggaggaggaggctatcttgtcttatgatgctagtgctacggatggtaatgactacgatgacaggtggtgtatcgttggaaggttcttgactgaaagacaaattgantttgaggctatgcaacatatgatggcttcattgtgccagccggggaaggggatgtttgtcaaggaattagatagtaatcactatctctttcaattttatcatgagattgacatccaaagtatgatgaatcgaagcccctggaattttaataggttcttgttaatttttaaaaggttacagcggggggacgatccaagattggtttccttgaatgaagttgatatgtgggtgcaattgcatgatcttagatcgaggtttaaaactgctacaattgttaagaatgtcgcaaactatattgggaagtttgttcaattagatgaaatgaatttcatgggcttatggcgggattatcttcgtgttcgtgtgactttaagtgttacgaagccattaaagagacgtatgaagcttcaatactgtcaggatcgagttctggactaactttaagtatgaacatctccctactttctgctttatttgtggaattatggggcattccaaaagcttttgtccacgacatttcgaggttggagagggtcagataatcaagccctatggggaatggatgtgagtgagacctataagtagaaagcacatgatcagagctaaatagcttaagcagtttaatgctgccatggacgatgattctgttggatattattttaccnnnnnnnnnnnnnnnnncacaagtatgttgtttaacaccctcaatatgaac

SEQ ID NO: 171985 - DNA, 992 bp, Cannabis sativa
  modified_base (321)..(321): a, c, t, g, unknown or other
tatatttttcattacatttattttaatagggttaatgttattttggactctatattttacaaatagaataattagtaattttatcctctgaacttttcacaatattgattttgtttcttaaaatacacgatttgttaagaatttcttaaacttttacatttacagaaagttatgttaggttctgtctcattattttatttaaatactgacatgtctttgtaaattagcaactttgttacctgaactttgataactatcaaatcgtaccccccaaaataaaaatgacaaagattcaatattttttttagtaaatcttaaaanattaatttagatcttaaaaaataatcttttgaatgattaagaaaattaaaaaagaaattaaaatttttaaactaattaagcgaattaaaaaattatttattttttataaaagaattcatttagatattttaaaatatataaaaattcaatttttgtaaaaattcaattttacgggaacaaacttgagtctattttatttttgtcaaaaaataaagatttgtttaagtaaacataatattttctatcttagtttaatttttaactttttttaaaaaataattttatatttttattgaatttttaattagttttctttatttgttaagatataattttataaatataaataaatatattttttctacaaaaaaatcttagtttgtttaaattatatattgaattctcaataattttggtttaattttttgagataagtatttataaataaaataaactttgaaattatttttttagaaataatttaggtttcttttaagaaaatttaatattttttaattagtttaatattttgtcatatttttttaataatttttattattttttttttcaaaattaatagaatataataatttttaatttttttttttaagaaaatgaggtaaaattttgtattggtaaaagttgagtgagtaaaaatattaatttttaac

SEQ ID NO: 171986 - DNA, 943 bp, Cannabis sativa
aacacatccaaatcaaccaaacattattttaaatcaatatttcacgaaaataaattattactatgactctgataccagttgtgagaacttattttaccaggatctacatttactaacaagtatgttttattataatcaataatctaacatcataaatatgaatctcctaaaataatgaaataaacacataagagactaaaataatgactcattaaattcagatctttagcccttgattcttgtctgtaacagagcattatcaatatctgaacttagatcttctctcctttaatttagttagacacagtcttcctcactatattaggtattattttgacatgaatgggaatactctcaattcaccatggatcacaaaattctataaagaaatctcaagaagaattcaaaatataataatagaaattaataggctttcttttgattcattctgtcagacaagagagagtctagagtcatctatttaatcaaaacactcaatgatctattcatagagattcattaggtttagggttagagctaaatgggctgattagaaagatccaatggcttagaatgcacctcatggccgaatccctttatgtagcctatgagttagaatttcgccattattttgtttccttaatgaaacaaacttgtctttcttcagtaatgccatttttctagttatttgaatactaattctatttatttaataattataaataattatcatataaaataactatttaaatatatttattaattagaccttccaaggtctcttacttaataaataaaccttgaattctcttttcttctcaattgtgccttcctttgtgataattcataaacaagacatagtcttatttagaattctaattgattaatcaaaaccaattaattgagactacaaaacaaaattatcctagttagtgtggggacc

SEQ ID NO: 171987 - DNA, 736 bp, Cannabis sativa
gattggatcgatttattcacacccctatcgttctatacataatattttacaatattttttatattaaaaaatagatctaaaatacatatggatcttaaattaatatcagaatatcaagttattgtatgaatcaataagatgaaagacatacataatttcatgaaattagatatgaaatgagatgatgggtatatgatcttcgaaagactaatcttctatctatggggagggaccaaacccttatgttctttatataacaaattaattagagccccataaactttaatttggtttagtattgggtattacacattataaaacccttaccaaataatatgtttataggactcatttaattagatcacttatttagcacactttagaatattcgctcaaataaatgaaattatcttaatttgtaagcccacatattagattattaaaaataacccaacaatctctcacttgggctacaaattaatttcaatgacaattacatttgattaatcttatgtgcacacaaacttgctaattattcttaaaacatctcttttagacaatctggtccatctcatataccaatatgagactaaagcgaccttcgttacatttatcgtaactggacccatgaatgatcaccatatcaaatatatttaatgacatagtgttgggttttgtgccttaaataaaatttatttcaatataattagatttactaattaatataagatcataa

SEQ ID NO: 171988 - DNA, 816 bp, Cannabis sativa
  modified_base (365)..(367): a, c, t, g, unknown or other
tttgtagtagtgattaagcaaaatgtaacatgatgaatgttattccaaattgggtaaataccatattggaccttgtattttgcaaaagttaccaaatggatcctctgttttgttaaatgataaatagaccttgtattttctaaaattatacaaataggaccctgaactgttttttgtcaaaataaaacttaataataataataatctgatttagagatgttatgacaaaactggttatattttctgtatctgtttgtgttagaaattgtctaaaatttggttatatttaaataataaaattattaaaaattgagctcagggtcctatttttaaaattttggaaaatatagggtccattttgtcannnaacaaaacagagggtccaattggtaacttttgcaaaacatagggtctaaaatggtatttacccttctaaattttgtccacatgacgtggcatgtccacatgagccaagacagagtacatatggaatacaactttgccagtagtaagatagggtctccatacaagatatggtaaaaccatcaagcagcaaccgaaatgagtgaagcgagctatcaaggagttgtaccaacattttaacgccctaaataattgggcatgctacccaaaatatttatgaaaaccctaatcccctaaatgggattactaatcaaaataccgcataatttaaacttttataataaacaggattaaaataaaacctgtaataatttaatctttttttaatagttgggatcccaaaaatatttacaaattttattacaagtctttttctttcagccgacctaagcg

SEQ ID NO: 171989 - DNA, 515 bp, Cannabis sativa
ctggccctggttgcatgtattctaaaacggttaagtacttgttcccatgcgtaagaaatacgtagatcaagcaaaaagttttcaaggatcatgatcctgttgtccacagtcaccgtcacagagagatcacgacggtgatggcggtgagtgtaaaggagagtggtgaggggcatggtgaccatggtgccgaagcttatcgacatctttaacgagatatgtcgaattctattagcaagttaagtttaacaaattgtaggaaaatttcagtactcattgatttacgatattttgattgatgggtgtaatagcttgacaaaatattctttttatcacaacttgtagcaagtgaaggctccttcatacccgatgtggtagagaaaaaattgcaagaattggttctaactttcgattaaaagctttgagacttgttttaagacacgaaaaatatgttattcgttatttggatacaggctgaccctgaaatttaatagactatagaaaaaaaaaaaaaaaaa

SEQ ID NO: 171990 - DNA, 800 bp, Cannabis sativa
tcgcaaaaataatcgaccgctctcggccgatgaacaagctctaccaggtcattatatgggacgtgataactcccacaatgtctgtctaaggcagagtagtggaggaaacgctaggaacaacaatggtgattgtggcagaaatggtggaagaacaccccaacgtagggagtggcaaccccgtgaccaacgcggccaaccacgagagggcgatgatcgcccgagaaacactaggtccagggggagaagggaagaccccgaagtcaatagtgactaccgtccaaactaccctatcggtcacggtgatgatgaagctgaaagtcgggccaacaaccaaccaaatcctgagctaagggttatcaagccggagggctgtatgcccctaatacgcaatattaacttgagaatccgccccgaaggggtagagatgaccaagtaccacccccaatcgatggaaggctaaagtcaaaatgtaggaggtaggccaagaaccgggtcagtttttaaacatgtaggcccccaagggggtagagaccttcgggataccctcaaaagaaatttagaagaaggatgatcaagcagataacagtggtgatggactgtttattgcaaaaggaaaatttcagaagaaagattacaaggggcacaagaattgttacaacaatagcagagacaaaaatgagaggttcaaacctaaggctgcagtaggtaaacaatgctattattgtaagaaagaaggtcattttcgtgatgattgtttggcacttaaggctaaactgaaaagagaaaagaatcgtggaaag

SEQ ID NO: 171991 - DNA, 852 bp, Cannabis sativa
gaaataataaagaaaagctcaaatcaaccatgattgtaagaaaagaattgaactgaaataaaatgttaaccaaaagataaattgaactatacaaattttttgatcaattgataattattctaataataatgacgtcttacggtctcatcagcttttggctcttacaaattaatatacctataaatatataggtatgtatatatatagatgtaatatgtacgaacaatatcaaattccatatctaaatagaaaagaaattcttggtatcattcaaaaattaatttaaagattatatgataaattaataataattttccttcccacacacccatatagtgttgctctcaaattggagtttgtatataaatttgatgtaaggcatattaagactttaaatcttaataaataccataggttttctactatttggaaagagagtgcatataagaaaccagagaagtttttctctttgctatgagagaaagagagtgctttagattagctttatcactattgaattacttgcacaaacaaaaagagaaaaaaggatcagtaaaaataaatggtccccaaaatgtaattttaagtgactatcattttcttatcccatatgttattaatttataatacttttttaatactactagattttactattgtgctacgctattttgtttgtagtggttaattggttcgtaatgaattatttaggctactagaggtggtcgtaggagagcatttggatgggcaggtgatgggaataatgttagataaatttataataaacccaaaatctatttgtatataacatagaacacaacaataatatataataattaggtatgcgtacct

SEQ ID NO: 171992 - DNA, 787 bp, Cannabis sativa
  modified_base (759)..(761): a, c, t, g, unknown or other
ggactttgtggtaggtttacctaacaccacagggttatgtgattctatatgggtagtagtgcatagattcaccaaattagtgcactttttttgtgagcgtacaatttatactgtggatcaatatgttaaattgtacataaaggaaatagttcgactccatggtgctctgaagtcagttgtttcagactgtgaatttacttctaaattttgggagattttacagattgtaaagggaactacgttgaaatttagtatagcttttcatcctcaaatggatggtttgtctaagagaactatacatttattagaagagttgcgagcatgtgtgattgattttgagggttcctagaacaaatttctacctttgattgatttcttgtacaataatagttattagggtaccattagcatggcaccttatgagatgttgtatgggagaaattatcgatcacctattcagtgggatgaagtcggtaagaaacggtaccttggacataagtggttcagaggactagtgaatccattgaaaagattttatctcgtatgcttgcttcacaaagtagatagaaaagctacgctaactcgaagcatagggatatcgagttccaagtgaggcattatgtatttctccaagtatcgcctatgaaagggatatgtgggtttgggaagaaatgaaagctaagccctagattcattagtccttttgagatactggagagagtaggccaggtagcctatctgtaaagaccgcttagtttnnnttggaaattagcagttaatcacgttt

SEQ ID NO: 171993 - DNA, 522 bp, Cannabis sativa
cattatttacgttttattgaaaaactaatttcataacgtttcattggaccgatgagctagttatattttcactcatgtaagatcatttaagatatatttgaaaaatattacaatctggttgtttttataaccagttaaacctaaaaaattcttgactgtagtgattgtttttgaccttggcaaatttttgacagattcaatctttcttggatcaaccataattttatctttactgacaatctcttctaaaaatgacttgagataattaaaatttacacttcttaaacttggcatagagcttgtgtttttgtaattgttgcaaaatcatttgtagatgttcatgctctgtttctgactgagagtaaggatgtcatcgataaattttataacacatacatcaagaaaatcttttaatgccctattcagattcatgaaagttgctagaacattagttaggtcaaaagacataactaaaaattcataatgaccatacctagcacgaaagacagtctttggaatgtc

SEQ ID NO: 171994 - DNA, 667 bp, Cannabis sativa
aaattaaaaagtcaaaataaatttaataacatatatatacgaggaagctatagttaattatatatatgtatatatttcttagaaagatgagggggcatggcccctgtacagcacaacatccctccgcccctgcttttattatatgccgcaagcttgatgtactctatcttctaatcgaatcttgctgaaacttcaagtgctcgaactcccttcgatcttcttgaagagtactgcttgcttcctcgcgatgcaaaacttgaaaagtaatctcccggaagctttgaaaaatcttctcccaaaagtagcaatgttcttcttcttctttgtaggcttgaatacaaactcaagataatacaaaatacaaataaacagagtaagagtcgaacaagctcttctctacaaacataaacactctttccttaagatatacaattcaaagtgtatgaaaaagatactaagcctagctgctataaggtgtatttataatcaatatacaccttattaatagcatacacacggtctgaaccagaccacagtctactagaaacttccctaaaataaatcttcaatcagcccagaaatttctatttctgtacctacagaatcgtgagcagcagtaagtacaattttttttatagaaaaagaaaatttagctccagttttctcc

SEQ ID NO: 171995 - DNA, 585 bp, Cannabis sativa
tctccaggctgcccccacacttcccttaattcaaattcatacttcagatgtgattttcacatcttgaagtatttaaaaggcttcttcccactaaccacattaggataaagagtcaaaattccaggtgtatggtcgaatataccttcattgagaaacaccgcttcaacaagatcatacttattgatccatgattggttagccataattctatctatcttcgaaaaaattctatcttccccatgttgcttgtttgactaagtaaagaaatttccacttgctttgacatcttccacttgacaagtattgacacattgcaagaactttgtgtccggatgagttttaatccgatgccctattctctcctctttggcaagaatatcattaaaatcccccattaacaaccaattctcatttgttttcagctcacacaaatccttccataggactttcctttcagctctattgtttgatgcataaaacacagtcaaaagactattaaatccttcagttgttctcaactttaaatgcattagttgactagtggatttaaggatgtcaacagtaaatctatctggattccaagca

SEQ ID NO: 171996 - DNA, 793 bp, Cannabis sativa
ccctattccatgcaagtataaagcaaagaatcaggtagaatgaaatcttctcgagcaacaagatgggacaagagcacatgaacctcaacaagttacaaatgcctttgtttcttactatagagattttttggggactcaactagaaggaacgaggaaagtcagcaccaaaataataaacagaggaaacatcctatcccagaaccaggcaggcatgctcacacagaaattcactatggaaaaggtgaaacaagctgtgtttgggattccaggtgacaaagctcccaggccaaatgctttcttaagcttcttctttcaggacaactgggaactagttggtgatgaagtgtatgaagcaatcacatctttcttggaatctggtaagatacttaaagagatcaattctacagttcaactgtagtgcctaaaatgaaatgtctaaatactgtcaaagacattagacgaatagcttgttgtaatgttgtgtacaaaatggcaacaaagcttttgtgttctacattgaaagtaattcttcctgatttagtttctcaaaattagggtggattcattgaaaggagatttataggtcataacataatgatatgtcaggacctagttaggcattatagtaggaaaacaaataaggctagttgtcttatcaagcttgatctataaaaagcctatgatactatagagtgggattttattgaggaaatgttccatgaacttaactttccaaagtccttcattactcttgtgatgaattgtgtacgcactcctaaattctcactcatgt

SEQ ID NO: 171997 - DNA, 867 bp, Cannabis sativa
tcaagtactgttcaaatttgacacaagcattgataaagtttattatcatatttgggtttgtgagtaatgattcattttggtctcaaaatgtttgggggaatttatcctataccttctatactttaccttcatataaattacacatccatttatctttattaataacatttttataaataatgcacctatatagttatagtagatattagaaaaagattaattactaaaaacatttgtaatagctcatctcaaatgagctacaggagctaatataatagagctcaactgagctggaagagctaaagagaaatgctcactttgaatagtaatatgctaaaaggcattaatgtaaaattataagctagtttatttgatttgtgtttttttaaaataatttgttgtgtaaatatttaaatttaactcttaattgcaagttaaaacctaaatttattttttagacagtaataatacataaattaattatatttctgtaacttatcatatcaatttattatctaaatattatttttttaatggtatatttaaattaattttttaataaaaaataaaaatttaatgatttagatcaattaaaaaatttcacatgataatttactttatatttaatattcagttacttaaataattcaaaaattataaattaaatattattaacgaagaattaaatttaaatatttatttataatttaaagttaatttagctatttatataacaatttttttttaatctgactttaaattttaaattttagcttagttatttattactttaggagctcgtttggaacgtcgtattaggtcgtattgtattgtactgtattatattgaattggattatatatcata

SEQ ID NO: 171998 - DNA, 508 bp, Cannabis sativa
  modified_base (204)..(204): a, c, t, g, unknown or other
cttgctttttatctctcaaattggacgccccttttatcttggattcagtcactatttataggtgtataggataacagttactctcttgagatctaattattcataactgttcatgaaacatggacattcctcatggttcatttttatgcacatgggataatatttaataacttcctaaccgctcttttatcattatccttaaanagttatgctaactatactagttgtttctcgctaccgtctttgtaggaaaaatgctaagtatagagatacaatactcctcccagtcctcttttaccatgatggtattagcgaggtggttacatcaacgtataaagaggaacacagtagggtggagtccagggccggccctatgttaatttgggccttaggcaaaaataaaaattgggatccagtgaaaaagtgaggctattcggatttgaactctcatcctcttagttgttaaactaatcaaattagcactaggctacaacacatatttagcatt

SEQ ID NO: 171999 - DNA, 666 bp, Cannabis sativa
  modified_base (485)..(497): a, c, t, g, unknown or other
cttcttttctctctctgaaatactttgtcctaacaatgagataataattttttatttctaaaaactttaaaatgtggggtacacataaaatccatgtatcaatctatatatctttatacattagaataattagcaatttttcccctcaattttcgataatattaattttggctcctaaaatataaagtttggtaggaatcccctgaactattacatttatagaaatttaatctttctgttagtttacgtctaattatttcatttaaatgatgacatgtcattgtcaattagtaactttgccccttaaactttgacaactatcaatcgtaccccttcaaaataaaaatgggaaagatttaacatttttttagtaaatcttaaaaatttaatttagatcttaagaaaaattatcttgaatgattaagaaaataaaaataaataaattaaaattttaaaactaattacgcgatataaaaaattatttnnnnnnnnnnnnnaaattcatttagatattaaaaatataatttgtaaaaactaaattttaaaggtcgaacaaacttgaacatattttgtttttatcaaaaaatgtagatttgtttaagtaaacataatattttttttagtttaatttataatttattcaaaaaaaattatatttttattgaa

SEQ ID NO: 172000 - DNA, 559 bp, Cannabis sativa
gcttataataaactatactaaactctttttttctaaactactaaacttatacattactattttttcctaaactactaactacatgttgacctcgcttttggccaacgacagtgagtcttgtaaaattcaattgattgaaacttttttacctgacggtcaattaccaaggtctcataatgtttgtatttggatcctgaaatgtcagagggcgcgatcgacggctttgtcgtcgatcctccgatgcttatgtcagtaaggtaaaaagaatatgatagaaattaaaacttaaattgaaaataaattcgaaagtttagaaatgatactgtcttaggtgaacagcgttccaactgttgcttatatcacgtccatctgatgcttggagtttgtaggctatttgttcgatcatcctgaagatcttgtaaggtccctcccatgtgggacctaattttccagctcctacttctctcatatttaggaaaactttccttagaacccaatctccaatgttgtactgacgaactctgatgttcttgtaaaaatgttgcgctactttatgttg

SEQ ID NO: 172001 - DNA, 512 bp, Cannabis sativa
aattttatttgaaatggctttttgagaaaatatgaaaatatatttaaaccacagaaatacagccttgccataattctttttttttttttgaaacgccttgccataatgggaaaatgcaaaagaaatatctttttattattgtgaaatttattattaatgaaaaatatagaaattggcttatttatagacaagaagtttttcattttgaaataagtcaaacccaagcttgttagtcatcattacggttcgtatatttcactacaaatatttttaggagtttaagtattattttatttatttcatcaaaaaaaaagtattattttatttattttgaaaaaaatgatctcatttacaaccttcagagggaaaagagtgctaaggcatcaatacaattagaatggttatgccaccaaacataatgaatattcaaagagagttaatttaaatgtgagccacactattagagtatgtttggtattgttttttgttttcaaaaaattgtttttagaaat

SEQ ID NO: 172002 - DNA, 760 bp, Cannabis sativa
attaaaaataaatatatgagtttttaatactacggatgagagatatctcacccttgctttatgtatgtttatgttatgttgtaacatgaaaagagagacatctctcttaatgtgtgtaattggtgctctaatatgaaaggataactacttttaaatgttatatgatttgggtcatggtgttgttactttttttgattggtgttacttttaatctttagagtgattgttgtacatgagtggcattatttgatgctcttacataaaacatcatgttgacctcgctttaattcaacgacaatgagtcaaatagtaagcgatagaaaaaataatcaaagtgaagtatgaactaacaagtaataaagaacacatgattttaaagaggttcggccccgtcagttcggtaatagtctactccccttgatttgtattaacttaagtacaaagaataaagtgtttcctctcttgaagttctcacaatgaaatctctgagtatgttctcttagatttcacttaagtaattcttttgactctcataccagtgagaatggatcactatttatagggctcaatgcttgagggaaggtttcccttttgcttacaatgtctatagttggtaagaacatagattacatatttagaatacacagattgaacttgaacaagatatgataatcataccgtaatgtctattcaattcaatatcatctagttgatcctagatcaaatgatcttaatcttgacatgattaggttcgatctca

SEQ ID NO: 172003 - DNA, 548 bp, Cannabis sativa
ttaattttattgttattgttatagtttagtggtcattttactttctgttatctgatctatgatattcacaaaggttttcccagtgttttgtttttgtgtaattttatatttttatattatttttatttattattatttttttttagcattagtaacacctatatatttactaataatctagaggtcttgacatagacccatgcctttctctttcctcccacacttccctcaccactcatctatggcttcataagtttcgtcagctaataaaaaggttcaaggcactactataaaataagcttttagagacattttttttcagcataataataaaaaaccattagtataagtttggaaatttttagaaggaaattttatgccatttataataaccaacggcatagggtgtgtagcattgtgaaatgttgttgggattattttatattgttctgaattatgttttgttgttattaataggtttgaatattttggaaacgttcaattatagccgttatgctaccgaaatttcagtagaattaggataatat

SEQ ID NO: 172004 - DNA, 520 bp, Cannabis sativa
acatgggtacactattgtttgggggtgtaatatactcccctttccctgtagaaatagacagtcatgaatatataaatgagaaattatgataatgggaaatattttgttaaaaaaattcttaacataattggaaattataaaagtagataaaatgcacgcgttcatatatccatgtttttcaaatgggattattattattattataataataggaacttacaaaaatatcgaattttgaataaatatttataattttactgtcacacgacaaaaattacatttatattgtcgtgcctcctcccctctcccaacctaaaaaaacaaaacctccattttctacacccacaggtagaaccaccacagtaacacttgaacaattagaaaataatcattaattctaatgagatgaagcagaaacattaaaactattaatactggggctatcatagtttttttaatgtcatttttgagttgttccactattgtttcgtatgtctaacaaatgttagtttcaaattac

SEQ ID NO: 172005 - DNA, 506 bp, Cannabis sativa
  modified_base (475)..(475): a, c, t, g, unknown or other
ttattcaagtttttattttttttaattgatatgttaactcttcaatcggccggtatgaaacatccagaaaaaaaaactatgaaaacaagctctctattaaaaaaaaaaaatttcttttttttttaagaatattttaaatgtagaaaatggtcgtaattctcgactagtgttaacaaaccattttaacaagttttataaatagtatatatatatacattttttatgtgtctaaattctaaataagactaaaaattattacaggtaactaaactgaagtgtggtgggatagtggtagcatgcacattcgaccaccacatagctgatgcatattcggctaacatgttcttcatttcatgggctcaaatggctcaatccaaaccattatctcttcgaccctctttccgccgatctctcctcaatctcgtcgccaccaaattaccccccacaacgactcctccattgacgacatgtacgngctctccctccgccatccccatccaccgctt

SEQ ID NO: 172006 - DNA, 694 bp, Cannabis sativa
  modified_base (266)..(266): a, c, t, g, unknown or other
gtattttaataggttattgttacctatatttgaatttatacttagttatatttttaatttatattttttgttgtttatcttttaaaattttataaattattaaaagaaaattatttattaatttttttaaaatatatttaatgttttaagttttgaagaaaataaatataaagtttaaaaatattaaaattgaacatactcctaatattaaaactaaaaatgaaaaaaataataatgctacatattaatatttatatatatttaanttaatttaaaataaataatatttacatttatatatttataaaactaaccttactaataccattaaatttaaaagaatatttttgttttttatttttaaagtatattctgttaaaccaacaaaaatacttaaatagtctatatgtataaataaaaatgtccaatataaacttttggtgacagatatcttccttttttttttttgaacaattctaaaaattattaaacatgtaatacttgaaatatcttcatattttaatttgtataattataattaataacgtgcatacatagtgtatacactgagacattacatagtgttatttcccattttatgttcatggtttttctgtataattttaggttttgttgacatatttatacattcaattgagggttaactttataattattagggtaaatagcggca

SEQ ID NO: 172007 - DNA, 639 bp, Cannabis sativa
aacaaaagcagagtttagttgagacattggttaaggtgcctgaggaatataatcaaactttcttgaccaaactcaagaatcgcattgacaggtttgttttgtttaatattatttacaaataagtgaccaaatagaaaacagttactcattttctaactcaattcaacagtgttggaattgagctacctactgttgaagttcgttttgaacatctcaatgttgagactgatatttatgtgggagaaagagctctaccttcattcattaacttcaccaccaatgtcattgaggtaaaaaaagtgtaaaattgtattcaaatcataccttggtatttgtattaattttctataaaaatattttgttgtttgattttattttcagggattcttgaattatctacacataattccaagcaagaagaagaaaattgctatactagatggccttagtggatttataaagccatgcaggtaaatgagtacttaatatccttttagttgtgtctgtgaaagaaaaataaacaagcttattatttttcagaatgacattgctattgggtcctccaagttctggaaagactacatttttactagctttggctggacaacttgacccacgattgaaagtgagaaaattttc

SEQ ID NO: 172008 - DNA, 598 bp, Cannabis sativa
ttcgtgaatttctttttcttttggcaactaatattcactaatgaatctcttttattttggtgaaaattattttagaccaatattctacaaaagttattgacttcactccctattttgttaaattacaatttacactttgtattttttaaaatagtacaaatagtactctaaactcaatttttatcaaaataaaacataataataacttgatttgaaagtgttatgatcatattgattatattttttgcatttattcatgttggaaactgattttattttttaaaaaaataaattgagctcaaaatattattttataatatttcaaaaaaaaaaaagtccaatttgtattctatataaaatgtgggtatataactgaattcttggtttatgagaaattattagatgactttttttttataacgatttattaaaataataattttttaattcttagtttaactatttttatggctaaagtaacaacaagtttaacaattctcggttaactttcatctaccatccaccttccaccatctatattattaattaaaatcgtgttaggataatattgcttcataatactattaacgataaaaaa

SEQ ID NO: 172009 - DNA, 785 bp, Cannabis sativa
accggccaaggaaagaacatggtaggaattcatgtacaactctacacgtggacaataagattaggttgcaaattaggccctaaaatcccaattaaacacttgaataatatctatgttcatgggagttttggtctttcgtaattaattaatcaaatatgcaaatatcctagggttttagttttaaaatagggtttagaatttcctatataaaggcttaactctaacatagaagacctaagtcattaagtgagaactatgtcattaagcctctttctagcctacaagtgatacagttctaagccctgagcaagtgacatgtggtaaataaaggaagggattatcctcataatctcgttaattacaattccccattacaatcttttcacggagaagcctcgcggaactgggaataagttaagactaatggataagcggaagtccaccttgccttatactagcttcctggatgcgaaagacatattgtctctctcagacccgaagtggtccaaatatggaagcttgcctagctgatacccggatgggtactcgaaggacttagtagatatcaatcgtcaggagtgtcgcggacgtctacctttgggaaaatctgaattcccagtgacggttatactttttctgacacaggattagattttgtcccctgtgttcaggcatggtagctgtgcacgcatctcatccccctttttgccaaacgggtatatcagacctctacttttaaaggtgacacctttgagcggcatgtgtgttgggattttatgccctaa

SEQ ID NO: 172010 - DNA, 982 bp, Cannabis sativa
caataaatgaaaataaaattttctaaacacactattattttctgtttttaaaattataaaataaaagtagttatataacgtatttttatttttcaaaatcaaaattttaaaaacaaaatttttacttttacttttgtgataaaaaaatttaaaacaaaagtattaccaaacgctaccattattttgatattaaatttacaaattcaatatttcaaagaacaaaatgtatatgtaaaagttgtctactaaaaatatggttagaccatctccaatgggagatgtcaaaattgttctatatttggtataaaataatagtttatgacatttttacattaatttttactattatgctccaatgcataattataaatcttgatgcaaaatttaatttgtcatttaatactcatagaataatttattaaaaatgtaactaataataatcataaaataatatatataaaatttaataatgaaataattataattataaaagtcatttaatacaaatgagcatgctaactaaactttaataataaaatatttcaaatgacataatggtaaatataaaatcatagcatttattgtgatgcaaattttacatcatgttatattgtgattcaaatttaaatcactttttgctatgtaagatatttgcatcacaatatggcacaccattagagtaaatttttgacaaagtgagctctatttcgtatttgcatcacttatttgcatttctattagagatgctcttagtctttaactttatgccaactataaatataatatcattattctattattctattattttggtattttatttacaaatttaattggcgttaaatttttttaattattataattattattttggtattagatttacaattataaagaaaggtcttaaagttgggattatttcacaaatatataaaaataacaaaaaaaaattataaatatatgattgtatgaaattttaaat

SEQ ID NO: 172011 - DNA, 526 bp, Cannabis sativa
tttaaatgatagaataaagaaattgttaagagtactctaatagttgtaagtgtaattgtaattataaataattcggttgtttctctttaaactaattttccaaagaggccctacaaagaagtctttgatactatacccaacgttacactattttagtgttttacaccacatactgaaatttttaacttttgtattgtggaatggaattttttttttcgaaaatactgtaaaaaatactgtgtaagttttatattgtgtatattgttaaattttcacaattgtttcactattgttttttagttgttccattgttattttaattgttttgttttattgttttacggttgttttataaaaagaatatttttataaaaaattccgtgtgacaataaaattgtaaatttttatcaaaaatctatatttttataaaaattgctatatatattttttttgaatgatttaatacaaaaaaaaaaaaaaaaaataccacactaaatatgatacgaaacaaaaatatctttttttt

SEQ ID NO: 172012 - DNA, 522 bp, Cannabis sativa
aattaaaacaattatttttagtgaaaaattgtcacaatataattttttttgactaaatgtgacttttaatcacaataaaaagttaattgtaattaaaacttagtatttaaatacaaatcatcactaatttagtttaatcacaacaagtattatgactataaaaatacatttactcacaacaaattataatttttgtgatcaatacatttagccacggattctttaatcacggaatgacaatttataatttgtcataactttttacttttaatcacaaattttattgtgactaaaaataaaaataaaaattgtagtgatataaaataatacaaatttaataaatttgttactaattaatattattaaaataaatatatagaaaatattaaaattatcactaaatattaattatataaaaaatattactaaacaaaatagaagcaatttgtttactagttaaattaaattttcagtaataatactatagtaatttatttatataaatgtaatttttttaaaaaa

SEQ ID NO: 172013 - DNA, 574 bp, Cannabis sativa
  modified_base (300)..(304): a, c, t, g, unknown or other
ttttgcggattagattggatttgatcaagcaaattagatttgatcagatactttgtgaacaacccgataaataccccattaatctcatggattaagattgaattctctggaatactttgctcaggcaaacttgagaacagacattccgtgtattttcctaaggcatttacaagtaaaagtttattgaataacatcgactcgtggactaaggctagttaattcctcaaccacgttaaaaattgtttgtcttatttacaaacacttttcttcttcttcttctccaatctcaaatgcctcaannnnnactcacttgaattctgtagaaatgtgcatgtgattctgagatgtatcaaaagctaaagatataatgcagtcgattccaagtgaatcccaactccatttggtcatttccttgtttaatggattgcaaatgtagattgttaggtcttgagtaaggaagaacctccagcaacaaatgagaccctgaaacgatgacaataccacaacatctgtagggagaaaatctaagattgtctgtttgaattgaaagccttcttcatcaacaggaatgtgt

SEQ ID NO: 172014 - DNA, 1186 bp, Cannabis sativa
gtgtacctcaaaattgttatcaaaaaattgaccaatcccaattccgtacaaagctagaatatataaaataagaaagctaaaaaaataccaaccttacgtgaccaagtcctgcaatgaacgaagagcaaacccaagcaaagcacaagatgttgttgagccttcaaaagaaactggttatcatgacaaagccacagtgggcaattcatcaaacatgtgaggtgcaatattaaaagagtgttgattaacaaattattaacatatggaatcatactccaaacttatataaagaataattgtcatataaagaatagaaacacaatccaaaaaattagagaaaaaactattcattaccccttttcctttttctttttgcctcccacttgtacaacaaactccaatagataagagagaaatgaaagttatagtttttgcagaaagagagagaactaagatttacttgcttaggtagctaacaattaaggattggtactaacaataacaatgacaccaaagtttcaataaatgcagtagtggaagtagtttaagtgtttgaggccttgagaaatagtagaaattgtaactgaaaagagagtttatgaaggtacctttttttttgcactcaagtgacgagcttgatttttttggttggcaagtgaaatgatacaacaatgttactggagagttcgaacagatgaagtgggtagaaaatgaaggatacacatcttctagtaaaagcaaaaagagagacacatgtaggtttgtgtgaatgatagctatcaatttttatgactactaagtgtaatagaaccttgtagaaattacagtaataaaaaaaatgaaagattagtttttaatttttgataatatattccaaaaaaaaattaataaatattaatataataaaaaagataaaataataacttaccaaaacaattatattgatgtacaagtgtagttaagagtcatcaatatatgaatgaaaatttgagaaaagacaaaaaaaaaatatgagaaaaagagacaaagttctaaggaatcatgagggaatattctattattgacacttctatattaatagtaagatatgagagttgtattcataatgtgtatatgtatataccgcactccttcgtatacgtcaggagtccattgatgagaaggggctggggaaagcttgaacccaatt

SEQ ID NO: 172015 - DNA, 817 bp, Cannabis sativa
tatatatatatatatttgaatgtgactttaaacatatataaggtgcatgtagcacataaaattaaatagaaaaagaaccctatagctactatatatatagggggtaaataactatatacttccccttcttctcattaatttatatcctcttgtagctacagtcatccaatgagttattgtcttttgaaaagaaattattagtcacaatgagacaataataacaaaatcgatgagattattggcattacaatataatcatatgtataacttataagtatacatgcatatcatatatataaattgtaaagttttaaatttaaatataattacaaataattaagctcaatttaattatgattaaaatttaattatttaccaaatttttattggccaaaaagatgttctcacgcgtttcatttaactcattgtagatagagtaaatgggcacgtatttctcgtgttttcttttatatttcgatgaatctttcgaattttccttccttttcccacttgaatcatttgtgttgttgtaattgttgggagctgagtttgaattcaattcattctcaaaagcaatgtctctaatcttatttctctccctaaagtcaacatcttcaaaaaatattgcagttcccgtctcaaaaatatttctgacagtgggatcataaaacttattgcctctagatcgctcagaaaaaccaataaagtagttactaactgttttggagtccaatttattttcatgtggcctataaggccttgcctgagatggacatccccaaatgtggaaatacttttgactaggctttcgacctgt

SEQ ID NO: 172016 - DNA, 594 bp, Cannabis sativa
atgatattttcttcaaacaaagaaaactcttttaaaaaatcaacaacggaggcttgacaaaaattaatagtggagaggcttgacttaaataattgtataaaaatattattaagtagttatatagcatattatgaaaaatgaaaataaatatgagagaatattcatataatgatatatgaattatatcaatattgtataaatatataagtgaaggccaaaaaaaaagtactttagctgctaaaaaataatttaggcacttaaatattataaatttaataattaagatgctaaaatataattttggcacttaaatattataaataacttacgtacgtactacaaacataataattttgatatagttttcaaatatttctatgtaactggatcttgatcataattaaatttgataagaacaatgagtatatatataattaaagaattataaaaaaaaaaaatgaatgatataagtgctcatatagtcacatatacagtgacggacccaagatttttactttgtggggcttacttatcataaaaaaatatttataactacattataatactcttattaaatttatttaattttatggg

SEQ ID NO: 172017 - DNA, 741 bp, Cannabis sativa
atagacaatattgagataaatgataaaataaaggaatattttatcatttattagaatatttttatgtatggaatatttttaactcaattttattagaatatttttatgtatgtaataaaataaaggaattgggtgatattttatatatgagcattgctattaggtactagtggtgtctaatacttttgcgatatgtcacgttgcgattggctagcgatactccttaaaagctattatattaaattacatgagacccaatactaagttggaccaatagcgatattgacacataggaaggtgctaggcaccactaatgccctttagcatttctctttatatatggtctgatttcaatattcattacacgatttgattttctgaattaattgtcaaaatattctgataattaatgtagcgcagatgctgatggagtatcttacttataaatatagggtctcggtctctgagctcttgactcattcggttaaaaacaacaaaattccatctaaagagagttgagagagtgaggaagcccaaattctcatactaaagctatctcagggattgaagctcaaacatctatgactggaggtatgtcgatcctttcattacatatacagtttattccgcattacatatcgtttatatatgctttattattcatattatataatagtctaattgtcacgaccagagcccttggcggtgacagatatgtaatatccataacttgggtggtca

SEQ ID NO: 172018 - DNA, 575 bp, Cannabis sativa
acatcaaaattttggggcctttctctggatcccatactattaaattaaagtcatttaagtaaattgactttcaaacgtgcctaaatcttttcgagtcaataaccacaacaaactaatccatttcatatcttaattttacatctaattccattaattcatttatgcaaaagaaaagaaaaaaattattgcaatgataataataataatcacaatcaaatactatctttgtcccgatttaatatttataattcttctttaaattttgcaaaataaatctgacgaacattacttatcacgaaattcttgtttatattataaatatcaacttgatagtgacactgacacaaaccttttttcttctcaaaaggaaaggttttttttttctgttttttgtattagtttacattttggttccctcatataaaagtccttgatcaaagacagattaagaaaatccaaatccaaaaaattggacaacgaaaaagaagcaaaaaaatggggcaacaattcaaaccttgaatttatggcaacacttgaacattcgacctgggttcttcaccgtctttgaggtacga

SEQ ID NO: 172019 - DNA, 744 bp, Cannabis sativa
  modified_base (625)..(636): a, c, t, g, unknown or other
  modified_base (663)..(663): a, c, t, g, unknown or other
tttgttgtgttctaaacttttcatgcagttgagatagttaattcaaaaattaccttctaattttactaatcaacgtctaatgtggatgaaagttgatagagtactatttggtagtatgattttatactcatcatattaatagaattgaatggaattgaatataagtttttaaatgcaacaatctcagtaatttaaaaataatatctttttgcaccacttgagaatcgaacgcgagtctgaattccgtggcattaacaaggtactattctaccattggtgctcctatttagagagaatatttaattacacaacaaatttttttacttttagtcaacaaaacttgtgattaaaagtgaaaaaattgagactaattataaattattattcttatattgtgactaaaaattcgtggcaaaaagtattagtcacaaaaattacaatttgctgtgactaaatgtatttttaatcacaatacttattgtgactaaaactaaattagtaacaacttatatttaaagtttatattttggtcacaagtaacattttattgtgactaaaaaattatcactaaaagtagtaattttttatagtataagagacataatgggtaaatagcggcataagnnnnnnnnnnnntaagtttgtaagcggcataaacccaangtttatttttagcggcataagtacgcaatgtttgtaaaactgtaatttttcttcagtaatttgtcagtacagactccgttt

SEQ ID NO: 172020 - DNA, 744 bp, Cannabis sativa
aagctcattcgggcaatgagacatctgtcccattcaattttttccaaagaacatcaaagatcgttgccatcagttcttcttctcctccaatttcaaagctttcgaacgcctagatctcctaacagagtgaaatcagattccaccactactccggacagctcccaccaaactcttcttgagtcatgctgttgtttttgcaactgctgcaagggaggagctcaacgtgggagatctggttaaaactgctaactgccagagaaccagacttattcaaggccatcaatttgtcaagcacactaacctatcaaaggtaagatgtcaaaatacttagaataaagaggctaagaggaagcttttggtagagtatatccaagaggctaaaactaagtattaagcttaccagaagaggaaagagcaggaggacctcttggctcatgcccagagtgtagcggatcagaagacacaaaaaaataaaacaagaagttggtggctcccagggctttgtttcctttcccggttcccaactccagtgctcctggagcagtaccttgggtgttcgtaagtctactctgtcttttcattatgtcccttttgccaggagttatgctcgtttcaggccatttgggtttgataggaggttaggttgcaaatgccccattcctggtggggtaagtgatgcgtgtcgtaagccacaacaaatttattattttttttaattccaatacttccaattattttagtata

SEQ ID NO: 172021 - DNA, 699 bp, Cannabis sativa
gcatatcaaaaactccaacatccctcaatgattaccaatgtgccaccaccagcacagaccatcccctcacaaatttcttatcttatcacagattctctcctctttttcgagctgctatactctcacttaattgcattccagaaccaacaacttacaagcaagcttccaaacataaaatttggaaaaatgctatggatgtcgaaatcgatgcactcgaaaagaatcatacatggattgtagtcccattaccaccaaatcaacatgtcattgacaataaatgggtctataagaagaaatacaaaccagatggttctatagaacgttgcaaagcacgtttggtagccaaaggctacacccaacaacctggcatagaatacttcaaaacatatgcacccgtagccaaatttaacacactcaaaatcatgtttgcccttgcagccatcaataactggcaccttcatcatatggacatcaaccatgccttcctccatggggaattgcatgaagatgtctacatgaaactcccacaaggatacaaacctaaagaaccagtcccacctaatgccgtgtgcaaactacaaaagtgtctatatggccttaaacaatcttcaaggcaatggtatgccaaattgagttctcatcttctacacgaacaattcactcaatccccaaacgatcattctctgtttattagacatc

SEQ ID NO: 172022 - DNA, 689 bp, Cannabis sativa
gtggaccagttacgtttataaaagtgagagttgagtccatctggtcccggagctttgtcagcagagaggctaaataaagcattcttaacttccgcttcagtatagggttcagcaagaaaatcgacttgaggggtggagagcctattgggaatcccttggagaagagtatggacagcctcaacacaaactccatgggaggtgaaaagagagttgtaaaattggagaaattgagacgtgatagttcttggatcatgagttatggaaccatcagaaagggtaataagtcggatagagttattcttctttctggttgaggcacggtggtgaaaaaactttgtgtttttgtccccagcacgcaaccaatcaatcctggaacgctgcctccagtatatttcatctttcaggaggagaccatcaagcctggattgcagggaagcagtgagggaacaagagttgggggagtgggaagtggcattcaaaagggagtccaactcagcttgagtttgagagatttggagtttaatagggtgctgatttctactccagttcctaatagtagcaacacagttagattgcttatcgagaaaaagctgcaaaggggatgaaccaggaggccctgaataagcccaagaagaggaaagaagatcggagaaagagggatctttcagccaatgattttcaaaatgaaa

SEQ ID NO: 172023 - DNA, 678 bp, Cannabis sativa
  modified_base (634)..(636): a, c, t, g, unknown or other
ctcctccacgactctgtccgctcggagtccgtcgtcacccacggcccaccagtcacggtcaggtaattctctcactctctctctctctctcgatcgattcagtttttttttttataaatttttttctgttaaataatataaattaatatatttttataaaagaaatagttatttgaataaaacattaatttttttaaagagttgactgagttgatcgggtcaacccgccaacccgtcaacccgtgacccaccaacccgtgacccaccaacccgttccctatttgggtacgggttcggtttgatttttttgaacccaaaacccgcgaacccgaaactcgataaatccacccgatgttcaaccctaatttgaatggaagtagtatttactaaaaaaaaaacaactatttttagtgataataacttttattaatcacaacataaattttttgtaactaaatatgaattacagtcacaatataaagttatttgtgactaaaaaatatagtatttagattcaagctgttgtcattaatttagttttagttacaacaagtattatgactcatctaatcacaatagattatgatttttgtgactaatacttttagttacgaattttttagtcacaacatannnatgataatttataattaatcataagttttattgtgactaaaa

SEQ ID NO: 172024 - DNA, 556 bp, Cannabis sativa
tgtttgaaactagttttatttgatgtttagctgctgaaagatattgataatatgtgggtttgaagctcaagtttgagagcttgaagttgtgagttttaagcatgttttgagttgattttgtaatctggttttttcgggtttaatattgaaagttgatgcttgaattatgtttatttgagcatctagtaattgctagcaactctgtttgttaatttgtggatttgagcaagttttgggttgatttagaagtggatggttgttgaaattccatgaaaatgcatgttggtttctgggtttggaacccaggtgccgcggcatgctctgggcatggctagggcatgccgcagcccgccctggtattttttgggcagttttgagttcgaactttaaaatttcataacttttgaaaccgaactccgatttgggagttctttatatcgttggaaagcttcttacgagctctgtatgattatctgaattttaaatgccatgattgaattttatgagtatggaatcaggggttaaccctatttgtgaaaatcccagatttgtgtga

SEQ ID NO: 172025 - DNA, 663 bp, Cannabis sativa
ctgaaatccagacccgaacccaaactcagacaaggactcgaacgccgacccaaactcgaaccctaactcaaattcagaatcacaattggaactagaaccggactaggactaggaccaggacaaggaactaaacccaaacccaaacccgaacccagataaaaatccaaaccgagacctacacctgaaccgagaatatgacttaaccctgaacctagaccgggacccaaaccctgataagaactggaacttggaccaagaatcaggatagggacctgggcaacgaaactaggatcgggacctagtacccaaactcagatccagacttgaacctaagacctagctcgtgaccaagcacacaaaatggaaccagaccaggacccaagattgggatccggaactggacccggggcttggaccaacccgtagtcagtgttcggatctaggacccagccacggccccaaacccagaccaggacccgaacctagacccagaccccaactcagtccaagacccaaacctggacccaaacccataccctatgaccgaaaattggaagtaaaccgggaccctggaacgggaccagaacagaaccgtaattgtacatggacgtagacccataaccgtaaccagaccaggacctagactccaactcagacctagac

SEQ ID NO: 172026 - DNA, 638 bp, Cannabis sativa
cttaaactatgttaagattttgatcacctgatacttcctcaaggttatcagctcacagttcattgatttatcattgagtgaaaaatgtaatcaatactagtacaagaaactgtatttgaatgaaaaaattagtagaaagcaatacttactcgagactcgaaccaattgggaaagtcgttctcttaaactatgttaagattttgatgacccctaagttgtagctcgttcatatgctgaatacacataaatagatttttgtaagataaggttttgagtgaagaaaagtaaattaagaatgcaaaaactatcttacttgataaacatttccacttcattataattgttcagaatgtaccactaccttagttttcttgcatcagtaaagacacgatggtcctcttaccaatgagtagcccaacatgcttgaagatagagaattaccttttaggcttattttggaggacatagggctgagcatgtaacccggtgggccgaccaacccggccaacccacatcaaaaatgggtcgaacaacctgtataattttgggccaaagtccacatggtttgaaaaatccataacccgctggttgtgggtcggaaacggcctggacatattataacccaaacaacccaaccc

SEQ ID NO: 172027 - DNA, 588 bp, Cannabis sativa
gtcttttaggcgtgacctccgtgcgacacatgtaatgcaccaaacggtctcctcatcaatacaaaattgttaccccacgagctggatatccttagtgagacttatagttatgtatttgtgtattttaccccattagtggactccctttaacaataaaacctaaatgggtcacgggtatgtccagacccaaactctagcctatataaatcatactaccccttcattctcaggggacagaactttagtcgaagctcttctagtttttattctaagttttcttcttctctaagagagacttagagaaaccatcttatagaaagggttagggttccttattgtaaaatttatttgtagcattttaaagtctaaaaggccaatacactaactcgtgaactaggaataactaacgcccgaaccacgtaaaaattatccatatcttttacttaatctttatttaaattcttgaatctctcacttatttagtgttcgaaaattttagtaaataataaccaattataggacgccacctctagatagtgttaggcaccactagtatctaataaaaatacttcaaaattaattagggac

SEQ ID NO: 172028 - DNA, 1432 bp, Cannabis sativa
  modified_base (950)..(954): a, c, t, g, unknown or other
tcttctctccttaattttttcatattttctaataaacaaataaaaatttaaagaaagatcaatatatataagaaaacctgttttgggatccagtccaccggttggggtggttttcaggtgcctcaagttttgtgttttcttgatatttagttattaccacgctatttatcgataaaaaaacttctagttttaagtttaagtccccgagagtgatttagtgagtcgcttaccagttttatgtaaatgtgacgtatggcccctgattgtcgagaagtttcccacacagttgatcggcacacttaattatggaaatgatgtaagattagtataatgattatacatgcatacatgtttagtgtacatattttttgattattagataacatatcagtaagagcggtattggtgtacatagagttgcactagataccgatagatatatgttgggcaatttaataagtatggcttgatgttatcacatcagtatgactagagtgcatcaatacataatgttgtcaagaacattctgttagggtttattctctgaaaagcctataaagatatttctgattattaaataaagagttaaacatttgatatgtgtatgaatattaaattgttaatattattattgaatgatttatattaaatatcataaaattccttattcatatatgaggtcgtggcttgtagctgtatagagaactaagaccacttagttatgaataaaatagttagcaacatatgaaagttatagaatcttaaatcaatagttgctagtatggttcactaatgtccattcttcggtgcaagcaatctcggcttggattacggatgtagtatgacatcaaagtgaaggtattgtatattatagagattatatatgaaaaagaccgatatgaataaagttatctttattaacatgtcatttatcataaagacctaattcnnnnnataacgatgatcaatagtagatcgacctaaatcttgagttatcatgaactcttgttcatgttattagtttctttgattcactcgttgaagtttctcagagaatataattcttacaacttttattttaggaatctaattatatggatggctggaaacatgatgtacaattatagaatcctgacttttctaacagatcgaatgttggttccctttaagtgttaatttaggaactggatgttatgcacaaattcaaatgggatcttgaattatatttccactagtgaattaatggtagtaaaggataaaaaagtaattaaaaggataaaatagtattttgaccaaaacaaattatgaacaaacacatggagggtcaatcattggaattgattatattaatggatactacagttaaacttaataaatataattctataattactaagagtgcaattttataattatagtggagtaatcatgg

SEQ ID NO: 172029 - DNA, 697 bp, Cannabis sativa
ttttgaaaccttatttatggaagatattgattcaatttctgattatttcactaaagcattatcaattgtcaatcaattaagaagaaattagtgaagtaaaggttatagaaaaaattatttgtactgtgagtccaacctttgagtacattgctacaatcattgaagagaataaagatttagaatccatgactattgagcaactcatgggttctttacaagcatatgaggagaaataaaaaaagaaaaagaagtgaaatgagaaaatggagcaattactaaagctcactttggaagaagaaaattctaacaacactaaagatcaaaaaggaagaggacgtgaccaagaaagtgaacgtggatgtggtcgaggacaaccaaaagaaggaaggggtggctataataacaataatttcaacaatagagaacgaagtcaaaattcacaagcaccaagagggcgcagaagaggcaactcattgtcaaggagtgaaaaatctcacatcaagtgctacaattgcaacaagtacggtcattatgcctccgaatgtagataaaggagggtcaaagaaagagccaattttaccgaagataaagatggagaagaaggaactttgttgcttgcctacaaagacaaagatgaaggtcaagaaaataaatgtatcttgacaccagtgctagtaatcacatgtgcagagaaaga

SEQ ID NO: 172030 - DNA, 696 bp, Cannabis sativa
tttttctcaatttgctaacaataagtatacgtaagattacatgcaagagctaaacaaaatacgaaaaacccaactaacatgaaggttcaaggtggatggggatctaagaccatagttggtcacattgtgagcgaggtatgacatttttaatatgactataattttgtcaataagaaaatttttaataatatttttctaatttctaattttgtttaaaaataggctgatccccaaacagggggggctttccagtgttgtggatacttttttaaagttccactgcaaggacaacaaatggcgcgatgaacacacacaacaactgcatataagtatctttatatttttaataagggatattggtggcgaaattacccaaactttctattttgtaacacttaaccataaaaaccaaaattttggtcccaaaccccgtttctgttagctatttacccattccgtcaaaaaattatgttaagtgccacggtggacatgctacagtgcacacaagtgtacacatctcaaatttttagtggtccatgtaatattaattacttaaatattataaaatttaaaaaataattttaaaatataaaataaattacaaaaaaaaaattaaaacaaacttgaaaaaaaatttaatttttttctgctcctttttttttgttttttttttctctttttttttctttttctttt

SEQ ID NO: 172031 - DNA, 566 bp, Cannabis sativa
aaaagaagtgaagatagatcaaattgctatggtgaagggttgtttgttcgaggtagaccagaatcaagggaatacataggtagttttcacaaatcgaatcacaaaagcaaacagtacaaaagctctaatcaatcacataaagaaaagtttaattccaaggcagggaaatagtgctactattgcaagaaagagggtcattttagagatgaatacagagcattgaaagctaaactacagagagacaaaatcaagaaagaggagatgcaggtgttgtgacaaatggctatgaatcagttgatgtcttggttatgtctagcaaagaatcaagtgactcatgggtacttgattcagggtgttcattccatgagaccaagaagggaaccatttgatagcttaaagaaattagatggtggatgagttctatttggtgacaacaaggcatgctaagttgcaggaattggaactgtgagaataaagtttcatgatgatcaggttagaacaattcatgaagttaggtatgtcccaaatttaaacagaaacttactttctattggtgaattgattga

SEQ ID NO: 172032 - DNA, 1068 bp, Cannabis sativa
  modified_base (665)..(666): a, c, t, g, unknown or other
  modified_base (899)..(920): a, c, t, g, unknown or other
attattacaagccttttctttcaactgacctaagcaacaaaacagagtttcaaaaacacatcattggtagaacccaacccgcttggtctagtatggcccgaacatgtacattcttcgtccagctcttacactcatggttttgtggggtaaaattataataaaagtagcttattgtatttttcatgtaaatttttctaaatattttttatatatatataaatatacagtagaggacccatgagccaagcccagcaagacagtataaaataatgataaacacatttatcacactatataaccaggaatgccattcacatatgcctgtacgacatagacctacatgttacgctcacatgcatatttatgtctacgtagcgtagacctgcgtgttgcactcacatgtctaattacaaaaggccttagaacggttccactcggttctaattaccgagtccaacctggttatgccttgaacacataaccctaaatcttacatattcattaactcatatatatatatatcatggcatagcattcgtacaacatatattactagggtaataaccctaggcaattaaaccgctcaagtaagggtaatagccctaatcccgattactgattactcaaaaatatcatttccaatataagtgccaccatgcataacnntacgtgctaactactgtcttaccaaatatcgcgcaataacagagattccaaatccccgggtgctccgaactaggtgccggtaatcgtagtcacaaataccgagattttacactaagggttaacccctgattccacattcatataatatattctatgccattcgaaactctcttctctctttctctcttcgtaatttcaaaccctatagtgatagagttagtgcccacacacannnnnnnnnnnnnnnnnnnnnngtgtaaggctgtgaagaatcaaaattcaagagaaggagattcgagctcagatcttggtgatactctaatacatacaggatacaagggttagagatctatgcggaaggagccattataattactacacccaatgtaaggtttctcaaac

SEQ ID NO: 172033 - DNA, 528 bp, Cannabis sativa
tttagtcttaattttaccacaaatcaaagcttggtaatctatcaagaatgcaaaatcaagattcttttcgttgtaattcttgaagaaacagttaatgtcatcaatgatgagatttaaattggagaagtttgatggaactggggactttgcactatggagagaaagtttaaaagggatcctagttcatcataaagtctatatagttcatagaaatgagaattattggctaaaaagaaaccataagataaagcagaagtggaggagatggtgtattgtgcgatcatcatgtatttatcaaacattgttcgaagaaaactcattgcagagaagacgaagaaaggagtctggaacaagctggaagaattatacttaaagccatcgattgctatcaagattaatttgctagaaaggttatacagttttagaatgatatcttctattttttttagatgataatattgacattttaatgagattactgtaggattggctaatataaatcagaaggttgatgaagaaagtcaggcc

SEQ ID NO: 172034 - DNA, 503 bp, Cannabis sativa
acctcatcaattttcccaaactgcactctcttccactgaaggagcgccactctagtagctcctatctttttgaaaacactggcgggagcccaatgatggcgcacagaattccaagcgttagcaacaacaagattacttctaacatccctcgtccaactttcctcaaacttgaagcacctcttaaatttggtcactgtgccgaccgtatcaagagacaacggtctatgatcagaagtacttgtctggatcgaacaaagaatagctttggggaaaaggtgaagccaggcttcattcatgatgcctttatccagggccgacttcacatggctctctcccgaccggtggttatcccaagtcatcatgtccccttggatctgcatattgattaggccacgggactccaccaggtttgaaatgaaagggataaaggggtctctacccgacgatccctcccgctccgaaggattaagaacaaaattggtatcaccaagaattaaccaagg

SEQ ID NO: 172035 - DNA, 959 bp, Cannabis sativa
  modified_base (388)..(406): a, c, t, g, unknown or other
  modified_base (706)..(707): a, c, t, g, unknown or other
tgtttaaaactagggccatgcgcgtgcgggacagactgcatgcagcctccttcgccgaggtttgttagtcgtgcacctttctttgcgcgcgcggatggtatgcagtgcataccatccgcatcaaacccattttttttcgtttttcttcattttttcatgctttttcattaaattaatttcgaattctttgtgtaattttgtatttagacttttatttttcatatttcaaatttgattattagaattaaattaattaatattttttaaaattaatttaagatattagtgaaatttgaagcttgaaaataggtgaagcttgaaaataggtaaaaaaataggtaaaaatctatctttttccttagtttgttatcttattttttaaaatttnnnnnnnnnnnnnnnnnnntaaatttaaggtcagatatttaacatttttaaattatttaattttttttttaagaaaatgaccttatttgaaattaaaaataagattattttaatcatgaaattttaaattgaaatacgatattttgttaacttttaaattttgttattttatttaaattaaattgtaaaattaaaaaaataatatttatctatcattttattttattgaagatttattttttttaataacatgaactttggaaaagttgttagcttttttttttttaaaaaaaaaaaatagatatttaggttagttganncctaatttttcaaatttataggtttaattttaaaattagtttttaatttaatttaatttttttatttcggaaaaaaaattatttattttttttcgaaattaataaattaattaattaatttaaaattaaataaatcttatttccaactatccaacaagttacatgtttgtgtgttttatatattgtttaattattaaactttttttttttatataaaacctattattgtttgatctaaattaccatggttaa

SEQ ID NO: 172036 - DNA, 504 bp, Cannabis sativa
aagtatatccagggaagggaaggagccaggaggtagaaaattaatttatttaagagggaccaaaaatttaaggacactgacaaagaaaattgagaaggacgaatatcaatttatcaattttttttaaattactattgggagtattagtagtcttcaacattttctatatgttattaattagcgatattctttaattttttttttaatttatatgaaacacgctatttaattacaccaatagcgatataatattaaggagaatgctaggtaccaataatatccttcagcaattttttttttaagagaaaattacactctttatcctttttatattgtcctcttttatttttactttttttttaaagtctatcatttttactttttttttttaaatattacattaattttgcccatgtcacttcaaaatacacatgtgactgttttatgtcaaggtattttgggtacagtacatataaaaagaagtatgtttcaattaaatataaa

SEQ ID NO: 172037 - DNA, 959 bp, Cannabis sativa
acaccccacttttcacttaatttggctcaaaggaaccccaagatacttgagaggaaataccccctctacgaacttaaaaaaaatgtaataagagttgcttatttatttatttatttatttttgaagaaaagtgttcatatattagataaaagatagttagatctcgctctcgcagtcattacaaaaaaggtgttcagaaatcgaggtaataagaatatctctgaacctctggtgggaaaacgcccacttaaccacattatgggcaacacaattatagtttctactaatattagaaaaaaaaaagtacaactaaaaaaaagagggagaggacttaatacaaaaggagacataattctcaagctcccacctggactcagtcatgttaagagcattgataactaccctcgaatcactctcaactataataaacttcaagccaagattcttcgcaacatccagcgcagagcagcaagccgccgcttctccacatagagcatcaacaaataccattctggaagtataaacccatatcaccttgccgagatgatcccttacaacaacagcagtacgtgtagtgtccaactccactttaacattacaattcagctttatccagtcttgcgggggaggacgctagtcaaccgttaggcacggaggagagcaagggaacaaaaaatcatggtgaactgcaaaagaagagcgaatgctatcaatacacttagttacatcaaaaagacaattattatgtaccttatcattcttgatccgtcagatggtgtcaacagttaacgaggcataaaggaagacctcatcagaattaccttatcacctttgtttttaaggtcccagatgagtttgacccagtcccacatctggatgctagtatcacacacatgaaaaatttgttggtttttatgccctaaataaaactcattacaatctaatctgatttgttatca

SEQ ID NO: 172038 - DNA, 600 bp, Cannabis sativa
gatgatcaaggtaattaagatacgataatggcaaaattcaaaattgaaactaaaattattttatccattaagatacaataaatagctttcatgcaataatttcagccataattcttaccgggttcgcaaattgtgccattatattcgcaccaccggctcaaatcaccatttccacctgcattcatcggaagtaacaagcatgaccgagtccaaaagaacaccaaatccaacatgcctttttttatatgcatccacacagttgaacgtacatattcgttcacttcaaggatgtacctccgacacactagatcaaaaacatatacagaatgatgaattatttgctacaaatgacccgtcggcaaacatatccaaataaagcattatcattgaaaaacattaaaacccctcactaaaaataagttacccaaaaaatgaaataattttatagataaaaaaatctaaaaataaatatcatatgccacatgatattaaaaagggtcaatactattttagaccctgtgttttgtaaaagttacagattggaccctgtattttgttaaatgacaaaatggaccctgcattttctaaaatagtaaaaat

SEQ ID NO: 172039 - DNA, 911 bp, Cannabis sativa
  modified_base (845)..(875): a, c, t, g, unknown or other
ccaaccattaataaatggatccattgttattttattattatttggttcatttgtcaatgtggaacaacaagtggcattaatgatttgtggtcattgtatttgtacattttgtattttataaaatggtgttgaactttgtatggttgaagccttgaattgaaggcattgaagaagttggcctagttaaccataccaatgactcatgctagaataatagttcaatgtgctcattttacatcatctattatatgttccaccaataatgggtgacaccaactcattggtatggtggtatagtttattttgtgcagtagcattgttgttatcggcacattaagatttatttttaaaatatatatattaattattaaactaaaatatgtaaaatttaatattaaatcatattaataatgatatgatattttatattctaatcttttgttttttttatcattgttactaaacacaattctttggaagatttaaaatataattgtgattcaagtgtaagattaacttaaaaagttaacaaaatgctttaaatttttactgaaggtatataaaaaataagttatttgcaaataaataattacctaagtttaatttctagttgcaaataaatactaagtttaatttttggcagtaataatactaagttataattttggaatttctatatatacctggttaagtatattgccacatgacaatcctgattagtccaagttattaaatttttattatttaaaaaaaattagttcaaatataccaataagaaaatgacatgtggatttaatggcttaatatttaatggttttgtacctacagagttctagaaatataannnnnnnnnnnnnnnnnnnnnnnnnnnnnnntaggtatttatttacaactagaagttaaacttaagt

SEQ ID NO: 172040 - DNA, 1091 bp, Cannabis sativa
aactcaaatgtaaatacgttttaaacgggatcccggttatgtagaagatatttattttcatttaaaagtaattaagtaaaagttttaattattcacagttttcaataaactcgttgattagcaacgagctgcggttgagcagccgtaagagcgagcagatgaagattgtacatggcggggcggttaggcttggaacgtacgatctttgggacagcaggttgtactttaaatggtcgctaggcgacaacttttgtaacgaatattttgtaactcaaatgtaaattctttataatacgggatcccgattatgtaaaagatatttatttttgtttaaaaagtaattaagtaaaagctataattattcacagttttaaataaactcgttgattagcaacgagctgcacagttaatataaaatcacgataacacacctaaactagtagggtgttatagatagtgtcgccagccaagccatcattggactcttattaactgtaagagagccacaattatctacaacacaaatgcaggagttcttagttgttaatctaccattagtttataacatattgatgcgttgattggactaggggcaataagttcaatcaaacacttcacaataaaattccaaacaccagcaggaataggtgtagtacgaggcgaccggttgttggctcgcgaatgttatcgcattgaacttcaaaatagaagtgccaaccatcaattaatgagaagaaggcaagaagaaagaagaagatctataccctataatccaggacgagaaaaacaagttaaaaccaattgaagaactggaagaggttgttttagatccagacaatcccactaaatgtgtgtttattaggaaaaatctagatgaaaaactaaaatagtagttaattgaatttctgaacgcaaactaggatcaatttccctagagccattcagatatgatagggattgaccctaaagtgattttgcatcatttgaatatcagcccaaattatttagcaaaaagacaaaaatgacgacccttagactctgagagacaaggggcattaaatgaagaggttgacaaactattgacaaatgac

SEQ ID NO: 172041 - DNA, 761 bp, Cannabis sativa
gatccattgtataagtaactttcactggaaaaatatgagttgatttcgtgaatttgtctactatggcccatagcgaatcatacattcctatggttctaggcaaaccaaccatgaaatccattgcaatgtcctcccacttcaactcaggaaaggctaatggttgcaataaccctgcaagcctttgatgtttaggtttgatttgcttgcaggttaagcacttggacacataatctaccacatctcttttcatcccataccataagaagtagggtctagtctgatttggtggttcctagatgtagtgaaaagggtgtggtatgggcttcatcaaggatttctttcttaagctcatcaacattaggaacacgaactagagctttacacattaacatttcattattttaaatgaaaaagtctttaggccgaccagccattatcatcttgaatcttgactagctcgagatcttctaactgtgcctttctgattctctctagcaaatcagattggagtgttaagttgtgcaactttcccactacaaattcaattcccgaattaaccatgtctgaggccagttgaggagctataaaaatagtggtgaaaacctgcgtgggaccttttctactcattgaatcagccgaaacattggctttcccagggtgataaagaatcttacagccgtaatctttaaccaactccaaccaccttctttgcctcatgtttaaatctttttgggtggtagtgtaaatctcgcatttttcac

SEQ ID NO: 172042 - DNA, 561 bp, Cannabis sativa
aaaaatatcctaaaaagaattggaattataatgttctacgatttgtattagaggcaatctgtatcgatatatattaaaagatttgtgttataaacactctcaatgtatacatatatttatatagttatatataaatatatatatacaattggatcttggatcaaaattgtataataagtagcaagttaactcacacttgctgagctatatataatcctattttcttcaaaatagagaagaaaaaggtgaaaaaactataaaagatagctctattatatgagctattttaacttaaattttaaacaaaattatagtgtttctataatatataaagaaatgctgtttatttttcaaataatatattaataactttttagttaatatatattaatataattggaagaggagagatttagacttagtacctcctctttgtgaggccatgtaaactaataaattatgactatgatcatatttttaaggttaattagtatttttgtcccctaaattttaacatgtatcgaatcatgcactctaaatttttctagctgttaaaaattc

SEQ ID NO: 172043 - DNA, 560 bp, Cannabis sativa
ccactcaactctgtcatatgccttgctaaagtcaagcttcaaggccatatatccttcttttcccaatcttttccgtttaaggtaatgcattacctcatacaaaatcatgatattatccgtcataaaacgtcccgggacaaaagcactttgtgttttggagatcaaatgtggtaaaacaactttcagacgattcgccaagaccttcgagataaccttatagagaacattgcataaggatatcggtcttaagtctcccatgttgctaggatttttcttctttggaaccagaacgatattagttctattcagcccctgaggtgtagacccatcagtgaaaaattgacgagctaaggcaactatatcattcttcacaataagccaacatttttgaaagaatcccggcgtcatgccatcgggcccaggtgacttctcgggctgcatttgaaagagtgccttcttcacttcttcctccgtgacaattgacaataaatcatgatgcaaaatttaatctttaatatatgtcagattcaataatttccaacattgcaagtaataacaat

SEQ ID NO: 172044 - DNA, 861 bp, Cannabis sativa
caaacagttatattttctcctttttaaagaatttattgatgtaacaactacattatgctaagagaagttatagtaaataggcttaaattataggactatattagtaaacgtcctcattttaaaacttatagtaaataggcttaaattataagactttaataaatttttttcatattttttttagaattggaagcaaattacttaaaaattatggtatatttatattagttttgttaaaaaaaaaattatttgaaagttatgtcgatttttttaattttttatgagttgttgtgggttattggtatataaattttattgtacagtatatttttattttgttgtatggtatattattatcttagatgatatttattttttattttacaatgtataatagtagtatataattttgttagcataatacaaatattttaatatatgtatataattttattcacatgctatatatatttaattattatttttatatattttaattatatgatatattatttattttaagtaatattcaattagttattattttattatatacaatggtgatatataattttattgtcatgatatatattttaattgtggcctataatttaattagtatagtatacatatatattagtaatatatattttttattattattatttttagtatatatgttttggtgaatggatatttttagttatacggtatattattttttaaataatatttaagttatatttcctattgtactttttattgaaatgatttataattttattagcatcctatatatttttatttttatttgttactattatatatatatttctattgtaagatacatattttttgtta

SEQ ID NO: 172045 - DNA, 775 bp, Cannabis sativa
ttattttagggtgttttcaccatatgattcggtagagaaccctaggttattttatgcgggttttagacagtgttttggaatagaccattattgatttactttttttcgtgacataggacccaagattgtcaagcatcgttccactcaggtcggcccgcacacttgagttctgaattgaggtatgaaaagtggtaagcacgatatgtgtctaaatgttagtggttgaatgattatagccttgattattattaagattctaattaaatgtttgttgagtctcggttgtgaccgagggttggaagcagttattaccgttatgagtaattagttttgaaaccatggataggtgtcttacttatcgtttgcttcatcgagcaacgatagttacatattcaggttgtggttaacgagttgtaaaggggtactttataaagtactaggtttgtgtgtttatgatattgtataaatgtgaaagcatgttgatatgagattgatttgatgaatattactggttattattttattcacttttcttgctgagcctctatgactcgcgggtgctttattgtgcaagtaaagggaaggaaaaggttttaacaaccatgagttcaaagtcgtagcaccaatgtacatatcagtcgcagtgccacggcctagtgaacaggatgctttattttgaatgtattttgggaatgcaaagtttatgttgtaaaaaaaaacactattaaaccagtttgtaaatattttgaaaatagggggaccccgtagttaatat

SEQ ID NO: 172046 - DNA, 671 bp, Cannabis sativa
aaaaaaaatatatatattattttggactttacgttttgtaaaaattattgattggattctctattttattaaataacaaaataaatcatgtattttcaaaaatggtacaaataggcttctaaactgattttttgtcaaaataaaatttaataataacttgatctaaatgtgttatgatacaattgattatattttctacaggtatttgtgttaagattgtcttcaagtttgttatattaaaaaaaatttaaaaattgagctcaggatcctattagtattatttttaaaaaatacaagatctattttgtcatttaacaaaacgggatccaatagtatttacctttaagaaaaacgttattattaggcaccctaaatagctcaacacaataaaattaaatggtggtgtcttgtaaataattgtgttaatactattttagactctttgttttgtaaaaattactaatttgattttatttttttaaatgacaaaatggactctgtattttttaaaaataatattaaatagaacactaaattgattttttttttatttttttgtaaaataaaacttaataacttgatgtaattaaatatgttatgagaaaactagttatattttaaaaaaaattattaaaaattgaacttaaggtcttatttgtactattttaaaa

SEQ ID NO: 172047 - DNA, 981 bp, Cannabis sativa
gagagttaccaaacaagttttggtttcttttcgaattggcaaatatgaagatggggtattgtgcgatgtggtcccaatgcaagctagacaccttcttctaggaaggccttggcaatttgatcagcgagtccaacatgatgggttcaccaacaagtactcattcatattccatcagcgaacaatcactctagctcctttgacaccaaaacaagtctatgaagaacaagtgagattaaaaaatttgagtgatcaaaagaaatttagtgataaaaagaacttgagtgagcaaaagaatgagaaaaaagagagccaaaaagagaaaacaatcgaagcaagagagagagagaaaagaaagagaagagttctatcaatgaggaaaaaatagagagaaaacaaaataatttgtatgcaaaaaaagtgagattacgcgagcttggcgtacaaaacaaccaatgcttttgttcgtttacaaggaggctcttttaaacactaaccaacaagatttttcgttgcctagtgttgttgtttctattttgcaggaatttgaggatgtgtttcctgaggaggtaccacatgttgtgtcacctattcgaggaatagaacatcaaattaattttattccaggtgcttcaatcccaaaccgcccagcgtatagaatcaatcctgatgaaacaaaagaaatacaacggcaaattgaaggattgatgatcaaagggcatgtgagagaaagcatgagcccttgtgctgttccaataattctcgttcctaagaaggatggaacatggaggatgtgtgttgattgtcgagccatcaacaacataacggtaaaatatcgacatcccattcctcatttagatgatatgttagatgagttgcatggctctttgtgttttctaagattgatcttaagagtgggtatcatcaaatacgtatgaaagaaggagatgagtggaaaactgcatttaaaactaaacatggatt

SEQ ID NO: 172048 - DNA, 648 bp, Cannabis sativa
aatttgtgaagaagtcgaccgccaatactgcatattttgctcctcctcactctgtgggaaatgccccaatcaaatcaatcccccatattacaaataggtatggcgagatcatcattcttaattatgtttgtggtacgcgaggtatatgcaaaaacctttgacatttatcgcattttttgacaaattcatgtgtgtctttatttatagttggccagtaatatccttctcgaattattttctatgataagctttgccaacttgcatggtctccacaaaagccttcatggatttctttgataatctcgtttgcttctgtggggagaacacaccgtaggagaggcattgaatagccccttcgatacaatttgtcttctactatcgtgtagtgaggcactgaatacaagagatttcgtgcctcgtttttgttagctggaagttgcctgttgagaagatagttgactataggtgtcatcaaagtaggcaagctgtcaatcatctcaacttcttcctcttcacatatacttggctcgtctaatactccacccgtaccaattttaattcatcaagttcgttctacgaggccagttttgccagggcatcgacattagagttttgttctcttagaatttgttcgattttaaaataatc

SEQ ID NO: 172049 - DNA, 915 bp, Cannabis sativa
ctaattctaattatcaactatatttatagctgaaaaaatataaaagaataaagtgatgaaaaaataaatgtaagatattcaaagaatgtcgatacattaattcaaagtagtcctttcattggatcggtagctaaaacaaaattttattaagtagtagagaattaagctccttaataagtgtacttaaaatgtaattggatcatataaatatataaaaattagagaactaaaccgcgcttctcgcagtgttgatcaacatttgttattttactttttatgtaaaatattgcattgtgatttttaaattattaaaaaagtaactaaacagaattctaaaaatataattatctttgaaatatgtagaagtcttcaaaagagggcatgcaatctgcgattagggcggtctttcacaataaatgcaattttgctaattggtaaatttttgtatgaataagtataatataaaatacatcgttgatatgtgttctagaagatgtatactccttaaatggaaaggatcattcccaaggagtccgtacaatgtgacaaagataaaatataaacatgcacaaatagaaaaagaaatatatacatgtaaacacatgaaactaacaactatcgagcttggtcacgacttgccaaagcttcatatgcaggtttgagacatctgtagtaagattgattgaaactaatgttaataacaaataggaactgtaagaatattaacagagagagaaatggaaggatgaaagaaatggaaaaaggctcatcaaaatctgatgagaccaaagcctttttatagatgaatgagataacagaaagtggttacaacagctggcaaactgctcagctaaaaaacagttaaacactaactgaaataacagacaaaggaactaacataatcctaacatcccc

SEQ ID NO: 172050 - DNA, 738 bp, Cannabis sativa
acagaaactacagaactcaaacaccgaaaatcaaacaaaatctacaacttatagttcaagaaactaaaaggatggtgctaggaacataccttgagttgagatatcactaacaaattgctgtaaaacaccttggattgctgaagaaaaacccaaaccctagctgggttctaagagggttcgaaagagagaaagagaacttgagagaataatgtatttttgtctaatttttcttattttaataaaatgaaaagataatttggttttatctaataaaattaattggtttaatattcagaataaaaacctaattaaaactcactaaaagacaaaaagttaattaggcaaaatgacaattttgcccttcccataactaactaatcacaaaatctcctaggggtattttggtcacttctagaatttcgactattctcgacactcccaatgtctaactatattaccccgctatactaaaaatactaagatgtgattctaatatccaaacaccacgtttaaatgttgtcgggcacaaaacatgcaaaattatgaaattccatatatgacatataaaatgcattccgaactcaaataaatcactgtaaactaataattcataactaacatgcaagtttcataattaaccctaattatctgctaatttccaaattaaagttaagcggtctttacaagtgaagtacaaagatacaaaagagatactaaacctagctgctataaggtgta

SEQ ID NO: 172051 - DNA, 950 bp, Cannabis sativa
  modified_base (338)..(350): a, c, t, g, unknown or other
gcctccagcagtggacaaatcagtggttatcccagcctggagtggcctcaactgaatactatcattcaaatttttattaataattgatttcaaagactttacatactgttatttgatgttcgactcactgtgacccgttttgctatgattgaagttggaattgtagagaaaaataatagatttaagctccattagaaaatttatatacatttatgtatatatagtttgttatatatataataaaaattaaaatatttttaatttcatgttaaagaaaattaaatttaaaattttttaacttaacattgaatcactaaatatatatttttatataattnnnnnnnnnnnnntattattattattaattttttattttattatattaaaaatcgcgtcaaatgtgtcacattcgtgttaagcgggtcgtgtcgtgtttgacccatctttatttcgtgtcaagtcgtgtcaacccgttttcaacccgcgtctaattttcccgatcctaacccgtaaaattcgtgtcgtgttcgtgtgctgtgtcgaaacccgttttgccacccctagtttcgtgtgggttttctgggctgttcttgctgaagaaggtggtgaagtggtgaagaagaagaccctgctcgtatatataatacatacggcgtcagttattaggaaataactgacgccataggtgcacgatttattgacatgtgccctcctatggcatcggttatttccataataattgacgtcgtatgtattatatgtacagcagggtgattttcaacccccaaccgatgacattggttttattaatttctatacctatagtttttatcaaaaaaccactatctaaatgtcaatttcgaactaggcgggtattttcacaccctttagcttccctttttataaattgggttgaaaaaacagcctctaaagacccatattgtagtagt

SEQ ID NO: 172052 - DNA, 557 bp, Cannabis sativa
tcatttattaagttaaaatttttgagagctgatattaaaatgcactaataatatttatgatatcttttgtggtgcttgacacctcagtgtcctttaatatttttgttattaatatgtacatgtctttattaacttccattataattttaattttttaattatatataaatttgtaagaacatcttcgattaatttttaatatttttattacaagtataaaaaaataataacattattattaattttttaatgtataaaaatagatagttcataattttttttttttgaaaaggaagatagttcataattaaagtaataaatatactaataaaataataagtgtcataaaattaattaataaagttgtgcatttatggggatgtaaattttacatcataagaccatcttcaatggaagatctaaaatttgtgctaaattttgcataaaaatgagattgtgctatatttgacccattatttataattgtgctctaatacacaaaatataaaataaaaaaaataagtatattaatagtcatttaatattttattgagaat

SEQ ID NO: 172053 - DNA, 924 bp, Cannabis sativa
ctttaagaaacaaattccaaaatacttgagaactagcaccgagacccaggacttgaccccgaaacttgaccctgaactgggacccggaccaggacctgggacaagaagtggaactagagtaggacccaagactgggatcctgatctggacccagggcttggacgtgacccgtagtctatgtttggatttgggatccatacccgaactcaaacccagacccgcactcaaacctaaacctagacccaaacctagacccgtaccccgtgacttgaaactagaagtggaaccgaaagcggattgggacatgggaataagaccaggggactaggacctagagtcagacctggaccaggacgtggacccaaatcaaaactcagattatgactcaggacacgaacaaaaaccagacatgaacttcgaccaagacccagacgcaggacctgaaccgagatcgaagactcagacttggacccaggtcccagacctagattgggaacccaaacccggtattagaaccagaatcgggacccgggactgggatggggacccaacacccaaccccggtctccactactacaaaaagtacaattctcgtcgatttttaagtgtcatttaaagaatttgcaaatagtttttcattagtgtcattttttaaatgaagcaaaaaacaattatcgtcatttaaaaaccgacgcaaaatatacactcttctttttcatcttccttcgtcaaataaaaaatgacgcaaaatcgtttgtggcattttaaaactgtcactaaaaatttatagcgtcggttttaaaatgacataaattgctgaaatacatttatttttaacttattgcgtcagttataaaatgaagcataaatgtatgtaaggaaaatttgcaaattttcatgcatttttccctacatgcattttta

SEQ ID NO: 172054 - DNA, 586 bp, Cannabis sativa
tttctggatttaaaatatgtttatacgtattgatttgaagtggttttaggggctgtggtgttgattgagcaagctttgagttttagaactcaagcttggctctctaatggtgattttgaattctgagcttgggttattgttttatttcttgcatatagtttattggggtataatatgaaggtctggaaggtttatgtttgtttggaatcgatttggttgagctttgaaactttttgggttttctgcagacaactgggtaaccggtttttgcagcagggttccccatatatttcagctagtcgattcatcctagtttcaagtttctggttggttgattcgctactagtttagggtattgcaaaattaagttgatatagataggtttttggtttaaaaactaagttccagttgtgatttagcgagtcacttattcgtattgttatcgatgtgatttaggagcctataattcgctgagcaattgttcccctcaggttgaccggtgcacctgaattcagaattgagataagattagtataatatcatgcatatgttattaaatgtttagcgtacatgttgtttatgcctg

SEQ ID NO: 172055 - DNA, 513 bp, Cannabis sativa
aacaacgaacgacgtgatgatcccattcaatgcttgaggtcaaaaagaaaattggatgaaactcacaaagagaatgtcaaagacaaagatggcatgcaaattttcgaaacaatctgggtatggttttttgtagagaagctcgacaatttttcagagtttttgaaatggcaaaggtaatgaaaaggtggttcctttttttccttttatactcttgggttgattttcgtcatattaagtaggcaattgatccaacgggtaaaattttaaaaaaatgaagaggaaaagatggttattaaatgatagtgtgcttcgaaaccacaaaactgccaaaatcagaggacatgcattttttcaaaatagattacgacaaaaataccctctgtaatcatttaaaagcacttttcactaaaaaaactttttaaagagcaattgttatacccgaaaatcggctagcactttagaagatgacacgtgtcaactttggagaacacgaatcaacgaatataatggcaa

SEQ ID NO: 172056 - DNA, 1642 bp, Cannabis sativa
  modified_base (1590)..(1595): a, c, t, g, unknown or other
cccatcgttcttcttgaattgatagggaggaggcgtacacgtaccccagtggggggtgtatctaaccattcccgaaggagaaggcctgtgcaggatgaggaaagttctagctcgggacatacaagatcctgagagcacagtcagaaaggcatacacgaggaggagatagacctcgccataatgatgatcgagaaagtattagtaatacgaggagctatcaatctgagagttactcaaatacaaggtctatgagcagccatgaacgaagacatccagatcttcgtgaatgtttaaatcagagacaacccgatttacgcgagcacttagatcagaatgcacctgatttacaccaacaactcaatgctaatcgaaaacaagaggatccaatccaattgcgaatcatcaagttagaaaataaattccggagataccaagatggggaatatgggaaactgcctggttatgactcagatgaagaacccgagcctttccatccagacattatgaactatgaatttccccagggattcaaaaaccctcacgtctcgctgtacaatgggacttcagacccagtcgctcacctcaacaattttaataccataatgcgagtcaacaatgtctcaaataacttacgttgtatcatattcgctagctcgttgactaaggcatcgagtagctggttcaataagtttacccatcattcaattacttcttgggaacaactgtctaaggatttcaagaaacaatttcaggcaacaagagatagacgacctgaagcatcatcccttactaacgtaaagcaacaacctggtgagtcacttaaggcttacttaagtcgtttcagtactgccgacgctaaagttagaaacttgaacgacaatattcaacttactgctcttcaagcagggatcacgactgacctctaaatagctggagacgagctatgggatgacttacaaggttgccaggtgagaaacatcaatgagttaaatgaaagagctcaagtgttcgtacggaaagaggaagcgaggaacgagatgaaattgttaaaaactggcttgggaagtaaacccagcactgtcgcagcaagcactgtctcgacaaaggctgaccatccaggtggctctaacaccaagagaaaagatgactctagagaatcagccaaagataagaagaaacaaaaaaagcacgataagtatgtgccgaattatactgtttatactgagcttaatgaaactcgaaagaacatttttctctcaaatgagcatagggttgcattttgagcctgagccaatgagacatgcgacacacaaaagagatacaataaaattctaccgatttcataaggacatagggcatacaacggaagaatttcgttagttgaaagacgagatagagagtcttatctcgtgcgattattttcaatagtatgtaagacgacaaggtaatggacaaaactagccaaatctgcccaataacccgggcaaccaaagattacaacctcctcctatagagggagaggacatattggtcatatcgggagggccacatctcgctggaaaaagcagtaattgattttaattaatcaannnnnnttctaaaattagactatgtcttttttatgaattttcactaaagcaag

SEQ ID NO: 172057 - DNA, 889 bp, Cannabis sativa
tctgtgtgtgaacaacatgagtctattctgggatatatttggttccatgatcaaaagctcaaaccttgattgtctcccagccatcttcatcatcaccagtgattgtacggacaccttatatgcagatacatgtcaaaatcacttggaaagggaaaggaaaggaaagaggtgatccccaactccactatctcacctctttattttgtcggttaggtgctttagttattaaccctttaaaggtttctcttttctactactaatcctactaatattaaaaattaaaattacccaaacaaaaaagattaatatcaaaaagtaagaaaaaaaaaacacagacacatgagttggtgacccaaagccatgtgggtagacaacaattgatgacctaccctaataaccttaagtgcttttcaagtgtcaaagatcatttgcccctaccaaagttatagttaggagtcattagtagaaacagtactagctagctctctctttattttcagagctttgttgttttgtttccttgtatagaaatgtagagtcagcaaactagcacaattgctggaaaaggacatatatatatatactctcaaataatattgctatgtgtccaacaccactattaattagttcaatttaaaatcaattcccaggtattttaattattaacagaatatatggtattgggcacctactcatgctttatagaaatcaaatactcatctcacgagtctagaatagtaatatgatactgtattggaaaacattatcccaattggattaaatgtaaaaatattgagctatatataagaacatgggctacttcacttattgccaattggttttgagatggaacctcatgattctcaacaacatactggagcgacactat

SEQ ID NO: 172058 - DNA, 580 bp, Cannabis sativa
  modified_base (452)..(458): a, c, t, g, unknown or other
aaaaacagtttatactgtttttaccgaaacagtctatcattttttagggatttttttaactaaaatatcatttttggtattatgtcaatagcagtacttcaggttttgaatttaaaacctagaacgagttagaccaagtgttaaccgatttaccatatagcatgttgagataagatatgattattatcgttggtgactcaattattatcaattataagatacgataattagcgttttacgaaaaagagtcatcattgtaaattgagacctttattatgtttcttagttatcgattacctcattaggtaacgatagtgacattgaatgtctggttggacttctcagggtttgttgtgatattttgcacaaacaatagtgtacgtatcgttacaagtagtaaactcgccaggagtgagatcgatcccagagagattgtagttaagtacgttaannnnnnncttttacttctatttggttaaatacaaattaaggaagaaatttaaaataagaaaactaataagaagcaaataattaaagaaaattgacagttaataaaaactagtgcttcgatttcaattgt

SEQ ID NO: 172059 - DNA, 590 bp, Cannabis sativa
tctatgtatcacatcgcatattgtggtgttgggcggacggacacctgcaatttttcctctataaacgttaaaaggtacgtagcattctataaaaatttaagttaagtaaatctcacagataagatggaaaactattgtaaatctagatatgtacaattatattacatgaatatgaattagagacgctagatagtaaactataatggttaattagaatttttattacttgtcttttaaatttttaaagtctttaaaaatattttttaaattattgagattgtttgattcaacgagtttgtttaattttaataaaaaaaaattaacatagataaaaattcaaaaaatataatttagtatatgtcacagttcaaggggaatgatttagtagatattaaaatttggggagcataatttagtacataaataatcactaaaatagtaaaattgaatgaaattaaataaaagtctttaaatctaaccatctcaatagttaacatccaaaaatattaagagacataatttagtacatcttaaaatttataaagtaaaaatcttaattagccaattataaatagggaaatttacatggt

SEQ ID NO: 172060 - DNA, 692 bp, Cannabis sativa
gagagagagagagaggcgtgtgtgagagagaaaatatggttgaaaaatctaattctattttctctactttcagtttgttatctgcctctatttttagtgttcgctggcttattaattatgatattatatatccctttagtgttataaataaaacttttaatcatttatttaaaataaaagataaatatctaatttgatttgaatcagaattaaaattcaaatataaatatctaataaccgaatatcaaaatatcagtagatcttttattttaataattattctttcaattaaataattatccaataatttaattaattagtaattaaaagataattaacttaatttaatttaaattatcttaacttaataaaataatcaaacaaaattaatcatgagcctttatatgtcaccctacacgtgtagaatggacctactgtgtgggccatattttaagggccaaaattgatttcttaattttaccacatataagatttattatttattctactaataaataataattgattaattctcattattctcttatttcacaatgattaaaataaatatcattttctctaaaacaatatacttttctctttaatattatttaagaataatattatatttaactaattaatatagttttatataagaataatattatatttaagggttatttgcggcaaaa

SEQ ID NO: 172061 - DNA, 531 bp, Cannabis sativa
ttgtaatggtgttaccttttccagatgcaaaaaaaaaatatctttattattatttaaaaaaattagaaaaaatatatgatatttctataaataaaaattattataaaattaaaattattaaactaaatataatcaacaataatattgaatattattatattttttatgtaaatattacttaaattaaatattttttaataaaaaataatgttatttatttaataatatatatatatatattatgaaatattatttatggatgtctaaatcatcatattaattatcatcattaatgcttgattgtattttcctttattacatattaatttagtttcccattcctttaatcaatacttttatgtaaataggggttcaccccattggaataaataactgataaattcttattcaatttctctttatctcttcatcatcattatcttcttcttttctattttatattattttataataagttatcagcacgagtctctgcctaagcttcatgcatgagtctctacccaagcccca

SEQ ID NO: 172062 - DNA, 934 bp, Cannabis sativa
tcttccactgattggttttttttttctcccggttggtgttttggatggtgtttctcttactctctttctggtttgggttggtgttttggatggtgtttctcttactctctttttggtttgggttggtgtttggatggtgtttctcttactctctttatggcttgagctggtgttcgagatacacttctggatctggtttggggtagtgtttgagatacgtttttggatctggtacagggtggtgtttgggctactgtgtgactgctttgaggtgttgtagaagctctttgagatctggtttgtggtgttctggaacaaccttctcctttcctagttctggatgttgtttgagctctgttttggggtgatttgttgagatttgactgccctttgtttttttctggtttggggtggtgttttggatggagttttagacctcgtttggggtgattggaacagttgtgtctggaaacttttttttttcttggtttggggtggtgttttggatgttatttgggacctggttttgggtgatgtgcagggatttaactggccagttttgccttgtctttgggatctggtttgtgctgatgttttactactttggactttttctggtttggatggtgtttcaaagctgttttgggcatttgtttgggtattggggtgtaaatgggccttatctgttaggccttcattttcagattcactatcatccagtgtctcaataatttggacactagaatcagtatcttcatcacttcctccatcaacatcttccatgtcaaattctggcatgtcaatatctggcatgtacataacaaactcatcatacccatcatcagaatcaccactgcaatcctgtagtttctttgccaattcctcctcaacatccctcattgctactttggacataatgttggaaattatttta

SEQ ID NO: 172063 - DNA, 1496 bp, Cannabis sativa
agagagagagagagaggttttttgtgagttgtttaattaatgggtcagaaataagtaaaactaaaatgtgtaggacagcttgttttggtgtattgggtgtgtttttatcaacaaagaaaagacaagcacaccccatcaaaagtagacaactctcctactatttatatttctatttctatttcaattaatttcctttacatcttttcttttacctcaaaatttataaactatgcccattttaaactctctccaaccattaatcgacagctttaattcttttgaaacccctttccaattctcattttttaattgggcgtataattgtttaacataagatatataacactttagtacataacatgttacgttgaatcgatcaactttacaaagagtaattaattttcaactgaacagtactagtatagtagtattaggggactatatttgattttttcactgctgataacacatctctatgataagtacatattgaataattctcaattatgaggggactagatacactatcacatccaaagacaacaagaacagcccaacatagaacatacaatacaataattctttttttctttttttttttttaaaaaaaaaaccaaattttaaaaaaaaaaccaaaaaaaaaaaaaaaaaaccaaaaaaaattaaaaaaccaaaaaaaattataataaaccaaaaaaaattataatatatatttataaattataatatatatttataaaaaagaggtaaaaaagaggatggagaatttaattaagatatttacactaaatgttaattttttttagaaattttacatttatacttaatttttacatttatactttctttactttttttttttcttttttctttttacaattttttacttattaaagcttcaaaaaaattatcttctttatatccttttttagttacttttttttttttttaattttttattttattttatctctatcaatttctcttttttattttttttctaatttttttctcaaacaaactattttttttaatttttatatatgtctattctatataaaatatggctatgtaacagaattcttgtttaacgagatttatttaattacttaatataatattctttattaattttataatattattatatatatagttaaaaataaaaattatatagttattttatataaaaaattaatttaattatatatatttaaaaataaaaattaaatctatatataatcacatttatatataaaatatatttttaaatctaagaaaattaatttaattatatatatttaaaaataaaaattacatctatacataatcacatctatatataaaatatatatctttaaactttaatttcacggcaactttttattttaaaaataattaatgacctgtatatgcaattctaataatttgtacactttattataaccacacactcctaactacaaattaataatattatatctatcactatcatt

SEQ ID NO: 172064 - DNA, 658 bp, Cannabis sativa
  modified_base (596)..(633): a, c, t, g, unknown or other
actcaagaagatgaagttcttggccaggtcaatccttgattcacagagtgggaggttcaagatcaacttctatattcctggttactctcatccatgtcagatgccatactcacctgtattgttggagctgaaacctctgctcagatctggaaaactcttgaggtatactttgtcactcaaacctcggccaaaatagatctttacacaactcagttaaagaattgcaagaaaggatctctttctgttaatgactatcttctttgcataaaaactcttgttgataaactagggtctgttggtcacaaaatttctactaaagatcacatatctgcaatcttcaaaggatttccttctctttatgatacttttgttatctctgttaattattgaaatgataactacactgttgctgaaattgagacattgctgttgtcttaagaacatagaatggaaagccatagcaaagatcttgattatattaatcttgctattaaccgtggctttagatcaaagccacaaagtactccttccttttccaataatgcagacaacaacatcttgaatcaaggtcgtggtgttggaaatattttaccagnnnnnnnnnnnnnnnnnnnnnnnnnnnnnnnnnnnnnntaatatgaattataaaacaatgaaa

SEQ ID NO: 172065 - DNA, 998 bp, Cannabis sativa
  modified_base (969)..(972): a, c, t, g, unknown or other
tatttttttcataataataataattaaatttaagtatgtattgtgaatacattaaaatggttgtacatgcatgttattgatttagaatccattaaaatcaagcttttgtaaaattttatttggattacaatatgggaaggaggttatcaaaataatttgtttcacatatcgaaataagttttaaaataatttatttttatattatcaacaaaatcaattacaattctaattaattatatttttatatgacaatgtagtaatttagaacctttcacattttttaaagaaaaacaaatttcattgaagcctgcttcatatgtcgcgagtatataaaataagttattttgaaagatcaattatatgaaaaagaaataaaaaaattgtagattttatacattggtgcaagtgactatttttggacagttttagtagttgaattagttagttaattctattaagtttattgggttattgtacattttgtatcagcctatataaatatatatatatatatataaagaccatttttgtgacttattagtgggtgaacttagtgtgagctgagagtgattattgttgtaaagagcatgagagttcataactcatgcatcttgagtgaatctgattttggggtaggagcaagattccattcagttctattattgtccataattgtatcctttttgagcatcatcttcaagtaataaaggcaaagctccaaggcagttcctcccaaggattagctccaaatgtcacaacttgtgattaaaccttgtaactcattgtgttcacctactctatttttgttcttgttgttattagttttctggttcatgtttttactgttttaattgatcttgttgatgtttgttatattcttggttggtgtttgattcaccacaaatggtatcaaagcacaggttgttgttgaggatccaagaacctccgatccaatccgcacttttttgnnnnaacaacatccaatccgcactaagtgc

SEQ ID NO: 172066 - DNA, 688 bp, Cannabis sativa
aattatgtaaatatgttaatcatatttttaaatcaaataattttgggttaatattattttcgattttgtgttttataaaattattaattagactattaattttgttaaatgctaaaataaattttatattttttaaaattatataaaataaaattctgagttcaatttttagtatttttttttttagtaatttgtggtataaatacttaattttaactcttgattgcatttaatttttaatagtaataatacataaatatttttaaaacttctatagatacctgaccattaagtatcaagtcaatagccatgtagcaataaaaaatattatatatttagttcaggtcattaaatatttattttttatgtattataaaatttaaatatactaataagaaatgatatatggataatgacttaatatttaacggttaggtatttacgaaagttttagaaatataacttaagtattattaccgttaaaagttaaacatgttataaatttaaatatttatattagaatttttttttaatataaacaaactaaagacatacatatcacggggatcatgtgagctcatacaatgaagtaatgataatgaggttagtccattacatattggttgaactatggaccacaccccttttcccacttatgtaaaaagcaagtagtaataatgaatacagt

SEQ ID NO: 172067 - DNA, 773 bp, Cannabis sativa
  modified_base (724)..(730): a, c, t, g, unknown or other
tgaggaaaaagtacgctagaaagaatcatattaggattcagaatcagtagtcgttttagagattatcaagaagaagggatgtgttaataagcagaaatttacaaggtattgagataagtatatatctatcagaaatgaatacttaacttgttattaagttaaattgataaaccaatttaggatgtcccatagaaggaataaaaagacataattatgaattatgtattgtgggatcttatgatttggactgaatagtaacagttggacataccgagttaatacgctgtctatcagtatagacaatttatacaatatataaggatatggaattcatacgaaggactaatctaatcttgtgaaattccaaggttaatatctttgggtatggtgttaagaattaaagaaggttattgagaaccatggagattaaggcagaaatagtatgatgctttatttttgaaaggtgggtaacctgagaagatcattggaatattagaaatatgtcatgggtgtatttaataaaggttagattatcttagaataatctcttcccctgacaaagtgtttgtataaaagtgataattaaatgtaccactggttaggtacctggtacaagaaaaatattagatacttgttcacaggagtaaataggcttggtagcctattgttggaaatattttaccaagatctagatttacgaccaagtatgtttcattaacatccnnnnnnnaattctaaaacaatgaaaataacacatataaagtttagtaaac

SEQ ID NO: 172068 - DNA, 715 bp, Cannabis sativa
ttttacaggttcacttctgacccaagcttgaaatagttatagctataataacgttttaacttcaattttttactaaaaatataaatagcatcaatgctactacatagcatttagggccggccctgaggtgagacgaaggagatggccgccttaggccccccaccactcaggtccctattttgaaaaaaaaaaaattaaaatacagttagtaataaaataaataataatactcttaattttaaatatgtgttgtagcctagtagtaatttaattagcttaagaactaagatgtttagagtttaaatctcaacaacctcacttgttcactggtttctaatttttatttggcaaattttcaccctgtaatgatttttctcatttaatttcttttttactgttacacgacaattactacatttttactgtgtatatatattttttgaattttgagcaaggctatttaatttaacttaggctatgtttggtaggaaggatggagagttggatggatgaagagttgatgaagaatggagagttgatgaaggatggagaatataagggagggagaggagagtaataatccttttatattgtttggtagtttggtacgaaggatggagtgattaaaggatagataattattaaattataaaattactattttatccttataattagttttaaataatatttgttgagggtatttatgtaattt

SEQ ID NO: 172069 - DNA, 568 bp, Cannabis sativa
tttgcggttcccccttaataagtcttagaatggaaggcttctgtccgagagttttgagatgaagcggcttaaagcggctatcttccctgtcaacttttggatgtctcttatggtgcggggttgtcctgtcacttgaaaggcttcgatttgatccgggttcacttctacccctcgtcgcgttactagatggcctaggaacttcccagatccgacagcaaaggcgcatttggctgggttaagtttcatcgagtgggcgaggaggatctgaaaaacattctcgcaaatggttgacgtggtcggcgccatctttggattttactaacatgtcgtcgatgtaggcttccatagtaagttctaactactgggcgaacattttgttcaccattcgttggtacgttgccccggtgtttttgagtccgaaaggcatcactttgtaacagtatgtccccctctcagtgatgaatgattttttatatcggtcgggagggtgcatcattatttgattatatcctgagaaggcgtccatgaagctcattacttcgtgtcccgcggtggcgtcgattatcat

SEQ ID NO: 172070 - DNA, 697 bp, Cannabis sativa
  modified_base (659)..(672): a, c, t, g, unknown or other
gcccagctcccaagaatagaataggaattttacaaaaaatactagattttaagtagaagtttacaattttactgccacacggcaaaaattacatttatattgcctctttttttttttttttcttttatactgtaacataaaaaaaaaacgaaagtctccatcttccacactcacagacagaaccaccatagcaacaccagaacagtcagaaaaaaactattaatttcagtgaggtgaagcagaaacattaaatccattaatactggagctgttatagtttttctaatgttgtttttgggttgttccactattgttttgtctgtttaataaatgttggtttcaaattacacaggttaaaccaaccactgaatatttgtttgaggtaaccataatgaaagaatcatatacaataatagttttacctccaattaaaaatgttatctgaaagataaagaaaaaaggatggaaattggctgggaaaagaaacaacataacaaatgtagcaaaataagggagccatggcacaacaagagaacataaaggagaagacatcaaaaatgaaaagaaacagaacaactacaataatagtggaacaacataataaaaactaaacatatattggaacataggatattgaagaaaataacttacatacaaannnnnnnnnnnnnntattactattaaaaatagagaagta

SEQ ID NO: 172071 - DNA, 505 bp, Cannabis sativa
tcaatacaaaatctaaaaagtgaggattgagaatactctaaatgaataaatatatttaatgtgaaacgagagtattcacatagcttgtgcgacccttagattattacttaatgcgaattgtttgttgtactatctcagagatacagtagttgacatacaatttcagacctttatgatttgaagtttaggttaatttataatctgtcatcacataggaggaagaagaatagttaattagtattaataattagataattaaagcaattaaaatcacatccttaattttacatccattgttaaaccactttttatttgtttatttatttttttttcttagtttatttagtttcaaaatccatttattcgattgcgaaatagaaataaaaatttaattgatcggtacttagctacagtccttgtgggaacgatctcacttacctgagtattacttgttaaaacgatacgtatacttgcgtgttggatttatcacaacaagtttttggcg

SEQ ID NO: 172072 - DNA, 580 bp, Cannabis sativa
tttatgcttggattttgttttaattttattttaggaaaaatatttggagatctttaattttggtaattttggtgttctgcaagcctttttgagcaaaaataagaaaatatattgaagaaaggaaatttattttggcttggagtaatttcccatttcttaaaatagattaaagactgcattttaagctcttaatttcggggtctagtcaatagtgatcactttgcaaaaataaattgaaatttctaagttttggatattcaacatgctccgtttgtgactgaaaataaagtcaaaaacttcaagctaatttttgactatgatccattcacttttaggaaaaacattctgaatggaaattctagatctctcttttatcttttcaaaacatcttgaatcttccaattttgagttatatcgagaaagttatggccaaaatactatcgatcatcgcagtagaaaatagaatacgggaaactgcgaagaaaagaggaaatcgcttgtaaggttgcggccttgcttggcctttgtagtaaaaaaaatgggaaacttccatttttggctctatttaaagggggctgat

SEQ ID NO: 172073 - DNA, 515 bp, Cannabis sativa
accaaaggaatagaaatgaacaagtatatttctgatcaactttgaagttcatcatcactaaaaatcaagtcatacagccagttaaaacaacatcaaaacaacattaaacaaactataaaataactttctagtatgattttttttcttcaaataaatgaacaacaatcagagaacatttcatacaagacaaatcaaaaaaagtaaattataaaccttgacaatatttttctttggaagcttcaacttgtcaacaacatcagaggtcttatcacgcacctaaaaatattaggatgacaaaattaataaaacaatgaaacaataaaaatacgattaatagttatacaatactgcaagtatatcatgtactgaataacattaaaacaacaatataacaacttaaaattattataaaacttaataaacatgcaactaaaacaattccaattaaaactcaaatatgattgataaatgtaagacctaacctaatgatctagttttaaaaaaaaaaataaaaa

SEQ ID NO: 172074 - DNA, 522 bp, Cannabis sativa
  modified_base (477)..(480): a, c, t, g, unknown or other
ttttaaaagtctttaataaaattctgtttgaaaaattgtgaagtacttaatgagttaccaattgtgataagtattttggtaagaaatcctgtaagaattctgcctatattgacttaaggatggtgccaccttaaatgagaaatatggagtatattttctcaaaaatgtcaatgaatggaatgagcacaaggtcattaacagtgcaaagcaaagacatgaggtcttgagtgaaccttaaaaatgtgtgtgtgaaatcgctgttttattataaaaaatagttggttcaatgctttgtcaactaaatttttaataaaatttgttatgattacactatggttaagttaaagtagaggtgttcataaaatagctgatccaatctacaaagtgcggaaattcgtacttgtgcggattggattggattggattggaaaagtcaaaattcgcatttgtgtagattggatgttgattgacatgtannnntaaccgatccaatctaatccacacatttttataaaaaaaatt

SEQ ID NO: 172075 - DNA, 617 bp, Cannabis sativa
  modified_base (103)..(108): a, c, t, g, unknown or other
tatttatacatgtactataatttggaataaaattatactaattctacgtagaggtaattattaagatgtaattattcttatatagaggttattcttatttatnnnnnnccaaattgggacttaatttttttataacaaattatggaggttattcttaactagggtattcttaaataaatattttactgtgtatatatatagttaagaattctataggttttaagaagatgcttatatgtttaataaaaattttaaattcatgcggattataagatttttttagagatattttttatagttttttaattaaattatataaaaatgagaaaatttaaattaaatagatatttttcttgattaataaatttatttgtatattataaaattaataaaaaaaatgagagaattaaggagagaattaataaaaaaaaactatgtagagtgatttgaaagtatcactcatacttctcatttacatatagataaatagatagaatatgggaaaaaattaaaaatatacattgttagacatttatatgtataaactgaaatatatatgtttaagtataaagtgcggaattaatcaaacatatatgcactataatttaaggatcgaa

SEQ ID NO: 172076 - DNA, 755 bp, Cannabis sativa
tatgtacatgtggctttagcgacgcgcaaaacttagtaaacagatttactcacacgcgtagtgtgtcaccatatacccttttattttatttttttcaattttcttttaatttcttttataaattatttagttttttttattcttcatattaatgtattaacgcagattttcgttaacttgatttgagccaaattagtgattgatttgcatagaaaaagagagatatgaacacaaaggtttttacgtggttttgtagttaaaattctgcatagttcacgagtcaatcttattagatttctgatacagctctaggattttttttatgaatttttcccccttttttagtttgacttgcctctatttataattacataggagggtcgttaattacaatgttgactgatattttacaacaagtatcccctgaactcatgagattttatcacattccacgtaaaataagtgtgattaatatctgaaaatcacacagctgtgattggtccacttttactgggtcaatataaacgtgtattaaatacgttgcaaatcgtatcgttttgggacatctcacagggaatatagcaacaacaactttggtagcaagctagagtttttcccaaaactttctaaggttgataatgtgaacctcgtcatttatgctattgaatacataacgctccatttgacaattgcagttcttggtgacaaggtaaacttcagtagccaacaacatttgaatgtcagcttctatctaa

SEQ ID NO: 172077 - DNA, 576 bp, Cannabis sativa
tcagatgctcagttcctttaagtattgaataggtaccaagttttccttagctatcaaggtgctgctggctatcaagcaagtgcatcagctattgtgtcatctttggggactttccttttaatacagcctttcagctgacttaacaagtcattaaattagcttaaataagccatcatcttttttccttgagctacgtattcatctaggatatgacctaggactagttgagagtcgtggtgtatgtctacgtattcaacccgtgctttgtgttctagcttgaggccagcaatcggagcttcatattcagccttattattagaagctttgaaactgacctttattgaggccatgcgtccaccaggcaggtggtcaattcacctttctagattgagttatcttgctcttgctctcactcttctctggcccttgcttttctcccaaatcttgagtgatttagggagatatgcttgtatatgctgccataaagttcgtgagagctttgcctttgatggccatgctaggttgataagtggccttatattggctgagctcaatggcctaggtgctttaggtttt

SEQ ID NO: 172078 - DNA, 816 bp, Cannabis sativa
agaagaacaaagccagccctaagttcaaggacaagaaaggcaaaaggcaagtgttttccattgtggcgtgatggaacactgaaatagaaactgtaacaagtatctctccgagcttaagaaagtaaattcgatttgtttgttcttgaagctaatttagtggaagatgatcaatccttatggattattgattcgggagccactaataatatttgttcttcaatgaaaatacttgttttgtcaagggaactggctaatagaaaggtgaccataagagtgggcaatggagcacaagtacctaccaagtgtgttggcaaagtccatttaagtttattaataatgagattatcaattccaagtttggaatgccaatttattatgcaaaacaaagtaacagactttatgttctcaagccaagcgagcaattaatgaatcgtttaaagtagcattgcctcaacaatataaggggcaaaaaggtttctaatgatgatataacatatctatggcatctacgtttatgccataatgggctagatagaatatagcagttaacaaaggatggtcctttgagagaactaaaaattagaactctttcggtatgcgaatcttgtttaaaaggcaagatggcactaagacctttttctacaaaaggcaatagagccaataaacaacttaagcttattcacactgatgtgtgcaggccaattgatattcaagcttgaagtggttatgaatactttgtcacttctattggcgattattatagatatggtcatacttacctaacactactacaaaaaacccctttagaggcggttt

SEQ ID NO: 172079 - DNA, 649 bp, Cannabis sativa
taggtttggggtccagattcgagtcaaggttcaggtctaggtttgagtctaggtttgggttggggtttgggttcgggtcttgttctgtggttggatgggttcatgtcatagtatggtgtagaatattaattttttttagtaaaaaaaatccaaaaatagatttaaaaagtgtgagtcaaacatcattaaaattttaaaattataaaaaattgtattttgttctcacttttgaaaacaattctaaaaaataaaaactgaaaacacaaccaaacaacctttaagtgtttaagctctggtttctagagagggaaactacagagagatgatctgaccttgtaggtagttttctaattatgaaaaatgagctagagtagctcttctgttataggtgaaggagatccttgaaaataagaaaaaataattcaaaatatgaaaataaaatctaaattggctaattttgactgtagatgatgatctaacagttacaattaacttctgagattgatagtcaattttttgagcccaggtcgcagtggtgggacccgttccgggtaagccaaagcttatttttgtaactcctttaggggtaaaatttgaggtcgataacttcagaattgcaattgaagtgtgagacatgatttgatagagc

SEQ ID NO: 172080 - DNA, 617 bp, Cannabis sativa
  modified_base (160)..(161): a, c, t, g, unknown or other
ggcttgcggatttacttgttcccaaactctcccgatcattggcttgttgagtattctctcctctttgagttgatcgactatgaattctggattgccttgaattcacacttgcctcttcacgttctgttctttcctcctgagagcggtttgtcgtatttcnnccatcagggtacgtacgagtcctcactctatgggtttagaaagaatgctggtgattcccagcaagtgatctccattctcccggctgagttcctagatcctcctcattttcatgagggatttcttattcatcagttttcgattgcctcctttctggctgttcgtcctgattcttagggggtgtctcattttctccgggttgttcttcccaggccttttcctgtgtcctggttcgtgagccactaggtcttccccgtggtcttctcattgcaggttcaggttgattttgagtgttgctcccatgcgccgccttggccgaggctacctctcattctaactcagtgtttcgacgctgcgcctcttccagacaacatctcaagtggtggatcttcatttcataagttctttctcccacagattggtcacctccacggttgagaactgttgggttttatgcc

SEQ ID NO: 172081 - DNA, 1105 bp, Cannabis sativa
  modified_base (596)..(599): a, c, t, g, unknown or other
  modified_base (1059)..(1059): a, c, t, g, unknown or other
aaaaaaaaaaaaaaaagccacaagtaatctattaaaacaatactaactacataaaaaagcattatcacaagtaagctattgcaagtaagtaaccaattagacacgttttcttttctttttttgtttatgttttcctgaatcataattaatccatattctgtcattgatatcatttataatgtattcagtatcgtcttcctcaaggttacaatcaatcctcacaacttgttcatgaattggttgcccaactatgaaatcatcataacataaatcagcattctcctcatcctcttcattctctaagaacctcctctctggtgttgataaaacaacagaccattaatcaatagccaagtcagaaatgtaaaaaacttgtactccttggctagccatgatgaatggatcattcttgcttcctctcttacttaaattagccaaagtaaaaccaagctcgtcagtttttactccaacattgttgtcaacccaagaacatttaaaaagtggaattcaaaacgcaaaataatttagctcccaaatttcttcaataaccccataatacctcatagtaccttaaacagggtttctatcttttgcannnncaaaatgcatggtttctacgacgatacgtatgccactattttgaacctctcgagcatcatctcttgacattgtatggaaacgtttaccacttacaatgtacgcttcatgctttgctaccgcaaaagttggtccaagggaaatccaactcaacacatcagatactccatgattcggttcgttcaactttgctataatggtattccttaaccacccaatgaaagtttgacaatgctggtctacaacccatttttgtttaattttatgatttcttggaaccattgattgtaacatctccatatggtcactgcaaaacatgtaaggttaatcaagttattgttcatcgtgacttaagaaatgttaatcaaaggaaaagctacttacattatatatggctgaacctctgcattattgttccacacgattaattgagcttgatctagttcaaacttggacactgtnaccattgtccctttcccccttaatcctctatcaacctcatctgggt

SEQ ID NO: 172082 - DNA, 557 bp, Cannabis sativa
aaatctacaaaatgaaatcagttttttttttcttccttatatattgattttgacacgacaagatgtgaatttgagaaacttgtggactttatattattaattgaattagacataatgatgtaataataatacgttcacatttatttttcgctaattattattatttttatctctttaattttgacatttaccaaactatgtcccctgtatttttaaggttgttaaaaatgccccatgaactattgatattgtttgatttaaggacttttgtctaattttattcaattttactagttcagtgattgtctatgtactatattatgctctccaaactttgatatctaccaaatcatgcccatcgaactttgacacatactaaattatgatccttgaactttcatccatattagacttttttactaaaattagaaaaaatccttaaatccaacaatctcaatagtttagaggtatttttaacgaacttaaaagttcatatcgtatgatttagtacatgtcaaagttcaggaagccaaaatcttaattagtttttttttttt

SEQ ID NO: 172083 - DNA, 782 bp, Cannabis sativa
tcctacatatattaaagacaagttgtgctatggtctcacgaccttttttttttcttaaaggaatctgagaacatgatcaacttatgatgagactctactggaatccaatataaatccttcatttaaatatgcaaaagttctagaaattttgctattaggaatagaaacttggaggagtactaatcacaccctaatttacactcttttgcactttctccatattctaatgacaagtgtcattttttaaataatgcttatttatataactttattatatttgtgtcattttatttaaattactctactagttaaataatttgttcatttatttatagaagaataaatatttttaagtgaaataatatttacacctcaaaatataaatatattttgcatcaaatacatatatatatttaattctttttttttttcacattgtaaaaaaatgtacacatgtaaaacagaatatattttgaataacataagaaattaaaaaataatatagaaaaatattagggaaaaaataaaataaaataattatttaaaaaaatatgaaaacaagattaaaaaaattactaaaattaacaaagaacaaatatatattaaaaaaaagtattaagtgtaaattttaaaataattttagttgatttattctattaggtgtataaataaatttgtggagtattgatataggactcgtttggacgtcgtattatgttgtattgtattgtattatattaaattggattatatatcatatttttatataatactatgttaaa

SEQ ID NO: 172084 - DNA, 832 bp, Cannabis sativa
gtttgatgcatgaaattagactcgtgaagtggtttaaatataagaaaattgaatgtggtttctttccatcctgataatgacaacatgatatttttactacgtgattcttatatcattgaccaatatgacatgttgacgaataacacctcaaaaattggtcattttccatttatacatatgttattaaacaagctaatcactaggaaattgcaagtgcacacccttttacatcctctatttccaacaccactcccttctcttgcaggctagaagtattttttattatatttataatttactacctaatgtgtatacactttatttgatatttaatggaaaggatgttaaaagtacgtttcaacattttgttcatttttcagtatactagttaggagtgtaaatgggtcgggtcggatctaatccggctatgattcaacctgatccaaatcatgtaaggatctgccccgctctgtcccgcttgatcagatactcgaatcggatcagatcccaccttactatttttttttttgaagaatttaagattaacttataattttatatatattttaattttgtattagtattattaaatacaatactatgtttggtattgacatatattaatagattgtgtaaagatctgaatctgggttcgagaccatgtctcgtccagatccgggttcgagtcccgtgtcccgggtccgggttcgggttcgagtctgggttcggtccgagtccgggtctgggtctcggttcgggtgcaagtttgggtcagggtccgggtccgaggtccgggtctaggtccgagtctaggtccgagtccgagtccagg

SEQ ID NO: 172085 - DNA, 709 bp, Cannabis sativa
aaaatgaatctgttaagtgctgccgttcttccaatcagggcctatacttccttaggctttgtcgggaattgcatgtctattaatgccttatttctttagcatttgcttcaatacccctcgcattaactatgaatcccaaaaattttcccgaagagactctaaaggaacatttttttgggtttagcttcaagttatactttttgatgttttaaagcattctgcaaagtctgaggtatgatccttactctttatcaattttaccaacatatcattgacgtaaacctccatgttcattttatttggtttgcgaacatttcgtttactaattactaatacgttgccccagcattctttagtctgaatgacatgtctttataacaatagagtcccatgttggttacaaagcatgtatgttcttgatctgggacgtacatttttatctggttatatccaaaatatgcatccataaacgacataagctcgtgcccagcagttgcatccactaactggttgatcctaggaagtggaaaacagtcttttgggcacattttattcagatcgaagaagtcaatacaagttctccaagttcccttaggttttgggacgagaacagtattggctatccacgagggataaaataccttgcgtataaaatcgttgactaacaacttgtcaacttcctattttagtgccccttgcctctcgaaat

SEQ ID NO: 172086 - DNA, 882 bp, Cannabis sativa
ttcttggggtgctacctgatgtacatatggagaattgaaaaaagaataactttaagaagttaatcttgttagcaagtggtttggacacaacatattagaacataaacattgtttttcattcaataattggtctttgttgatgtgctacttacataaattgaatctacaagcttacattattaaaagtttgcttctagatatcaaatggctacccctgcttgacttgcaaagtagaggccaccgttgaagaacgatggatggccacgctgaaaggctatgggcactagcttttttatcctaactctaatgatgagttggtaactactactattgagtagtgttctataagctggtcactagtagtacttgcaaaggtactctccattctagtatcttggtagtagaacgagctccatgttcttgttgtactttcccaacttataggctcccttacttgttaactatgtagcttggtagaggccttcccagttgtgtctgaacacacttactgctggatctttggtgttcaggaacactctttggagcatcaggtctcctatgaagaatttcctgtccttggctggtttgttgaagtaccttgcaaccttctgctggtaggcctgcaactttaggttggcttgacctcttctttcttctagaaatttcgtcctcgaaatttatttaaacaattcgggatattacccccgtatttacggttctaactctcaaattgttgtttctatcttgctatttttctatagccctttctcaactagtggaatcgtctcatttcatagtacttcctttttctagtctaaaatttggacaagatatttttcccatataataaatttttctgaagtttaacatcatcatagctca

SEQ ID NO: 172087 - DNA, 693 bp, Cannabis sativa
aacaaactatatatattgtttaacgagattttcagaaacatatataatagaataagaattaaaaaataaatcaactagatgaaatatagatcgaaatttttacgttgtttggatattaatgaaccctagtctacgagtcaattgtattgggctaagtagccttgaagtattacactaatgttcttgacatgcttaagaaccctagctttttgctatagtgtttgagtcatgaatttctaaccctttgcatgaagggatcatgtaccatttataggctaagatccgagtatgaacatagttgtgacccgttagggtttgcgtgtaacatgacctactaatggggtaaatacatataatatattgactttgggtccactgattatggcctaacttgtggggttgtgatcttctatacgattagggacctttgatgccaataggtggcatgtgtgtgtcgcctctaggggtgtttatcaaatcactcaaaccgctcaaactgtccgtaccacaccgcaccgcaaaaaaatgcagtttgaaattctttgtggtgcggtttgaatttttttctaaaccacgtggtgcagtttgtagttttgaattgttaatatgcggttcaaatcgcaccgcaccgcacattataaaaatactaatttttatatttagttaggcccaatatgtgaatgcccaacccaa

SEQ ID NO: 172088 - DNA, 505 bp, Cannabis sativa
tttttctttatatatattatatgttatcatgtagctgacaaacagattacaagttagccatttattattcttgatagtgcaatttgttactttcttattgctatccatttaccacttgaagcatgctgaatggtttgtgtgtgagggttatctgctcttattccagtaaatatatttaaaacaaaaatagcacatgttagcttatgtgaaatttgtattttaatgcaggtgtgggccacagcctaactcaaaattgcttataaactatggatttgtcgatgaagataatccttatgaccggttggtgattgaggtataataagcaagtctgtctactgtacacgattccctatttaggtgtaagtcttattcttactgattttttttctaggcggctttgaatacggaggatccccagtatcaagataaaagaatggttgctcagaggaatggaaaattatctgtgcaagtttttcatgtatgcacatttaatttgttttccaga

SEQ ID NO: 172089 - DNA, 538 bp, Cannabis sativa
aatgctaaaaggcaccagtagtgattagaccctcttatgtatcattatcgccattgcttcaattaaattaagtatcgagtctcatatagtttaatataataacttttaaggagtgtcactaaaaaataaaaatattttcgtattaattgtaatttgtttcaaatttttaatcaattttgtaaaaattttaacaatatgtatattgtaaaatatagaaaaacatgaaagtccatatagcctattaattacattacaaatagtaaaaggcacagtaaaccagtaagtgatgactaccacctttctatgtgttattattggtattattttaattaagtattgaattttatataatttaatgtaataatttttaaggagtattgctagccaatcgcaaagcgacatatctagaagtgttaagcaccactagtatccaatagcaatgctcttactaataataatacttatttctatatgttgatgtgacagtcagtagtccagtgatccgtaagggaaaataccgggtaagctgtgcaatccc

SEQ ID NO: 172090 - DNA, 990 bp, Cannabis sativa
ccctgattaaaaaaaaaaattgtatggcgcgtgggggcgcgtgaagggttccttttggaccaaattttcaccattttgctctattttaatttttcatttaattgtgtggttatatttttgttttggtcaatttaaatgtttaattgactaataatcacatcattaaattaaggtaaattattttctaatataatctcacaattttattatttgttatttatcaattaaaacataattatattcatgtcacaacatcattgtataacaaatgattgacatttttttttaatataattatgttagtgaataattaattgagcgctcatgtactcacctattgtgagtctaagcatgtcaattttattaatcataaattgttagaattgtgacatattgtttttaattattttaatctcatacaacactattttttcatatgattatctttccataattttgtttttttttttcatatgattatctttccataatttttgttttttttcatatgattatatttccataatttttgtcatatatatgccttttgtaattttgagatcctttttatgaattttattgttattatcatgaaattcttttagggcatatactatggaaaatgtgtaataaaatattgatcatgatttgcgcatttgccatacaaattattgtcaatatttaattgatattttcggtaatagaatttctagaaattcaaaatgcgcatttggtattagataattatgagattaaaattattcattgaatatgttatgcttacctgtcgtaagttttcacatgtcaattatcaaaaattgtgattcatgttaatacttttctcccgtatcaatcacaattattacgaagatccatacatgaaacttagtcatcctatcgatgattttatggtgaagaaaacacattagatgtcatgaaccacacaatcttttctaccctatcggtagtggattaaatgaatttggttat

SEQ ID NO: 172091 - DNA, 650 bp, Cannabis sativa
tttagaaataacgaacattcaattgtgctgaaaaatatcattgccaagccataatactaaaatacatcataattttggtaaggaatttatattataacttataagagcttaaatcagtaaaaccataacaagttataataaattacttttttctttcttaataaaggggaatttacaaaaatattcattttttttgtcatttttatatttttaatgttatatatatatattacatttttactgtactatatttttaaaaacactgtgataaagtttgaaaattataaaaatattatgttttaataaaataaaaaaataaccctaaaacaatttaacaaacaatataataaaaaactataaaataacaaacaaataactataaagcaacggaaaataatgaaacaataacctaattgcaatatacaaaataataggattatttataccacatactgaaatttctaatttttttacttttttactgtggggcggaatttttttcaaaaataatatgtaagttttatacagtgtatagtgtcaagtttttactgttgttctacggttgttttttagttgttccactgttatttttaattgttctgttttgtgttccactgttgttttataaaatacactatttttgaaaaaaa

SEQ ID NO: 172092 - DNA, 533 bp, Cannabis sativa
ccagactcggacccagtccttgaaccttggacccggacccagtaccaaattgtaacgagcgccctactagattaggcacattactgtattttttaattacgttgtgcactcctttgctagtcaaagagtttattgaaaaacgcaaataattaaaattttaaaaaattaaatcaaactaaaataaatgtatacaacatatattttgagatcccattttaaaaagttacaactattttccaaaatgcgtgtatacaaaagttatcgcttagtgactatcaaaatgaagttctactttcctaaagatctgaacactctgggtctaaccgtccaatatgtacaatcttcatctagttcgagctcactgctgctcagcctttgcttttcctatacctatacatatatacaatatatgtgagtcaacatactcagtaagaaaagcataaacataaacataattacataaccagattgtaggggtgcacacgggtcgggttttcggctttttggggtttcgggttcgggttttcgggttt

SEQ ID NO: 172093 - DNA, 663 bp, Cannabis sativa
ttcgcaaatctttatgtggattgagaaaaaagttctcatgcttggtttcgtaaatttattcaagctattgagtaatttagtttgttgaaaagtaagtcagatcattctgtattttataaaagatcaactgctggtattattttgttagtggtgtatgttgatgacattgttattactggcaatgacactgaacgcatttcatcccttgtgtctttcattcaaactcagtttcacatgaaagatttagaggaggtcaggtatttcttgggtattgaagttactcggagtaaaaaaaaagtatttttctgtgtcaaaggaagtatgtacttgatttgttgactaaaacaggaatattgggagcaaaattgtgcaatgctctaatgaatctagttgtgcatcttacacgtgatggggaatcatttgaagatcctgagaaatattagattggttggaaaattgaattatctaactgtgactcgtccagatattacattcctagttagtgtcattagtcagtttatgtcttctccgacaattcaacattcggcagcgctaaagtagattttatgttacttgaaaggagcaccaggacgaggtataatttacaaggatcatggacatacccagattgagtgtttctctgatgtagattgggcaggctcc

SEQ ID NO: 172094 - DNA, 1259 bp, Cannabis sativa
gatcatctcgttcattccaggcatgctcttgacgtagaggtcgaggagatggacgacgactggatggccccagatcgtgagtcggatgaggaagaggatacggagggaagtgggaatgattcagtggataacactcaactgaatgagcctttctcgtgcgaggacttggtctcgcgaatcaccaaatcggaccttaccacttttacgaggttaaatctgttgcggcttgcctctttgcgtgctcgctctacccagagagcgtacctcccttttactaaccctgcgattatacctacagaggatgtggtagtctcaatacccattcttcgatgtggagtatcgatccccttccatccattcatctccgctattctcaagcagtatgatgtctccccttttcaattgaccccaaatagttatcgcatagccttaggcttttatgcgatgtatatggagtatgtgcacagggcaccttcgacggaagagtttaactatttctatgacataaagagcgtgggtctccataacggcttctattgtttcagcaaatgggccacttctgagatcaacggggttgaaggcatggtttataatatgggggattggaaatccaaatggttttatgtatttaaggttctagggattaggactgactttaatcgttgaactagtatgtcgcgtgtttctttacttagtcaattttcaagatagaccggctcgtcctttttattgtcgcagatagaccggctcgacctacacttgacgtggatcacagagaaactgctgaagtccttggaagcctccctgtgcaagatcgtgactggtgattactgtgcacgaccttaaagttgcgagaacacaagttgattcagagaacgcgagccttcaaagagagccggtgtacaaggagccgtctgagaagcaacaagagcagatagacaaacgcctctccaagcaaacttctcgaccaacatcaggtaacatgtcgcatgtataaactagtgcgttaaaatgttattgttattggcacttatctctttttgtttttgttgttgtccttgcagagatgactttcttgaagtccgcaccaatccttaaccgcaagccaaaaatggaatagggacgacatcgcctgtcgttcctcagaagaggaaaagcgatgttatgactactcctaccgcggattcctcaaagaagctggctaagactgtacaagacaaggggaagaatgttggaaattgttttaccaggatcttaga

SEQ ID NO: 172095 - DNA, 1379 bp, Cannabis sativa
tgttatatactacccctatttttgatgaagtttctggaacaccaatttttaccaccaccgatagttaatgtgcattgcttaggtgaggtttcgaaactctaaactttaaatatagtcatattatatgttgtaggactcagtttgaatgtatattgcaatgatgataattatttagctatttgatggtataggtgagactaatatctatgattgaactaaacaatttgagcttgggacttgagagcttaagatcgtcttttggacaaaatttatcgactttggagaggtagggactcaacttgattattggacttgatttttatatgtgttgaataatattagacatattctaatttatatgattgcaaattttttgaaaaatttaaaacttaatctgcatatttttttggactgtttaggggcactgaataccaaatatatttttgtacaaatatttatccaagttatgaattctgtatttatttaaatgcaatctttatgctatcatattttctaaaaaataaaaaagaatatgttcttttgttattcttattattttcctacttttggttatactgatgagagccatgttgatcatgatttgtgcatattattgtttcacgacctcgtctctgtgccatcataggtagatcaggtgtgcactcacctgtaggtgaaagacctagaatatatacatggagtgaattgaatctgagccccagtattatggtggttatcaggtgcgactacccgatttcggatgtctttttctatgattggtattgagagctaggaatctagtgggcggtgttatatgcatttggcgcttgattttgtgattatttgtggtcaatctactttgtttatatattttgataatggtgatgagatattttatttttaaaagctgaccatgcatgattttttattaaaccaagggtcctttgatattagttattttcctactgagctttataatctcaccccctattttctcccatttaaggaattcagtttgatggtagtggatgatgattgtaccgttgaggaagaaagtcgttattagtttagtcttattctacttattaaacttccaataaaattaattttgtatttaagctggaatggaatggtctgaatgacttaaattagttatgtaatagttagaaatgagaaatgatgaatgctagatattattttggtattttattgacttatttaatttatattcagtgactacataattgttgggatattattgttttttttagattaataagttatcctggttttgttgctaatattttcttatcgatataggagttattccattatttttcaataagtattttgtgatataaattcaaggatcatttata

SEQ ID NO: 172096 - DNA, 643 bp, Cannabis sativa
aaacttcgtacctcagtaactatttttggtctagtctagttttttagcgctcaatcttccccgagtctaccataatgtcgtctttttctgacaatatgtcctagattgacacctatgacagccagaactcacactttttgaacttttcattgagtttatgatctctgagccgttgaagaaccatacaaagatgctgctcatgttctgcttataaccgagagtacacaaagatatcatcgataaatacaatttcatagttattgagaaaatcctcgaataccctattcatgagatccataaaggttgttggagcattttgttgtgtaccgaaagtggtacattttacatttatcaactcgcaagtgcatggatctttattgtagtatggagattgtgaagaacgaggtcgaacccatgggaattgcgtgaaatcaaagaaaatacttatttaatctaaggtaatacaactctaacatagtttcgaaaatggtgaggtttttggtaataaaataaaataaaatatttaaatggtaaaaataacagtacaatgacagtaacaaatattttcagtaatatttggggatattattaaggttcagaatccacttaagtgtatagaaaaatatttatgtttatattgatt

SEQ ID NO: 172097 - DNA, 753 bp, Cannabis sativa
gacacttaatataaattatacttttcaaacttccatccacgtcagatatgcctgttataataaaatttaataaaattcgacaaaaattgaatctttaataatctcaatatagtttggaaaaaaattttaacaatctaaaaattttaaagacacaattagtagatattaaaatttgaaaaaagatcctaattattaaccttaataaatcgttaaatttttaaatttatatacatataacatatttaaagatttaggacctatagtgaaagtactgtactaaattatgcaaatccttattttattaaatacatatttatattaatttttaatttaatttattttaattaaaaagtactatatatataatattgcaacttaaaaacacatgaatatatatatatatatatattttttttaataacagaagaaaaatatttgtagaagaaaaatatttgtttataattatgggttgcaaattaatatagtactatagtactactccaaggtccatgcatgagaataatccatccgacaaataaatttataaaatttgacttttttttttttttacatatccgacatatatattcattaaagatgactttaacgtaggaaagcatgcaaaccacaattaaacaaaatagcaaattaaatgaatgatatttatatatataggaacttttctacttcaatacacgtttttacgtaatctaaataatatctataataattacaataacttaaaccttacga

SEQ ID NO: 172098 - DNA, 847 bp, Cannabis sativa
  modified_base (443)..(445): a, c, t, g, unknown or other
agtacgttcatttatttttcgtaatacattggtaagaaaaatttgttataaatcatcaaattgtgttgtataattgagttttacgttggtgtatttttttattttaattattttgtatattaaaaattaccatggaaatagattttttcaccttataagattgattttttttgcctaaaataatttagttgtgcatctataataatgttaagattttttcaagatgagataattaccttaaacaccccaaacataacaagaagtatataaatcaagaatttttgaagcactgattagagtcataaatgttaaaacataaatggttgaaaatagctagtaatatgaatgattatagtatgactcttgtgtggaggcaggcgggtccgagaaatacgcattggagtggtcattgaatgagtcagatcttgcttgattgtttgcannntgttgcccctgagatccagtattttgttgacggtttgggccccctgagatccagtattctgttgacggtttgggcaccgtcgataatcatggtctgatgagcgacaaatgcgacagagtcttgagtttcttgggatctgctccccgtttggtccttcccttggattttacgtaccctttgttctcacaacttcggggtctttaataatgttggggttgttacgatatcttccaagttgtggcgtctctccttccggagtggaactcaactcaaattcttccttgaacattagagttagctgttcaatctcttcctttgcacggttatacgaatcctctgattttgatgcataaaaagtgaagttatgttaggttatttttagtattaattttagattaagtt

SEQ ID NO: 172099 - DNA, 644 bp, Cannabis sativa
ccccctcctctctaaacccttctttttctcaactttgatttttagtgaaattggtgtgattttgcttggtttggagcttgatacttggagattgtttgggtctagctttgaattggaagtgaggtagtttccctactgaattttagttaaatctcttgctgaaaatattgtgaaaaagtatgaattaagtgaaataatcttatttatgcatgtatgaaagagttggagtaaatgttgttgaatttgagtatgtttatgcttgaatctttgatgtggtgtttgattaagctatagatggaattctaggattttttcattacattaaattcaagttgtctgagaataattgttgttggaaatatttgggtaagttgaaaccaagctcaagtttgagagcttaaagtttgttcatttaagcatgttttgagttgagtatgcaatctggttttgggggtttaatattggattttgatgcatgaaatatgttaatttgagtatctattaattgctagtaactctatttgttgatttgaaagtttgcttgagatttggggatgaaaagattggaattactgctgtttttgagttttggtggctggtttctgtgttttcaacctaggtgccgcggcatgctctgagcatgc

SEQ ID NO: 172100 - DNA, 504 bp, Cannabis sativa
gggtccgggtcgagtccgagtctggtctgggtcggagattagtgttgaccccaaatcatttgtaaatattataatacaagttaatacggatcatttattaaataatacaacatacattgtattaaaaaatttagtcgtcgttcgtaagtaataattaatacagtacattgcacgaacgaccgaccgttatggcgtaccaaacgagccctaaatagttaaattaataagtataaaaatttaaatttctattttattattcgctattggattaaaatctaatagtttaatatttttaaattaatttttattaaaaaatattccatatatattaatgttgttgaaactaattaacacaccgcctatatagatgtacgttagaagaaataaaaaaaaataatggaaaattaaagattagtaaagctaaatattatctaaaaggattatttgcggcaaaacccctaaagtaggcaggtttttacaactaaccccctaatttaaaatttt

SEQ ID NO: 172101 - DNA, 513 bp, Cannabis sativa
aaaaaaaaaaaaaaaaaaaaaaaaaaaaaaaaaaaaaacctagcctcataaaaacctcatgactactcccaatgggaaaaccctcaaaaataaaagagtaacaagataaggaggcactaatacaactagggtaggggtagtgaagccatccaataaaataattatccaaagaatgaattaatttactaacaagtgagtcacactattagcaatcttagaacaaaaagtaaagaaagaaatgtggttaccgttccaataatatgtactcttttatattaatatatatgtattaaaatataatttttcaatatgttaaaaataaaagtaaaataaaaaataatgctccaacataacaattttcacatatgtataagttgagctaattgtacaccatattttagtaaactccttatctattgaaaactattttagtccttttttttttcataacgacacacattgtattttttttttttttgaataaaaatcataaaatttattaattaataaatt

SEQ ID NO: 172102 - DNA, 849 bp, Cannabis sativa
  modified_base (145)..(161): a, c, t, g, unknown or other
atccctccaattatggaaagactgaaactctattttattaagggctatttacaaaaatatggaaaaataaatacaagttatgatatatatggcatagaaacttaagtgtacaaaatatggcatttatttaaaaaaaaaaaaaaannnnnnnnnnnnnnnnnaattattacatacaaagagaaataccattaaaaactttaaaattgtatttttttttaaaaaaaataaactaaaataccgaaataaaaaaatgatgtcaactgaacattttttatttttttttatagaaactgaaataatataaaaataattttattaagacaatattttaataaaccaattaattctatataatcaaaaactggtttcttaataaaagaacaattacaaaaactaaaacttatataaattttacatctttcttagaagctctaaaacttgaccaccaacctagtcaccagagttattgtcgtgccaaaaaagtagtcgcaatttgctaacattgacggaaattcactggagttgctaacgatgccaaaaaaaaagtcgtcaaaatcgacatcgtcactggaaaaaattatcgaaaattttttcagagctatcgctgtcactagagtttgtctgtttgacgccaaagtcgtcactggagttagccattggaatctgtctcacaaaaaccaattacacttattagctaattacaaatctgaacaatgaaaccagttttttaaaatagcaaaaaaaaaaagaaacacttaaacttcaattacatttaaaaaaaaaaactaccatttaaacacgaaaattagttatttagtatagctaactaagaaactgaacattaataag

SEQ ID NO: 172103 - DNA, 1214 bp, Cannabis sativa
tcccgagcctccttttcatgcctcatccaatctgactttggcttcatggacagcccccaacagatcagaaaaaccgtccctattgatgtctttcagaacggttttcaaacttttcaatttcaccaccacctgaaacatttttgacccatttacttgccttgaccaaatgtccaacaaactactttcaaacttagaatgagacttccaaattcgaaagtatttaaaagactttaggccactagcaacagtcgaatataaggagactatagccggtgagtggttgaacaacccctcattaagaaagacaacttcagcattctcatacttattcaaccagccttgattagctaacactctatcaatcttggaaaaaatccgatcttctccatgttgtttgtttgtccatgtgaaaaaattgtcgttgctctttatgtcttccaagttacagtaagtaacacattgcaagaaatccccattaggccaactcgaaacccaaagccctattctttcttccttagctaaaatctcattgaaatctcccgtaagacaccatccttcacttgtattcagttcacaaatatccctccaaagccttttcctttctaacctgctatttgaggcatataccacagtaacaaggctatcaaacataccatccattattgatattttaggtgcataaattggcttgtgcacctaataatatccacaatgaatcttaaaggattccatgctattacaatcttccctccagtatgccacacaatattggatgagaaacaccacccctcaaatacattagagtacaaggcacctaggttaggagccttgacttgactcttgtctcaagaagcccaacaaaatcaaccttttggtgactaataaattgcttaattagtctttgtttttgttgattgttggctcctcggacattccaacataagagtttatccattggagagagagggatctccccccctccagtattgccctcattctcagcatcttcagcctcttttcctgccaatacttgttgttccagatcagagtctaaggcttggaaagtgttttccacccttagagcctctgttgtgctagactgctctttccccttagtacctcttgtaactttaacaaagccatcctcatccactacctgttttggcctatgatcttcctttactacccaattcttctccactttggcattcttc

SEQ ID NO: 172104 - DNA, 618 bp, Cannabis sativa
cagccataaagggtcaagcccttatcgattttgtggttgagtgcaccaactcaaatcttgagatccctaaaaaatcgggagaaaagcaagagccagagaagaagcgagagcaagagcaacaacaaaatcccaaagaactaacatggaaactccatgttgacagaagctgcactgaccaattatctggtgcaggcattgctcttaaaacaccttggggcagcaactatacagagcaatcaagtttggcttcaatgcctcaaacaataaggttgagtataaatccttgatagtcgaccttaagttggcatatgggctaaccacctaggcatattcagaaattcccaactagttgtgaatcaaattctgggtgaatacacagcttgaggtaaaagaatggtggcctacttgagaaaaattaaagacttgctaagttagctcaaaggccacacgattaagtagatccctagagaacataatgccacagcagatgcacttgcctatttgacaagcagcatcattgctgataaagtaaacttggtgcccatacagttcctagaggaaccaagcattattggcccaaaaaaagttgacatgttggatgacactccaacatggatg

SEQ ID NO: 172105 - DNA, 739 bp, Cannabis sativa
tattagtgttatatgttgtagtgtataataatctataaattcaaatttattactatttcaaaaaaaaaaacattaatatataataacatgtaaatcaaaaaacatctctatttttaatataagttattttttttttctttttacttgttatttattttaaagagcacatatatatgatttttttttatttatttaataataagttatatagacaatcacattctatttaataattcaagataattattttttcacaattcttttaatttatttaaaaggtcttatttgtttttgtttttcatttttcttgttatttattttaaagggcacatatataagctcctgtttgtaataataagttatacacacaaccacattgtatataataattcaagataattacttttcacaactctattaatcaatataattaaaaagtctttttttttgtatttaatttttttaaaaagacatataaagtttttttttttttgagataagaataaattatatataatttatatacacatgacacacaagatgattttttttttcataacactaaaattaaaagttcacattgattttaattcatcatttcttcttcaaaaaagtatgtacttaaaagtttcatattgtattaaatttattctctattttcctcaaaaaagaaaaaaaaaatgtatacttaaacgtttcacattgtattaaatttattaaatacaatatatatatatat

SEQ ID NO: 172106 - DNA, 519 bp, Cannabis sativa
  modified_base (153)..(162): a, c, t, g, unknown or other
atatttttaatataaaataagaaaattgccaaaacaatactattaatttaatataacattcttatatattttaaactaggcaatatagccgctcttcgcacggttaatttaattttataatattatagtataaggcacggtttaaaaccgtcnnnnnnnnnntgttataggcgacggttttaaaccctcacaaagttcacattaatgatggtttttaaccgtcgcctattttgcccgttttacgacgagatcgtataggcgacggttatagaaaccgacgaaaatactttaaacgactatttaaaaatatcgagaaaaacaatttttgtagtagtgtttattagttacatactaaatttttttaaaagaaattagaaaaataagaaggttaaaaccaaccttttatatatattaattaatttatgaacgtacttaaataatttgaaaaagcttcaaaaagtgtgtctttttcaaaaagcttgtatttcacattttctaagcttctagaacagattgtga

SEQ ID NO: 172107 - DNA, 895 bp, Cannabis sativa
atatatatatatatactaggttagttacgtgcaatacacatataatgagttttctttttaaccaggttaattagatgatgttaagtgcaacaacttaattttttttaaattaggtaatatatgtttcttaattctgaaatgggatttgagcatttgatatttgaggtttttttttttagctattacagctaaattggtgtgctatttggatgtgattatatatagaagtattttatatgtacaataaaatccaagtaaaatattctggtgaattgttgtgtgtttgattgagcgaaattgtctcttattttaatttaaagttaaactaataaaattaaaatatgattaaaaatatctagtattttaaatttaaattgaaatttctttatataaaatatatgatttttatttttaaatatatataatattattataaaattaataaaaaatattttgttaagtaataatatattctattaaagttaatatataaaattaaaaaagaccgttaaaattttattgaggaaattacacttactatgggattttaaaagttgtttacttaaatatggtacttttaagtttgactaatttatatggtatttttttgtttttaagtatttttatggtatttgatatactatatatatatatgtaaattatgttttcaaattccctatttaatgtttttatttgtttagacagttttatttgtcactgatgtcggaaaagtcaccagagtttgctgtcagcgccgaaaaaatcaccaaagtagctgtcggtgccggaaaaatcgtcgaagttgctactgacgccgaaaaagttgttagaattggcacttgtcgccggaaaaattaccaagaaattagtttcttgatgaagaaaccactttttt

SEQ ID NO: 172108 - DNA, 578 bp, Cannabis sativa
agacagtgttgcttattggtcggcacacataaaagacatgaaaaatttgaggacactgctcgtcaacttggagtaccatacaccaaaaaaaaatatcacttgattgtgttacaaggtagaattcaaatttttggatccttacacagctttatcgtacaagacggtatttgaacgtgcaaggctacgcaagttgcatttaaggtgtgccccttcggaagttgattggcagaatgctccaaaattatgttataaattagagttgtttcataaagtgagagaattattttttggaacaaagtacccaaccgccaatatttttttcccaaaaatatgtgaaatcaagacaaatattgaatcatggatgtcatcaaatgtgccttttattaaggacatggcaatttaaatgatgtctaagttccaaaaatattggggaaagattcacgggcttatgtgtgtggcagtttttttagacccgaggtacaaatttatgttgctcgaatattagttccctgtaatctatggagatgagcatatgtaactgaaattgcaaatgttcgtgagctttgttgcgagctact

SEQ ID NO: 172109 - DNA, 655 bp, Cannabis sativa
attgtaaggttattgttagtaaattttataccaattgttggaacaataatgtcttagatgatattttgagatttattaataactcattatccttcatttttgggcttagtgttttttatattctttgagaatttgataaagttgctcatggttttgttaaaattaacttaggattagatgatgagttaatttgaaatagttctttacttataattcatgtttactttatactaattgatctatcaatgaaaagctttaaggattttcaaaaaataaaaaatgtatgtacaataaataaaataaaataaaataaatgccatcctacttatagttaggggattgtagctagtcaaccaaatcatttcattagaacgtgtttatattttaatattttgtaagtgtcattttcatgtgataagtatgcatgtgcatctgatctaatctaacatttttcttctcatatgatcaaatctaattagtaattaaatttgaaaaattatcatgtgattcaatctaattatacctcaaaatctaagccaatctaattcaactaataattagattgaattaattttttaattagatatatatttaattacacataatttttttttattaacttaaaaatataaagaaaaaaaatacataaaaatta

SEQ ID NO: 172110 - DNA, 787 bp, Cannabis sativa
  modified_base (577)..(579): a, c, t, g, unknown or other
atgaagtgatcatttcatggtttaaaaaattaataaacaaaactaaatgtctaatacacttgagtgagtgagagctataactacatttacaattttttttttaataagtttgatttgggtttttgttgtaggagggatggtttggtttctatatattcacatgtaataactttttcttttcttttcttatttggaaacatatttgttgtagcttccacttttgattaattgtcttctttcttacccttgcacatggcttttggtttaaagtgatgagtatgcatgtgctgttataaaagtcattattaaatctagaatatgttagaatgttttacaatgttctaagaaattaatttgtaagagaaactaaaacactctagaatgttttaaagaaaacttagaaaaattagaactaagattagatagttttggagttgtttagaaaatagtaagaagtaattaaatagttggtaaattagaaaaatctagaaatatttagatatatcctttgtagcctataaataaaagtgaggtgtgtggttaagaagcaagtttgagcaagagagttcaagtgtgnnnaaaagagtctaaagtgtgtgagttcttaataagtgtctaaagacagtgtcccaaaagtgtgagttatacacaagtgtgtagtaaaagtgtcttgtgataaaataaaagaatgtgagtatttggtgtattgtggtctagtaaaaaatattcaagtcttggtgtaattacttttacaataataaagattacgttttcacgtgttgtggtg

SEQ ID NO: 172111 - DNA, 701 bp, Cannabis sativa
aaaatatgataaaataaaatcaaaatcgctgaagaaaaacacctattctccttaggattagaaaacctattctgcttaggattagaagaggaggtgagtttgctactgcgtcgactgatagtattttggccataactttctcgatattgcttagaattggaatatttaatatgtttcggaaagataaaagagagatctagaacttttatgttttaaatttttccaaaatataattagaatatagtcgaattcaaacttgaatttttagcgttatttacttgcacaattttctctattttatatatcatctttttgtcagattgttttttttatcttttttgcatcttattcctttgatatttcctaatcttcttctattttaatttttcaaaaataaaacataaaaagcgtaaaattgctctaaaaaagggtaaaactaaataaaatattttaaaaattaacctaaaaataatactaaaaacaacctatatcactccaaaaacattaattttttgaatattttattagagcataaatttacaaaataatattttacaattattgacctcaataagtgatcaaccgacagcgtggtcgtataagatctgatgattgccacatgtttatacaatcaataatgaaaagtaataaacacaagatttgttatagaggtttggtgatagcaagtaatgaactactcc

SEQ ID NO: 172112 - DNA, 611 bp, Cannabis sativa
  modified_base (573)..(578): a, c, t, g, unknown or other
actgaccaacccttacgccaggtgttacaaaaactcgatacatcgggacaccttcttaaatgggcaatagagttagggcaatatgacataacgtatcagccaagattggttattaaagggcaggccctagctaactttgtagccgagtgtaccggggcgcaagagggcgaccaaccaacaataaccagtgacgtccaaaggcctgacctgagcgattcacctgaaccacacgtccataactccgaggaaaatgaaaaccaagaccacctaggtgaaacctggaagctacaagttgatggttattctaccaaccagtcatcaggagcggggatcaccttaacaacaccggaggtacaacggattcacacggccattcgctttggtttccctgcctcaaacaatgaagtagagtatgaagcattaattgccggtctaaaactagcaaaagaggtgaaggccagacacttagacatttacagcgactcccagctggttgtaaaccaaattttgtgagagtacatggctagaggagaaaagatgatggcctaccttagcaaaatacaagacttgctnnnnnnactggaagggtacaccattcaacaaataccacg

SEQ ID NO: 172113 - DNA, 622 bp, Cannabis sativa
  modified_base (393)..(402): a, c, t, g, unknown or other
aataaatgtaaaagttcactactataaatatgggttttcccgacgtttttaaacagtcgtttaaagtattctcgtcagtttttataaccgtcgcctatacgaccatcgtaaaacgagcagaataggcgacaattcaaaaccatcaataatgtggatttcctgatagtttaaaactattgcctataccctgttataggcgacagttttaaaccgttggggatgtaaaaaaaaaagagaaaaaaatatatggcaaaaaaatctgtattttctgcattaattttataattttacctaaattaaaataaaataactaattaattttgttacaataacaactaactttaaaacacattaaatttattcaataacaaaataaatatatataataaatannnnnnnnnntaaataaataaatgtatttatatcgagctcgaagagagagaaagagagagagggagacggacgggaggtagtggtagtttgacgtatgaaacggagatgagagggacaccgacaagaagtagtggtggtctgacgtatgcgacggagagtagagggagatcgatgggaggaggggtgggtggagatcgatggacgagagagacgagaagaaagagagatc

SEQ ID NO: 172114 - DNA, 526 bp, Cannabis sativa
cgaagtagagagggagagagagagagtactggtagctagggaattaagatctcttgttaaaaattagtgtcgcatactatgttaaaccaattaaagtttgacacatcaactaatctaatttatattaaatatattaactacttttgttgactcaattagaggtttatttttttataaataaaaaaattaattgacgtgtcaaattttgattagtttaacataatatgaaacactactttttaacatgagattttgatttgtagctaagttagaatttttagggttttaattaggaagagatgaatttatactcatctaatttcctttttttaattatttttttttaatataattatttatttatatttatttttatagaaattagtttttcttaaccacatttttttattcctatagtaacgcgcaaaatgtgtttgggtatatatgtacttactctcatagcgcgtcactatatcttaatattaaatttaattatttataataaatttaaaggtatgatatagtg

SEQ ID NO: 172115 - DNA, 535 bp, Cannabis sativa
gcctcaagcccaatcatctctcttaggcctattcacttcaaactaataagagattatttcacaaatacacaacaacaacaacaacaacaacaaaattataaaaacaaagaagtacaaaattttcaatatttttataattttttttaatttatttacagaaaatacggattttttttatgttgtatacttattaattttttattgattttttattatatgtatgttattttttgttattgtttgaatgttatttttcagttacttttatgtaggttttttgttgttttcgtattgtttttataaaaaacagtaaaaatataaaaatctttactttttgcatctatctggttctatatactttgtttgactctattttacatttgattattgttcttaatttattaatcttgtcattgttaattatttaattgtttaaagtttaattatttagattctacaccattagcagtgacggacacactaataagagtgtgggggctatagcccccactaaaaaaaaaagttagtgtgaaaa

SEQ ID NO: 172116 - DNA, 645 bp, Cannabis sativa
ccccaactgacaaggatgaggtattagccacttggtttccacggcaccttttgagtgtttgtcgcaatgaaattgggtcatattgtcttttaaattggcggttgggatgcatgttctcttgttccatatcaataaatgggcctggtgaagatggtaatacagtagatggtggtgttgatgaatgggaaatggacgaagatttatgggaaaaaggcatggtcatagttatggcaggctttaaatgagatgagatattattagtggcagtaggtggaggataagtagcatgaatggaatccagaagaggtgaagtaaaatgtatgaaaggagaagtaccaacatctggtgtatacacatcagaaagatgtgttacggttgtggaggatacagggaatggttttgaagatatagtggacatggggggaaataattggtcagatttagtgtggtctttctcatgagagtgtggtatgagtgatgattgattaaggtaagcaggggaaaagggatgagaggcttcagggaccatagttcctgtagttgttattggtataacccgagatgcatgattaactgtatttccattatttgaagattcccccattaacaaaggacgtggatgaacctcaggccggttatgtaatt

SEQ ID NO: 172117 - DNA, 602 bp, Cannabis sativa
atttagagagagatctatcatctaccagacatctatatctataactactataaaaaagagaatgatttgggctttttaaagttaaattacaatattaaccttttcttttttaaaataattttttttgaacaattaaaataaatttatttgaatgcatataattaactactatgaaaaaaagaatgatttaggctttttaaagttaaattacaaaattaaccttttcttttttaaaataaatttatttgaatgcatataatgttaatttttttttctccatgtgtttcttacgtctcatgccaagtgggcaatttaatggagtaatgtttttttttttcttttttattaattttgttttaaaatatatctttattataatattattatgcaaaatacaagactagaattcaccagcttcacttactgtaacagttttaaaaaaattgttgaattattatttttttgcaatgcaacatcgttgatgaatgccaaatctaaggcttgtatcctctttttagaaattgacaaattattatatattttatttttaaatcttgtcatcttcctatattgagataatacacaagtaaatgccccaaaat

SEQ ID NO: 172118 - DNA, 1188 bp, Cannabis sativa
  modified_base (907)..(907): a, c, t, g, unknown or other
ctgcttggagaaagatcaataatcttggaccctatgtcataacaataataaatcaataagtgtttatcccaaaacactacttaacacttgtgtaagacaatttatgattttctatcaaaccccgtggtataaatacactaaaataaaacttatcatttggctctaaaacatataccatatcttagaactcgtcacaaacttcaaaatggtattctaatgtctaaaacagacacccgggtgaaaagttatgacaaaaatacgtttttcagatctcttacgaatttcaaaaacactatgaaatacgaaaaatctcaattttcgcactcactgaaacactaccaaaacttatccaaatcactccaaacttcacagagaatatatataccacgaatactgccattcttacgtaacagaaattaaaaattggacccttaaacgaaaagcgccattaacgctcgaactaagctttaaaaagtttcaaactcgatttctaactcaaaatcacctcaatttcaacaagaaaacatcaaaactaatcctatgactatccaagaacaatccttaaggtcagaaccttcgtaactattctaactcataaaacccctgtacgaaactaattgttattaaacttaaaacgaaattaaaccttactttaagctttccttgtttgagaattcgctattctactactaccaaagcttagatcgctaagttccaaattaaaaatcgaagaaagtagatatatggggagaaaattttatcgaatgagaaagaacaagggtttcgttcattctttactgtttcaaacatataacataacttatatattatatatatatagacgatcagacgtttatatatacgaagatgatcagatttttttttaattttataataataataatantaatataatattaataaaaaatttattattaataattattttattatttaaacttctacttttagggcgctacatcaaatctcacatactcttaattatcctaatacctacattatcaacttatcataatattcccactaattctatcaattaagcatgttatgacattttttaccccccatcgagtctccaaggtcgccaaaattgaaaatatttttattacaccaataactcatattacattcacatatgtaatataaatcttcataatttataaatta

SEQ ID NO: 172119 - DNA, 712 bp, Cannabis sativa
gttcccgtgctttctcggtcatcagcgtgacgagcactctctcttcctcgagttgatcgactatgggtccttcagcaccccgagatcacacttgcttgttcacgccctgttcttccctttgagcgtggtttgtcgtatttcccccactggggtttgtacgagccctctctctatgggttcaggaaggacattggtgattcctcaccggtgacctacattccctgggttatgctccaaggtcttcctcatttccacgaggaatttcccgttcattagtttctggctgcctaccattctcatttctatgagagggttccagctgatcatttggattttcagggggaatctcattctccctaggttgttcttcctgagtattttcctgtctcctggttcgtgagccacgaggtctgcctcgtggtcttctcactctaggggcaggttgattttgagtgttattcccttgtgctgccctagctacggatgcatcatgctctaattcagtgttctgccggtttgcctcctttaggcggcgcctacgacgacaattttccatttcataagtatcatcacccatgggttgagcacctccacgattgggccctttatctctcattgtgggattttggccattcccatgttgagtcctcctcgaacgtttcgttcgtgtactgggaccaacatcaggttgggtccttctggaacgagtggt

SEQ ID NO: 172120 - DNA, 1068 bp, Cannabis sativa
ttttttgccattatgaccacaggatctaactcgtctagattgtccttctttttgccatcatcatcaggcgtatctgggcgatcatcttttggtgtgttctggggataatcttcaacatcatcagaactaatctctcatgattcttcgattatgggatcattaagattctagtatttaccatgttggtccttgtggcgactggtcacctcattcggatcttctgtatctcctgccttagcattatgattagcataatgaaggcaaaatttagttcggctgagtaccatgattactgaatgaaatctttagatggtatcattacatcctttagctctcaatgaaagtactaaaatatttaccgagatttttagaaaaccaattataagaaattagaattgaaaaaacaaataattcaaagaaagaaatataacaaacacgtgatttttacgtggttggggcgctaatatgtaatatcccgaaaaataaaataatatttaaatatacattttattaaatatgtcattattttggtaatgaagtaagattatgatcttactttgggtaactactgagaatttagctaatgatatataaagcgtactttattaattacgaagattatattgagagatgtgggtatcgaagatacaattattgaaataaaaatattttatcgggcccggcaattgtgaaatttagcaatgtggttagaaatgtcacgacactaatgggagaattattttgaggatattttggactagtttagaattttagaatgtcggttttgtggattagtaaaattaccgaaatgtccctaggctatttttaaaatttatgtttctttggagggtaattttgtcattctttagaataggtatctatacttttattgtttgggctgactttttaaagaaaagaaaaaaaaataaaaaccttatttaaaggattagcttgcaaggcaaggaaatcgaaaatcgagcttcttcttcttctccccttcgtgtgaaccaaaaccagcctgcaagaggatcaaaatttcaccattttctcttgaattgaagcagcttg

SEQ ID NO: 172121 - DNA, 724 bp, Cannabis sativa
aaaggggagggcgttgagaactcaaagcatggaggagatggcggtggaaaggtttggggcgatggcactggaaatggaagtaatttcgaggaggtatgggaagtcagtttgtgcttgtacaataataaagaaatgcccttttaaattttactttcttgttcttcaattggatctagtttacaaagtaaaatgatgatgataatgttgttattgatgaaactagtagttgtatgcttctttcgttaagttaatcaagaggatgttgatggacggctacttagatttagggcactgagagagcacgagaagaagagagaaattttggagaattagggttttttttatctttttttattactctttaattttatgatttattttttattttagattaatttatttatcattttaaattaaaatatttttattttttatggaattagattgatttattattttaaattaattaattttatttttattttatttataaatatgttttaggtgggtaatatgtgtacattgtgtccatgtgaaaaatacattgtgtacacatggacatgccactacaagaattacacccaatagcggcgggggtattagcggcggagctatttcgccgctaataatgcccgtattagcgacggacccctgtttctgtcgctattgggtggttgaaaaataattttttttcaaaaatttattagcggcgggctgtccgccg

SEQ ID NO: 172122 - DNA, 1225 bp, Cannabis sativa
gaatttgatttctctaacttcatggatgttattatggaatcagaattagataagcaaaactcagcccaccaagccatttgtcaacctgggtgctctcagtgcttcatttctaagttatcggtttgtcattttgatacttctaaggttctaaggctcctaccttgtttttgaccattctaggattcaatgggtcaaaatcaatttggcatttgagtgatcaaaaccaacacatcatgttgattgtcaacttgggcgttgggcctagcagtagggcagtctgggtgctgagccctatttgcagggtctcaaaattatggttttctccctaagtttccttgaatattcattatttctaataaaaaaaatgcccagaatactttttggagaacttgatcggaaacaacccaagttgacaatatgacaatatgtcaacctaggcgctagtccccttcttgggccttcagaccttcagaagttccattttgtcccaggaaatagttgaatcttaatagttgctgaaaacagagaagatgctcaaaaaagttctcgaaaaacatcatcaaaattggtccaggttgacaaaatgttaacttgggtgctgggccagccccaagtgtcaatatgggcgttgttccttgcttttggaacccaaaagtgttgtttcttctccaaaagtacctatcttcccattttttatgaagaaaaaagaagatgcaaaagtcgaattggcaatctgatactctgaaggtgcccagattgaaaaattgtcaacttatttggcgctaggtgcccgggcaccgagtgctcccggtgctcaaaaattaactttttccgaatctagttctcatacctcaaatatttttgtggtatgtctagtttatatctcaatacaaagtttgacccatttgaactaagacggtcccgaaaactaaaaccctagttgaaaatatcaacatgggcgctgggtgaaaccctaggtttccaggttggcctccgggttgcaagttcatataatttcagctgtcgagacttggatttgattgctccatgtctctatggtatagaatactgaaagatagtgagttggattcaagttatttaagtctaaacttctatcccgaagctctggaagtcaacctgggcatagggctaaggtctcctccaaagtcgactcctatgactcgagcctactcaactccataatgtcatccttcttgtcacgtgt

SEQ ID NO: 172123 - DNA, 696 bp, Cannabis sativa
aacacttgggttgttgttcccctatcccctggccaacatgttatagataataaatgggtttacaaatacaaatatggggctgatggggctgtcatacgatgcaaagcacgccttgttgcaaaaggatactcccaaaaactaggtgtggattatctcgacacatttgctcctctgggcaagtttaacacattaaaaatattattagccttggcagcaatcaaaaattggtctctccatacacttgatatcaataacacctttctccgtggcaatttacataaggacgtttacatgtccctaccccaagggtacaaaacaaaagagccaatgcctcctaataccgtttgcaagcttaacaaaagtctatatggcctcaagcaagcctctcgcaaatggtttttcgaaattagttccactcttattgcacctggcttcaaacagtcccattcggacgactccttgttcattaaaaataaaaatatcattttttttgcagtcttaatttacgttgatgacatagtcattgccaccaacaatgatgtagctgccatcgtgtttaaacaacacctaaattccatcttcaaattcaaagacctcggccccttaaatttttccttggactcgaaattgcaagatctcaaattggtatctcagtgtctcaacgacccttcgccctacaactcttgcaagatacca

SEQ ID NO: 172124 - DNA, 901 bp, Cannabis sativa
cttagattttagtttaaaatgtgcgtggattctttgagaaaatatatgtttaatgttttaaatgactattttgttttaacaaattacatgagtagacattgatatctggaagtttctttgatagatatacttaggatgtaatgtagaatgctacgctggtgtttcccgggtgccttgcctgagcaatagttgaataacacttgatgtttaaatcatcatattgtacattaaggggtataaaactaagtaaacgttatttatttttgtataatccaaatctgattcctctaatactaatactgtttatcatagaactagaatcttatagatgactttattctatttagtgaagacttgtctaaatgcaataatattagtgtttacaattattctattttggttttacagatattttattctagatcttgcatcttgtttcactgaaggagcccaaaaggactttattgatataatctatcttatattaacatcagctttgattaggtaaacaagcaatatccaatagctacatgtgattatttattgtgcttaattttatgctccctataactgctacatttaagttgaaattctgtatggatacttgatatttagataattaatgagatcggtcatcaataaggctaccatactttgaacataattttgtgagtttgtccatattcataactctaacctatctttctctcccacacagaaaaaaaaagtttgaattctctgttacttgacatcggttttgttcgtctcgatattctgatctaattgatttcttacaatattttaaattgaatctcctactgatgttgcttctataaagaatctcctactgataactaataatctcacctaaactataataataatctcacctaataactaa

SEQ ID NO: 172125 - DNA, 565 bp, Cannabis sativa
ggctggcctatagacttcccttggtcggctagacatggtggtataactccttgacggatcgcttaacttctttcgcttgctgtttgactgttttgccatgtcttgtaaggagattttgtcttgctattggcaaggctgtattccacatgtactctgtcttggcttacgtagacatatcacgtcaagtggataaaatttgggacaacataagggaaactaacagtattcattgctctaaacatattttattagttatttttgtattttaatatttttttatatttagatatgtgaatatatcactattatatttcgaaaaaattgggttttattgcaatgcaatgtaaaattgagtaaattaaaaaaaatactaatgtactctaaaagattaagaatatattttagtggccaacttcaacaaaaagattataaatttgtttgtaatcatcctcagtggcaaagagaagggggcatttggggtcatttgccctcttttaattttttattcatataaattttgtatataaatttttaggtattttatacgggtaaataccattttgga

SEQ ID NO: 172126 - DNA, 932 bp, Cannabis sativa
gcgaatactaaccaccccaccaatgggcgagtagataggtgtgcgaatagaaaaacgtcccaaaaaatggttgggggtgtcccagtgaccacagcgacatgcgtctttcggcatggccctgaagtgacgaggagacacccaccatttcaaggagtctaactaaaatcacaacctgcgaagatgtcatgcatctttagctaagcgatattcctccaaaaacggctgggagaaactcagtgactcaagggacatgctttctcaggcatgaccctgaagttactaaggtactcccaccgttttgaggatatctaccagccaaagaatacgcttattagaacattagcacatgtcgcaaatggctgggtgtatctcagtatctcaaggaacatataaccaactgcatatatgaacattagaatactgtgatacacccaccatttgaaagaccagaccaatgttaccacaacaaaaatttacagaaatgcgaaaatcctaaagttcagagtaagtctctttgaagctaggaagaacagacatgcgagtattcgaggtgttcgtccgaataccccggtgtattcaaaatatgaagtaacgtctgttcaagcattttttctacaatacacggttatgccaattttaggtcattttttcttaaattacctagtttcttgcctaaaaaacgtagcctcatacgtattccctacaaacatatattcctaaaccccctcataaatgttaaaacccataaattagtgttttttctcaaacagaaaacaaaatgcagtgagctttaaaaacagacctttagttctgataatctgttccaacgatggctctcgacagcactggagattgagaaaaatcccacaaagaagggacgaaaatctgggcaatttatggaagtctttgatggagtctctgaaagagaggga

SEQ ID NO: 172127 - DNA, 739 bp, Cannabis sativa
  modified_base (705)..(712): a, c, t, g, unknown or other
tttttttttttttttataatcacttcacatcaatatatgtattataatgaaatattaaaaaaaattcacctcaaaactcaaaatggttcaaattttttagattcaatattttgtactcacttgttattggaaaaaatatatattttatactaacataaaatattctctatgtactctattgtaaacatattattaggattttgtttagaggtttccatttcccaacaggtaaagtattcctctatgtactctattgtaaacatattattaggatttttaaaggagtttttacattatatattgaaatttttaatttttttactatgggacagaattttttaaaaaaatactgtgcaagttttatgctgtatactgtgttaagtttccacggtggttccacaattattttttagttgttctactgctgctttaattgtcatgttttgttgtttacggttgttttattaaaatacaatatttttgtaaaaaattcaatgtagtaaacttgtaaatttttattcaaaatctaatatttttgtaaaaatttaatttttaaataaggtgtctaaaagaagaaatgtaagttgaaaaataccacttttattaatcaattaatcaaatttacccttaattttatattaattgaaacatatctctttttatatgatttatacccaaaatatcctgacataagagagtcacatnnnnnnnntcttgaagtgacaggggcaaaattggt

SEQ ID NO: 172128 - DNA, 880 bp, Cannabis sativa
tttgttataagttatgcatgcttggagggggagttcttctcttaacctatttctaacatgcgtgttgcaggtttttgtttttatttttgtctatcaaattgccaaaggggaagattgtaaaatcctttattgacatatttgataaattaagcaaaaataatgtttgtggtatttttgaaattggctttaattgtttattatttatttttcgaaaatttagcttctctttcttgtgtgaaaaggcttttaaaatcaaacttcatactcttttgatttattgtgaattaaatatgagtttttcttttatagaatatttgatttatcctttactttttaaggaatttcttaatcatatttatttttttatctgatttctagaccaagaaaccgtatacagctatgggtattaatgtagtcaaagttgccttatttgtttatggaaactttgctaaaaaactgttcaagttcactgtacctgtttgaacggactaattgtctgtttaaacagattttaactttcctatttgggaagattttcatttaatgacttggtcctttcttggttgtttgaccacaacttagagggtttctaaactgtataaattcatccttagatagttggtattagttagctctcttgatgtatcaattctaaactgtatgaattcatccttagatagctggtattgaccactagtgttttctttgttctgtaaagaacttgagtccaacaagctcttattattttattattgtgttactctgtattgtttcttgttgaaaatgtgcacgttgaacaccttggatatagttaatcaagcttcaggagaagtcttgttcgtgagtcaccttccaagaggaaaagtgttggaaattattt

SEQ ID NO: 172129 - DNA, 722 bp, Cannabis sativa
  modified_base (661)..(673): a, c, t, g, unknown or other
gagtaaaatgatttacaaagaaaatccgtacccaaatcaaatgatgagtaaatattagatggagactggagaaaaaataaataataaagaaaaataattgatcggtagatgaacaataaataataaggaaaaaataattaatagtcacctcatcaaattattatacacgtttaaacaaaaataaaagaagtaaagtacacagaaagaataatatgagttttaacataccttttctgaatcatcttacataaattgataccttaatcgatacgctcacccaaaaaattgaaaatatagcctcaacagatgatgaagattatagtttctcttgttcctctaagatagacagatggaggaaatcgaagggaggtccaacgatgacttgaatttgggtttcgatgatttcgatatgcagaggacaaaacatcttttctattcgattctatctaacaaatcttttttttttgggcttcggtttcgatttacacggaacaaaccattgcttttaattttttttattccattagaaaaacttaacagacgttaacgtgggcattgaaaaatagttaaattagatgtatttttgtttcactgttaaagatttttaaaaaatagttaaatagttaatatataaaaatttttcttttttaaaaaataaatnnnnnnnnnnnnnatattctcccaagataggtttgttagagagatatgtggctaagatgatt

SEQ ID NO: 172130 - DNA, 740 bp, Cannabis sativa
  modified_base (712)..(715): a, c, t, g, unknown or other
actttgcatatggatcgtgttgggcctatctttccaaatcgaggcaacataaggcttcgctaattatgtttggaaaatttacatggtatactgacttttgtcatttttttacaaaaatattgtcaggcggtataatttacttttttactgtgtttttttattagttttatactgcagtatactgtgttaagttctaactgttattctactggtatttttttgtgattctactattgttttgagttgttctgttttttgttttactggtgttttataaaaacacagtatttttgaaaatatttctgtgtgacagtatttttgtaagtttcccgtctgtttttataatttattattattattataaaaatgaatgttacatatccgctgtcatataaatctgcataagtactacatgtagactttagctcataaatatgaacgtaattttcagtatacctaatttggttttaagaatatgggtgtaaaagtagagtgtagtttggtccccattttaataccaatttgtcacaacgttctctaagactttggacaaagacaatgacattgacaataatgacaatgacctccattcatttaagtaattttccactttgaatccacaagcccaacctgtctttttccacttcaatcacaactaattgatttagctaggaagtgttatattatttataataatataatatatagattnnnnatgtgtaataaactaataatatgta

SEQ ID NO: 172131 - DNA, 1108 bp, Cannabis sativa
aatggtgaattcctgcaatatgagcctgaagaagctcttgagtttctcattgggcttgctaaaaaatctcacacggggactaatccaagtgctgctgaaagcaccaacagaaatcgaccagctgggatttaccaattgcgggaagaggacaagataaaggcccaagtcgaagctttgagaaagcaagttgaaattctttcaaataaagatggccaaaaagggcacatggttgcccaagcacaaaccagaccacttgaaccttgtttcgtttgttgagaaaatgagcatctagctaaggactgcttagtttacaaagaaatgagggggggttcatgaggaacaatgcaataccttagggcaatataacaagccattctcccatgcatacaaccctagttggagaaaccactcgaattttagttggagagatgatcccaaccaagctcaaaatttctggaggagaatggagaaatgagaatcaagctcaacctccaaaggatatcatgcaccccaatacaatgctcaacaacaagggaactcccttgaaaataccatccatgtattcattgaggaacaaaccaaaataaatcaccaattgaaggaagatgtccaagagataaaaagtcaattttcaaaattgaacacatccttggctatttctgagaaaggcaaacttccttcccaacctcaatttaatgcacaagggcaacatatggctgaaacctccacctctaatgatcccattgttaaaggggttaacgccatcataacaagaagtggtaaaactttggaagatccatccatcaaaccactacttcaaatccaaaagtttcccctgacagtgcaccactcaatgctcaatccaaaataccatttccccaggctcttagacctgttgggaaacttcctgaaaaatcgacctgaactccttgagcacttgacacaagttaagattaatcttcctttgcttcacatcataaaacaagtgccagcttatgccaaaatcatcaaggacttgtgcactgctaagaggaaacaccatgttaagaagactgctttcttaactgaataagtgagtgcggtgatcgaacaaaagacaccgccaaaa

SEQ ID NO: 172132 - DNA, 1015 bp, Cannabis sativa
tggttccaacagtcaccattcttcgtatagacactatggatccatttgacccataaattatctttcttgacagctagtatccatattttctatattaaagcagccttattccaggtattgatatttaaaaaacctattccaccttcagttttggatagacatactttatcccaggctacggctccaactcctaacatattgttagagcctttccatagaaaactcctgcagattctttcaatttcagcaaccactttctttggtaagaccaggatctgactccaatatgtgtgaatggttagcaagacagaactgatgagaactgccctacctgcaaatgagatgtgtctagtactccatattttgatgcgagccgtcattttgtctactagaatattgcactcagtctaagagattctctttgagcaaattgggatcccaaggtacttaaaagggactgagcttctagtaaaaccagaaatccgaaccaccctttggatctctgtttcaggcatccccgcacaatagatagcagacttactattattaggcaagagtcctgaagatcttgaaaagagtcgcaagccttgaagcattagtttgatgctctgcaagtctcctttacaaaaaagaaggacatcatccgcaaaacataaatgattgagctttaattctttgcatctttcatggaatccaaactctgccttatttcccactttcttcatgattctgctcagatattccatgccaagaacaaagagaaggggcgacatggggtcaccctgtctcactcctcttttagtaccaaagaagccatgtaagacaccattaaaatacaatgagaatctggctgtagagacacactacatgattaaattgatgaccttagtaggaaacttaaaggcaataagaatttcctctaagaaatcccaatctaaggtatcataggctttttggagatcgagtttaatcatgcaattaggctttacagatttccttccatagtgtctgatga

SEQ ID NO: 172133 - DNA, 565 bp, Cannabis sativa
gagaattaaagagagaacaaataaagatattaaaatatattaaaaaataataaaatatttagaaaataactttgtatatatggtaggatatagattttttaatatattaattgtatatcttttaaaattttaattaaaaaaaaaaagaagtcacaacgtgactaaaaaaaactaataactattttttttttcagaaaaaaagaagccacaacgtggaaaaaacaaaaaaaaaaactcaataactaatttttattttgagttatcattttttttttaaaaaataaatgaattaaggaaaaaatatattaaatataaattaatatatatgaaattaataaaaaattaaagaaaagagagaattaaggagaaaaaagaaaaataagtttaaaacatttttagaccaccatgtcatcgctttataattctcctttatatatatataaatagataaattaagaattttttcattaatacatttataacaagtgttttattcaattttacggtaaattgatttttttttctaataatacagtagaacctctatttaagaatgctctattca

SEQ ID NO: 172134 - DNA, 554 bp, Cannabis sativa
aataactaacttttaacagataaattttattaagctaagaatgagggtggggccactaagcccacaattttgaggtccgaaaaaattaaaattaatgtatacatacaaataatataatatataaatttaattcattaaattgcattaaaaaaaactaaatcattaagctacaatacatgtcaatattgttagtggtggatttcattcttcactttcctatagttattttaagaaatcaaaggttttacatacatgatacatatattttttaatttaataaaaaaaatgcataattttatttgtcaataacatttctataaaaatgaacttgcttttaaaaattttgttctcttctattttgttttttttacgctagtgtcacctacaacttctattcaatgcatagtgttctctttgttctccttattcttcttcaaatatacaatgttaactttttatttgttaatgtaatagaatctacatttaaaaatagggttttttttttttcataaatgtacaacaaaaataacataattacaaaaaatgtacaaaaa

SEQ ID NO: 172135 - DNA, 564 bp, Cannabis sativa
tttttttattaattactcattgtttgtgtatttctaaagtgctttggcatgatgaattactcaataaatcccaattcacaaaataatttccaagtatagtcatagccaactttcaaacattaaaacataaataaataaacaataatgtaaatatgatcattcttaagaaatcatattattattcctctttgtcgtatacaattacttccttaggttttgtctttaccagttatgtgcataatcaaagtagatataaataaatgcttagtgtaacctgtgtgccaagatggtacgttataagctaggtgatgctcataagttggccaagttgtagtcaagtggtggcgcatgttagtgtatatgctagtggcatgttgatgctaagtttgtacagcagtggtattttcgtaaatatcttcaatgttgttcggactgggacagaacttggtattcatcatttatttgggtctacgaatacaatgatgtaattagatttgagaaactctatgatttggtatatggtgatgaccatatgtctacataacaaaatccatatatgttcct

SEQ ID NO: 172136 - DNA, 677 bp, Cannabis sativa
  modified_base (440)..(441): a, c, t, g, unknown or other
agggcataaaacccaacacgttgaactaatggtaattaaattggtggttcaaaatctaatcattttttatttcctcgataaccacttgattgcgaggtttatgacctttcatatattcatgttcaagaaaagtagcatttgttgatacaaatactttgttatcttgatgactttagaagtaggcacctcaagtttcctctgaatatcctacaagcatacgcatttttgttttaagagcaagtttctcaatcttaggtttaagaacatgagcaggacaacccaaaattcaaaaacttttcttaaacctgatgataggctccaattttgtaaatttattagagatgtgaaatttctcgatggcttttgttctaatttgaaaagaaagtaaatgaaaatttaacaaatgttctgagttgaaattgtaacgccctaaataattnngcacgctacccaagatacttatgaaaccctaatcccctaattgggattactaataaaattagcacggaaattaaactttaattataaacgaatttaaaataaaacttgtaataatttaaactttacaatctaaaagttctagaagttaggatcccaaaaacatttataaaatattattacaagttcttttcttttagccggcctaagcggcaaaacaaagtctcaaaaatacaaca

SEQ ID NO: 172137 - DNA, 702 bp, Cannabis sativa
tttgttccagaaacaaatccagagctgttggtttccgatgttttacaagaattaaacactatgatgtcgagtgctgatattgtagcataaatgcccttcattgacgtttttttgatggtccagaccctgaatgttatgttgagggcaatgatggcgtaagagatgaccaaggtacagaggcccctgctgctgtagctttgaacttgagtccactatcgtaccaaataccaccgaggccaccgacacggagaagagtgccccatagagaaaattgccaaaaacctggtacgagtagtagtcgtccaggcaaaaccagtaatgctagaggagccattgacattacacgtgttagtctacaagggtggtggtttaaatcccgtaggctataccgactcagatttccaggcttgtcttaatgaccgaaagtctacatctgggatggtttttactcttgggatggagcagtcgtttggagaagcgctaagcaaaccgcaatatcagactctactcagactctaccatagactctaccatggagtctaccatggaggctgagtacataactgagtacataactgccgctaaggttgctaaggaacttgtttggctaagaaagttcttctcacgacctagtgttgttcctggaatggaaaaaccactagttttactttgtgacaatactggtgctatagccaatagtaa

SEQ ID NO: 172138 - DNA, 1969 bp, Cannabis sativa
tcaggcttctttcctctctttcacgtccaatcgatggctcttggagcgactcagatatctagagggcgaggtccaaaaatcactatcccaatgcggggctgtgattaagcaatgggatgacgcccagtaggaaatcactcgtctcaaataagatgttgagaagttgaaggaagatcctgataaagtcgagaaggccattaagacccagggtgatgagtttgagaggagacttgctgagaaggaggccaaactcgtagggaaggaagacgaaaccacagaacgatgtaacaaggttagccttcgtaccgtataccaagcctggatgaactctaacttactacgagaaggccaggaaggaggaggaagacaccgaggcagaggaagaagaagaagatctttccaagtctcccaccatgtaggttttgtttttatttatctcgttttcttttttttttttttgaatttggccttttggccgagacaatgggttgccccttgtggcattttttataaagacaaatttgcaaagttggatggccaacttttctttctaatgcctcagttatcatccttagttccgttggcggtatgcgaggtatatgtgaaaacctctgacacttatcacactttctgacaaactcatgggtgtccttattgatcattggccagtatccttgtctaatgaaatttttagataggctctgccaacctgcatgatccccacaaaagacttcatggatttctttgattatctcgtttgcttctgtaggaagaacacatcgaagtagaggcattaaataacctattctgtatagtttgccttcaattattgtgtatcgaggtactgaatacaagagttttcgcgcctcatttttgtcagtcgaaagttgcccatcaagtagatagttgattatagggttcatccatgtaggtgaactgtctatcatatctatgtcttccttttcgcatatacttggctcgcttagcatctccactggaaccaagttcaattcatccaagtcaatctgcgaggccagttttgccaaggcatcagcgttagagttttgttctcttggaatttgctcgattttaaagtaatcaaatctttccaagttctttcgaacattctctagatacttagccatcttgaagcccttggcctggtattctccgagaacctgatttaaaatcagttatgagtcactgtggcagatgagatttttgactttcaacgcctcaactatcctcaagccggcgatcaaggcttcatactcagccttgttgtttgacgcatcgaattgaaatctcatagcataatgaaacttaaagccttctggtgaaattaatattacccctatacccgagcccttctcgttggatgcaccatccacgtataacttgcaagtgtctgcgtctcgatgaacagacggattttctttcagaattattccttctattaagaagtctaccaaggcttggcccttgatggatgttcgaggatgatatgttatgtcaaactaccccagtttgattgatcattttatcaatcttccagaagcatctagttttgataaaagttgtctcaagggttgatcagttaatacttttattgggtgcgtctgaaagtaaggtcataacttgcgagacgcttggataaggcataaagcaagtttttcaagagggggtacctcgagtatgcccctagtaaccttttactggcatagtaaataggttgctagtgcataccctcttctcgcactatagccgcactaatcgtgtcttctgagatagccaaatagaggagtaacgtttctccagttattagtttttccaaaactagaggcatcgctaaatgccttttggtgctctaaaaggcttcttcacaatcttctgtccactcgaatttcttgtttccttacaatacattgaagaatggctaacacttatcagttgacttcgaaatgaattt

SEQ ID NO: 172139 - DNA, 528 bp, Cannabis sativa
  modified_base (221)..(234): a, c, t, g, unknown or other
  modified_base (482)..(483): a, c, t, g, unknown or other
ctaataagataaaatgttaaaacttagcatttatcaaatcttattatttaattaataaaatatatttcaaaaaataacaaatttgaaaaagaaaaaaaatggttagcaaattttgaaatttaaactagattatttaaaaaatatatatatattttaatatcaaaataagatcattcaaatttaataataaaaaaattgtaatatctgatcttataattaannnnnnnnnnnnnntctaaaatttcaaaattaaccataaggctatttttgtgaaaaattaaattttcaaaattcaaaacctactaacatctataactaattttaattaattaaaaattaattttattttgataattagatttttaattgaaaatttagattctacacaaaagtctacaaaaatttgaattttgtttcaatgaacggtttacgaatcaaaaaatatgaagaaaacaattttggtgcacaggggtatgcaatgnntacccctgcgcgcgcggaatgggaggagtggccgagtgacaaggc

SEQ ID NO: 172140 - DNA, 625 bp, Cannabis sativa
aaaaaaaaaaatagacaattatgccaatttgggtctcctcttgtgtcgattggctccattatgccatgcggctcctttgttggagctcatggagccattccaattggctcaactttttttttcagctccagtcttttttttttttcagctccacctttgcaatttagctccatccattttttttcagctccacctttgcaattcagctccattgtaggagctcatggagccatttgcctcctttgttggagctcatagagccacacatattgttctttttttttatatgtatataccaagaatacacatagagaaggttattgcctccaaaattttttgaaaaaataaaataaaattctgatatacccaaaataagtcaaaaaataaataaaataccctttattttttttattaaattcattcaacttagttaatttaaattagatttattccaatccaatttaacaaaattagatttttccaatttgatttagatcaaatttagtttacatctattttttgtaattgaattagttttatctaatttattttaattaactagcctaaatactttatcaagtgaatttaacttagtattttttatttatttttggttacctcattt

SEQ ID NO: 172141 - DNA, 589 bp, Cannabis sativa
tttaatttaataattctcgtataaaatatctttaactattttaattttaatgcgtacggccgtttgatctacttattattttatattttaattgttttttgtacttgtctccatctctctaaattattatttgtttattatatatatttttattttttaattttaataatatatatttttttgaatgcataaaatagagaaagtgataatgtatggtgtaatataaatgtgaggtaaaataaaaaaagtaaaattttgatcaaatattttaaatgaaagtaaaaaattgggaacttgggagtgtacgtaggtagggtttaattttggttatttttacgctaaataggcctcttttttaatattattgatctttattaactatttgtttactgatgtttatattttttaagagtcacacaactaatgaaaaaacaaaacataaaaatacttatctattattatttttattttgaaagcaatccaaatcataatatttattcaattaacaaaattctaacattaataaatattactcttaatatttgtaaaaaataacttttggtcgtaaaaataagggaaatttacaaaa

SEQ ID NO: 172142 - DNA, 843 bp, Cannabis sativa
  modified_base (784)..(784): a, c, t, g, unknown or other
aaaaaaaaactactttaaaatatagaatgaaaaaaccatacaagtataattgtatcacaacattccttttagaaagttaactataaaattttgagtatgtttatactttatgcgttatccttattaaaatataaattgtttgttattggacaaaggaatatagattgtagcttacgtaacaaactgcatagatgatttgctatatatgttgataatatgatattaattggattttagctaggcatcatactatatttatatatagaatattttttaatgggtatgattattaaataatttaactatattaattttaaaaatattaaattattagattttgatccaacggagattaataaaagagaaatttgaatttctatgcttaatttagctacttagttaaaaaaaaataaaaataaaaatatctctttttatactatatcaaaaatttatttatatataaaatatttaagtcaaactcaactttttttttaccgaaaaactttttttcttaatttttttttcagccaatagaacaaccccaactcatatataatgtaaaaataagatatcattttaattagatagaaaaactaagtataaaaactcaaatttttataatattacccatgaattgataatacccattaagagtgtaaaatatattattgaaagaatcaatatcctatgtatatgctatatcttacaaataaatatataaatatctttatccttttatattaaaagtgtctatctaacggcaattcttggtttaacagaatanacttaaaaataaaagaatattcttgttaaatttaacgattaggtttgatctcccgttaa

SEQ ID NO: 172143 - DNA, 522 bp, Cannabis sativa
tgtttctagaaacttggatattagacaactggatataaacaatgcattcctcaatggccacttagaagaggatgtatatatgtgccaacccgtggggtttgaagatccaacaaaaccagatcatgtttgcaagctccacaaatccttgtacggcctcaaacaagctccaagagcatggtttgacaaattgaagaacgccctgcttgaatggaattttcagaactccaaagctgatacctccctatttttctgcatcaacaataataacatcatccttgtcttaatctatgttgatgatattattgttacaggaaacaacaacatcaatctccacaagtttgtccagcaacttaatactcacttcactctcaaagatcttggggcactacactactttcttggcattgaagtagtaagagatgaaacagggctatatttaactcagacaaagtatattgaagacttgctcaggaaaaataacttgcaaaatctgaaactatgtccaactcccattgcagcagg

SEQ ID NO: 172144 - DNA, 766 bp, Cannabis sativa
  modified_base (716)..(719): a, c, t, g, unknown or other
ctggtgcgtgtttctttttgtctaagtgatcccgtatatcaccatgatacccgttgatctgatgtctcaaatcaacgagggggtatctctgtccccttcctcctttctctccgggttcttagtgcacaaaaacgctctttcggtcctctcgatcctaagggccaagactatcccttttgaagtttgcccctctgtggacttttccctttcgggaaatctgagcggacctttcgcggatcttgcacctttttcttttttcccgagatggaagtgggatttttgccgttggtttcatttggagagatatcgtatgggactaggctccctcgacttatgcttctgagtgcttggtgaggactctctggtgtttcctcaagtctcgcagggatggctttagggtgtatatggatccctgctgtctccatggctttttgcatggcgaccatcacctcttgcattcttttgttttgttctttttgggtggttatctcagcttcatgatcagcaaccttttgtcttaagagcagcaattctgtgtaactgccatcgtcgtaggtgtcgcactcatcaacattttcctcgtattcgccatcggtggcctcctctcgctcttcggaatccatgttgactcttgaggctacttcctcatcttcagggttttgagcgtcttgaggaggacaaggctgacgtatgttgcgagtttccaccattgatgnnnngcttacaaggttgttgtctacttgcagatgcttccttcagctctcaa

SEQ ID NO: 172145 - DNA, 567 bp, Cannabis sativa
agattgtacataacaaggaagacacactacaagaaaaacgggttttagtgacacacattgagtaactctaaaactgtttagtgacacttcaacgcgcgtcggtgactagaaagatagtttttagtgacacttcacacgtgttactgaacccttttacattcactttttgcgcgtcattataggcatatagagtcaggttatatcagattgaaaaggtaacagctacacacatgaagtgtcaatatatccttttttttttcttttttattaattcaaatttatatattgtaaataatatttaattattttcactattttaactatatttaattttttagaatacaatattcaataatatattcagcattcattaataaataaataaataaatatataaatgttataaaaatattagaaagaaaaattaatcaaaataaatatacaaatacaatactaggtatatttttttttataaactattactgcatattgttgcgatattttgcacacgcaagtgtacgtatcgtttcaagtagtaaaacctacgaggagtgaggtcgatcccac

SEQ ID NO: 172146 - DNA, 732 bp, Cannabis sativa
gggaaatttgactaaatatgcttatataatcttaatttttttttctacttataattatcaatatttgtaatctatgtcaacgttaatcttatttccaaattactctcccaatttatatcacatcggactaaaactaaataatacacaaaaaacaattaggtctggtggggtccaatagtggcccaatgctaactttttttattattattatttgtttatgtttttgtacataaaaaaaagtagcactactatcggaccaccatcagaccatattttctaccaatttttttttatatatatatttttgtacataaaaaagtagcatcaagtgaccatcggactaccattagaccatatctgctaccaattttttttaatgtttttgtacataaaaaaaagtagcatcaggtgaccatcggaccactatcggaccaccattggaccatatctacatttatagatgttaagctccattcattaagctcttgaggaaggcatcgtgccaccattagacccaatcggatcatatcatcgagctaccatcggaccttcgtcttcaacttttactcattttaacaacaggaaggcatcagaccactatcggaccaccatcgggcctgacaaaaaataagtttttagcctaaaactcaaatctggtcattttcgaccttaaatctaacatctactcacagataacaaacattaattatataatttattcctttgacaaca

SEQ ID NO: 172147 - DNA, 773 bp, Cannabis sativa
aaggtaaacaatattttttattaaggtaagcaccccatcttaaaataagataaacaacatatcttattaaggtaaacaccttgcttaaaataaggtaaacgacacattattaggcaaacttcctgctttaaataaagtaaatgactcgccttattttgtaagaaacaagtctcaaataaggtaaaataacacatactttatctttaaaaaggtaagctgctaccttaaaataaaatacataacatgtcttagttaggaaaactccctgccttaaataaggtaaacgacccaccatattgaacaaacaccgtgcctcacataagataaactaaatcataatttatcattaaaaaaataaattattaccataaaataaagtaaacgacatgtcttttacgtaaactacgtgcttaaataaggtaaactaaaataatcattaaatataaaaatcactaccataaaataaggtaaatgactcgttttattaagcaagccttttgccttatttgggtaaacacagtacctcaaataagatacaccaaaacaagtttatcagtaaaatgtaaactactatcttaaaataaggtaaacaacatatctcattaaggtaaacaccctactttaaaataaggtaagcaacatatcttattaaagtatataccttgccttaaaataaaataaatgacacaccttattaagcagattttctgccttaaataaggtaaatgactcgtcttattttgctaagtactatgtctcaaataaggtaaaat

SEQ ID NO: 172148 - DNA, 682 bp, Cannabis sativa
catattacccttgtaaatttttaatatttttttgaataatttacagtgccgaaaatacatttaaagttttttaaacacgagtagtaaactgaaatatgagaactctattttcgatactgtaaacttattctgaattttttaaaaatttacaaatatatataatactgtaactattgtatattactataattttttttaaaaaaaatattcgaataaattaactattttaatcaaaatattaaagggatatttcaaaaaaacacaaaaacaataaaaaaaattacaaaattacggttgtacgccattttaaatatttttacaattttaagagattttatttaaataaaatacgtttttcttgatgttttttttatgttgtactcttgttattttgatattagtttttgttacttgtatattattttctttatgttttttggatgttgttttcctattattttcatgtgattttttttgttattttggtgttattataaaaatataaaaagatttatttagacgtaaatgtgtaaaaatttttccaaaaatagtagcttatgtaaacgtccctatatgattcttgcaacaatttaaattgggacaatttcacaaatcacaaaaataacaaaaaaattacagaaatacggtttcacggaattttaaacatttttatgattttatt

SEQ ID NO: 172149 - DNA, 534 bp, Cannabis sativa
ttttttttttttttgttattgaatttttgagaattataatttttttattataatatttttataagattcttacatatcgttagacatatgatttaattcaatatttttttcttaatatgatttaattcaattagtaattgaatttaaaaaatcatttgatttaatcaagttaaacttcaaaatccaatccaatctaattattaattggatttaatcgattttaattgaatatccaattacatatctaatttttaatattaacttaataacatgaaaaaaaaaatacataaaacctacatataaacctttatttaagtttagttttatgtaaatatatcatccttacaaatttaatacaactaaaacaacattactataaactaataaaataaaacagaacattataaaaataaatatacaaaacaatcaaatattacaaaatacaaattcaacaacaacaacaaaaaagctagtataaaaacataatcaaaatattttttttattataaaaaatatatataaataatttttttg

SEQ ID NO: 172150 - DNA, 595 bp, Cannabis sativa
aaaaaaaaaaaaaaaagcataaccgaatagaagataaaaaataaatctttctcaaagtttaaaaaaaaaaatcataacacaagtatagttttatagtctcatacctctcaagtctccaaacaaattaaaaaatgaacaaagataaaactaagaatcgagaacaaaatatatttacacttgtaatccataataatcactagttcactatagttattagatcttcataatttaagaatatgatatataattttgattatggataataatcaaaataattttaattattaatgatatatagggtaattctattgtaggactcttagtttgtacctcatggcatagggtaattttttggccaataaaatcaaagtcaaatagaaattacatggtagtgtgcacatacacatgcgattttttttttgggggagggggtttaaagaaaaaatgttaaaagaaaagctagaaagagtcaaagaggattgctttatatatgtggcgtgtgttggattaaaaatcctttgtgggcacatatgtataatgtatatgctattataaagtgtgatacaaaattaagtgaccaattatgttatgggta

SEQ ID NO: 172151 - DNA, 517 bp, Cannabis sativa
gagagagagagagagagaccttcggtgggggtgatttaaccgttgggcttctcgaaggtaggtgggaagatgttagtttggagagagagcacagggaagagagaaagatagaaagagattgaaattttaattaaagggcattttagtatcttagaaaattataggtatcatttggtacaaattacgagagtctaaattttaatttaaggtatgtttttttaagaatggttagtaaaatttcccgtaaaatattaaaacgtgctcaaagaaattaaagcattttgttaaattgtgcttaaaatacccaaaatttttacaatattagacttatattacatatacctaatgttttcaaagtgttatacttttatctccatcaatttttagtgacaagtattctaaatattatctaatgttttggtagcttttgaaatgatttatagtctaaagcacagaaggagaggctctaagggatatgcagctttaaaattggacttgagtaaagccttcgatcgtg

SEQ ID NO: 172152 - DNA, 549 bp, Cannabis sativa
actctgttttaacagagtttgttatttctgtttggaaccttcttgtaacatttttctgttatataaacaaaggttcaactctttgatttttagagcgtttacaattctttgtgtccaatctttgttgttccaattaggaattgtattgataagcttctctttcaaccaaaaattgaaatctggcaagtgacaaacctttggtgaggaaatatgctacttgatcatgtgagggtgtataacgaatctctaatttcctttgcataaccttgtcttttatgaagtgaacatctaactcgatatgcttagtccttgcatgataaattggattttggaagccagtgcactggcactcatattatcacactagataattggtggagcagagaagtcactactacaaaaatatactttttatcccggtttttagggccattttatcccagttttcgctgaaaaccgggatgtatgccagtgggataaaagctctgataaaaaccgggataaaaactcacttttaatcccggctattatagaaaaaccgggataaaa

SEQ ID NO: 172153 - DNA, 1091 bp, Cannabis sativa
agtacacataggaagacgaaagcgcaacatatcaattgccaaagcccttagtgtataatgtacaaactaagtgtaatagtcggatcagcttgagaccaagtaagcgaggtgcccgtctcgctatgggaaggcttcctgtaacttcatccagttaatgtcagtgaggcatacaactctggcgagtcaaaagctaacattcaaatgagcttcgaagaactctttgtatataagaaccgtaatcgtcacaagacatgcaccgttgaccttagaaggaaaaatggccccaactcgctattaagatcactagaaccaagcttccgtcgagacatctccatatacaacaattaaagacgtgtttaattcacaatcattttgacctagtaaaagcggaaacatcaaagctatatgatttttcaaatcataaccgcatttacactatgtgatatgtaatcataccccgtgattttaggggatgatcgttgtaaatagattacagtcaactttgtaattaactggtcactatgtaattataaatagtggcaaacaagatcaaaaaagggacggaaaaactcatacaaaagaggccctaaaaaataatcagaaatttgaataagattgactcatggactatgcagaattttaactgcaaaaccacttaaaaaaccatgtgttcatacttttacttttatagcttttatttaaactatgtgaaatcattactgtgaggctcaaatttggttaacgataatctgcgttaacaaaacaaaaattaaaaacaaaactagctctacaattaaagatctcaaaacacataatacctcataaaaccgattataatattttttaaaaaaatagagatcaatttcaaaaaatattgaggcataaatatgaaaagaacaagttccataacaaaataaataaacacaaataatagcatacaataactcaaatgtaatataaagaaaccgtttatagttatcaactagtaaaaaattgaagacaaaaaaatggttccgtaaagcaactaagataaaaactcacacacaaaaaccacttaaataaaataccttaaacaaaaacatccattcaac

SEQ ID NO: 172154 - DNA, 750 bp, Cannabis sativa
tcactttcattttatggttataataatgggatattatgttcttttacaaggccggccaatcataattaatcattaatatatagtgttacttaattatgattgattaattaaatggctctaacaagcaatctttgggggcagttcagtcaattattataaagtcggattaactccttcaaagtctaaaaactcatatacatatgtacaacaatacaacttaagctacaaatattaatattataccttactttcacatatgatgactaaacgtacaaaaatgtaacaatagtggagaaatcttgtgttataggtttggtattgtcaatctcctattataattttttagtcaatttttgtactcaaaaattcatacttgaatatttttatcaattttttttttcatagtggtgatcgttatactcacaacatcattcatgtaaaaattttaaaaaatttcgaataatttacagtaccgaatataggtatgaagttttttgaacacgcaaggtaaactgaaatatcaaaaattttatttttggtaccataaaaatttacaaggataatattgtaactataacgaataccgctataaaaaaaaattgaataaaaatattttagtatgtgattttgatcgtagaaattgaccaaaatgttgtagtaaaagattttaatcagtactcttttatactgttattattgtaattcaatataaagttttatatatttttatttaataattattataaaaaa

SEQ ID NO: 172155 - DNA, 544 bp, Cannabis sativa
ttttgattaatatttgttactaatcaatttttgatcattttgctagaaattcacaaagtattaatatttgctcggaaaagtcaaacataatcaaagaaatagattcaataagtatatcaactatttcatactttataagagcaaaagtttcatcaagagattaaaaattcaagatcctatccaaaagtggatttcaaaagctcaaagtcaaaagataactcgaaaatttaagtcaaagccaaaatcaaagtcatctctcgagaaaaatcaacttttgatcaaaacatgcaaatcaagcaggaaatctcatctacataaagataatacacaatcaaatagtataagtttaatttagtcatgttaaagtgatttacatagcatattaagatttataagtttcaagtttagctcactaacttgtgggacagtacttagtattaacagagaagtaaacttactcttaatcttctcttagttgacatgatctcattaaattgaagggcctttttcataaatgtacaaaaaaacaacataattacaaaaa

SEQ ID NO: 172156 - DNA, 973 bp, Cannabis sativa
attattccaaaaaatcatattaaattactattttttaaaaatatcttaataattaaatattttattaaaaacaatctaaaaaaagtacgtaactattttattaaatatttatttcagattcaaattttgattattgatgatttaaaaaaaataaaatttaaatatgaaaattattttatatttcataaaaacaaaattcaaataagaataatctcaaaaaaaatgtaatctactttattaaatatttatttcagattcaaattcttatttattgataatttaaaaaacaaaatgcaaataagaaaaatattttatatttcatacttatcacttatttgggttttagtttactgtatttattctttcttaatatttgaaattttaatttttaattaatggtttttttattatagtatctagttttgatttttcccatttttctttgttttagatctccccatttttggatgatttctcaatttttatttttttatggtaaaaatttctttttatataaatatatcaaattttttctggtttaaatatatgagtgttatgtcagcaaattatttaagaaaataaagatagcatttgtaataatagttatagttaaaaaaaaaataaaaaaaaaaaaaagtttaaaaaagcatagtttaagaaaaaaaaatatcctacttattattctaattgttacattttttgtattgtttttctcattttatattataattattatacttttacacatcaagagtctatgctcattgtattcaaaagaaaaaaagtttatactcaggagacacattcataaataacctaataatagtaaggttattataatcggggacatatttataaaattaattgagtaaattatttttattattataatattgtgaattatgttaaaaatcttactaaaataaaactcaaatattaaaaatacacacaataaaattcgaacctagaactt

SEQ ID NO: 172157 - DNA, 838 bp, Cannabis sativa
catgtgtgatataataatgcatagatcataatttatgggtcaaaaattctaaatagtaaaacaaaaattgctatgttaaaaaaatacatcttgctttacaaattaagcttgtgcttagaagaaagctactatattatataattggatttataattgtgttcgtttttgtagttctatggtaattatgtaattgaaggtaattgtggggttctaattacgctctttaatttttatagcgtcatgaaaattaaatgtattacactgtgttaatgttttttattagtggtcatagacatagcctaatggacacttctcacaaagagaaagtcccgagttcaaatctctcctcccctaatattaatatataatagggaaattttatttgtatgcttaaaaaaatatctcatatcaaaaatttagacccacaattaatttatacaaatgagtaagtgttgttcaaagaatttcttaaacgtttagattaatatgtagtttatttttgatagatctgtgtggttgttgtttgtattggcgttgttttgtcggttttttctttgaaatgacgagatctggctttctcactaaactaggttttttttaacaaattatcgatgtttttttttattatatatcgatatcttctcgataattagggtaagaaggtaaaggatgataattttttatacttttttgatagtatatcgatactatttcaatccataacaaaatatagcaaaattaatcacacaaggcagaatcatcaataaattatcgataaaccatcaataatcaattaaaataccgagcaaaaaaaaatgtcagctcgccatcgataaac

SEQ ID NO: 172158 - DNA, 518 bp, Cannabis sativa
attcaagtcgaaagatattttaccaaatgtacataagtaagacttcttcaaaagtgggtatttatacaatcaaagtgggagaatattatactttgatattttgattttgattgatcaaataaatgttacaagtgtgtcacatattttaatcttatgagaaattattatattatttgttaatataatatgaagattaaaatatgataatatatattattatgtgaataatatatattaagtgtttggtaaataaattatgtaatatatgacaatatatattagttgtcatcattttataacatttgggagagttacttgttactatgagtaaccaccattatcaccaatattaagtgcataaaaagatgctacatatcttaatttgaaattcttaatgctataagagttatggtgtgtgcatgagttacatttgagtccataagatctatggggtgttatgagtttgatttcaaatggtgatatcctaaacactatataaagagatctaaggtgctcat

SEQ ID NO: 172159 - DNA, 1110 bp, Cannabis sativa
gggaccttactcggtcggcccttgggtcagaaaagggggttctcagtggcaaggtggcttccctggagactagtctgtcggcagtgaatctggagaaggccactttgctgcaagagcgcgatgcctttcgttctgacgccgagacggcaaaggacaaactctcttccttgagtggaaagttatccgaagccgaaaaggcgtcgactcaggctcaaaaggttctggttgctgagaaagaatccctggccaaggagatcaaagtcatgacgggccaagtcaagaaggcgttccttagtgggagttatcagtcgtcccttaaactgtactccgagtttaaggagggcaagtctgctacttgggatctggatgagttttttgcgaaatattccgagtttaagaaggatgaagatttggtggattcttcctcggagtctgacgaagttagcgagggcgaggatgccgacggtgcctaaagagatgggagggaattttccctacccttatttcaataaatttcctaatgccctccttttttttttatttatgcgtgtgtgaaaagtttgaggaacaatcttcttattttatttcgttattgtttaaggacaagtttgaggaacaatcttcttattttatttcgttattgtttaaggacaagtttgaggaacaatctttttatttatttatttcgttattgtttaagggcttgtaaggatttctctttggatttatattttcagcttatttttcttattatggttgtttacacgtgggtggtattttttcgaagcgttttgacacctgggaatgcgcatttattgccatttaatgccttatatgtgggtggatttaccttttcgccttccttttatctttccttggccaccttttgtgttctatttaaacaagcactcttctttgttcatggtgtctctttggtctcaaagcttctaagtttgtctttttatacgtatatatattttttgctttcctttcccctacttgagaaatgtcgaactccccaggttctcctcttcccgagtccttcgattttttctcgttactaccggcccagtggcgaagctatcgttggaaggatgatgagggcttaca

SEQ ID NO: 172160 - DNA, 808 bp, Cannabis sativa
  modified_base (682)..(682): a, c, t, g, unknown or other
ataaatatgcatgcaccaaaaaaattgtctcgtggaaaaaacaaaattatagtttttttttttttcctttttttgaataaaaacaaaattgtagtattgaaaccgtttccacgttttatttttacttttatcatttattcaaaaaaaaataaaaaacacaaatatcttcactcgaattccaaggctaggcaagccctaaatctcaatcctttaagggtccgtttggcacagcttttggaaaagctaaaagttgctttttgaaaaagctgtgataaaagagtgtttggtaaacagtcaaaaaacagttttttgaagaatttttggaaaagctacagctaaaagctgaagctgctgtaaccaaatttttagaaaaagttcttttgattaaaagactataataattgttttatactaaaaccatatttacttatttatttcatgttaaaaaaaatttaaataaactaattataataaaataaataattattaaatctctttttcttaaaaaaaaaataataatttatattttattttattattaacaaacaacatcaacttacaatttttcttatatacttgagtttccatgttttttttacatttgataaaacataataaaaacatactataaattatttttatcaaatgcatataaatttatatttaaaaatatatatatatntataaaaaataaaatattatataacataaacttttacatatttgtcattataataaactagattataacattatcattatcgttataatagatcttaacaattcacagtactttgaaatttataat

SEQ ID NO: 172161 - DNA, 650 bp, Cannabis sativa
  modified_base (353)..(356): a, c, t, g, unknown or other
gggggggggggggggggcataatgaaaattttcacttttattcttttttactgaggggcggaattttttttaaaaaatattgtgttatgttttcactgttattccactgttattttttagttgttccactgttgttaattattctgttttgttattttatggttgttttagaaaaaaaaaataatatttttgtaaaaatttacatgtgacagtaaaattgtaaactgttgccaaaatttgtattttttttttgttaaaacccaaaaaaaaaaaaatctattagggcccgtttgttacgcaggactggattggattagacaggctaatttgtccaatccagtgtttggacatgnnnnaagtctggataactaatccaattaacctcatctgtctgggattatttatcccatctagtagggtgggataaataatcccatgcaggtaagatttttttttttatcgttttttaattttaattttgttaatatattttaaacttaataagaatttaaaggaaatgattatcacatatttatttatacaatttttttatctaaaacttattcattaaaattagtaaaaatggataattttaaattattatacataagttttcaaaatttataatattattaattaaataatagtta

SEQ ID NO: 172162 - DNA, 503 bp, Cannabis sativa
  modified_base (456)..(456): a, c, t, g, unknown or other
tctcaaacactttggcaacactttcttgcaatacactttaatggtttcttcaagtattggtctcacaattgacatcacctctttctaaatattcattaataatgtaaaagttaaaaaaccacaaaataaaaaaattaaattacttaggtgacgtttgataacacttttttaattagttttatgtttttaaaattgtataagtaaaaatatttttcaaaaacatgttctataaattttttttttcattttttaattttttaattaagaatcaaaatttaaaaacaaaaaaaaaaatcactttcaattatttttaaatagattttttatttcttaatcaatatttttgactccgatcagatccggacccagatcccccacggccctggcgctgaacctggcctctaacccaaacccaaatccaatcctgaacttagacctgacttaaataaaatcaanaaataaaaataaaaataaaccttacagaacacacttttattttctgt

SEQ ID NO: 172163 - DNA, 560 bp, Cannabis sativa
aataatcaattgggattgttagaccaaaaacaaatgaccaacttggtctgaaagaaatgttaaaatagtgggaaacaaacaatagaaaaaaaatgggatgttgatataagagaatgagtaaagggtaacttacaaaaatactggattttgatccaatgtttacaaaaatactactacacggtaaaattaacttttatagtgttttggaactttttttttcttttatactgtaaacaccaaaaaaaaaaaaaacgaggtctccatcttccttacccacagatagaaccactacagcaacaccaaaacaaccaaaaaataaccattaaatctggtagatgtagcagaaacattaaaactattaatattggagctgtcatgatttttctaatgttgtttttgggttgttccactattgtttcgtatgtttagcaaatgttagttttaaattacacatgttaaaccaactactgaatatttatttggagtaaccagaatgaaagaattatggacaataatagtcttaccttccattaaagtggtgaaatctagaagaccaaaaa

SEQ ID NO: 172164 - DNA, 1035 bp, Cannabis sativa
gaaggggcacatttcataagaagccgacgcttcaatttgccttaggaggcgtctgatgattggatgtgagaagctaaaagggtacctcacccccaaatggatggctccaatcattggatgcatcgcaaagaacacccaacaaataagaagactgcctaagtccaatcactgccgtttggagcttcccagagacacgcgccgagcacgcgcgcgaaaatccaaaagttaccatttaacactctaacaagaaaacgggagaaatcatgcctcccacacaatgacactttggtttgacggctgatgatgaaatgtattaaaggactcatcataaatgccacgtgtgcgaaaaatctctaaagagaagatgttgcaagctcccgggccatggtatgtcccagaagcttgggggtaaatgttatctgcatttttgccaagacgacatgtggatactaattacagaaagttgaggagtcattaagccacctaagtgcgtcaaaaagatagcgacatgaacctcacagaataggtcctcgtgagagatgtcttcctaggaacagtccacgaaagagatgttggtaacttagcgactctctccattatagatgttgggaccctttgctcctgcaaatggtatgagccttacaccagggtgcatcagttcgggatacgcttttcacctgcaaaagtttagcgtgcacatgcaaggctacgggtccactgaccacgcctttttcccttgtacaatgtcatagtttgtctcccccgccacactaccatgcagagcatgcatgtccttgcgtactgtgctaaataatccaacaactagggaagagggagattcaaaggagagtggccctaagacaacacacctccaaagccccgccggtgtagctagtgcaatttgacatcagtaaagaccacatggaatatatgccacctaccaatctgttaatgcaaattttcgtgaaccaaaattaaatagcctcttagtaataaatgttctgcagaaaataataagtaataaaagatataata

SEQ ID NO: 172165 - DNA, 670 bp, Cannabis sativa
taactaataataaaacaccattaattaactaaattgcactgtcgtgtgaatcttgataatggtacgtaccattttagattttatttttataaaaattaccaattagatcttctgtattgttaaatgacaaaatgaaccttatattttttaaaatagcacaaataggaccctaattaaaccgatttttttgtcaaaataaaacttaataataatctgatttagaggagttatgataaaactaactacattttctgtaaaccgttcgtattaagaattgtctttaagttagttatattaaaataaattatcaaaaattgagtttaaggtcttattttactattttaaaaaatttacagagtctattttatcatttaacaaaataaaagatctaattgaacaacttttacaaaacacaaagtctaaaatagtatttatctccttgataatcatttaatttttttcacctattttacgctatgcaatatacatacgtttctttcattcaataaaatttattatttactctacgaacatgcttaaattaatttataagccgcaagatgaaaaatgcgacttacatatatatggatgcagggaaatgttataataacatagagtaatttgcggtataaataactaaatttaactttcagttgcaaataaatactta

SEQ ID NO: 172166 - DNA, 573 bp, Cannabis sativa
aaattattcttattataattatttgtatagtattattaccgtaaaaaattaaacttaagtatttatttgtaactagaagttaaacttagacatttatgccgcaaattactcttataataattaaaaactttaagactgttcttttaaattgtaaatctaataccaaaataataatgtggttctgtttttttttattattattttttatttttacacttcaaaacagtttttttacatttttacggaattccacaccaaaagtcatatagcaactagtggaacaacctaaatcgcaaccaaaattcgtatagcaacccacatagaaaccattagagcaacctaaaccttaattttttttaaaaaaaaataagttaaaaaatatatgaggtaatttcctaataataattacaataactaaaaacaaattaacaacaatagatttataaataaaataccaaaataataattataataaattaatgatgctatattagttggcgtacagttaaagactaattataattttcatcaaaaaaaaaagactaattataattttggtagataacttttaaa

SEQ ID NO: 172167 - DNA, 1220 bp, Cannabis sativa
ttaagtaattgagatattccgttaaagttaacgtaaaaaacataaaaaaatatcgttaaactaagaatttagttatatagccatattttatatagaatagatactaggttattgttaaacgtatatttagtttttatttttgttatgtgtattttaaaaaatttataaagtaaaagacattaattattaattttttaatttttttataaatagaaataatatttaaagtttaaaaatttgaggaaattaaatatgaaatttaataatattaaaattgaatattctcctaatattaaaaataacaataaaaaataataatatatgaatatttatatatatttaaattaatttaaaattgatataagactaattaacttaaagaaaataatattaatattatatatatttaaattaattaaaaataaataatattactatttatatatattttataaaactaaccctactaacactattaaatttaacataatattcttatatttttaaaatattccggtaaaccaacaaaatttgttagataacacattttatataaaaatctacataaaaaagttcaaaattattaatttttttattgaaaatatataaaaaaaaacctatctatatatttatataattttgttgttatgcacgatatagccatctctaagaggtttgtttcactttttctattttcttaatttttttttattatttttaattattcttaatgacaataaaaagtgagaagacactaaaattttttaacatttattcaaaaaattattaataatacgtatataaataaaatctataaaatatataaataaaatgtaaaaagttattaattataataataagtgacaaaagagtaaataaaaaataatatttattgttttgactcatgctatatttttttttgaaagaaaaatataattcattaagataaattcgtagttatagaagaactcaaaaatcgtgaataaacatccgtccaaacacactcctctaaactagtaggagaggttgccaatgtatgggcaacaccattcgctgaacgaggaatggcgctgcaaaaaccactaacaacaataactaataacgcgtaaatatctaataaaatagactgaaaactaaaatttatatgaattttattaatcctattagaatatttttatttatggaaattattttctaattaaggaaatgattttctattt

SEQ ID NO: 172168 - DNA, 766 bp, Cannabis sativa
attctgtatgttctattaaccaaatctcttataaaagtggagggtccaccatgtttatgagaaagattaagcttttgtgacaatattaaaccaagttgtaattttattcattgaatttaatatttggtatttacaaaacacctcatgtgattctattccatatatgtctcacttgacaagacacacaagtttactataaatataacaatctttagttgtgtcatttaacaagtgaagtactcatctcaatagccaaaatcccaattaattctataatctttttctttgtacgtacatttttcttctacaatattcataatgggtttctatttgccaggagtcgttccaactaagaaatttcttcgacgatctttgtctaactcgagcaaaagagcatcaaatgttgttcatgttccgaaaggccatttagcagtttatgttgggaagaacgaaaagaaacggtttgtgattcctttgtcaattttaagccattcttcatttcacgagttgctagttcaagctgaagacgaatatggatatgatcatccgatgggaggcctcacaattccatgcagagaagatatatttattgatctcatatcaaatctgaattaataatgttactcataaaaatgtggaaattcttttatttatttagtacaactagacattcttttattcttatcatttttcctcatcatgtggagtagaaaaatagctcccagactgaggaaataatatatatggatacaattgttaattgtta

SEQ ID NO: 172169 - DNA, 506 bp, Cannabis sativa
taggaagaccctaaatcattcattgaggtttgtagtttgtgctctgggtttgagtttttatttacgtatttttggaggttttggcttgggcgtagacttaatagacatttgctcttaatctactaggttcaagagtttcataatcggagttttggcttagatctgatctacttggttcaagagtttcaaaatcgggcttttggcttagatctgattgtttggtttgcattttgtttgtaatatttagttttgatttcaaatcctattttttttttgttcttggcaaataacgggtttgtttatgttaaatggatgcattaaaatttttttatatagtttatgaatcttttgggtagaagaatttggatttgttttggtttaatatttgaaaatataattcacttttgattttagtttgctcaaaatctgtatttaatttgtttaattggtttcaattagggctgaacatcgagcgggtttaccgggtttcaggttggcgggtttcg

SEQ ID NO: 172170 - DNA, 681 bp, Cannabis sativa
ttaacaatggtgaaaatacacagcaaggtgaaaacgttctgagattatctcagatttgaccaggataatcaagaagcacacggaacccaaaatgatgttactggaacgggtagataacgagttctctaagagcttgataagcccattgatctacgtacttgtgagtatgttaaaggactaagggctgtaatgaagataggatctatctcgccgctttccattaataatgcgtaaagaccaatttagaagaaccagctctagactgtttcttagtgttatggtgggaagaagcatcaagttatctcgcaatttacatcttgctatatcttctattataaaaggatgcaaaaaaaaaaaactctaattgtgttgtgataatttgcacacaagtgcgtgaggtcgatcccacaaggattgaagttaagtacgttaaaattaaacttctacttctatttggttgaataaaaattaagaaaggattaaaactagaaaataaaatagtgcaagaataagcaaataaactaataaggaaattaatggttaataaaaactagggcttcgacttcaattctttctattgattatggcctaataagattatctctctactattatcaatttctatgcagtagcaggtttactaaggtaatttatagtcttctcagatatataaatctcaat

SEQ ID NO: 172171 - DNA, 1201 bp, Cannabis sativa
atcacttcgctcctgcacaaccacgaaccagctaccgttacaagctctaccaagcacattcgatcgaggtattcactatcgagtgctattcacacacatcatctcagcagtaagaaattgaagcccgcacatttcagccaagtaaaagtaattccgggtttgagaatttaaattgaaaatttatttggttaaaaggttttatttggtgaatattgtggcctgtgtatctgaatatttttatggtggaggagaattggatttgtgttgctattctgtgattatactggtgttaattgggctattgaaagaaaatttgtggctgaattctattaagcaggggtcaaaatgccgaaaattaagaggtgtgctcataagcctcctgagaaagatgctcgagaggctaaaaaatttgtttcagaagctgctgaaaagaaataccttgattcagttcaccacaaagaattttatgtcgagcgaggtatgataataggagatgaggactttggcagcatgtcgccatggctgatagagaacattaagaagaggaactggctacaattgtgcgaagatccggcatctgcagtttgtcaagtagtaaaggaattctacgcaaattttctggcgcatgaattgccagctgagattacggtgcaagaagttaaagttaaattttctcacagagacatcaatcattattacttgcttaaaaatgtgacttgtgagttctctaaagatgtcggtaagctcactgatgagctaatgcacaagattgtgcccgaattggccactccagaagcagagtgggaaatagatgggcgtggtgtattccatttcaaacggacggatttgaagcatgatatcaagtgtatttataattttatgcaatccactctgctgcctacgtcacatgactccaccgtgattcaggaaaggatgtggatgctctattgcatcatgaaagacaaaaagattaatgttggcaaggtgatagcgaaagagatttttgactgtgcacaccgagtaaaagggaaattttttttcccatgcctcattactgaaatgtgtagatgcgccaatgtactgatgttgaatgacgaagatccagttccaagaaagggagtagttagtttcgggcctaatcgtgccccaaaacgtaccactccatccactgccacagcttccacttcaagggatccaatgg

SEQ ID NO: 172172 - DNA, 660 bp, Cannabis sativa
ggtgtagcgggatcaatgataggagttagacttggtttggcagaacacatcaaggactcaaatgccatattctctctttctcttgatgaagaagatatgagcagcatacaagaagtttcgagaaaaggtaaagatctactgagagtgattggagattgtggagatgaatacaggcgcgcctgaaattcttgatcttactttaatgaaccacagaaaattttgtatattttgtctttctttgtctaatatttttgttcaaatcatattgtacctgtaaacaatgggatgtaactaagaaagaaaaaaacaacaccgacaaatactaaaaaatgtaatattagaggcttttctgctaaaccaaggactttgcttattggatatgggattattggttatttgcatgtaatacaaggacttgtttggtacacgggatgattggattaggcaagttaatttgtccagtcttgtgttgggtatgctgaaagtgtggataattaattcagttaatcacttgtttcacgataaaatttaataaaatgtgatagaaggattatgttactgttgttactgatatttcgcaacaccaaaaagtacaatttaactggtaaaagagagaattatttgagagatgacaaatgcgagtattcagcctagaatggc

SEQ ID NO: 172173 - DNA, 984 bp, Cannabis sativa
gagtggatactactgagtactgattggattctttgaacttgatggttatgttagtgaaagactgatccacatatttagatcatgtcgctcaaaacttctttcggtcctgtggtcaaatgaagctcccgagtgggctgctacaaacttgaggcccatgaagtgggcatatattgggccaagtgaatttccttttttcttttttgaagtaaatgggccaagtgaatttgagaagggattatttcacaaacacacaaaaacaacaaaaaatttacaaaaatacagttttacggaattttaaatatttttacaatttttttattttatttacataaaatacggccttttaatgttgtactcttgttaatttattgttgattttttgttattttttgttgttttattgttattttcatattacatttatgtagtttttttgttgttttcgtgttgtttccatgaaaaaccgtaaaaatacaaaaaaaaattatttaaacgtaaaaaatatatttttttacaaaaatagtgctttaaataattattcctatagtttgatcatacattttgagagaaaaggtttaagtgtaacactttcagagccaaaaacctcaataagggagtgagacttaaagaaatgttattggggacttataaaaatattgtaaaatgagagaaagtttacaaaaatactgtgatacagagtttttttatatttttagtgtatcaattttataaaaacattgtgtttaaagtttcaagattataaaaatactatgttttactaaaataaaataaaaaaaaaaacaactcaaaaacaactaaaaaaacaatcctagaataacttaacaaacaacatgaaaataattataaaacaacaaaaatataactacaaagcaaaagaaaaataacaataaattgacttaattgcaataagcaacataatcagaggaaaaggattaagcatgaaggctctagcaaagctgcttc

SEQ ID NO: 172174 - DNA, 716 bp, Cannabis sativa
taaccgattatgaaaaatgagagttggtgagactgaaagagagagagagagcagtgatttggacaatgcccgtgatgaacgcttctaattgtagttgtccactctatgtctcaagaagccgaagccacgacgtgaggccaacttattattctttaattcaattttgatattgtttttatttttaatttattttatttatagaaatgctaaagcgcacccgtgattcaattaaatatcgggtctcgtatagaagtatcgctagccaactacaacgtgacatatggagaaggtgctagataccacttgtgtcttgtgtctaatagcaatactctttttctttaaaaagcttaatgtttctacaagtgtggtgcatacttacggaagagttgactaattttatggtaggtgtcgggtcaccttcagccccaagtgagtttttattggaactataggtgtcgcgcatgccggattacatagaactgaattatttcttaaactgtagattagggaggcacaatttccgatgggtatgagtccgccgagactagtccttaatggaaccggaattttctttctaaatagaacatgagagggtgaggagaattatcttttgtgcccgaatattacataagactacaaggatgacactttccatcttgttagagaatcctacattattaatctgtggaaagaaaatagaatatataagaggaatg

SEQ ID NO: 172175 - DNA, 957 bp, Cannabis sativa
atgaactaaaagaccaaaagaggaggacaaagtaatttgggtttcggcttgaacacaaactaaactatcagtttctaaaatcaattgtccccacaaatgacggtcaatccaaattaaagcttcttttatgccaacaaattcatctatttcaggttgcacctaccatttcagcataaaaatccctgccattttctctgctgcctccattcgctaataactactcgacgccatggatatcccaacgaacccagaaccaagaaccagtaactaacaccagaaaccaataaaccaaaaccaatgagagaaactatagaaccatgtcaaaagacaagactaataggaaaacctaattagtttcaacacatgaaacgaaaaattctaatcccataaaaatactaatagtaattaacctaataatagtaaaaaaataaaaagatcaaaaaaaaactaaaaaaaaaaaaaaaagagagtaatttaaaacaaaagaacgaacaccaatcgttcactgtaaagcaacctaaaataatggagatagaaagaaatttgaactgacgaacaaaaggagagataaaagaataatattccaaacccataaggatgaaaggccgcagttaatcaacacaacctgaaaattcaattgaatataagtaggtcaaaccttaaatgaatcaatgatcaatactactttcagcgatgaagataatgagtactcctacttctcgtggagaatgcctagtacggaaattaagtcaaggtttcaaccatttatgttcattttgatgatcataaagattagatctaattctaattattaatcaataataatgaaacttgtgaaggattcataccaggcgtaattgcaattaaccaaaagaaaccctaaatattaatccaaactccaaacgaaaccgatcaagaaccaaatcgacctaatcaaaatcacaacactaaccgatc

SEQ ID NO: 172176 - DNA, 554 bp, Cannabis sativa
  modified_base (381)..(407): a, c, t, g, unknown or other
accaccgcctacaacgccagcccctcaccatcgcctacaacgtcggctccctcccaaatcaaaactgaccacttctcactgcctactgcctacaccgccgaccccatcaacacccttctccaccacccacgacgactgtgactggcgaccaccgtgtctgacagactgaagacccctttctccacgaccaccgcgacccacggatctaatgtcaaaggttagtgtttttgaatctgtgatttctgggttaaaaaatgcattttctaggcaggcctgatgcaggtccgatgcatcatgatgtaaaaaattgtaatatccagtttatatacatatattggtatttggtatattaagtgtgatatattattattattattattnnnnnnnnnnnnnnnnnnnnnnnnnnngttgttgttgttgttgttgtgggtgtgtaactagaaaaatatatatatatatattaaatagtgagataaataaatagtgaagcattagattagttagtttaaaatttaaaatttaaatttaaatcagcataattttatctgattagt

SEQ ID NO: 172177 - DNA, 607 bp, Cannabis sativa
tggtgccctttaacattttttaccatctaatagagattagtcaaggtttataattaattttatggaacttatattgagacctaatttatacacaaacatcctaaaacttaaagaagaggacattagattatacatatttatttaaccttgtgcaaaataatcaaaacacataataaggttgatgttatgtgcagtgcacatataattagttttctttttaattaaatttaattaggtgatgttaagtataatacatgtatgtttaattttcttaattaaatgatatatttttttttaaaaaaatttaaatgagatttgagattttaatttttgagaatttttttttaattattgcgggaacattagtgtttaccgagtttttcggcaaccaaataatattagagcttaagaaagtaatgaaggtataaataacaaaataacaaacaagagatttttacgtggttcagacattaattatctttggtccacgagtctatttcattaggctctttggccgatgattgtgcatacaaatacaaaagaggtggacttaactccactagggccgaccttgagctaagacgaaggaggcggccgccttaggccc

SEQ ID NO: 172178 - DNA, 627 bp, Cannabis sativa
aaaaatggaccaccctcttgggtttagattgctcatcctcaggtagttgtcctaggagatctaaatgacaccatggtcactagacgaaaaatgcagaacctgttggcattcgcttgctatctctcttaaattgagcccaaaaatgtcagagatgctctattggatgaattctggttggctgcaatgcaagatgaaatgggaaactttagaagacttggtgtatggatcatggtccctcggcctaaaggagaaaatgtaataggaacaaaatggctatttaaaaacaagtcagatgaatttgggatagtgactcgaaataaagctaggcttgttgcgcaaggttacagtcaggtggagggaatcgactttgatgagactttttcaccagtggcctgattagagtctatcagacttttactcatcattgcatgttttatgaagattaaactcttccaaatggatgtcaagagtgcatttctcaatggggtcattcgagaggaagtctatgtcaaacaaccgcagggatttgaagatccacaccatcccaaccatgtatacaagcttaacaaagccttatatggattaaaacaggctgcacgtgcatggtatgatcgactcacctcattc

SEQ ID NO: 172179 - DNA, 588 bp, Cannabis sativa
gagactagaattaggaccagtaactagtatgtcatctacatacacaagaaggataatcaggtttgcatcagatccataaacaaagagagatgtgtctgattttgaagcatgaaaaccccactgcaacaacgtgtgcctcaatttttcattccaagcccgtggagcttgcttcaaaccataaagagctttatgcaacttacagacatgagtcgggttggttggatcttcaaaacctcttggttgtctcatatacactgtttcttggagatcgtcatttaaaaaggcattactaacatccaattgcctaacaatccatgctgaagtgacagcaagagtgagaacagttcgaactgtaactggtttaaccacagggctaaaagtgtcctcataatcaatcccaggtgtttgtaaatatcctttggcgactaacctggatttatatgtattgagggagccatcagcattaagttttatccgatacacccacttgttgtcaataacatgcatatgcggctcataaggaacaagagtccaagtgtgtgatcgaatcaaggcagtattctccttttgcatagattgaaaccattt

SEQ ID NO: 172180 - DNA, 505 bp, Cannabis sativa
tttatagactatggaatttaaaataacttagtttttacttttattataatgatttatgaacacgaagtttgatgatcaagttgtttgttggttggattgatttttgtactttggtttaaaatttaaattaatgcttattttcttcttttaatccaaaaaataaggtgttatattatatatgcttaatttaataaataaataaagcaaaagaaataaccatttgactctgtaatttttttaaaagagttaaccaagttgatcgggtcaacctgttgacccggcaacacgatcaacctgtgacccgccaacctgaccttatctcgagtttgggtccattttttagactcgaaacccgtgaacccaaaacctacggacccgaaatctggttaacctgcatgatgtttaatcctacccagattgatagattgtcacctgggcgctgggttctaatgaacttgcctggattctgattttgatgcctcaaaaatgttcgtggtatgtctga

SEQ ID NO: 172181 - DNA, 819 bp, Cannabis sativa
ttctttcacttttttaaagccaatacctccagctttcttgctttgacacactgtgtcccaagcaatggcaccagcccctgaaacatgtgttgcgctttccatagaaaagccctgcatatagattctatttccttgatcactttgctaggcaatagcatcacctggctccaatgagaatggatagacattagaactgagttgatcaatactactcttcctgcaaaagagagatgttaagtactctatctaggttccgactctccctgtcatcttctcagctagtattgcacagtctttactagagatctttttagcaccaatgggaacccctacgtatgtgaaaggcagctcctgtttggaaaagccagaagcagcaataattctctttagatccctatcaggcatattactgcagtatatagcagatttggttgcatttgggaacaaaccagatgtcattaagaaaagtttgagcccctaagtagcatttaaactcaattgtgttattattaatatgagtagcctttattttaactttttttttttcaacttttatggaagtttaaatattttagttacaatatcaaatttggaagtattacaattattttttttaataatttacaggaaaacgaagtacttaatgttttggtttatcaagtgtgtttaaaaaactttaactatatttttagggataagttgaaaaatatctatttatagtattctttaatcaaaaatatcctcatattatattttattatatatacctatttttttgagtgggttgtccaatatactcccactctctacttaagtcta

SEQ ID NO: 172182 - DNA, 1244 bp, Cannabis sativa
  modified_base (1163)..(1169): a, c, t, g, unknown or other
cgatgttgcctatagagctagtgctatcatctcacaggggaataacctatgaccaacaaataaacaataccctgctggcagaatccattgacaaagtagaagaaagaagagatcaagccaacctaaagttacaggcctaccatcagaaggtagcaaggcacttcaacaaacaagtcaagagtaggaaattattcataggagacttggtgctccaaagaatgttcttgaacactaaaaattcagtagtaggagtgtttgcacctatcttggaaagcccctatcaagttactgaattaactagcaagggagcctacaagcaaggaaggtacaacgagaacatggggctcgttctcctactaagatactggaaaggagagcacctttgcaaatactatcagtaaccagcttatagaatactactccaaagtagcagttctacctactcaacattagagtacaaaagagctagtagccacgaccttttttgcgtggtctcccaccgttcttcaatggtagcctcttctatgcaaggcaagtaggggtagccatttgacatatagaagctaaatctatgtaatgtaagcttgtagattcaatttatgtaagttgcacaacagcaaagaccaattaatgaatagaaaacaatgtttatgttctatttattgtgtctaaaccaattgctcacaagattaacttcttaaacttactctttcaattccatgtgcgtactatggataacatcccatgaaagaacctaggaaaagtctatgaaacttggtgaataccaagtgaccaagagacttgtttgcatgctcacttgggggcacccataccatacaatgcataaaactagcacaaaggacttatgtaaagaaattttaatgcttagaacaagctactaaacttgccactaagtcgtacaggcatactttggcttgacatagtaaatctggacccttacatctcaaggccataagaagatagcaaggattaaagacctcctggtcggtcacataatccatgatgttgaccttgaaaagtgatcaattgacagcggggtcgtataaatttgatgttttccacatgttacatattaagacaaatatagtaaatgagataaagacttttatagaggtttgacccccttagttagcgggtaatgnnnnnnnccccttttggttgtattgataccttgagtaatactattcagatcactataggtgggatctaatatagctctctat

SEQ ID NO: 172183 - DNA, 598 bp, Cannabis sativa
tttatatagatgttaaatagatgttatcaattacaacaaagaattactaaagtttatgtatcaagtattagtttaattgtaatagttaatgtttgtttgtatatatatatattgaaaaaaatacaatagttatgtaatagttaaaatttaagaaatttttgaattttaacaactaaaattcaacataaaaacaacacgaaagcaacatatttttaaaataaataaaagcatacaacgtgtttacaactctacaacaactactaaacaactttttttattagctactaattttcaactgcctctaaaatatgagggttatgacatcctcgatttttaatggtagttaatgttttttttttttcattataatttaaattaagatttgtataaaaaaataattattatctaattttgttaataatttaaataattatttaatttatatttaataaataaattaaatttaaatatttaaaactatttatttttttaagaaaatgataattaattgattgatttaacggcgttaattttaactattaactttaatggaaaaataaaaataaaccgttaaaccaacaattttcatgatatagcc

SEQ ID NO: 172184 - DNA, 509 bp, Cannabis sativa
ttataaatcaacaatcatttacaaaaatagtgaaaataggatcacctagccaactctaaagtatgtttagccaaactatatacagcatggttagcgtttctcctaacataagagatacgtgcttattttttttagtgtagcgtaatggtatttttataattaattaatagcttgtaccttaaaagtcttgggttcgaacccatgacctctctcttttcccatccctccctccccactaagctagccttagtggcttagagatacgtggttcaagaaaaaaatgataaaagacaacaaacatccaaaattaaatcagagaaactagacagatcagtggatgtagtagttagagcatgaaaaactctaagagcatcagtctctatgttgatgatattaagtttttactatactccataattagttagtcctttcactcacacattatttatttaatattaaaatgcattaataataatatatatgttataaatattaataattatgtggat

SEQ ID NO: 172185 - DNA, 820 bp, Cannabis sativa
aatttgacaaaaagaaaaagtatttaataaatagataactttttacaactttttttattattttttatttttttaatgttatgtgcataaatatatattttatgtattatttttatcaaataataataattataatattaaattgtccgggatcaaaattctgttgcacctatacaataacaaaggtcatttacaaaaatttataactctattgtaatgttgattaaattttttattattatttgctatgaaaatttttatatactgtatttatttatataatcttaacaattcatatattcatttatattctaaacagtatacatatattaaaatattatttttttctaaaatttttcaaatagggtagttttttcttattttataattgaacattattcaattattttttttatataaaaatgttatatattttattttgtagaatcttcatcaattattatttatttaaaaaataaaacattactaactatatttatattaatataacatgcatttttatcaaaaatttatataatttagtatttaattgaatatattttagttcatttacattttatagtttatatcgttattgatttaacaaaaaagaaaaagaaaattaaatacctcctataaattatttacaatatcaattaaatatataataatttttataattttgtaattagcacataaataacaaggtatactaatataaaattaattaaaattatttagttttaaataagaaattattttaatagctaagagttttaagaaaaacaactatattatcattaatcttcaaaataattaa

SEQ ID NO: 172186 - DNA, 913 bp, Cannabis sativa
ttaagttttgtcttcatgacataagacccgggatcgtcgagctttaatccactcaggtcgttgcgcacacctgattacttgactgaggtaagaaagttaattgcactgttaagcatgttaagtgaggaacgattattatcgtttgtgacttgattatgatcgaggtaacgattactatcatgtgaggctcaattatgatcgagataaagatacaatcattactattgttgaaaataggtaaagatacggtcattaccgtttattgtgaatgagtaattactcgcttgaaactgcagataggtttcttacttatcgattgttatgttgggcaacgatagtgacatatgaagctcgtgggtgacaagtggtaaggatgctttatgaggcatcaagaacagtttgtcttattagacaaataattgttctgtattgcttgaatatgtgttgttaagcgtttattatgaataatgaatttgtatgttatgcattgtttgatctcgtgttatataatgtttgtgttttacttgctttcttgttgagtttttgtgactcacgggtgtttcgtggtccatgtaaaggaaagcgagagtgtatcaaccatgattcagaggtcttccagcgatgtacatatcaaccatggtgttttggcttccagtggatatgatccacctgttaattatgtattaaattgtaaccccatttttttaatatcaattttgagacaaattgtaaaagtttggaaacaggggatccccaaatataacagtattttgaatgaaaagtaatgttttagtttaatccaaaagttgcaattgaactacccttttcttaacctgatagattaattataagttaattaataaaagcacacacgtaatatctctgtgagtcagtgtaacgccctaatctatag

SEQ ID NO: 172187 - DNA, 783 bp, Cannabis sativa
aaatccctaacctagctagccatatattttatcctttacaattacaagccttcttttcccaaaaataaatgcattccaatccaaatcccccaaagtaatccaaggcattcttcaaataaatctgcagtaagaattttggattttgtgttttgcaaaagttaccgattggactctctgttttgttataagacaaaatggaccctatattttcaaaaatagtaaaaataagatcctgagctcaattttcaacaattttatttttttaataaaatcaactttaagacaatttctaacacgaaaaaatacaaaaaatgtaactagttttgtcataatatctctatattagattattattaagttttatattttgactaaaaatcagttcaggatcttaattgtacatgtaacaccctactagtttaggcctattattgtgattttatactaattgtgcagctcgttgctaatcaacggatttattaaaaatcgtgattaattaaaactttgttgaaatacatataaataccaaaataacatatatatatatatataacttggatcccgtgtacaaagtatttacaattgttacaaagtatgtaatacaaaagttgtcgcctagcgactatacaaaatatgtccatctgtcccaaagaccgtatgctccaggcctaaccgccccaacatgtacaatcttcatccgctcgctctcactagtgctcaacctttgccttggccttacatacacatgcaaacaatgagtcgacagactcagtaagaaaagca

SEQ ID NO: 172188 - DNA, 625 bp, Cannabis sativa
tccatgctttgatgtgtttgggctcttacatcagcatctttgaggaaagccataatgtagtctagatcacatttgatttcttctacgtcattatgcacaccacttaacaagtatgcttcttcagctagtaatggaatcaagttgtctatgaccaagccaactgcagtttctgccatctttattagctatctagtaatgcactcgacttcttagctctgtttttttaatgagaaatcatcaatttattgcacatatataaattagtcataattatatatgtttttttgtcataagataatactagtgaaatgacaaagtccgtgtggttatatataatttaacaagaataatactctttaataattattattagtaaaatatttatctaaattaatttgagatatttttttaaatggaattaatttgatacattgatttttttttctatttctcgacataaaggctatttttttttctcttatcggaatgtgtatattaaaaacaattcaagtttagaatatcacaataaaaaatagttatttttagtgataactttttagtaacaacaaaaaaatactgtgactaaatgtgacttttagtcacaacaaaaagttatttgtgacta

SEQ ID NO: 172189 - DNA, 1051 bp, Cannabis sativa
  modified_base (792)..(828): a, c, t, g, unknown or other
atcctgttagcacacacaagcaaatcatgtttagaataagaaggatcagattgttggcagatggtttaataaaaagaaaagaaacattgttcaaagatgcaagaaatttaagataattttttataataaccccaaaaatagaaagcataggtaatgaatttcgaatagcttaaattgctaccaagcaatgtgactccaactccactttccgctatggttgagttttaatctaacttagcgcttcctttataccaattgttttagtcaaatttggagtgcttatactagcaaaactacccgacttagccatcactacttctccttgagagtctcgagtgactatgttataaccaaatgtaactcgatcatggaaaatggcggcatctacagttaccttgattgtattctcttgcggcttaacccaaaattcaactctatcactagcttcaaaaattggaaaagaacccatctattgtagcatacttttgtggcacgtttactaaactgtaattggaattagaataatcaatgggagaaatgaatcagtttaaaatagaaaataattggaaacaatattttattatgctgtttactaaactgtccggaaagaaaactaaaaatcatattattttgtttacataactaggaaaggtaattagaatattttaatttgacaaaattgtcattattagaacatgtaattattttctgtttatagatttttaaagggtgtatttatctttttcatttttaattaataaaatcaaaattaaaataaattaagttaggaannnnnnnnnnnnnnnnnnnnnnnnnnnnnnnnnnnnntttccctttgttttctccttaatttgtacggccccactactttctctctttccaaaatttagtaaacaattgtatgggaatcaataccatagcattcattcacattcccttcaagtaaacaggtaattggttccaaactaactcgttttgagccttttataaaccctagcacaacataacaacctcctcacacttgtccttactacacctttgcaaaatttga

SEQ ID NO: 172190 - DNA, 705 bp, Cannabis sativa
gaagttggatcttggagtgattaacaagaacctggtgaactatatgagaagaaatgggaagcacaaagttcgatcttgagaaatttacagggaagaacaattttggattatggggagtaaagatgagggcattgctggtgcaacagggattacaaggtgcaatttgaagggagaaagagttatctgcaagctggtctaagaaagaacgatctgacattcttgaaaaggcacacagtgccattattttgagccttggagacaaggttctcagagaagtttcaaaggagacgactacagctggactttggttgaaattggaaagcttgtatatgaccaaatctttggctaatcgattgttcttaaagcagaaactgtattctttgaagatgacattagggaaaagtattgaagatcatttagatgatttcaataagatcattctcgatcttgagaacattgacatcaagattgaagatgaggaccaagctatcatatcctgaattcacttcctagtgaaaactatgagcattttgtggatacaatgatgtattggaaagattctcttacattaaaagaagtacaaaatgccttgatgtgaaaggatatgaaaaggaaatctgagcttcaagagagtagttcaggggaaggactgttggttcgagggaaatttccaaagaaagagaataaagatggaagtaatcaaaa

SEQ ID NO: 172191 - DNA, 528 bp, Cannabis sativa
tttcttcttactccttccattcatgcatggctgcttcctttattacctttttctaatacatacctataacattattcattgtttctttgtacaagtgtaaatattttgtttggatttgtataaatatgcatgtttattttttggttcagttaaatgagtaaattatgtttctacttcaggcatgccaaggaataagggagttgctccaacttccagcagagaaacctttaccccagcgtatcctaacttttgattgtaaagttaaggttatcacaagttttatacagttcacataatgcactcaaaaatccatatggtacataattacagaagctttgttaccaggttctgatatatgtatatttctttatgaaatcagtttcaaaataatgaggaaaaccagttttaatcaatgacttaaaaagattaaacattcctctatacaacttagcatttttatttataataaaatacagtacaacacagttcctttactttacatgtagagagttattaaaacataaaaaa

SEQ ID NO: 172192 - DNA, 1071 bp, Cannabis sativa
agttattagaaaatcctttattcaattagaggaaaattgaagaaataagacaaaaaatcaaagaaaccctctatttcccttctccctcttcgattgagccaagaccaaggaaattcatcgctgaattttttgttttcaacaaggtttggaggaagattcaatcaaggtgaaccctagttactttctagctatgtttttctcaagattttagttagtttcaagtagtaattttgtgaaatgggggctattagggttaaaaatgcttagggttcagagtttatgttaattttaggttgattctaagttttggttattggttttgctgagttgtgatgaaattgcataagtttaaagttagaaacccaagctttgatctttaatggcacaatttgattcagtgactttctctatgaattactggttggaatatattgtttataccttaattaggtactctggaaggtttggttgcatttggtggagttttgagcaagaaatgagattttttgggtgaactggtataaaccaggttagcggttttatcagtacctgtgaaatcggttagccaatttttgcagggtttcccgagtgtctcgttttctcaattctcgatcatttcagtgtcatagttgggtgtttccctacttcctgggttagtatagtccctagagagtataacaaaacctagagttgtgggttcgagtttcccaaattagggttttgatcatgtgatttacccggtttcattatgtgattaggacatctattttgcacaagattttctattcaggtcggccagcacacttgaatctggaaagatggtaagaactgtatataatgtgtgttatgaatatctgaatgtatgtatatttttagtgtatatggatgcttatatgttgtgagtcatacattaccaacacttgtatggttgcggtacatagtgcattggcaaagtgtatgatgtctgaaagtacattgtggtgttactagaacttttatgggaaggtataaggtgtctgtggtacaacacttaacagtactcaaggtgcggtccataccctacctacacta

SEQ ID NO: 172193 - DNA, 538 bp, Cannabis sativa
gattgctgagtcattgctgggtcactgctgtatcaactcgaacatactagtgaaaattaaccactgaagtctattttctaaatctgaattatcaccactttaattacttttggcttcttatttttagtttatttagcttacaatattatttctcaactttagaattaaggttaagaatttttctcttgaattaagtagttactttgttactttgctttatttttacttgcatttttgaattgcttttagttgattttgcatcatttagtgaaaagtccatgtggagacgaactttgattacttatcattatattacttgtttctgattgcgtacacttgcgcaattataattcaatataattttcacaacaaatttttggcgccgttgccggggctttaagttctaaattatattttatcaactaattgacattctaattttttttgtgtttttttaatcttgctggtttgttctttgaaatattaggtatctatagtgtacgaaccaacaagaggactttgaacttgctcctattga

SEQ ID NO: 172194 - DNA, 628 bp, Cannabis sativa
aaaatttaatcttctggccaagttcttgtgcctacgtgtgtttgctatcactcaagctaatgctgcagccagtccttctgtggtgacaggttagcttcttatcaacaactcctattttactgtgttatttgactcgggagctacacattcttatgtggaaacacgagtaattaatctattgggtaggccttgtgattttatcgaaagaaggtttagatccctattgcctagtggggagttggttatctccaataggcgaattaggactatgccagttaggatcaaagatagggagttgagtgctgacctagtagagctggaattaacagaatttgatatcatacttagaatggatttcctatccatgtattcaaccatcattaaatgtaagcataaaatggtaactttttgccgatgggtgaatatccatttgtcaatgttggatcggttcaggggtctcggatcctgattatttcagttttaagggctaaagatttactacacagtggatgggtagcatttttagcgattgtgattgactccaacagacctgaaatgtttggacctgaagtgttagggttgttaaagaatttctcgacgtatttctcgaggagttactgggattacc

SEQ ID NO: 172195 - DNA, 615 bp, Cannabis sativa
cgtagaacttgagccaccatcccagagaagattaacgtatagacaagaagcaaatcacgtactccttgcagaatcacttgatgaaattgaagagtagcgaaccacgaacaacataaagttgatgacccatcagcaaaaagtagctcggtatttcaacaaacaagtgaaagctcaaaaaaattttgtgggatatacggtcctaagaagagtatttttaaacattaaacacagtacgagaggtgtgcgcggacctaactgggatggaccatatcaagtagtcaaagttttagaatcaggggcatacaaattgggcaagtatgatgaaaaaatgcaacttgttctggtaccacgttattggaatggagagcatttaagaaaatactaccaatagaagtactaggtcggatgaccacatcaagtactaaagaaaagaacatttactcttaagtgaatggccttctaggcagaccacgcccaagggttcgaataaaattacaaagtactcaggtcgaatgaccaccatctaaagcacaatttttaatttctgcaatttgttctatttcatgttaagctaaagatcagattagatcaaattaatagctttgatgtaagtta

SEQ ID NO: 172196 - DNA, 846 bp, Cannabis sativa
accaacaaccaaaaacaacatagaagctcctaaatcaatcaaatcagacagaaaaatcaatacacctgtccatcttaaagattttagttgcaacaacacccgtagcacaccatatcctctcacaaattacctctcttaccataaactctcacctcaattcaggacagcagttcttgcaacctaccagatgcttgaaccaacttcctatacccaagcatgcaaagagaaaatatggaaccaagccatggatcagagattgatgtattagaagccaaccatacttggatagttgttcccttaccttcaggacaatacaccatcagcaaagctcgccttgtagccaaaggctacatacaacaacaaggcattgattatttcgaaacttatgcccctgtggcaaaattcaacacacttaaactactctttgccttagctgcaataaactagtggtatctccaccacatggacatcaataatgcatttttacatggtgatctccatgaggatacttacatgaaattagagctgaacatcagtcggtttggtcggtttttttctatataaaaatctaaaattcagtttttggtatggattggtgcaatccgaaaatcgaccgaccaatccataacctatcttaaaactgaccattttgaaacctcggtttggtcggtttaaaccgcccaaaccgaacttttttttttaaaaaaaaatatataattcaatttattctctaaacatattattatacatttcacaactacaaacatacaaattaattgtttaaaaactaattatcttatttttttaaaactttaatattaataaaataataatatattattagta

SEQ ID NO: 172197 - DNA, 677 bp, Cannabis sativa
tctcctaattattttaagagttatgatgccatcaatgtattaaaataattgaacaaaagttaggtaaatgattgagattgtattacatatattatttaagtacatatatccccaaatatatttaatgtcataattattttaaaataatatggatcattaatttttttatataaatagtttttgtaacttttctttacatcctaccagcaccaaaaagacatgttcaaactatcatttacatattctcaatccacacaaaacatcttcttgctttgttttcctaagcaatgttaccaacaatctattcttaacacatgctttaatcttctttacaattatatctacattatttattattatataatatataattatttggaaacgacttttagataaattatgaagccatttttcttaaagaattatatgatctagtttatttttgaaataattacataaaacactaatttttataaaaaatttatatttttacgttcaattttttttatacatatttttataatattctataaatacaagaaaataacaaaaaaatatatgaaagtaacaaaaaataacatcaaaatgataaaaacgcaacaccaaaataacataaaaaataatatacaaataacaaaataacaagaatatatcataaaaagaccgtattttatgta

SEQ ID NO: 172198 - DNA, 550 bp, Cannabis sativa
  modified_base (500)..(503): a, c, t, g, unknown or other
aaaactttaattcataatctaaaaaagtttcatcaacagtactcaagaaagagtgtttagttcataatcacaaacataatatctacaataatcatgttcataattaaataactaaacaaaagagtgaagaagaaggagtagaagaagaaaagaactttaacgatgataattgatgatgattgttttgaatctcttctctatttctcttaaatgtattttctaatctcaaagttacttgtttgtatctctccagtcatcccaaaatttgagttacatcattctttatataggcccaaaaaatatagaaagaatctatttagaaataagatttaaattcaaaaatacatgtacggcgctatagcgccacgcggtactcctcgaggcttcattttagcgcaaagaaatattttttccgaaatcggggctatagtgccatacttttggcgctatagtattagagttagtcccacattgataatgtgtggaaataaattgtgatnnnnaagatgaatgggctactcctcccattgccaattggttttgggatgga

SEQ ID NO: 172199 - DNA, 614 bp, Cannabis sativa
atatatatatatatataacgaattgcactagaagagtataggtggcattttactatttttttcttcctatttttcctattttgtgacacattttcttattttatttgaaaaataaactacacatacaagctaaaagtgtcacattatttagagacattttagttgttatccatgtaggttataaataatacttttaatttattactttcttttgtcttttaaatattattttggtaatgggtgattgattaatgtcttagctagtaagttatatatagatttctaagtagttatttatatttcaataattaaattttttatactactttttaattttacatacaatttatgaaattaacttagtttaaaaatttattttaatattctagatttttatattgttatttgttcgagttaaaaaaaaattacaactaaaatattttctcttaaattttaatttgttcaaaaattaaaaagtgacacacttatatgactatatatttgagcattttttaatcatattttttcactttttttttttttatttttttgttacttttttattatatcaattttagaatacaaaatatatctatttcaacaaattgattttt

SEQ ID NO: 172200 - DNA, 531 bp, Cannabis sativa
tgcttttttatctatgtttttatttaactatgatgaatttgtctattttgtttgttgtctttggctccttgatagacaaaaaggaggaaaaagtagttattttttggattgttggttacaactctagacccttattttagggggagttattttgtttgtggtttgtgaacttttccgtttaaaaagttatttgttttatgtgttagagttctttcatgcatgggagtattttctatactctattgtttctatttctaacacttgatgtaggttttctccgaataaaatattttgtcaatcaaagtgccaaagagggagattgttaattccattttttgcatcttcaatgtgacaaaaatattttattatttattttttaaatttggctagtgttaatattgatttccatattctgtatgtgacttttatattaagtaatctatttttggaaagacagttgtctagctttcctctttatggaaaataaggtaaaaagggtaagtttggttactcaattcttttctatctaac

SEQ ID NO: 172201 - DNA, 889 bp, Cannabis sativa
gaatctccaaaaccattgtaacccaaagctgattttgatagtgaagactcaagcaactttgagggtcgcttgacggagacgtacctctgatttagagggaactccgaaatcaatcgttgtggtgtctatagttttttctttgctggttttattttcggttgttctttagttttgttctttggttttttctgcaggtttaaagcttggagaaagaaggttcgaatgctatattttgcagcaaaatgaaagaagaaagaagattagaagggctgaaggaggaagaaaaatgcagaagtggttaagtattgttctgctgcaaagttttgcagcaaggagaagaagagaagttcggctgaagagaagaagagggctgctgctaggaagtggctactagggttagagaggagaagagaaagaaaagggctgctagggtttgtgacccaaaagaaaggctttatactaccttaaagggggtagggtttcgagggaaaactctcttgatccgcacaagagagaaaggtcaagtttgaccttggttttttgaactttgtggtgttggtgtaggggcatttttggaatgctttatttcctacagtggtatcaaagctcggtgaagcaagaagattcaacaacacctggaaacaaagtcaagaaacaagaaagatcatcaaaacataaaagaagccaaatttgaaattatcaagaaattgataaacaggaaaactctaacctaaactttatcttgttacattcttgcttttattatcttggtcaaataattaaaatgagtaatattagagtggatgttgacaagtttgatggattgggggattataggatttggaggaagaagattagagctcttcttgctcataacaaattacttagg

SEQ ID NO: 172202 - DNA, 583 bp, Cannabis sativa
aaatatagagcagaaccaggattaaaataggactgtgaaacttaataaatatatttaatttataaattatcattaatgataattactttttatgtcaatttgcaacttaatttgttattgtgcattggagcacaattgcgaaaatcatgctaaatataaaatttacttatttttttgtgccaaatttatcacttttttaccttatgcattagagatggtcttacactgtacaaaattcaaattagatcctctatttcatatttttccaccctttgttaaatatcccgtgattaggttgtagtttgtttggtaattttcttttttccaacccatgatatttggattttcctcttttcctcttgtgttgagtttatttatgagttttttgtggctaaaccctcccaactatcatttcacttgcactcaatcctctaaactcaaattttaacggtaaaacattccaaactactgtactgttaagaaattcaaggtgcatctggttaactaccaccatgaattacttatgtgtacactattgtacatgtggcatgtttatattagtacacctaatattattattatt

SEQ ID NO: 172203 - DNA, 659 bp, Cannabis sativa
tggtaagaatggctccaacaatggagagagagggaataacggtaatgacggtaacaacaatgacaaaaagagactaaagaatacccctgagccagccaggagagatccaaccccaaggttcactacctacaacatactcctggacacaagagaaaacatctacaatgcaactcactcggtggtgccataccgtaagccttatcccatgagaaagggcattagcaagcgtgacatgaacaagttttgtcgattccacaatgactacgaccatgacaatgatgagtgcaacaatctaaatgaggagatagagttcctcatcagacaaaacaacccccacttgaaaagatatgtacgtcgacacaacgaccggcccccacgacaacaacaagcagctggagatgaccaacaattgttacctccccccattgctggctgtttggacgttatatttggaggaccccaccttgctgggaactccagaaaatcccaggagaaatacgatcggtctctgtgacatgagccaggtgacgatgtgttggctgtccaggagcgacctcccaaacaacctcggtatgaacatgagtcaatcacgttctttgaggacgacaccaaacacgttcgatacccacacaacaaccccttggtagtagaagtacaaa

SEQ ID NO: 172204 - DNA, 907 bp, Cannabis sativa
ttctctctttacactttatgttttgttgtttttcacttgatctgttctcgatctaactccttctttattttcttgtccatgtacttcccctttttcgagcttctcaccatgagaactgatttctcatgtttggatcttggagcagaagactaaaactagggtttacttcttctctctctctctctttctttctctgatctgtttttctggcttagatcttaggttatttgcttttgttttctgtttatatagtgtagtagagtcggttgatcaaggcttaggagttagttacaatttcagttgtaactaactactaagtcttgatccactaaatgcaaagtaacctaggatatcgagtctatttatctgtttctgtttgtgtatttgctgatgtggatatttgtaagtatactggactggttataagtgaaatttattcaacaattcatttgatcctatcatttcttaaacatatatatttcgtcacgcaatcacaaaacagtaatagtagtactatatctttctcttacataaaagcccacaactttacttataactattctaataattatcatcaacactacacatctaatggaccctttgaggccaaagtttttgtcaaattttttgaggtatctctttctcatggcatatgctactttttgtagttgaaattgactaagtatatccggctctgagggtaggcgggctaggcgtacgcttcgggcccctgaacgctcaaggttccgaaattgtgaaaaaaaatgttaatatatagattaatgcaatgtctccgcttcaagcctccattgggtccttcccccctcggaataatggctcttatacacgggtacgccactctggctgcttcctggattgatgactgactctacagaccaacacgagt

SEQ ID NO: 172205 - DNA, 1138 bp, Cannabis sativa
  modified_base (863)..(864): a, c, t, g, unknown or other
tggtaaaataacttccaacacagaattatcccatgccttagtagctactcttcatctacttcagagagaggatcctaatattttagagcttcttcgtgatgaaaaagaagaatttcttgctcaaattttgaaacttgaaaggttgaacaattcttccagtgaaggagctattgagtttagatccagaactttccttccagctgctcaaccatttacgaaatcttctcttccagaatcctgggtagaactggctaaagatgcccccacacttccagacacatctatcaagcagtgagctaacttatctttattgtttctttccttgaatttgggggataaagatccccgtttttatttgggtggagacaatattataatacccttgtcatgggggtttctttgatatgaatattttgcctccatattattaaagatttgaacaacttttatttatcatatcattatcgtttaaattcatttagcatattactacttaaatgaattttaatttgctaagttagcttcattctaaattccttgaggttccggttttaacgattggaccttaggatttcaatttttatacttaaggtttaactttttgcttttaataagttgtttacttccaggttccttaggatcctagttccaatggcctggaccttgggatttcaacatctttattatttttgaaaaaaataacaaaaattgcttaattctggattccctaaggtaggggtgagcaaaaaatccaagaaactgaccaaaccgagtacaccgaccgtccaaacaccgaaaaaaccaccttcggttaaaaccgtcttaacatggtcggttttagtgtcaatggcaaaccgaccgannaaaccgagaaccgaccgaacatatatattatataatatatattatgtttatacatatttaatatacaattttattaaactaattttacttatatcttttttatttaaagtttcaattattcattactttattttactataatttgatgcatttacgaattatatacacacattcataaaataatacgagttttttaatataactcattaccatattagtagcacaaataatttgaacaaatttttaaaaaatatttacattatttatttaacta

SEQ ID NO: 172206 - DNA, 867 bp, Cannabis sativa
aaattatatattaaacaaggacatttatagtgtgatatatgataacataaaaaattgttaactaattattaagtgtcatatatttgtatagtgttaggtatatatcttatgcaaaataataatattttattaataataattaaaataattcaccaacaaaaaaattgtacaaaaaattataaataaaaaaatcagagaagttattgtaaaaaaattgtaaacaagtactacaaaaggtaacatctagttattagtgcattttagtttccataaattttaatttaatatgatttagaaaattactaaccaattattgtgtatgtgaatcggtataatattgagcaccttagggtgccacatagcaataatagtacaattattttaaaaaaatagtataaagatcattcataaaaaataaaacacagaagataaaaaaaattaataactaattattacgtaccacatcggtatgacattgaacaccttaagtgccaataacaagtatcaaatagtatataaaaaaaaaaagatttagaaaattgctaactaattattgtgtatgttaatcggtatagtattgagcagtttaaggtggcacatagcaataatagtacaaaaaattatttttaaaaaaattgtacaaagatcatttataaaaaataaaatacaaaagacaaaaaaaaagaaaaaatcactaactaattattgttaccatatatcggtatgacattgaataccttaagtgccaataacaagtatgaaatagtatataaaaaaaaggtttagaaaattgctaaccaattattgtgtatgtgaatcggtatagtattgagcaccttaaggtgccacatagcaataatagtacaa

SEQ ID NO: 172207 - DNA, 2018 bp, Cannabis sativa
  modified_base (307)..(318): a, c, t, g, unknown or other
  modified_base (482)..(483): a, c, t, g, unknown or other
attattattattatatattttagtaaatgatctatgtattttttttgttatatggttttttatttttttttaataatatttaaagtctattttttattgtacttttattgacataatatataattttattagcgtcctatatatttctattgtaaagtatatgcgttttgttatatggtatataagttttattatatagtatatcattttattttagatcatgcatgtttagattttatgttattacatatgaatgtgatatataatttttttaatatggtatataattttttttaataatattatnnnnnnnnnnnntattttttattgtaggtatatatggtttttttgttgtctataatataacatttatataagatgatatttagtttcgattttattatatataaattttttggtatgtatacatattttaatagtagtatatataattttgttagcgtgatatatatatatatatnnatatatatatatatattttgagtagtaatttagtgttgctatgatttctttatgatatataattttattactacgatatattaattttcaatggtacaatatatcaaatattgttctgtatatttaacgatctaatatatttatttatttttgttacaatataataaaatgcaatactaaaaaaattatataacttaatttaactattatatatattttttaaaaaataaaatatagtaaatgtatttagctaattttattttatttggccatttttttaattttttttttaaaaaggagatatttactaacttagttttagggccattttgcatcttagcctatttaaaataggaattgggccttggtatttttttttttgggataagttgaggagtacctcttttttatattcattaatcgaaagtaccctcatattatattttagtaaaaagtacccacttttgtgagtaggttgcctaatatgctttcattctccacttaagtctagcatataatttacatcaacttaaaggtataatagaaacattatctataaaagtgtgtatatcttaaagaatatagaaagaaaggttaaaacaagtaaagtaaagtaagtatacaatgtaattttctctttctttttttttagaaatctagaatagtatacacttttttgtatccaatttacaataatgacgttactactattattggtgtgtcacatcagctaaatcttatgtatctaacgctttatgttattttgttatttttctacgtttttaaaagtaatattttgattacttagttatctttacataaaaaatttcatttatatatcatatttgagatacattttggttacctttaaaatttttatgttacattatggtagattataatttaaaatatatttaggtaactttgaaaattatttttgaaactaatgagttgttatataatatttttaagttaattttgtcattttatttaacaacttatcttttctttcacaaacgctatattttaattctaactctacaaatgtcaattcaatctatttaataattataattaattattaaataaaattattatttaacttatttattattaagaccttacaaagtctcttaattaataaataaactctaaatccttttttcttttcaaatcagccattgcttagtgaaaaattcacaaataacatagtcttatttaaaattctaattgattaattaaaaccaattaattgagactacaaaacaatattatcccagttagtgtggggactatgaccctatataatcaagcttccaataagtagattcaaaatttaccaagtaaatttcttaacttattaattcctccggagtccactatagatttagaactgcactcctgattacatagaacgctctattaccaaaaataggtgcaatttaaattactcattgtttcaatccaaatagtcaaagatcatatatagatgatctacatcgagtagggataaatttaccattctacccttcaat

SEQ ID NO: 172208 - DNA, 780 bp, Cannabis sativa
acttaattacactaacaaaagtataatatcttaggtagggatgtgtataaattgattcaatctaatgacaactgatcaatccaattacagtcgaccaccaaatattaaatatccaattgtgatcggattagattggatgttatcttttaatatctaattagatcggatcaaatgttgggtggggtgtctgaaattcaatacatccaacatccaatcaaactaaataatattttcatttaatttgaatgagtaattaaattttatattattaaacgtaaataaaatatatgtatatataaaaattaaaattaattttttttattggatgaatccaattcaatcaaatagctattagatctaaaattttaaaaggatccgatccgattcaataaatactaaatagataaatccaaattaaaccaataaatacatccagtgaatgaaaccgatcaatgtcaacatctattggatgactaaaattaattggcttgaatagaataataaatctaacatctaatatataattgaatcggatttggataagcttaaaataattagatgtggtccaataaatacacctaaattctcaggatagtaatgccctttggctttttttctttttatgtgaaattctgttaaaatcttctctatttctctcccattcatttacaactaaaataagtatcaatttaaacaattttatttgtagagaagaacataagtctaaaatctcttcattgaatctcactctactcatatatttcaaaattttgaaaatgt

SEQ ID NO: 172209 - DNA, 639 bp, Cannabis sativa
  modified_base (596)..(614): a, c, t, g, unknown or other
aagaatgtcagagccacttatcagtagatgatcaattgaatgtttaagaatcaattggggaggaacatggaggtatatgacgatatgttggttaagtccaaaacctctaaggagtatggccttgatctcaaagaagccttcgtggtaattagaaagtacgggatgaagctaaaccccaaaaagtgcacctttggggtttcctccaagaaattattgggtttcattgttagcacttatggaatcgaagcgaacccagaaaaaatctaggcctttcaaaatctggtcaacttaagttactggtcaaaaaatcaagggtttagggtttcctcccaagaagcacaaatatgttcaaacttttactggtcgaattggcgcagttagcaggttcatttcaaaatctacagttaagtgtattctcttctttaacgtgttgcgaggcaacaaaaagtttgaatggagtaaagagtgtgaagaagcttttcaaaagcttaatgagaatttgactcaagctctaattatatcgaggcccgtggagggagaatatttatacctgtacttacggatgcatatttttgttgaaattattttaccaggannnnnnnnnnnnnnnnnnnatgttgtttaacatcctaatatgaa

SEQ ID NO: 172210 - DNA, 503 bp, Cannabis sativa
ataaatatacccaagcccaaaaatgtaaaagtaagcccaacccgatatgacctagccaccaatccagattgccaatccataaggcactacggacaaaaagaaggaagacgacaaacaacagggaatgagtaaagggaatgccgacggaagtagaagaagaaacaggaaggaatgagatgcggacgaatcaagggctaactacaagtaagatagcataccaggaccagaagaggcacccggatacctttccgacggaggaaatacctgaaaatgctgacggagaaagtaactagagcacactaaaaggggaccgaggtaatacaagttatgaaataaaggcccccgacggatgagaacttggatccccgcagacaaagatcccgtcgggagtaggaagagaactaaagcgtaaaatatgaaattaataaactcaagaatgtgatgccgacggacacaacaccgcagttaggaagagtaaaagctctaaaaaaccactaaaggca

SEQ ID NO: 172211 - DNA, 521 bp, Cannabis sativa
  modified_base (123)..(124): a, c, t, g, unknown or other
tctgttattcctaaccccaaacctttaaagtctcggctgttcacaagttccgactgaccaagacaacccacgaccaagacgacccacaactgagaagacccataacgactcgcgacgacccannagaagcacccaagacaacccacgaccaccacaccacttctagcaaaatccactcgcttattttctgtatttttttttttatttttgacgatgtcacagaacatcgcgaaatcatgaaacatctctaaatgtctcaaattcacaacaacgcttgtttttctgtattttttttttttggtttttgacgatgtcgcgaaacatcgtaaaatcgtgaaaaaatatctcttaatgtctccaattcacaacatcacgaaacacatcgcaaatataatcgctaaatatcacagatcatcactaaacttcatccctgacctcaaatttgttctatcattacaaatacatcgctaaatatcgcaaaaaaaaaaaagtagtaaaccagaagaaaaaaacgcaaaaaa

SEQ ID NO: 172212 - DNA, 619 bp, Cannabis sativa
  modified_base (582)..(591): a, c, t, g, unknown or other
cttcctcatattcatatataatttcattttttaattgcagtaaatattagagtttattcgtgaaaataaattgtgatatataagatgaatgggttatttttacaattgtcaattaattttgtgatagaatttcatttgctttatcttaaattttaacattaaaacttcatattatatgtatatattaaatagatgagatgataaaatatataatatatgaaaattttataatccacatatcctaaatttaaaaataaaagtgatgttcggtaatatttttatttttaaattttttaatcacacaaataaaagtaaaatttttatttttaaaattttgtttttgaaaaacaaaaatgtgttttataaccacttttgttttttaattttaaaaacaaaaacaaaaatgtgttctgtaaattttatttttatgttaatttattaattttatttaagtcgggtccgaggtcgagactgggggtgggtccaagttcaggttcggtttctaaggtctaagttctctttaaaaaaattgaaagtgatttttttttttgtgttttaaaaatttagattcttaattaaaannnnnnnnnntaaaaacagttttataaaacatgatttt

SEQ ID NO: 172213 - DNA, 642 bp, Cannabis sativa
  modified_base (585)..(601): a, c, t, g, unknown or other
gccaaatcaccaagtgacagttatgttttttctgatgaagatcaaattttgtctcctacatccaagcttgatattgtgcacacctcagcccccttcttaacagacagatattacagacctctatttttaaaggagaaagctttaggcaaccgtggcctctatttttaaatgtaaaatctttaaaagacacatgtccatatagtgcaaaatggtccccatcgtccagatgcagcacacacaagcacaatagtttccatgggacccaacgatcagctttgattattacatgtaatttaccccattagtgggctatgagcagaaatcctaggccaatcatgggcatatccatacctgtcacttagcctataaataccctcccatttctatatggatgggggatcacatccaacatagctaaaactctatcaagtttactcttcatctcctccacaagaaacttagagtacagagttagggtttcttgcaaaaataatgtaaacacatcaaaaataccctaagaggctattaacctgactcgtggactaagattaaataatagatattatttcacaaatacacaaaaannnnnnnnnnnnnnnnnaaaatacggttttatggaattttaaatatttttatgttttt

SEQ ID NO: 172214 - DNA, 577 bp, Cannabis sativa
  modified_base (488)..(489): a, c, t, g, unknown or other
tagttaaattcatagttatattagtgtcaaatcgaaacctttacaattgtttttatcttattatattctcaactttattttgttattctcattgttactatactttttaattttccagtatcattccaaatcgattgcatagatagaatttgacattattgttcactgtaattaattattttaattgattttaatctccatgggacgatatcagtcacttgacgactttattatttgtttgatttgtgcacttgccaggaattaaaaaattgttttaattttaaattaatataataaagaaaatataatattttaatttaaagtttacttatttttattatttactaattgttgttgtgaaggtgcacgtgcaaagcttatagtacaactctctcaccttttaatcctgaaattgaaagaatattgaagtcaatcagaagagaactacgagctggataaagaaagtgttgagctttgtgccctaaatnnaactctatttcaatgtaatcttttctattcaaatatcaataaagaaacatatttaatttcattgcttgtttaatgtgttatttggttc

SEQ ID NO: 172215 - DNA, 1103 bp, Cannabis sativa
tcaagaacttatcgataacccgtcgagaaagatcttccctgaccttgagacattcacattgagaacccatcgagaacgtatcgagaaactgtcgagaaaaatacgaacacacagaatactccaaaaaatgagatctcgcgatttaaagaaaattatattaaaaatagaagggtaaaatgggaaattcatgtaatgaaaggaattaattggtacaaattagtaaggggagtcaaaattgatatgaggtgttttattaatcataaaaagtgaaattttccttctaaaatcctaagcttctatttatagaagggtaaaaggactaatgtgtaattaaacttattacaaattgcatgttggttgcatgtagacacgtggcgagatgagagaatgccacgtggcctgaagggactcggactaagagaagagccacttgcgtggctggcgagtggagcaaacaaaagtcccaggaggggccgtgcgtgccactcgtgcgtgaggcgtgtgaggggacaaagggagctgctactcctgttttccttctggcgagcgaaccacaacccgccatgtggtgagcctgtctcttggtgaagagaaagtgggccggctgggctgcgggctgggctcctttgttgggctgaattgcattccaaaatgccatttttctatactttggaccacatttttaccatttttctttttcttttcttttcttttcacaaattgttattttcttaatcaaacacaaaaaaaaacaaaaaaaaaatctaaataaaatattttaaatataaaaatatataactttaattttatgaaaatattatttaaaatttaattaactttgtatttttatactatgaaatatgtaatattttggcatttaacacaaccccaactagcttattgctagtccctagcaattcaagcggataacaaaatattaccaagatgaacaaatcaaaacaaattctgcctaatcggaacaaaataaaatattggtgtaaactcaagaaaatactacataaaaatttacaatagatataattccagattttttgtgtgtgtgtgtgcttcaactcattttatttgctttaatccataacaca

SEQ ID NO: 172216 - DNA, 544 bp, Cannabis sativa
aagacttaaatatgacaataaaaaatataagtagagaaaaaaacatgaaaaataatctttaaatcattacaaatgcaaaaggactataggaatagctatatatattatatggtggacagtaagtccatacatccaaagcaacatttgagggtatatatatgagatgcgatgaaagaggagcaataccaatgaatagaatcacaacaaggcatatcctttcatacatttatcattacttttattatatactttatttttaatttatatagatacttgtagattgatgtatttgactgccaaccaaacctagatgtcattttgtcaagtaccaactgtcaaagcattcaacaaactattcacatggcgattcacccaattatgatttatcacattcccatgcaaacattgcagtaaagttctttttaattattaatagcatcaagcccaaatacagaggagatccctggccactagactagtgtcttgtaaagtaaatgccaacttagctaaacagggggccatggtatgacattcctatagcagt

SEQ ID NO: 172217 - DNA, 934 bp, Cannabis sativa
  modified_base (884)..(884): a, c, t, g, unknown or other
ttttttctagtctaatatttctcagtcttgtatatcactaaatttatcaaatgtatatttagttgtttttcatgagaaatgaaaatacatacatatacactgaaatttgttttgtataattacaccccactttgtgtaccaaaagaatatcttttgaatacaccccaaaactttaatttaccattgaaaaaaataagagaaaactagaagtcattaatggcttgtacacattgattgtccaagtaaatctaataaaataaataataataaaaaattaaaatcattgatttgtgaaaagaattaaatggtatgttaagaaaaatctacaagttttagaattgttttgaggaaaaaaaataaagtaactgaatatttttaagtttttttctagtctaatatttctcaatcttgtatatcactaaatttattaaatgtatatttagttgtttttcatgagaaatgaaaacacatacatatacacataaatttgttttgtatcgaatgattcctctattgatgaatctaaaaaataaatctctgtgatttctattaataatttttggagtgaaaaatattgtttttaaatttataattatatagaaatttaaattgtgtagtgtttataagaaaaaatagtggagtgtacttattaaaaattaaattaataaactaaataaagatgtaatgatatctattttagtcattttataaaagggtaaatgtgtaattatatttttgggtgcttatacaattgagaaattttatttacactcctaaaatttctaaaggcaccttattttgataatttttattttatataaaattattatttttaattgtactaagtttatttaactttttttttccaattcatattcttaaanaatatacctatcaaacaaaaataaactataatttaaatattatgacaaaa

SEQ ID NO: 172218 - DNA, 840 bp, Cannabis sativa
atacaaacctataatatacaaaaagaaaaaacaaatacaataatataaaacttatggtatacaatatcaaaacacacattcaaacaaacatcaataaaattgtaaaaagattgaaaaaaaagccctaaattataaaacattaaaatcacatttaaacaaactgcaataaaatcctaaaaaataaataaataaataaccattatgtatacagaaacaaaatcacattcaacaaacgaagcaataaaatcctaaaataaatacaaatacaaaaagattctctaacaaaatattatccaaacaacaaacttaaaaaatgaaaatatatcctaatcacatgaaaaatacacatatataacaatcatataatatacaaacacattttttaaaaataaaaaataaaaaaaatctaaagtatgtagtatcaaaaactaaaaaatttacaaaaatcacatgatacaaactagcatgcatattaatgataaacaaaagtatattaaccaccaaataatgatcaataaactaaatcagatgaaaaaaaattataaaatagagtataaattaaacaaaagtacaaccctataataaaaaaaaaaaaaaaaaaactaaggcatacaatataaaaaagacattcaaacaaacatcaataaagtcttaaaaaagaaaaaaaaaagtcttaaattatatagtatcaaaatcacatttgaacaaactgtaataaaatctttaaaatattaaaaaaaaaaactattaagtatataaaaacagaatcacattcaacaataaacgaagtaataaaattttaaaacaaatataaatacaaaaatatactctaacaaaaaa

SEQ ID NO: 172219 - DNA, 857 bp, Cannabis sativa
agagagagagagagaggagagaattagagtttcagacttggagctttatgacataaatgaaacttatgtggaatacaaccttgtcaatagcaagacaaagtctccttataaggtatggtaaaaccgtcaagcagcaagtgaaaggagtgaagcaagtcgtcaagtagttgtaccaacatgtctggccagccaaggggagtttataggctagcaaggaagagcttgtatggccggccaggatctaggcacatgctggctgcccaaaaggtaactttcaaaccaagggagcttccgttcgaccaagagaacttgacctctgcaaggaaaaggtgtacaaagctgacttctcctcaccaaaagttggcctccatatctaaaggctagcctcctcttggtaaagctgacagaaacatgacctaccagaccctggcaagaacataatctgctagaccctaacaagaacaggacctgccagatcctagttagagcatggccggccagacctcatcttgtaggtgtatggtcggccagcttctccctagcaggaattgatgcgcaaccttcatccatggacagcaagccaagctacgttttggccttgacagtccactaagatgctataaaaatatatactttcaaggggtaatttggccatttgtatttattaatttaatgcatgaatatctattattttatctgctaattagggtttatgctctcctatataaagagccttaactcaaccctaaaagcctaagtcagtctaactctaatttaggccataaagctctaagtctggaaccctaatcttcctctctctctctctctctctcgctcttctctctctctctctctct

SEQ ID NO: 172220 - DNA, 1713 bp, Cannabis sativa
ggcaaagatcggacgccttctaggcctaaatcgctgggctaggtccccaatactggggctcccgacgccagcacaatgggctccggtaagtttcccttaacggttcatcattttccttctgtccaagaatattctcggtgtaggcctataaaattcgacgagcgtcttcttaaatttaggatgcccccgactcggtggggggatcatgccaagaccttttatttttcccacttaggtcattttttaggccggtcctggatgggtttcaaacctcctacacccatccctctggatcactcagcttatctgtcttccagctggtttctcccatcggacaactttcttggggatgacgaagccagtattgtagttcaagactttgctagggctgagttagatagtcagggtaggactagttttaccgttttgttttcatgtgcatactttcttatggtcattctgacactttgtttatttctttttgaagcagccaggccaatggaagacctcttggcaactcttgccgaaacctacagcccggacccttcccttccttcggcacccgcccaaatagtgaccccgaagaggtcatcttccagtgtccccttaggcacaatcgtcttgatcgacgaggacggggaggtcgaggaggaggaggaaggcgagattgtggccccgctagaccggaagtgcaaggtcaagatggtggaggctgagtcttctaaaaagcctaggaggaaggacactccaaccgtcagctcggactcggggatcccgcctgaggcagaggaatacactgtacctctcggcatcatcctcactccggtccctgccgatgaggagaggcagcagcttcgagttgccaaacataaatacgccatggatgagtacaccaggggaaatcccaaggtggaagccctgaaaaaggtgttacaggaggctcgacaaaattccttgcgcgaggaggccttcaggaacgcctgtgatctgaacatggatcctttgactgactggttcaaccgcttcgtcggccctgcccttgctcccttggcctccgaactgactagccaatttgtttccaacttgacccaactcccggccaaaagatacgcagcctgcgcttccacaaattccatctatcaagttcaggatattagcgttgccatgaccgcggtaagtctttattgatggttttttcttttcgtttgtgctccaccctgtggcatctgatctctcacacttaactcattttccttaccagatcgctggagagactggtcacctctcaaaaactttaatagatcatgggtacgttatgtccgagttcgggggcatggacgaggccatgaagagtttgagagacctggcggctgagaggaaagcattccgggaggaagctcaacagagggaggcacaggcgaagaggaggcattaggaggcgttacaggccaaggcggaggagctgaagacccgggacgtggtcgtggccaaggcaaggcgcgagctgagggaggccaaggaggcggtcgaggatctgactgctaggctgaagtctatggaggagatgcatcaggcgggttcacaaacgatgaccaatttgaccgttgaggtgaaagagctcagggattttaaagactggacctagaagaaggctaaaagagatgagctcttagcccctgttgtctgcaatcattgcactaagcgctttgatga

SEQ ID NO: 172221 - DNA, 1122 bp, Cannabis sativa
gtaaaaagttaaattacaattttaaaacacagaaaataaattataatttaaatattaataaaataaaattatacatgtaatttaatatttaataaagtgatattataaatttaataataagtgacttttaatttaaataacaaatgaaataaatctataatttaatattaatgtgtaatttaaaattaaataaagtgatattataaattttaaaaaataattaattctcaatttaaattataaatgatataaaaattaaattgtaagttgatttcaatatgtaatttaaaatttaataaagcgattataaatttttaaaatatataagtttttagtttaaataatgaatgaaatgaaataataaatgaactgtaatatgtaatatgtcatttaaactagcataagatattaaaaatgagcataaaatatgataaaatagcataagatattgtaaaatagcataaattgagatttttatattaccttgatctctttggttataaaccaatgataagatagaataattgtatttgtattatcacaaagtgataattttttttatttactttttatacatgcacgaaataccttaggcccgtttggggaggttgagtcaggaaggactcttaaatatgcttctctaaattatccaggatttttttgtccacatggatagtttgggtttgtttatacttatagtatgatgtattgcttatttgattttttcattagtagatattttggtatgttgtctccttacgtgttcttgtaagttgacaaacttactataaggttgcatacttatgagaattgtgcagagaaactgccaaaatttttactaataaatttttttattttttatttaaaaattaatataaaatttttacaatcattttaaaattaaaaaaaatattaatattcatttagatatataaaaataaaattaaacataattattaagggaatatactcatttagtaccttgtgtttttatgaaaaacatatttggtaccctatgttttcaattatacttgattggtacttcatatttttaaattgtacatatttggtaccttaaaataaaatttaatcaatacaattttattaatttaaccaaacaat

SEQ ID NO: 172222 - DNA, 528 bp, Cannabis sativa
ttcttccaccaaaggagcacatactctttttggaagcttatgatttttcacacgtttcaaaccaagatccttattgtccataagaagcttcaatttctcaagtgtcttctctatctcaggttttatgttcttatcaaaagaagttaaaggagttgatgagatgaatctcatgagtgcctgaatattggtagagaaagagtgagcaattgtattatattctgatatattgaaaaagactcctacaataatcactctaataattcaagtaaatagagtaaaatattctctaactaatctaatgacaaagctaatcataataaataattagagaaatcaaattcattgatttatcagtaccttactagtacaacggcagctgctatgagattcatgaggaccaccaccttctagttccagttcatttcgccatgcttcagtgtcgatcttgtaaaccaagtcgtctgcatcatagatggtgtccttgagatcatcaagccacttccggactcttgggtctttgatgagctt

SEQ ID NO: 172223 - DNA, 972 bp, Cannabis sativa
tttatttagaagtaggcaacatacctgtttattttaggatttttttctattataactttattagatctgaaaattacttttttttattgttaggtgaaaaataaacaaaattaaataataattttttttaaaaaaaaatatgatcttttcaaaaaaatttaaaatggcttcttcttcaccttaaaataagtacgctgcttcataatcggtgaaacttctctaaacaattctagatctaaaatcaacaacataatcagcgatatagaagcttttgtcggtcatctatcactggcgaaaagcttttttcaatctccataaatactgatgagaagctttgctttaatattcagctatgacagcaacgactaaggaaaagaaatctccatgaaagtcgatgaatgaagatcaactattaaggagagatctctttcaatgcttatttgcccaaaaaatctagttttatatatacataaatatgatgttgtttagtatttgatttaattattttcttaatgaggttattattatttggttgcttcacatatctcactagttttgttcatatattattattattttctagtacttttggaaaatgtagaatgaaaaccagtacactgaattttttgggtagtataatgagaattagtggtgttcaacaaaatttacaaaccgcccaacccgaataaactgcccaaaccaaactgaataaactaacaaaaaatacaacccaaaataatacaatgaaaattcaaaccgtccaataaatatattgggtggtttacaaattattcaaaaccattcaattaacccgaataaatcgaattaaaccgattaatatattttttaataaaagtgtatataatatattacgtaaattatattaattagtcaaactattttgtatttaaagtttggacattttagtgtttaacttaaaatctagactttatagttaataatttttattgt

SEQ ID NO: 172224 - DNA, 611 bp, Cannabis sativa
ttttcagattatttatggttattcatttacaagtttctccaacggatattttgcaacaaagctatacggtaattttttatcttgatttctaaaactatctttacatgcatatgtatttagattcagttttagttcattatgcatcttatatatatcttatgttgattttttattttcatcatatttcgctctttgtattaattttttctctttgttcacgtctcctaaatatgtatgggtgttatttttaatatttcattcgtttattttgttgtttgtaactctatttgtacgtgtatgcatatatattctattattattgatgaccttcaattagtttaattcttacatattcttatcttctaagaatattttatttgatttttatatgatgaagagtgtatattcttttaatcgcttgaagtagatattttgttggttgctgttttttttttttcttaagtaaatatatgacatttttcatcatagttttgaatttatatattaataataaaaaatactttattattgtgtgatttgagacatggagaaaaatatttacaatatttaggaaataaggtgaggtatatataaatatatatgttgaaata

SEQ ID NO: 172225 - DNA, 599 bp, Cannabis sativa
aaaaaaaaaaaaaaaaattagcacgcaattattataattgtatgtttataaattaagaatgttcattgaatcacattcattagattttgacccaagtgatctaatctcattatatattagatattgaattttatcatctgatccgacgatcaaatccaattatttattagatattaaattttatcatctgatcaaatccaattgaattgagtcattcgatttgatctgatctgatggatgtattagattggatcagttccaaccattggatgtattaaataattttctttaatctcatgtgtgcatgtgcacaataagattaaaattaattaatatatttctggaaagtttatgactaaatgtgcatgttatcccaatttttacactctgacgtggcactgcataatggtgacacgtggaatcaacttggagtatctgctcggagggtacaatccgaacaggatgcctcgctggcatacccaaagcaaaggaatcagcaatccgcgcagaacaaccaacacttagcgaattcagcttttgcatcgtgagtcatcaacgaaatccctataacttggggatcagattacagggatatggca

SEQ ID NO: 172226 - DNA, 703 bp, Cannabis sativa
  modified_base (125)..(126): a, c, t, g, unknown or other
atggcctttacattggaagaggaagatctgataagagagaattcacgaataaatttagaggtaatagccaatccaagaccaagtcaaaatttaagagtgaaaagttctgttactactgcaagaannaaggacactttcgagatgaatgtagggcattaaaggccaagaatgctagaggtaaaagcaaagagagaggtgaaactaatgttgcagaagatggatatgaatcagcagatgtattggtggtgtctagcaaggaatctggtaaagaatggatattagattctgggtgctcatttcacatgacacctcacaaagatctgttctgtgaatttagggatatacaaggtggaaatgttcttttaggaaacaacaaagcttgtcagatcaaaggaattagatctgtgttgttcaccatgcatgatggcatcaaaaggacagtcaagaatgttaggtatgtccctgaactcaagagaaatttactgtctattggagaactagctgctagtggatgttctattaatatcgatgagtctcttagagtggtaaaaggctcactggttgttatgaaaggtgatatcagaaatggtatctatgttctcaatggaaatgcagtgttggggacagcaaatgctgctgtaaatgacagtactgtggacagaactaggatgtggcacttgagattagtgttgggttttatgcc

SEQ ID NO: 172227 - DNA, 681 bp, Cannabis sativa
ttaagtgtttgacattttatactacgttggtattatgtataatgcaagtataattagattttttttttttaaaaaaattaagtgatgctaagtgtaatatatatatgtatgtttaattttttttaattaagtaatgtattttttaaaaaattttaaaatgaggtttgaattttaatctttgagaattttttttagctagctacattagtgtgttgtttagatgtgattatatatgtacattaataaaactcaagtgagatatcatggtgaatcgttgtgtgtccaattcgagcagaattgtatcttattttaattcaaagttaaaccaacaaagttaaaaatgtggtacgattaaaactatttacaatatttgaagtattttaaatttaaattaaatttttcttacatataaaatatctacgtaatttttatttttaaatatatgtaataatattataaaattaataatgaatattatgttaagtaatagtatattctgttaaaattaacataaaaaatctaataatactgttaaaaaagaatttcgttacaaagttacatacactactacaaaaaacccttttagaggcgatttttaagccctttcagcgtcggttttcgcaaaattcgctgccgatactgatcagggcgacgctgaagggtccatatgaaccgacgcca

SEQ ID NO: 172228 - DNA, 640 bp, Cannabis sativa
cctgtaaggactcaccaacttcctatttcatcttagccaacgttgtgtaaggcagtttgtacgtcatcatggcttggaagtgcgtcaagaatagatctacgaaagtctcccaagttgatatagatgccttaggtaattggctgaaccaatcatgggcgttatcctccaaggttgccacaaggatgcgacatttcgctagttggggtacttggtctacttccataatggtattaaatttttctaaataatccatgggattagtagtacctttatattttagcgattcagataatctgaaccttttagggagtcgatctttttgtacttctttagtgaaaggagatgtcccgtgcagtttataaatgggctttctctgcttctcgattattttcaatgcttgtagcaaaatgctctgatcaacaccccctggcatgacggtgttggtttgagtaatcgctggtgcggtagcaatcacagctatatttgttgggatcactacctcagtagtcacagctggtgtgttgggcgggttgacaacgttagttaggttatttccattgtttatgtcttgatcgcccacctggggatcacgtgttggcttttatgccctaaataaaatctatttcaatataattagatt

SEQ ID NO: 172229 - DNA, 800 bp, Cannabis sativa
  modified_base (244)..(255): a, c, t, g, unknown or other
  modified_base (385)..(390): a, c, t, g, unknown or other
  modified_base (601)..(605): a, c, t, g, unknown or other
agtaagaataagatcttggagatttcccaaacggaagagggatcattttctcttaagtatttaggagttaatataagacctactaagtggaaggtctcgaattgttgtactattttagataaatttaactagaagcttattggttcggctagcaaaaatctttcttttgctggtcatgccctttggggatattttaccaggatctagttttactaacaaatatgttgaattaacatcctaaatnnnnnnnnnnnnaaataatgaaataaacacataaggttttaagaaaaccttacattaattgcagcggaatataatgactccttccattcaagatccctagtccttgattcctttctataacagagcattatcaagatctgannnnnnatctctttctctccttcgggtttggtgaccaccgtcttactcactatgattgagtacttgacttgatatgtgtgggcacggtactcatcactatgggttcgaatggtgaagaacacattaaggaggctgaaatcactaagggaagtaactctctcatctaggttggttgaatagtcatgttgacattagttggatgagtgagagtatcatnnnnnttttatagtgtttcaactagggattaaggctggattatatggattaaaaaagaataaaatattgggcaaaaatacacatcatggccatacactataagaccaatttctagttagatttttgccactttatttcaaccacttattcttcttttcaataataccatattttctaatgcaatcctataaatgccaaaa

SEQ ID NO: 172230 - DNA, 513 bp, Cannabis sativa
attttgttcttctttgttgtcaatgattcatctctttcatataaatttgtcggtgaaaaggtatatgttgattgacaataattttgtttcgtaatataattcgggttaattgcattactatgctctggtttaattcaatttcacaagatttagactattaaaaagttctcaaatgtggaagttgattggttgatatgttagctttaatgaagcttatttgacaatgctaactctcgagtttcatgttgataatatttttatgctacatgaagcacgtctttcattttgggtaagggtgtctatttattttgtgtttataaaacttgtgcaaaaatcagctgctgtattaaagatgagcaacccaagaaggttttggaagagaacttgcgaaatagatttcgctcactaacagcggaaaggatgatgccaaggaggctgcttttgcagtttatggggttcagccctctactagccatagcacaacccgattttgcagcaacaggaccaatgccg

SEQ ID NO: 172231 - DNA, 634 bp, Cannabis sativa
aagaaaacaatcaaatctcttgaattattgttaggctgatttggataaagtattgttactggtttttaagaaatgcttataagcactagtagtgcttagcactttccaaaatgtactattattatttgtataattaagtaatgagtcccaaatcaataatcaagcgatgctagacatccatggtgcctaacatcaatattgctcatgatttttggtcatcttatcatgtaataatacataataataataataaataatcataattatttattaaaggtaaatagtagggtacaaatatttaaagttttaaatttgaaagtactaatataaatttaatgtttatttttaacgacataagtacttaatgttaatttgtagaattgtaatttttttttttaatttcgtcagtccaaactttgttattatcttaaacatgacatatataagactcatattttagatcattaggtctagacaaaaacatgtaatatcagttacttccaaatattcttttaataaattgatcaaaaaagagtttttactgatgatgaaactgaaaaaaaattacaattttacaaacattataactactcatgccattaattacaagcataaaactttgaatacagatacc

SEQ ID NO: 172232 - DNA, 764 bp, Cannabis sativa
aaatcaatgattaaaattgatgacatgtagtcatgtattgagtttgatttaagggcgtgttgaagcattgcttattacaaatgattggctcacactcattttatacactcaactcaatgatatgttgtacaataatcaatatccatatatacacatcaaaataataaaatggggtctcactttattaattaatttttacaactaaaacagtgacaaagtataatattcatttaaatatgaaaaatggttaggggtattttatggtattatgtgatatattattattgatgcaaattaatatcgagtacttacacatattttgatttaataaataatataagaaactactaatcactcatataacacgcaatatcaacagggccgaccctgaaaaatatataggcccgagacgaattaaatttttcctaaggaaacttccaggaggtcacccatcctaaaattaccctaggtcatgactgtggagttctttcgtgatgggctaccaggaaaacaagatataccttgttaatatggtagtaccaatcaatccatttaagctttcttcaattgtgtagtcccataccttagaatcatcacacttgaccttgcccaggcgatgtgggattgcacaacttacccggtatttccccttacggatcacgggactactgacaactgtcataaaacccatgaccttggacattatgccatccctcaactaactaagctatgaatatttgttgcttataatacacttaaatttt

SEQ ID NO: 172233 - DNA, 599 bp, Cannabis sativa
taattaaacatgtttactcatcatgattatatttataaatatatctctcttattaaaagtggtgacaaaataagaagttttattttttaaaaaaatattataatttaaattttaactcatatataacataaattattttctttttcacattacatttcaaatttaaatttattgtacatacttaaaatattttttttattatcattttttaagagtttttacaccacataaatttttaatttttttttacttttttattgtggagcgaaatttttttaaatatactgtgtgagtttcatactgtgtactgtgttaagtttttacggttgttctatggttgttttttagttgatctattgttgttttaattattttattttgttattttacgctttgttttataaaaaaattgtatttttgtaaaaaaattagtgtgacagtaaaattgtaaactcttcctcaaaatctaatatttttataaaaatatttttttgggtaattcacatatctaaaaaatatatctttctattattatttttgttgcccctgattttgccaatatacgtggaccaaccagacaaggacacgtggacacaaag

SEQ ID NO: 172234 - DNA, 1072 bp, Cannabis sativa
attatttaaataataaaaaaattagtaccttatataatatagattttaaaaaatgaaattttcatttaggcaaatcaataaataagcagaattattgacgtaaattttcgtcaacagatctaagaaaattataaaagtaaaaaggattatgataaattaatttgattaaataaaatcacaataaataaaatggaaactaggatttcaaggtagttcacccttcatgttgcgatggtaatagggttacttttacttttatttttattaattagattcaacacactagagttatattctcaagagtgtcaagacaataatacaacaatagatttctaggtaaaatttgtatcgagacttataacacaagactcaagggagactcaatgttcacaaatctaataaagatggcagttgtaaggttcttgaaataataaaccaataaaagtaagtaaagggaatggtccctattcttgaaagttgtgtatgtaaatggtgtttgagttgtagagacttggtgtcaacataatatggaggacttagacaaaagatgaaggaagagatatggtgttcttagcagtccagcaagcaagcaagtaatccccttatctttatctattactctctttataaaggccttagggtttgttaataatcccccgcatgtcggggtgttccattaacaaatctcgtatttcctcctcaataatgaataaacaattacaaataaatataaatctctttatttttaggccaaaatcccacaaacattgagaaaatggttatttttacgactaaagatgtacaaatttgaaatggagtgacaaggaatgtcacctctcggtttggaattcatgacattagtgagaagtgttggaaacatgtattttgggggtgtcattgttcacacataatgccacatgggctatggcattgttcaccaacctcacacacttaattacactactcaatttttgagtaaagtgtactagcttgtcttgtgagccaattttggactcgataactttagaattgagctatgactatgagccacactacaaaaatttttactttt

SEQ ID NO: 172235 - DNA, 663 bp, Cannabis sativa
tttttgaattacggggccattttagccaaatttaatgcaaaaccaatcttcatattcacgccttagcagaaggaattcaatgtgactagtgccaaaaaaattaattcgagatgggtctgggccacattttacaaaggggtaccactatcaaaaatgtgagatttttactattttgattaaaatgactgttagtgcatgaaaactactttttctctcaaggcgtcaaatagaaaagtgatgcacaacagttggctttgtccctgtgaaatttcacgatttttgaagatgtatagggtgagattttaacagaacactaacgagtgtaagagtaaggaaaaaacttattaaaatttaccctaaaaagaagaatattttaaatttttgaattaggggccattttaataaaatttaatgcaaaaccaatcttcatattcacgtcttagtagcacgaattcaatgtgactagtggccaaaaatattccaagatgcgccccggcaatattttacaaaggggtaccaatatcagaaatgtaagattttcactgttttgatttaaatgattgttattgcatacaaaatactttttctttcaacgtgtccaatagaaaagtgatgcacaacggtcttgtcttcatccccgtaaaatttcacgatttttagaga

SEQ ID NO: 172236 - DNA, 701 bp, Cannabis sativa
cctgacgaatttagttgttacccgcctgtgcgtcttacaagcgagaccactgagggggctagtagcaacaccagtataagtggcttgacgtaataggcgcttagagccttgagcacatcagggcaggggcaataatcccccttcgtgattatttcaaggacttcgtaaaccacctcgggcttgccccgttccaactgaatcccgtctcttacagaatccttgcaagtttgagggttttgtacaaaattctgaattgggagtgccccactcctctggaaatagagtatttttactcaattaaagtcgttccagcgaggaagaatgctgcaggaggcttttactatctcggcactcactccggcgagcacaaaatgatcgtggatttaccaaaaaaacttccttcaaggacgacttattttggacgatcggcctttccccgattggcacaatcactttcggtattatttgtaagtgattgttggcattagacttaattaaattaatccatgttttttattctaagttatctaactgaaattaacttttgttttcgacagctgtctcaaaaagacctactcccactcctgaaatggccgagcggcataggctcttgttgactcttccctacgaacttaggtcatgcgaattctttctaaatgaggtccatctgaggtctgtggacctcctaagatcggaagagc

SEQ ID NO: 172237 - DNA, 571 bp, Cannabis sativa
  modified_base (497)..(510): a, c, t, g, unknown or other
ctcggaaggtggtttgatccatctaacaactgactgattctcaggaagaataccaagatgagtgttacaactatttggctaaagagaactactttaagaaatccatactctaattaaacagaaggtcatcatgtacacaaactttttcatttacccatttattttgtcaataccaaattctccaaagacacacaatgaattttttaaacatggtaatagacatagtatcatgataataataaaagaactcatagatgtcccaactatgaaaaataagtacctaaagatggagggtaatgacctcacagatagaagagagcttatcatagccccaaagagcatgcaaggaagtctcaggacccataaagcaaaaggggcaggagttaacagcaggaacaccatagctttggtcaaagtactctggaagaacagtaaggtgaaataagctacctgggagctaaagtccggtatgaggactcaatatccagagttattcnnnnnnnnnnnnnnggacgaaatccttttaacggggagtaattgtaatgatcacatgttagattatggattagta

SEQ ID NO: 172238 - DNA, 783 bp, Cannabis sativa
tagagagagtataaagagagagagagtcgcaaaagagagttagagagagagagagagagagagattatgttttctcaatcgtatttttcaattctaaaaacttgttctttgtttcgttgctttttactcttatatatatcattgtgtacattttggtttataatatatatatatcatatatatacacattaataattaaaattattttaatcctataaaataaaaaaatactattataatttaatttaaaattcaaaatccaaattcatatctttttattttatattaatttttaatttaaatatattatcctataatatacttaattcaaataattaaaatataattagtaatattttattttgatttatcttatttaataaaataatcaaaataaattaattggttttttatatgtcaccctacaaatgtggggctaagccctacacgcgtaagccatattttaaagcctaaaattgatttctcaattttgtcataaattagatttattaattattttgcaaaaaataataattgattaattctgattaatctcttattttactaagattaaaataaatattattttacacttaaataatatatttctctcttttaatattatttaataataatattatatttaattagttaatataattttatcaaataaaactaaatagttaaatatcattttaattattcaattcataattgatataattattcaaaataataatttataaaaaataacaattttgcccataagaattatttcttata

SEQ ID NO: 172239 - DNA, 811 bp, Cannabis sativa
taaattagtgtgggctaatcactgagtgaatgggcctactagtgttattttttttgtaagttgaaatatacctttttttttaatcagttaactaaaaatagccttattttaaattcaattgaaatgtaccctcttttataagtccatcaccgattataccttacataaaggtactgttcagggaggtgaggaagatttttttcattacataagggtataatcgagttataacaaataaaagagggtataaatgaaatatataaaaaagaaagggtaaaaataaaatagattaacaaaaaagtatagggttcaattttgataatgttttcttacacaatcgaccaaaattcaaaacaaggtttcaaattgaaacaaatttcgaatctatatattcagcaaagaaaaagtttgaaattgaaatcagtaaatatttaaactaacatctattcttttaagaaataatactatgttactaggtataatattttagttcacaaatcatttctcttttgaaatgagtaatatcacatacatatatattatgaaaagcatagctgggattgaaggcttgggctccatttgtcttgcgacggagatcaacccctttgaagatcgataacgtggtttgtgtgatagttagtagtcctgttatccgtaaggagaaatattgggtaagttgtgcaatcccacatcgcttgggaaatatcaagtgtggtgattctaagactatgtaggtatgggactacacaattgaagagggcttaaatgaattgattgatattacctatatcaacaagatgcatcttgtttt

SEQ ID NO: 172240 - DNA, 734 bp, Cannabis sativa
tttccctttctctatttgtgaaactaccgtcgagaaaggagtgagttggcaaaatagcctttatgaaaatttttattaataaaatgacttttcaaatattttaattagaaaaataattttcttttaaaattgacataataattaatataataaatacaattaatattaatttttctttatcattttaaaaaaaatagatttggttggactcccatgacctctcttcatcttcaattgagttcttcattaccatttgagtttttatcttcatcttcataccactagttgagtatttcttcttcaatggtattcattcacatttgacctaaaaaattcaagaaacccttaaagaagaagtgaaaattcaatccaacaattgtagatgttagtaactgactatactctcaagtttaatgattgagtatttattattttgcagttatatagcaatataaagcataaatttaggttattctaaaaaaattagtgtgaaaataaccccagtttgaggttgaagatgacctgtgatatgcgaccatgtgcgaccaattggccgcctttggtcgcatatggtcgtttagtgaaaacaaaaaaaaaaaaatactacgcgaccatgcgtgaccatgtaggtcgcacatggtcgctcagtgtaactataaaactataatatgtgaccatgtaggtcgtacatggtcgctcagtgtaactaaaaaattatattatgcgaccatgta

SEQ ID NO: 172241 - DNA, 1047 bp, Cannabis sativa
gctagagcttccgcctatcctcctacttagagcatcgagcatctgcggagacatgtctgcatagaataaaaaaagtgtggttagaaaacagccatcagaaaacacaaggcatgaaagtcaagaagctcaaaagtaaagaaaaatgcaaggtgaccgcccgcacagagaatcagaagtccatcatcacctgacatcgattttattttagacatgacagccttcccttttccagcaaaggggggagatggctgaacaggtgaagtgggctcccttatgcgaattgcatgttcaacaggcctaggcgtggccgggagtttcttcttcctctttaatggggtcacctgctcagcctcagcctcatcctcaggatccaaaggctcatgagcgtactgcttggccctgaaacctcccttcaacttagcctctcgcttaagttgaagaagctcatcctcctgatgagctcgttcaggctggccagcaccggactttctcttcttccccgccacggacttaggagaaaagtcctcagggtaaagcccatactttacctgattatcatcggaggtcaaatggatgatattcctatcttcctctggcaaccgggcaagtttttgagctctatccctaagagcaagcgtgaggggaggacggtgatatgtcgaaatctgctgaaacagagtccgggtgatactcggatccttcaccatgaagtactcataaacaaaatgccctattttgctgatggccttgtcatccatgccgctgaaccacttgaagccttgttgagagaagtagtagtaccctgacctgccttgcttgggggtagacttcaggtcgaagaaccaggcgacctcatgaggggaaggagaatcccatctttgggaagtgtagaggacgaagagagcggacaaatacttaatgccctttggagtaatttgggtccggcagaggccaaagaagtctaccacatccctgaagtacttgtgcaagggcatcagcgccccttgctggccgtgagcccctgaccaggcgcacattcccttatca

SEQ ID NO: 172242 - DNA, 500 bp, Cannabis sativa
  modified_base (154)..(159): a, c, t, g, unknown or other
tcaatcgtgtctgaacggagtgggtaccgtgtctttagacacggattttcctaatccgcacgcgcatcactttgtttgtccgagttcctggtgaattgagcaccataatcgacaccaattctacccaatttcaaaaaattcataactttttcannnnnnatcggaatcgagttccgtaaaaactgaaattgcttaatttttcacaatgaatccaaataaaatattttcagaaacaaaaaaaaatatttttcgtggaaaaaattcgtacaacacatacattcatcaaataagcacataaactaaaatcaaaccatccaaatcagcacaaatcatcgttttaattcatattatgaaagtaaatcattaccatggctgtgaggccagttgttcgcaatattttgcgaggatctagaacatcctaatatgaattctaaaacaatgaaataaacacataagtgtttaagaaaaccttacattgggtgcaccagaatataatgact

SEQ ID NO: 172243 - DNA, 548 bp, Cannabis sativa
acgattttcccaatctaaataaattaagcatcttttaagatttggctcagcatgttctatttgatgagtaagagaagagtttgactcggtattcttaaaaaaatagaaaaattcaaaaccaagccaagatgatacgaaatattttttgtccatctttcattttttgttaatcaacgtttttttgtactctttataataataacttttctgtcttggtttgacactcattttttaccatcacaatattttttagaaatttctctcaattattcctatacagtggccaccgacaatattttttttcgatattttttaatatttcgagaaaataaaatataactaagaatttttttcatcttgaaattcaaatctatttattatttaataaatataatttgcaaaaaaggctcacactccatgttttgagaaaaatttaccttccgaaaagagaaaaaaatgagatctttgtctaaagaaataccttgagaaaggacagatatatagaatctttcaacaagatagtactttttcaactctctcaaaatgga

SEQ ID NO: 172244 - DNA, 650 bp, Cannabis sativa
cacacacttgactgtatccccaccgtggttactgatgatcacaatgcctctctccttgctcctttcaccatggctgaggttgaatgtgcccttaaaactatgagtgcggacaagagtctggaattgatggaatgacggttatgttctatcaacaacagtaatctattgttggcaaacttgtctctcgtattgtcctaagcatcctaaacaatggcgttgatccttcaagcattaaccacaccttaataaccctcattccaaagataaagaagtcgcaccatatgaaagactttcagcctattagcctttgcaacgtcatctcaaaattggtcactaaaatgactgttgcaaggttcaaagctgtacttccgctggtaatttctgaaacgtagagtgctttcttggctaatagattgatcacagacaacatcttagtggctattgagttggttcatgctataaaaaacaaaacatctggacgccatggcattacttctctcaagcttgacatgagcaaagcttttgatacggttgagtggaaattcattgaagaggtactgaaaagaaatgggttttgcaagtggttgggttggacttattgttgggttttatgccctaaataaaactatttacaatctgattagttatca

SEQ ID NO: 172245 - DNA, 595 bp, Cannabis sativa
actttgtgaaggaagttcgaacctatttaatcttgattgtgttctttaaattctgttattatatttttctgaaattcattaattcatttctggtgtgttgattaatgtttgtttgctggctgaggttgttgtctaacacaacaaatatcccatttatctagctagtctgaatgcatgaaagactgaaactatatatgtctacaaatttctattattaaaactattctttgactatttcaatcccagagaggtgagcgaaatcatggctagcttttctagtaccaacattttgatgggttttctctgcgttagctcacaaataatgcattctttttgttttgaaatgattgtatgcagctaaatatgttgtaagttgtaatgtataatggtatgtatctctttggttatagtatttgtcactgttttaatcattatgcttgtattttgactttaaattgttgtgcctttagttatatgtttactgttgttattttcagctctgtatctaaaaatggtgaagagctttatgtcagtatcatttcaatacataaaagttatagtttggttcttgtgtaatggttgaactgtttagacc

SEQ ID NO: 172246 - DNA, 1640 bp, Cannabis sativa
ataaataagacacctaaaaaaaaccactttcctattaaaaaaaaaaaatagtttcaaaaactataaaaagtgccccgtctttgctcttgcttctggcattcttggctttcaatgctctacatttatctaaaaaatgtgcttccttcttccagtagtaacaaaattttccactcttaaacttggactttgtcttggattggctattgcttccatttattcttgaattttcttttgtcagtccttcctcttacaatgtacagaccatcaccatttgagtcccctctgtcctctgttttcttttggatctcttttgaattgagtgcaacttttaccttttacatggttaatgtatctttttcatagataatcgtatatctataaaatgttcataggttttaggtagggaatttagcaagatgatggcttgatcttcttcctctatcttgacacctatgttgttcaagtcaagaacaattttgttaaattcatccaagtgacttctcaattccttactttcatccatcttcatggcacaaagcttcttcttcagatacaattcattggccaaagatttctttaagtagatggaggcaaatttgatccataaacctgaagcaatggtttcatctgagacctctctcaagacttcatctccaagactcaacaaaatggcactgtgagcctttgattcagtatccctcttgatcttttcatctgtgatttctgcaagtcaaataggatcaattgcttttgagaaatgccctgatgaacaagtagtaatactttcatcttaattctccatagattgaagtcatttgtcctagtgaacttgtccacttagaatcttgctgatgacattttagattgagtctttgaatcttgaaccaattcttgaatgctaatcctctttttcattgagctctgataccatttgtgatgaatcataattcacctcgttcaagaacataaatcaacaaagaacattaactcacactagtaatgaaaatttgaaattaaaccagcaaagatcaatcaataagcgtgaattgtaaacttgaactttaatggcattgaacagaaaaaaataaagatgacacctttccttaatgaggttcgaacacaagttagagtaacttgtgcctacattctcaggaaacaatcaacatttgaatctttattgatggaagcaattgtgattacagaactaatgagctaaaccaagaatgatcaaatacaaaggagacttgctcatgaccctccccaatcactctatctcactctctcttctttctcttgaatctgtttagggtgatcacactccagtcccaaaaccaggtgccaaaagctattatttatagctcgatcaattttccctccaaggccaactaacataactgtcctttaaaaatgacaaatctgagagttccacttggcacttgttgacttatgtcaaaaacactacaatatcctatgtgggaagatgtataaactcagatctcaactcaattcatttatattgggcacaaatagtcattcttcctcaatcattattgcaaaaaattgatagtatttgttgggcttttttgtgaaaaagctctgttgtatatgcaggtccaggaaaactagcttgagattacgtt

SEQ ID NO: 172247 - DNA, 579 bp, Cannabis sativa
ctattcattttattaatgtacatgagtattatttcttttttgtaaaaaataattcggattttttcattttattaatattatattgtgtgtgtgctataggtggctggatttttgtcgcaatttatcgccgaattgcatttataaggtaaatatttattaacttgaaatataatatatatatgtatatattttgtgttttattattgaatatgtgtttatatatattgtgtgtttatatatattgtgtatatactttttgtgaattttgtgtaattgtattgtatatatatgttcgttgtgaatgagaatgaggtagtagggatttacttagtttaggattaaaacttttaaaattatattagtgtgatatataattgattatatatgcatatgtatatgttatttttttaaaaaaattaactataaaatttagtaactagtaatttattacattttttattaactagtaagtaatttaataattaaaattttaatttggttgtatattgcattatattataggctgtgagctaatatttgaaattcgacatatttcagtgttgatcgaatttgcaatag

SEQ ID NO: 172248 - DNA, 564 bp, Cannabis sativa
ttatttttctaatcagatattaattataaagaaagtacttcatatattatttttaattttttttttaaattcacaattaaagttgctccaatagtaatttttatataggttgctatatagatttaagttaggttttagatttctctattaattgctatatgagtttctagaaacagcactaaaaataccactaagaaacacaaccaaaaaactccaaagaaactacacaaccatgtgaaaagacaagactactaagcaaaaaccaaacagattcagagtactatgttattaaataaaaaaaccatattatgtagcacaaaatagtattgtaatttttttttttgagagaaaacttgtgctttaatagatgaaaccataaagtacaaagcaaacaagttaaagggatggcaaagaaccattccaaactaactcattatctaatcctaatcctagcttagctgcccaatgagcaagttgattagaattcctatacacatgttcaattctaagattaggactgaaagataacaagttcttaatccccattaaaatatcatccagagg

SEQ ID NO: 172249 - DNA, 616 bp, Cannabis sativa
ctcttcctccaactcaacccaaccaatgttcttctcgtgagttagactttttcattttcattttatcgtctaccgtttcctcactaactctcattgttcattgttattcaacttcggttcgctttatgtaaaaaaaaaaaaaaaaatataggtataacaaaaatatgcatatatcattcatcaaaatatgtatactaacaataattataataaaaatatagagacacgtttttatcccgtaatgtacttttagaaatatattctgtagtacattagatagatccaagaacgtagccacatgcaccccaatagggactgtggcccccattttggaaatttattgtaaagttattatatataatatcataatatcattttactatatattaaatataatttattcaattataataaaatattataattatatgtaaacttagtatatttatttacactaataaattctttaattaatattagtgaaatttaaatattatactattcttaatttaatgacttttttttaaaaaaaaaaattataagcataaattaagttcctaaaatacattacaatttacaagatgtgtctagatataaggtaataattatttataaa

SEQ ID NO: 172250 - DNA, 521 bp, Cannabis sativa
ttaaaatattgcatagacactattattgtcaaaaataaatttataaaagtaaaaaaaaaaaacttatattactatatgttaatataaatgttaattttttagagtgatatatgaatcacaatatgtcaattgttgacgcagaaaattttcagtcaacaagctacttatctagctaaagatatacaaagtcagaatatgagtcactattaacaaaacgacttatataagaccaagttatctcagaaatttagacaaaacaacttgagaccactttcaagagacatctgatgtaaacaacccaatgggccaaaactacctacaaaataaataaatatagaaaagtggattagcatactatacaataataatgctagaaatttttaaattaaggataaaacgcaaatattatgttaacacgaaaaacttatctttgaatcatgatatcaccattgaaactaatatgttatgtccaaatattaaaactaagtcttccaaagtagaaataaactagccaccataac

SEQ ID NO: 172251 - DNA, 539 bp, Cannabis sativa
attattttattaacggcttccgtttttccattgctttgcaggtaagcaactgcagagaatgctttgttaattctcaagtcgtcgcataattgtcgcatctctttacaatcgaactgctttccattatttgagatgagcttgtaagggatgccgaatcgacaaattatggagttgtagacaaactcgcgcaacttagtcgctgtaatggctgcgagtgccttggctttagcctattttgtaaaatagtctactccgactactacatacttgactccgccttttcctttaggtagttctcctattaagtcgatcccccatactgcgaaagaccaaggacttgtgatggaatgcaagttgctcggaggttgatggacatatgtggctattcgctgacatttgtcgcatttctttgcaaaagtaaaagtatcttgtcgcaaggtaggccagtaatacccttgtcgcatgatttttagagcaagggaattacctcctgtatgattgccacaaatacccctatgtgcctcatgtagtatatagtc

SEQ ID NO: 172252 - DNA, 502 bp, Cannabis sativa
tatatatatatatagattaacaattagattatagttgatatgatggaaaaatattctaattaagcttgggaaagttcttttgcattttaaattatatgattagcactttcccaatccagccacagcaataagtttatgcattttttaaaaataataaatctgagtttgaacttcctaaagaattggacatcattcaactagctagcaaagtttatttttctctctacagttttccagcaataccaaataataattaaacaattacaaatattattgattagttaaataatgtaccaatataattaaatattaaaataacaaggtcaatgattgtacatactgcttccatgttttaaggattatgaaaagaaggaattattttcaagtatattgctattcatactctatttctaaataataatactatatatacataaaatatagggttatttgcggcaaaaccccctaaagtagggaagtttttacaactaaccctcaattc

SEQ ID NO: 172253 - DNA, 668 bp, Cannabis sativa
gggcataaaacccaacaagacggccattttttttatagtaagtaattacctacttaatcagattagtgtttatagagtcttattcttcttctctcataggtgtttcctcaattcttctaaacttgatcatgatggtttgttctgctctgatttattttaatgaaaatgatccttttgtgaatcttgctttgtcgtctaatcaacctttacgcttataattaccactttgtccgtgctataaattgattacttttttttattctgctttgttttgtatgtgcttcttaggccacttatgctctcttacatcctgtgcgattcaagttttttatttgttcctaacttttggcatgaaatagttaaaaggaataagtgattaatgagcttcatattgtaaaaattgattccactagatttatgcttatctaataaaaacaaatacttcattgttctatttgagcttttaagcgtgatgtgaagctactaaacctacctctaagtcaagtgcaggcataattcagcttggcataaaaaaattatatctacatacatgtcaaggcaatagaaaatagccaggacaattatatgtccatagtaaaaggctttaaggctaaacaatagcagtgttcaaaaatacaatgcttataggccaaaagaaagaacatgaa

SEQ ID NO: 172254 - DNA, 696 bp, Cannabis sativa
gagctaaatattgtgtattaatcacgaggttactatttcttaaccccacaagtaaaagagatgttgtcacactgagcttgtcatctaaaaattgaaaccgagaatgagataggacctttgtaaagcaatttactatttgttcgcaagatacatatcgaatgcctgtcttcttctacaattgtctttcatgaacaaagtgaatgttcaactttatgtggttagtggtacgagcattatagattgggttggaagcaagagcacttactggtgttatcacaccagattacgggtatttaagctggagtaaattgcatttcgtgaagcagaggttcgagccatataatttcagctgaaacttgagcaagagcttaatattataactcagtgcttgatcgagacaactatttgatctttcaataccatgacacgagtgtttcaccaaagtagacacaataacctcctattgattttcgattatttaggcagcatgcctagtcatcatcttatcagtatccaacaagactcaaattttcactttgtttaatatgcatagtatgatgaattgtaccttattgaggtatctcgggcatttgagatactaacttagcttgttcactacaaactctatgtcaagtcttgtatgtgtgaggtattacattgcctttataatgctttgataggtggttggtttgtcca

SEQ ID NO: 172255 - DNA, 512 bp, Cannabis sativa
agaagatcatcggcggagacaaacggggtatgtggggcacgtaaccccactcaacttctatttttatttatatatatatgtaattcttttacaaataaaaagccctaaatcccactacactcatataggacacgcgggacataaaaagaattgctcattaatatgcgaaagctctatttgtagaaaacaaaaaagaacaatatggttgcaatttttctatatgaagttggtactaagacttgattgaagaggggtgttgtcgtatgacatgttggtaaaagttctctcaagtttttaaggttgtttttttgtcttttgttcttcatggcatctagtagtcacgatacttttgatttgaatgagcagtatgctcagataagtctggaagatgtggaagaaggaatcttgattggtggggatgatgaggctgaagagacgttatttgacgatcggtggtgtttggtggggaaatttcttacgggtagggtggtggattttgatgcaatgcggca

SEQ ID NO: 172256 - DNA, 568 bp, Cannabis sativa
cagcctgaaacatcagtaaatctattttttgagtgctctgtttcccgggtgtgcctgcagcaagtcaaggtgtggttgcaatggaagccacaatgagttagcctctcgggtctgattcgctggcttggtaggtcgaagatgagcagtttcaagaagcctgtaataactgctgctgttacaagcttaatttactacatatggaagatgcgaattttgtcatattgggatgatgaaaatcaagatgacatgagaatgtgtaaagagttaaaggctggtgtgattcaaagagtggaattattttggcctaaaaaagtttcgaatgtagacaaagaatgattcaattcattgttatagaactgattgttttactttgtacaatttgtatagatacttaatttaggcctattttttcaggtgctattagaatgtaaaaaagttttgtgagctaatacaactttcctgatttatcaaaaaaaaaaaaaaaaatagttgcctttttgggctcgaccttcacatattagacctgaataaatataaaaattagtatttttataatgtgtgatgcggt

SEQ ID NO: 172257 - DNA, 1173 bp, Cannabis sativa
agggaaataaggtggctttcgcaaagcttagtcatcaagagaattattctcgtttcaaaaatatatatatatatatatatttgaaaatctaataaaaatcgctaatatttaaaatctttatattcaaataataaaattaatacacaaaaataagaggaaattacacgtaacaagagctttttatatgttttttaagaaatgtggcagttttatgttttcccattttttatggatttgggcatctatttcatcttttatggtatttatttaccagattttttatattctaagtttcaaatacaataatttaccttttttttctacctcaacaataattttttaaatttgtttctctctgctacctttcttcccatccaagcgctcctgcccatgtcatttccagccgccataaaaagtggctattggttcgcggttttctccccctctcctctctcattttctttctcttagctcatttctcgccagtgactgctgctagctctggcaaagctattattgccatttacagattacccagattgcggcccatgctcagtccttattcaatactgccaatgtagtttatgatatgagattttaacatttagtttttggtatgatttgtatgagtttacaagttttgttattgttttacaggttttgttatcattttgcatagggtcaaaactagtttcacagggttaacaactttcagattggtttcattgattcgaaactagtttcaccgagttcaacggttcgaaactgatttctccaggttcacaagttcaaaacagatttcacatgtttttattttaagttcccttttgatcattttgtttctaggttcgaaatttgttcacatttatattttatttttagatttttgtcatacattctgtattgttttgattatatttgtgattaatatttttttgtatatgtgtgtgtgtgagagtttatctttcttcattttttttgcttgatgatattggttacagttaactttcttgtttagcatttatattttgttattactcctcatattgtcgaaatttgttttatagggtttacaagttcgaaagtggtttcacaagttttgagggttctataatggggttgctctattttatgatgttattgtatatattatgtttttttatttaaaatatc

SEQ ID NO: 172258 - DNA, 538 bp, Cannabis sativa
cgaaagatcgaaggtttgaaagctaaaaaaatggaaaaataatgcacaatttcaaatttatacctaaaaggtggccactgttcaatcaaggaaaatcaaatctaacggatgggaactttacaaagaaaggaacagtcagggcattaaatgagaaatgatgtacctcgaagttttgaaccgccaaattctaagcatgtaattttaaaactaggaaaaatacggctatacccttgaaaacatttaaaaatttcttttttaatttaaaaagtactttttaggagacaattgttatacttgaaattcagctatcaaccagaaattgatacgtgtacttcaggaagaatatgaatcaactcaatgatatattaaattgtatgattaaatacaacttaaataactcgtttcaattaattatagttgatagaaatattcaaatgcgctgccacataagtgtgaatgttggaagcaattgattattattaattgctaaaaagcctttatataggcgtgtacatttacaagaaagaatactgatata

SEQ ID NO: 172259 - DNA, 525 bp, Cannabis sativa
aactaagcggtctttacacatgacgacctctttttttcgttgtttgtacaatattttaaattgacacaaagtagcatctgttctaaactgatgcgaaagtttaaagtgtacttttttggtatcgattttgaaaacgtgttgaccgacataaaaatcctcctttgtagtattcagagtatgcttgtatacaaaaatataatcatgaaaatagtacattatttcactactacaaaacaagcgttcagaggtgctttttttagcataataattaataaccgacaccatagggctgtaattttttggaagggaatttgatgccatagggtgtcccctttatggagtcagttaattccaaataatcgactccaaaagggtttataaccctagcccatcccttcgtctttctcattcgttcagtcaacccagaaatcccaaatcagagaaaccccaaaccctctccgccaaccaccacgaaaaatcactccatttcaccattttttcaccattttagctcatttttatttc

SEQ ID NO: 172260 - DNA, 705 bp, Cannabis sativa
aaaaataaccatcatcaaaatttttattttctctattttacgttaaaaatttacatttcaatgtatattaggagtgacaaaatgccttattgtgtcttttacgtgtcatacttgaaccgtttctatatttcgtataaggagtgtcaatttattttttgactcgtgtctaattttttcaactgtaacccgacccgtaaaaaatcgtgtcgtgttcatattgacctattttgacccattttgttattattgaaactggagtgtagagaaaaatgatagatttaagttccattagaaaacttatatacatttacaagtcataacaaattgtaacttttctccaagttacaacatgtaggttacaaaaatataggttaaattcatagattacacatttatttacaatacacttaatatatattattcacataataatatatttatcacattttaatctaaacttattatattataaaataatataacaataatcctccactagattaaaatgtgtgacatacttgtaacacacttgtaacatttatttaatcaatcaaaatatataatattcccccactttgattgaataaatacacattttcaaaaaaagtcttgcttaggtgaattaggtaaaatgtctttcaacttgaattttaccttagtgtagttaccacaaagtttgataaaattttagttgtcgtaacattg

SEQ ID NO: 172261 - DNA, 502 bp, Cannabis sativa
ttcaaatcaaattagtaataaacaaagtgaaagtaattgcattaactgaaacacatataagaatgacaataaaaattaaaaggtgtagagaagatttgaatatatggtttacttgacaaattaaacactagtactagaaataaaagtgtgtttctttctttacacacttaaaactatacaagactaaacatatactgaaatcaattcaatttgtttactgtgaaacaaaagtgtatacaagactaaacaaaagtgtgttccttaattaatttcgaaatttgaagcctctataacttgtgacccttcatagagataccattttaatcaatttcacatttatagagttatagggatgctattcttctaactaaggagtatatatacatacaaaatattaaaataaagcatagatacttgaatgaataaaattattaatctcatcactgaaattacagtaaaaaaacaccataaaaaactgattcttgcaaaaaatttacctgaa

SEQ ID NO: 172262 - DNA, 510 bp, Cannabis sativa
ttcaaggtattgcattcttgtcttcaacccttttaaatgcctaatagtttaaattggagtttgaggttgatttggggatttaagttgctatatgatttggggtggtttgatttcgaattctaaggttaggttgtgattgtttaggttattctaaactaatttgacttggtttggtaatttgtgggtgaagttagagttagagagcttaagctttaagctttaatggtgtttttaattcttgagtcgtttattgatttcttttgctggagattggtttattatagtatatacaggtattctggagagtatggttgagttttgggttgatttgtgttaaggggtcgatttttgggtttctggttttgtgggacttgagaaactggtaaaccgatttttccctcaggaaacccagtaaaccggttaaccggtttttcggtccgggtttttccaggaaccctagttttcccccaaattgttgattttagggtatggtcatgtcttttattgata

SEQ ID NO: 172263 - DNA, 546 bp, Cannabis sativa
  modified_base (87)..(92): a, c, t, g, unknown or other
tgttttagcatatgaacactatctactattaccttagaaaaaaggtaaacattcttctgttgttacactgaatttcgcaacaactgnnnnnnttttcgatgattccattcaagcgttataccacaagttctgcaaagccaaggcaatgaaaacaaagatgtgtcacatacatgctgctcacccaattgcgtattatataagaggtttgcgaatttcgtgttctaagccttggtatgaagtcgaacatgtcatattcatcataaatcttaggaaggaaagtcattgggtttttggttgtcttgatttgaatgaggggattatatttctttataattctttaaggactgccaaaatgaattctgcagctaggaatgcaatgaaggcttattctgttttacttcttttgttttttgatctgcttgaattttggaagaataggtcccatgttcatgatttaggttttgaccttaaagcttctctaagagttttggagatagctggtcttccatctcagtagaaagtgagttgttgtttttaagtttattt

SEQ ID NO: 172264 - DNA, 682 bp, Cannabis sativa
  modified_base (322)..(331): a, c, t, g, unknown or other
tcaactattctagaaaagataatgaccaaagattgaattctttaggatcaacagtgagaggtctcgtgtatgctttgcaatgcattagaccagacccctactcttgagtgggagttattagtaggtatcaatttaatccaagaaaggaacattggaaaataatcaagtaaatcttaagatgaagagaggaactatatgttagttgataagggttgtattttaatactcttagactacaccaaatccgttttctagacttgtgttaatgctaaaaagtctactaattatatggtgattactcttggggtggagcagtgatttnnnnnnnnnntaaaaacctatctgaagtctttaactctaccagtgagattgaatgttaaagttgcaggaaggatacttattcagcctatggaaagttttgtatagtttttggcatcgtaccaataatgaattaacagctagtgttacttcctgactaacaaagaagtagttgccaaaaattaaagaatccagtatccctaaaacagtagacatatagagagaaatttcacaatataaaagatttcatgcctaaggatacgtaatggcagagaaagtttgtcttcaatacaacctgttagatcctattacaaaaataatactacatactacacttgatttagatatcaaggtgttgagatta

SEQ ID NO: 172265 - DNA, 762 bp, Cannabis sativa
ttttcagcccgaatatctaaaacaaaattatttactattagtcatattagtatctaggatcaagtatccaaatcttttttgaatgaaaaagtatcacaatcttgtttagaaaaaaatattatatatataaaataaaggtgaatattgttaatagtaaaatgttattgaataaaccataatttaggggtactttcattgcatctagatctataattatcttaactaagtgaataaactaattgaattaattaaagtcttatggcaacaaaatttaatattatagcataaagtttggcttcatcttcaccaaggaaaaatacataaaaacaatttccctctcatggttatttaatcaattattttttaaaaaaagaaaaagaaaaagaaaatatatgaaaattggccaattatatattcatttctttttaataataataaataaataaatatataaaaacacaaccccttttggccttgttacacaaaattcccacatcttattattaaataaataaataattaagtaacctcgaaatgctacatcatatatggctgtcggggtatcattattttttgaattttttataaaaaggattaagttaataataataatttcttcaaaataataataataaattaataatattaataataatgttgtaaaatatggaatctaagctaataatatctttatatattaaagtgcctatctaacggtatttcttggtttaacattcttggtttaacagaatgtacttaaaa

SEQ ID NO: 172266 - DNA, 574 bp, Cannabis sativa
aataataaaaggatctatgtgatttatacagtttgagattttatatatcaatgtataaattaaaaaattataactttattgtaaaactagttaatatgctgcactttgcgtgcgactgtttatagacattttaaattatatgtatgaatatttattaaataataaaatcgtattaaataattttaactttatttttatgcataattttaaagtatatatttattaaaattttatataaaaaattctgaatataaaaaaattcatcatacaatttctcatatataaaataaaacatcatcaaatatatattatagtgaagaaaaattaaaaattgaacaatactcacataaatagatagaaaacagaaagaagatcataaatttattgaaaactcatcatataattttaaaataattgttatcatcgtatctcacttatagtcactattacatttaatgatgtcatcattgtatctctcttgtagtctgttgggctttgtgccctaaataaaattctattttaatgtatcttttctattcaattatcaataaagaaacaaatttattttcattac

SEQ ID NO: 172267 - DNA, 655 bp, Cannabis sativa
  modified_base (623)..(625): a, c, t, g, unknown or other
cgatggttatttgcacagtcaaaccagatccaatgcctttccttaaaccgagcttaattgtatcctttgcagcaaagatactactccaaatgaagctaggattagaacccaactcagcagacaagtaatcaccctgtggatagtatctagccttgaaaactttgctcacaagagaatcatgtctgaataagagcctccacccttattttccaagcatagcgagattgaaatccctcaaatttctgaaccccattccaccaacagcttttgatcttgtcattttgtcccaattcatccaaacaatgccactcccattgttatgagctctttttgatttccaccagaagcttgccatcattatctcaagttcattacatgtaccaataggaaaaaggaagacattcatggcatacgaggaaagagattggaccaccgattttataagtacctccttgccagcacaggataaaaatttgccctcccaactgcttattcgcttcttcattttctcttttagaaaacccaacactacgtttttatttcgcccaaccgtgcttgggagacctaggtacatgctatctaccccagcttcttgaacttgcatcaaaccacagattctgctnnngatatccgcccttgtgtttgaactgaagaa

SEQ ID NO: 172268 - DNA, 720 bp, Cannabis sativa
tatgcatgacccttattttgtgtgcaatgatcttttatttgatctttttatctttttttcatcttactacttcaatattttctatttttcttctattttaaatctgcaaaaataaaagataaaacgtgtaaaattgctcaaaacaagagtaaaacttaattaaaaacacactaaaattaacctaataatagtactaataacatcctaacagcgagatagagcaagaacagtgaaatcgacgtcaaataaataaatcatgacaaacaaccgtaaaacaacactaaaaaaataaaaaaaatactaaaaacaaaagaaaaaatgattaagaaaaactattttttcgcacaatctcaataatactagatgcaatagagactacatttgcaagcaagttctgaaaaaatcatttaaaaaaactacacttttattttttccaaaaacgtgaatgaaaattttaaaaactaaataaaaagaagatgaagaagaaaaatttaacaagaaataaaataaaaagcttatatgttaatggagagagatagagagaacttgacaaagaagagagtgaaagaaagagttatttattatttgttatttgttcaaaaagagtatatctattctatataaaatgtggctatataacaaaattcttgatttatgagaaattattgggtgacttttttttttaaaacctaaatataattaatccacctaaagtgttgc

SEQ ID NO: 172269 - DNA, 1299 bp, Cannabis sativa
agactaaaaaaccaaaatcaatgacagatttccggcccatcagtttgtgtaatgttgtctacaagctcatctccaagtctttggtgattcggttcaaagcagtccttccacatgtaatctcggagacacgaagtgctttcttgcctaatagactcattacagataacatcttggtagcttttgagctggttcactgcctcaaacacaagacgcggggcaaaaaaggtttttcagctctcaaactcgacatgagtaaggcatttgatagagtggagtggtcttttatagcagctgtaatgggcaagatggggttcagtattcgttggatcacccttatcttgaattgtttacaaactacacagctttcatttatcatcaatggtgcaatttcgggcaatgtgaaaccacaacggggccttagacaaggagatcctttatctccttacttatttctgatttgttctgaaggcttgtctcgattgttacaatatgaagagtccattggatgtttaaaaggattagctgtttctaggcattctccatctgtatcgcaccttctttttgctgatgatagtttgttgttttgtgaagcggatgatcgatcttgtggtgccgtaaaagagtcttggatacatatcataaagcctctggtcaacagctcaacacgaacaaatcagttatgtctttttcaccaaatacttctgaggcttcaaaacaatcctttcgaaatattcttggcatgcccatttgtgagtgtcatgaatcatacatgggccttcctgcgtattctgaacgggataaaaaataattgttcaatcaaattaaagagcgcatttggaagttgttaaatgcatggactgataagattttctcggttggtggtaaggaggttcttctcaaggctgtcattcaatctattcccacttatgctatgagctgcttcaaacttcctgttaaattctgtcatgaaattgagagtttgatgtctaatttttggtggggctctacttctgacaaaaagaaaattcattggaaacaatggaagtttctttgtaaatcaaaattggaaggtggttttggtttcaggaattttatccacttcaatcaagcacttttggctaaacaagcttggaggttgtttcaaaatccaaagtctctactatttcgtgttctcaaaggaagatatttctcaagatctgatttcctttctgctgcaacttgtggtatttcttctctcacttggcaaggaatttgctggggccgagagttgctgaagaaaggattgcgtttgcaagtggg

SEQ ID NO: 172270 - DNA, 732 bp, Cannabis sativa
atagatattagaagaaattgcaaatgttatggattttatactaatcatcaaaaatatagtttttttttaaataaaaaaatgaattattttatgggaaaatgcaacaaaaattaaaataatgacaaaacaaattctatgaaataattttttaaaaaaatatatatatatatttttacaaatttatactttaaaataataataaaaatataaattcccctacatatatgtttttcgtaatgatatttaaatttgtgttgctactatggaacaatgactttatgttcttaaaccagattgaaccatttaagcttaataatgaactgtttaagatagctaaacctaaaaaccacaaagagcaaaagatagataatgaagacgaaacatatcaggtggtccattgaaaaatatcaccttaggtgaattacaagtttctaaatcttgcctagaaaacaaaatgataaaatattctttctctataaaaggagagcgtgctaaagaaccactaggaataatgcattcagatctttgtggaccactaaatgtcaaagctagaggtggttatgagtactttgtcacttttattgacgattattatagatatggtcatatttaccttatgcataagaaatcagaaacattaagaagttttgaaaattttacattggctcaaaaccatttaggtaaaattttaaagatcttgcaaacttgtaacgtccccgcttcaagcctcca

SEQ ID NO: 172271 - DNA, 1575 bp, Cannabis sativa
catatcattacactaatcttaccttaactttgaattcaggtgtgccggccaacattagtggaacaactgcttagcgaattacaggctcctaaatcacatcgataacaacatgtataagtgacatgctaaataacaaccggggacataggttttaaacgaaaaacctatctacaaaaacgtaacatggaaataccctaaactagcagggaattaaccaaccaaaactctgaaactagcacgaatcgacaacacgaatttttaggggaaccctgcagcaaatctgggtaacgagttttacaagtcctataaaaccagttagccggtttacactagaaaacctaaaacattcaaaaacctaaaaaaatcgattgcaaaccttccagacctgcatattataccccaatagacataatccaagcaataaaataactacctaatctcaaaatcgaaaatcaccattaaagaggcaagcttgagttctaaaactcaaagcttgctcaatcaacaaattagccttcaaaacatgcgtaattcaaaatatctaaacatattctaacttgagaaacacaaactaaacaacaatagcaactaaattagccgaaatcacaaaacatgcataaatccactttcttaaaactcaagacactaaagagggagttgcttaaaggcttaccttagcttggattcacttaaaacctgctataatctgcttgaaatgctgaagaacaacccaaccctagctggttctaggcgggtttgaaagacagagagagtttgagaaagaaaatgctttgtttttttttaaatttctagtatttataaaatgaaaagattaaaaggttttattaaataaacttagcctgataaatctaataatcagcatattaaatcaattatactccactaaaggacaaaataactaatgaggaaaaatgaccattttgcccttcccacactaaaagtcataaaaggtcacttaggggtatatttgttaactctaaaatcttgactattcccgacattcccaatgtctaactatactgcctcgctatactaaaaatactaggatgtgattctaacagccaaacaccgcgttccaatattgccgagcacaaaacaggcaaaattatgaaattctatatatgacatataaaatgcattctcaattcaaataaatcatcgtaaataaataattcaagaataataaacaattttcataattaagcctaattatctgctaatttccaaattaaagctaagcgatctttacaattatcccccgctttaaaaggattttgtcctcgaaatctaacctgaacaacactagatattgagctttcatgtcggattctaactcccaagtggcttcccccaccttgctatttctccagagtacttttaccaaagctatggtcttgttccgaagaaccttatgctttctgtcagggatctgaactgcctattcttcatatgacaattctagttgcagatcaagattttcataacttagtacatgagccgggtctgaaagtacttccttagcatagaaacatggaatacgttgtgaactgctta

SEQ ID NO: 172272 - DNA, 952 bp, Cannabis sativa
  modified_base (317)..(324): a, c, t, g, unknown or other
  modified_base (472)..(481): a, c, t, g, unknown or other
  modified_base (532)..(549): a, c, t, g, unknown or other
  modified_base (923)..(927): a, c, t, g, unknown or other
atatatatttatatatatatgcaaggagagattgagagcaaaattaataataataatcttaactaagttaatagagtgtggctgagagaagaaaacaaaagttttggaaaaattaataataatgatcttaactaaggtgccgtttggcaacacttatgttttttaattttttaatcacaaaatgaaagtagaatttttgtttttaaaaaatttatttttgaaaaacaaaaatatgttctgtaaccacttttgttgtttaattttaaaaaaaaaaaaacaaaattgtgttctataaagttcatttttatttttatttnnnnnnnntatttaagtcgggtttaggtccggggtcggattcgggttcaagtcaggttcagcgccaaggccgtcaaaagggaatttggttccgagtctggttgtaatccaaaagattgattaagaaaaaagaaactgtttaaaaaaatattgaaannnnnnnnnntttttttttaaaaaaatttgatttctaattataaaattgaaaagtaaaaannnnnnnnnnnnnnnnnnttttgaaaaatatttttacttttccacttttaaaatatatttgtagtttatgtgaaatagggatcgtgtttggttatggatgatatatatttatatatatataaaaataaaaatagattatgagatatttattttatgtggagaatttttaaatataatttagtttattaataaaaaatgaattaatatttataaaattaataaaaaattaaaaaagtgagagaattaagaagagatcaaatatgactattagagagattttagagtgtcatgtcaccgcttcatacttctcctttatacgtgggaaggggatttggttccgggtctggtcgtaatccaaaagattgattaagaaaaaaaaaactgtttaaaannnnnttgaaagtgattttttttttttgtt

SEQ ID NO: 172273 - DNA, 1025 bp, Cannabis sativa
aaacaacacattagttaagtacttaaaagaaaaaagaagactgatgtaaataagaaagaagagaacaatcacttacggagtttgcaaaatgtggttgtgccaatggggaagacaccagtcgtccaaaagaagtcttccttgaaggaaaccttatttggaaagtctatgataatttttggctcactagcatgagtgccaagatagaaaaagccccttgcagctttctttctcgatgtaatgactttaactgagtaaagatactcaattgtataagactttcaaactaacaggaatcctataagaaatgggattcagctggaatggggaaaccccgatgtgatttatgtaatccttgaagtagtcttcaagagggaggatgccccctgcacaaatatgcttaaggctccaagcacccatactagttgaaccactgtctcaccactggttcctgggttactactggcaaagcgtgtagggggtagcaactgaattcaccctcttgtattgacctaacctggcatgattgcagaagtgcaattccacaagtcttcagcatgtcgcatgtgtagcctgagatagatcgcaccttagattttatcaactcagcctcaaaggtgacgctgggatcttgaggagttttggactacgtgctttgggaggcataatctcgaaatccaaatcacctggttcaaaagaaattgtgggttgggtaaaaacaaaggctttgccataggaatgaaggacacacttggtggttctggccaagctgtttctcgcaagaaccgacatttgcctttagatatttcttgcaagaagcgcctgtggcaactagaaatatcttcccggtgggttgtcactgtgtgttacctagccctagcatcgtttagctctaatttggagatgcgttttgagggattgtgtttatattggatgaccgattctgtaggaaactcaaactctaaagcttctggatgataaactcttgaaccagagtgggacattgctaccagcaaaaagcagtccca

SEQ ID NO: 172274 - DNA, 659 bp, Cannabis sativa
gtatttatgaaataatcccttaaacaatatcagtttcaatcacatgaaaaaaaaaaaccttaaagaaatagagtccccaattaaagtgacatacattccgcttgaatcatatatatatatatatatatgtatatatctcgtgtacgtataatatgtatacttctataattatagcatatcaagaaaattgattatttatggagatccttcatgatcaccactcttgaatcataaatacgtaatacgttcattgaaaataatcaccaaaaaaaaaaaaagaccatgtttaaattaaatccaaaagatcaatatggaaaaaaatatatatttctaatctaaaaccatctcttattttgcacaatatatgttacaaatattaatatatacagtacggtaccactatgcactcagacatactcatatatatgggtagtgcatggatatatatatttatatatatatatatatatatattccagcgaaaaaaaaaagagtatatataatttaggtttggggattaatttgtaagtgagatattcatcattaatatcaggatataattaaaaggaaagaaaatttgcaaaaaaaatctgattattctacttacaataatattgtgtagctaataagaagtaagatatatatatatatattagctt

SEQ ID NO: 172275 - DNA, 509 bp, Cannabis sativa
acataaatcgatttatacatttttcaataatactagaaacttacaataataattatataaaaaaagtaaagaactgtttagacgggttaattagaccaaatagaggaaatcattaggcaagttgaactttttctaatttttaattggatgagttataattaaatatttgcaacccgatatttatatatgttataactcgaccgacgtacatccctaataagtattactaataaaaatatatacaaataaatttttaaattttgaattagtaagtcaaaactaattattccaacaaaaataaatgtgtatttaagaggttaaaatcaaaatttaagtatttaattaattgtataatttttttttgaatagaaactttcattaaactaaaaaaatcaaccacaagaatgatatctaactttgaagatgttgaccgaggttttcggcaactaataaaatattataaagttagagggctgtaagaaaattagagaagaatttttacgtggttg

SEQ ID NO: 172276 - DNA, 691 bp, Cannabis sativa
tggaatgagtgtgggcgatccgtgacaatcctctatctagtttcattttcttcctctttaattttctatgtttttatttgtgtctagtttaattatggatttgattatgagctaaactcctaatttagaggtttgatagatgttgtctaagattattttatgagttaatatcagttaattgtgttttttccttgattgcgtgatttattcatctttatatttattacatatttaaccttgatcaccttttgcatgatttatgatcctaatgtaaaatttgaaaagtgaatattaggaatgctctaaataaataaaacataggttttgatgtgaaacgaaagtatttgaatagctaatgtgacttttagattattgcttaatgtaaattgtatgttgttctatcacagagatgcagtagttgacatgaagtttatgacatttatgatctaaaaaaagtaggttaatttataatttgtcatcatatataggaagaagaaaaatggttaattagtattaatgattgggtaatcaaaataattaaaattatatccctaattttacattcattattaaactatatttgattgttttatttaatttttgcttaatttatttagtttaaaaatttatttacttatttgctaaataaaaacaataatttaattaattttattattattacttgtaaacg

SEQ ID NO: 172277 - DNA, 802 bp, Cannabis sativa
taaaaataatcaaattttagtttctttttctctacttaaaacactcgtatttatttatttattgttgacttttataccccactaatcaattttacggtgtatgtatagtgtaaaaataattaagagtatatttggtattgttttctgttttttatttttaaaaaagtgttttcaaaaatgagaacaaaaaatagtttttgaagtttttaaaatacaagtcgcgttggttagtgttttctaaaaataatattgaccaagagtgaattttgttgttttcatgtggcaaagaaataaaaattttgaaaacaacaaaatattgttttattttttgtaactttattttctgaaaactgtttttaaaaaacatggccaaacaagcctacttgttttctaaaaataattttctgtttttaaaaacaaaaaacagttttttagttacgatgccaaacatgcactaattttttggtagggaatttaaggggagttctcccattcttattttattaaagattttaattatcatctccgtttatttcttattagagatgggcgagaaatctcctaatgtaaaaataaaatttattttaaaaagagtttttttgcagttatatattttcgactatcactcaatttgcacttaattctctgtaagctaaaattttgacagtaaaaccctccaaacatctgatagcaaatttaaagtatcatctattttccataactgccaatatagactgcttatgtgtacacttttacacatgtgttacattatattggtatacctaatattattattttaaaa

SEQ ID NO: 172278 - DNA, 707 bp, Cannabis sativa
  modified_base (244)..(255): a, c, t, g, unknown or other
  modified_base (488)..(498): a, c, t, g, unknown or other
taattctatagataagttaatggtaatgacaaatacgagcatgtaaggtcttcatcaatacattctgttttttttttaatgaatttggttggggtaaattttgcattattttgacatattagctattgaagtaataaaataagaagaagacaaatattgagatcatcattgcaatttagtgaacctcattcggcacaactccctcttgtgtttggtatattttattggctaattagtaattttnnnnnnnnnnnnttgacatgtactaaatcgtgctctctgaacttttttggtcgttaaaaattccccattaactattgagattgttaaatttaaggacttttgtttaattttaataattttttttttaatatggatgaaagttcaaggggtataatttagtacatatcaaagtttgaagggcatgatttggtagatatcaaagtctggagagcatggtttagtacatgaaacagtaaaattgaatnnnnnnnnnnnaaagtccttaaatttaacaatcttaatagttcggggagaatttttaacggccaaaaaaattcagagagcacgatttactatatgtcaaagttcagaaaaaaaatcactaattaacctattttatttgaattgtgaaatgtaactttcttatattttatttgaattgtgaaatgtaactttcttatatacatacccattatctatatctt

SEQ ID NO: 172279 - DNA, 508 bp, Cannabis sativa
tgcaaaaccctcttcaagtggtgaaagaagatccacaaaaactagctagtagcctgggggcaattcagtcactaaagttgatgatgggactacacctgcatcttagatgccaggtggaggcctcatatctgctccacaactcgtccaccaagaccaccgactgctcctagtactaatactagtgaacaaattccacctggggaaccacatcttgaactggaagacccgggggaggctgatccttaggttgaacaacttggccaaattgtggctgacctgcaacaacaactacgagattctcttgacaaacaacacatacattttcataactgtgtttgtgtagaattggtagaatattgagaatcaactagttgagtaggagcaacaaagagctaacctgtctcaatgaattaggaaagcttatctcttcgatcgtaggactagtccccgtagatgtctttttgagctggctggagagactccccgtcgacaacctggccacgtggga

SEQ ID NO: 172280 - DNA, 720 bp, Cannabis sativa
aaatgtcacaagttcatatttcagctttgatcgtgaaactcttgggaaagaagaaatcccaatcgatcgatcttctcttgctttcaagaaatcaaaattggagaacgactgcaacaataatggcctcttcgtttgcaacaatgatcgtgaaactctttggaaagaagaaattccaattgatgtcggtacattttattgtaagaaaagatccaagtgtaattgcagcaaatctaattgtcacatcaacgattcagtttagctccttcactcccaaacaagttgcccttgtagcttggagagcagctcagagggagtgggttttgatccaatgtgatttcatatttcaggccttcgtgaaagaactgaggccaatataagaatgcggttagtttctcttttctctcttttaatttctgatatttctttttatctaatttaatttctgaaattacaaaaattaatagggattttttcaataatatacttaaaatacaaactaattacaaaaataccttcacaaatctcatttataataataccttgccacatcttcaaaaaataccttaattttaaattaatatgcctgaaacaaaattaatcttaaattctactttttatttttaattcagctacattttcaaaacttaccttttggttacttacttataatgttgataagaaactaattagcgtcttttacataaaaaaaaaaaaagaaaa

SEQ ID NO: 172281 - DNA, 721 bp, Cannabis sativa
aataaattaaaaaatatagcttaaggtatctacaaatttagcacatgacactttaatacacatgactcacaattactaaaatgatcacattctttgggtcaaacttcaaatagcaatacaccaatacatatgagcacatattgaaaattttaatctaataatctctcacttgggttacatatgttttcttatagtgtgtaaccttataagcacttaactttgctatcataattataggtatttttaaacaatctcgtccattgattatactaacataggatcaaagcggctttcaccatatttagtgtggctaaacccatcaatggtcacatatatcaatataatcaaatgacatagatcaatcatgaatgcgtagcatgaaaatgtgatcttagcatgcctattcccaattggtcatccttaattgagattaattctttagtctttctaacctcttatacttaaacttttcaatagaaaaaaaatattcagagtactcaaaacttaagtccatactttatctatagaatcaaaccataaatatatgttagcttgatagaacatcccaaacaaactcccactatactagcacaatcttaaataataccacgtccatatatgagcaacaagctcttgaaagccataagtcgtatatccttaatgattcggatctgaaaacatggagtttgttcttatatgtgttgagaatattttaccagga

SEQ ID NO: 172282 - DNA, 590 bp, Cannabis sativa
taaatgagtttccaaaatcctggtggacaacggttgcttagtaaacatccttttcgaattcacattctaggtaatagggcttatagaagctgacttgactccttatttcagtcaggtgtaaggtttaaactgagatgcccaattgcctatggggaaaatcagttacctatcaccctcaaaggagaaaacaatgcaagtgcttttgagcactctacttttgtggtggtggatttcccaacaacatataatgcaatactagggcggccaaccctagtagattttggggcagtaactaccatcaggcatctatgcatgaaattcccctgtgataatggatgtattggcacaattaaaggttatcagaaaagtgcaaggaattgttacaatatctcaacacgggttgtgttcatggtctaggaagaggcacccattgctcccagaatggaggttcagatggaaactgaggccatcctataggattttgaagacgagttagatcccagagctggtacgaaaagaactttagaactaatggaggaggtagaagaagtaagtatcagcgatgaagaccctgttggaatatattttac

SEQ ID NO: 172283 - DNA, 663 bp, Cannabis sativa
taatcatgtgatatataattatgaataatttttcttttttctttttataaaaaaacaattcatcaaacattaaaaaataattagagagaaagaaagttagagtaaaatgaatctaagatttaaagtgattcaggcttataactattagccataatttaagagtcaatattatattactagactaaatataacatataataagggtaattaggatttttttcctctcgaattttaacatgtacaaaatcataccccctaaatttttttggccgttaaaaactctccttgaattattgaaattgttagatttaagaactttttgttacatttaagaacttttgtctaattttagtaaaaaaattctaacatggattaaagttgaagaggcatgatttagtatatatcaaagtttgaggggtatgatttggtagttttcaaaatctagggagcatggtttagtacataaacaattactgaaacagtaaaattgaatgaaattagactaaagtctttaaatttaacaatctcaatagttcatgggaaatttttaacggccaaaaattctagggacataatttggtacatgtcaaaattcagggaaaaaaatactaattagcctataattaatatgggcatagacaaaaaaatttctctgttttaaag

SEQ ID NO: 172284 - DNA, 670 bp, Cannabis sativa
ctaaagctcacttatttcaaacgaatgttcctataccattttgggccaatgtggtttctacaacatgttttttattaaccgcatgccatcttctactcttcatgatagaatcccttacaaaattctttttcctaataagccattattcttattgagctaagaatttttggtagcacttgctttgttcatgatgtttgtctacaagtaactaaattagatcccaagttattgaagtgtgaatttcttggttattctcctctttagaaagggtatagatattattgtcatgatcttaacgaatatattgtttctatcgatgttacttttgtggacaatacaccttattttttgtcttcacgcgctcctactcgttagggcggggatgatgatttgtaggtatattcttcacatcctctgcgcctgatacatgttctgctgagtctcttgttccttcacctgcctcggtcatagctcccacaatgcctacatccaccacctccaccacttcctaggcctcctatagtgtacaccaggcgtccacctcctccatctcttgtttcatatcctgcagatgcatcttcgtcatcagattcggaactcaaagatgatcttcccattgcactatgtaaaggtaaacgccaatgtacatatcctatttcttcttttgttt

SEQ ID NO: 172285 - DNA, 1337 bp, Cannabis sativa
taagaaaactatcgtcgtttcacttttatataaacatagaagttataaatattcatatatatgaataatactctcactcaattgcactatcaagttcccaaaatgtaagtatcgggtaggtaagtttaacaaatcaaagaactcatgcagtacaattatgctaaaacttgaccatctcaagattgagatcaattgatctatggtcaactaagtgacattgacttagaaaagttataacggtaagtttagaatatatttccactgttaatattggctcagtccgatctacaaccaatgtatacgatacaagtttactttggtaatgctggaaaagacattccacttatctaagtgtaagtaaactatatcgttgattatcacgttagtgtaaatttagtgcaatgatgcaggactaaataatttgaagcatataatcataattatcttcaactgagatggcatcactataattgtgaataactatatatttaagatttaatagaacttatatattaaacatatgatcatacaataaacatgtgaaccaaacatatgacaaaggcaagatataaaatctgatctttattgatagcaaacaagattatattaaaattagattttatttatggcataaaactccaacaactcaatatatctttactcatgtactactgtcacattaaatcacctatcatcaggcaaaatacccaatttttattgggaaatttggtttagtatgcttaaatgtaatatatattgttttaatatgccaccaaattagaaatagtatatatatacttttaattttttttccttccaaaaaaacccttatatttcaaaaaaaaaacttctctctctcactctctggcgttgaccctgactccgaacccctatcgccgaacacacagaccctgaaccccagttgcaaggcctcgacgcgtcatcttctctcacggcctctctcattttttgtgtttctttcttctggtttaccagttttttttttatatgttgcgatatttagcgatgtatttgcaacgatagaacaaatctgatgttagggatgaagtttagcgatgatttgtgatatttaaaaatgtttagcgatgatttacgatatttaatgatgatattagcgatgtgttttgtgatattgtagattggagacatttagcatgtttcatgatttcgcgatgtttcgcgatatttagcaatgtttcccgacatcgtaaaaaaaaaatgcaaaaaacaagcgagttgagaactcatagattttggggctttggcttcacgatttctctttgtagtttcgtgatatcctcctcgattttgtccta

SEQ ID NO: 172286 - DNA, 557 bp, Cannabis sativa
  modified_base (65)..(77): a, c, t, g, unknown or other
ttaaagaaatagtaaatcaaatgaaagcctatggaaaaaaaatttctaacaagaatatagtacannnnnnnnnnnnntcttgtacagaaaaatatgattcaatagtttctatgatagaagaaacaaaaaagttagaaactctatcaccaactgaactaatgggctctcttgaagcatatgaaagtagacgagaaagacataagaaaagtaaagttaaaaatgcctatcagtctaaaattaatctgcggtctcaaaaaccaaaagttgatgggaaaaagacacaagaaatacaaaaaaaaaaataacgacaagtaccctccatgtggcatttgtaaaagaaagtcacttggagaaagactgttggtttaaaggaaaactacactgccaaaattgtaaaaaaattggtcacactgaaaaaacttgtcgtttaaagaaatcacatcaagctaatttttttaaagagaaaaatgatagtacttggtatcttgacagtggttgcagtaaccacatgacgaaaaatgaaagcatcttttgtagtcttgatagatccaagacta

SEQ ID NO: 172287 - DNA, 640 bp, Cannabis sativa
aaaagtcaaccatagtgatccaggaatcctgtgtggaagggctctcgctcaacaaattaaaggtgctggggataataggctgatgactctcaatatcgttaattaatctcattatgaagcagaaactacaataaaactttctaacaaatggaaaagtttttgattgaaaaacagaagaattcgttcttactttcaatttataaaggaattcgagagctatatgacacctttaggtgatgttagtcatcacttagtatttttcgtataataaagtggttaatattttagggtgcttctacaatacatccctaaaagaggtctataaatgcatcctctatttatttcgatatttgagaaaattctttattcatttacataacatgacgaaattagctttcaaagagtttgttgcatgtgagattctttttattttatacacgtgtaaaatagactgtttgaacatatttttagcgtgtttaattttttttttaaattcttaatatttaacaagatatcttaaataattacaatatagatgaccagactgaatgtttttttttcgatgttgaaacagataagaaatgcaacagtgaaacttttttaaaatcatctccaagtatgttttctaaacacacttctt

SEQ ID NO: 172288 - DNA, 517 bp, Cannabis sativa
tttcaaggcacgtcgttactcggtaatatactattgtgatctaatcttcaatatgaacattttaacttgtgggaagcatatttttttctggtattttttgaaaagaaactatttggttactaataaagtaattagtgaatgttttataattttttttaaatcttagttaacattaattttagaattttattaaataaattatattatattataggataagtaattagctttcaaaataacaaaaaagtatataaaataattgatatataaaaatagcatcttattatattatatggtaacttattagtttcgaaaataatttttaagattacctaaatgtatttaaaattataagctactataatgtaactttaaaataaacaattaattactaagatgtatataaatatgttttcgagataactaaaatatatcttaaattatatgatagaaaaataatttttttttatgtaaatataattaattagtttcttatcaacattactagttactaaaa

SEQ ID NO: 172289 - DNA, 979 bp, Cannabis sativa
tatattattttaattataatctaatgattattgaaataaattgactatatatttttaaagacaaaatttatttagagtatactcatttaatgaactaaaataattaaaaaagtaaaatagataaattgaggaatattattttttgtattcattaattaaaaatattttcatattatattttattaaaatgtatctatttttgtgagtggatttcctaatatatcatcactttctatttaaatttaacacataatttacattaacctaaaaagtataataaggacatcatttataaaaatgaatatattttaaaaaaaatataaaaattaaaattaaaacagataaaataaagtgagtatacaatataattttctcaatgtttttacatgaagaaatcttattataattaaggagctccatcaaataagctaaaataacttaaaattttacattatgaaatagacttgtctagagaagcaatattgatgtttcaactaatattttaataatttcttctcctctttctattttttcattttatatttctaaatttttgtttatataagtaaaatatatttaaataatataaagaaaataatagagaaattaatgtatagtctaatgtaaaagtataagataaaaataataataaaataattcaatttagagatgttatgataaaattggttatattttctatatttgttcgtgttaaaaaaaaattaaagttagttattttaaaaagtaaaattgttaaaaattgagttcagaatcctatttatataattttaaaaaatacagtgtctattttatcatttaataaaacagagagtctaattaccaacttttacaaaacataaaatccaaaatagtatctactcttttatttttgcccgaattcataagggaaatttgattttctatacttaaaaatcataatttttttttaaaccaatacattttacactacaaaaaatat

SEQ ID NO: 172290 - DNA, 508 bp, Cannabis sativa
  modified_base (264)..(282): a, c, t, g, unknown or other
gaaaaaatactaattgtcggtgagttttctagcaacaatgccaattgtaacgatttttccagcgctggccgcagctctgacgatttttccaacaccggcagctactccgacgataaaaaaaaaagacgctaatctaaaaacccataaaatctattaatcaataaaatgaaagaaaaatagagatttccactccaactactgatgtttttattgtaaattcttgagtgattcaaatcactttgacataataataataataataannnnnnnnnnnnnnnnnnnaataataataataataagacaacataatataacagttaaaattgattaaaaaaatgacttgataaaaaaaatccctaaaatttattaatgaataaaagaaaaggaaatttccccccaaaaaagaaataaaataaaagggaaaaaaaaaggagaacacactagtttaatatatcgagtgagaaaaaaaattagagcaaaagtaatatttaggggtgttcataaaata

SEQ ID NO: 172291 - DNA, 726 bp, Cannabis sativa
aaggcacctactgcatccggtggctaaagtcagaataagagattccacgggaaccaggggagaggcaatcattagggtagctctgaaacatgatacacttacctagaatgccctagttgtaaaaagcatcatttgggagagtgtaaagggcaactaccttgagagaatatctcaaccaacagaaatatctataactactttttaaattcaaatttaaataaatatttatctcttgaaataattaattaattaacccaaaaccaaatccaatggggacaacccgatcttataggcgcctattaatgtgttaggacacagtaattatggcgctacctatgtctgaacatgacattagtggtgtcttttatccattttttttcttttccccgtttatttaattaataaatttgaacaaattaattatttattaaaaaaataaataattactatttgtgcaatccctacccttgacagtgtttcaatgtggcaatccgagaaccatggacctataattttacgcttcaataaacgagattatttatggaatctcataaatcaaataatcatgtttattaattccatgattactccactataaatacggaattttacttagtaattataaaattgtatttactaagttttactacagtgtctatttatatattaattctagtgattagccttccttgtgtttgttcataattagttctgttcaagttactg

SEQ ID NO: 172292 - DNA, 515 bp, Cannabis sativa
ttatatatatttatatgtttagatctacgtatatacaaaagctctctctttctcgagtttgactggatcaatataatatatagacattagaaaaattgtttattatcattatttattttaataaataaaaagtgacatttccttgtctcatataggctttgtttacataaattttgtcaactttcttaatacaaagccctctctagccccacaaattaaagagttgttagctgttataaaattttatgttaggcacatggttagcataattgtgcatatatttattatttatagctctgatctagcttccaaaaagtgtgtaaataaaataaaataaaataaaagggtattcaatatatattactaattattagttagccacctcacgtaacttcagtacatctgtgtgtgaagtctaggtgaaacagaagtgtgggcttttctagttaactgaagcctttgatgagtccagtccaactagggttatgtagcctaattctataaatacatattgt

SEQ ID NO: 172293 - DNA, 574 bp, Cannabis sativa
atctagggttttcaaaacccttgggcagccaccataggccaccccgacagttctctgaccaccccaagccacgtcaacatctcttctctctctcgatctcgatctcctctctctctctctctatctctctctctctccctcttagtcccgatttagggttttcaaaacccttctgcagccaccaccggccacctcggtggttcttcgacaactccaagctctcgtgacctcctctctcttttagtctgacggttctccgacaacccccagccacttcgacgactctctctccctcggcgctctcgtaagtcctctcctctcctcatttctcttataaaaaatgttgctttatttttccagatttagatgttttgtgatttggaaaaacacctatttttgtttaagaaactacagtttggtattttgtaatttgcatttttttagtttcaagtgagctttgattgggtttatgtggtggtggttttagtgaggtgttggttgttttggttaggtgatggtggtttctgggagagagagagagagagagagatttagggagagagagagagagaga

SEQ ID NO: 172294 - DNA, 614 bp, Cannabis sativa
aacaacaccaactctaatagcaacaataacaacaacgactccaaaaaggatccatcattcctttgaaaggtcaaaattctacttccagccaaaaaattgtgcttgtcacttccttgcctagaaacccatctttaagcttcaagttcctgttgaagccgactcgcctcgaccatgcaatcctgaagaaagtaggggagggtgacaacattttgaagaagtgtcatgagaaggaaaagaactttctttaaaagagagcttacaacctttcatcactgaagagggttgagatttttgagggcatccgcaccaccatttaaggagggccaatgatagacactgagaccttagagaagtgattggtgcccaaggttgggagggaagtaaagccctttgctgcaaaacttttggatcaagtagtaagcagtgctactgagctaaacttaaataagtgggccatctatagtagcaggaatgcattttcctttgctcactcctccaaacagtaaatcgtaggggtaagtctctgttggaaatattttaccaggacctagatttagtaacaagtatgtttcattaacatccaaatatgaatttctaaaacaataaaataaaca

SEQ ID NO: 172295 - DNA, 548 bp, Cannabis sativa
taattaattaatttagaaaaatttgataattcacctacaataaaatttaacacctaaaaatttcaaatattgattattttattttctacggctgtgaaataaactatttgcacagatgaatatgaaaaaaaaaattagactaaaattttttttccacgccgaaataggtaaaaagtggatcattgcatctcgagatacattatagaagcaccatttttatattcaaaattaatagtagttaatttaggaaaattctacaatctacatttatggatatgatgcactcctatatgttttggtatccgacataattttttagttaataatttttttctcatggtcatgtacgttataattatttaagatatcctacaaaattttaaaaaaatcagaaaaatttaacacgccaaccgaaaatagggttcaaaaagtgtgttgtagtgtgtatttattttttacgcttgtgaaaaagattgtttgaatactgctttttatattgtaaattattttaatctcaaaattttgtaggatatcttaaataactataa

SEQ ID NO: 172296 - DNA, 615 bp, Cannabis sativa
aagaactaacattccttttatacattaatttttttaactgttactaaaataaattatttttccacactttttctcatatttttttaatacgctttttatctcttgcaagaaaaattaagagcactccttttatatgtttctctctttttacatgattaataaaaatagtaatttttttttatatatattttgtagtttattcatattttatttttgaatcatttgcatatttcaataagattgatgtcttgttatttttctaattgatttatagttaactttttattatttaatagttatttttatgttgttgtttaggtattctataattatcgttctattatttttgtatttgttttgtatagtcgttgtttagtttatgtgtatttttatattgtatatttttagtttattctagatagttttttttttacatatatacttttattttgttattttatgttatttttaagtggttttcaaaatatttttttgttgaccaattatttttagttattttttattgggtaaatatcattttggacattgtgctttgcaaaagttatcaattggaccctctgttttgttaaatggcaaaatagaccctgtattttc

SEQ ID NO: 172297 - DNA, 827 bp, Cannabis sativa
  modified_base (302)..(302): a, c, t, g, unknown or other
aaaaaaaatgaaaaatacaaatgtcttaagtaaaaaaaaaactatcacaaaagtgacataagcaatcaatcaaaaaatttacaaactttatatatataaacacatatatatataggaataagttaaaaaatatttctttttttatccattaatcaaaaataccttcatattatattttattaaaatatacccattttttagagtgggttgcccaatatatcttcactttctacttaagtctagcatataatttacactaacctaagggatctaatgaagacatcatctataaaagtgggtanatcttaaagaatataaaaatagaggtaaaaattaaaacaaataaagtaaagtggatatacaatgtaatttcttcatatatatgtatattggggaaaaaaaataacgtagactgtttcccaaaagttaaaaaaaaaatagtatacggtataaaaaaaaagtaaaaaaagtaatttttttcatacaacagtaaaattgaaagaaaaagaaaataaaaatagaaaaaaaaaaaatagtatgaggtgtaaatttttcatttttataacgtttacattattaaaattatttgggccaatgaaaacatgtcacgtgtacacatgtgtgcacagtggcagattcagttagcacttaataactaaatttgacaaatgcattaaatttcctcaatataattgaagttaaggggttttatcacagtaaaaataatggaattaagtgtataacaattaaaatatacgggagtttagcatcttaggggctaagtaaaaattttatttttaaaaatatacatatattttttaataatt

SEQ ID NO: 172298 - DNA, 551 bp, Cannabis sativa
ttttttaattatttttctctattattttatattcacattaactcatagtattgtcttatcattgacatatgaaaaattattattattaaaaagaagagtatcctcatatggttcaaatttatacccaaatgtaattattatgattttgaatattaatattattcagttacaagacaaataagaggagtaaataatgaaaaatattctatacagataagttacgtatagatattgtaatatatcagttacaacttataataaatgagaaagttgaaaagacatattaaaaaagaagagtgtcctcatatggttcacatttatacccaaatgtaattattataattttaaatattaagattattcaattacaaaacaaataagagaagtaaataatgaaaaatattatgtacctataagttacctatagattagggatggtaattatacacgcgggtacgggggttgactttcggggttgggggcgggtatgggtttaaagattcatacccgagttagaaacggggcgagggtgggggaatagatacccgcct

SEQ ID NO: 172299 - DNA, 591 bp, Cannabis sativa
cgtacggttaattaattgatttaacatatgacaaattattaaatattaatggttactattgacttgttgcccaattttggtttttaattaattgttaaaatattccgataattaattgtagtaagatcccgtgtcacgacgagttctaatttagctggtcaaaatcatactttgacccttgttaaaagataacacttataaataattctttaatgtatattacaaaataattatttaaaaataatagattaatccctatatcgataaaaaatattagtgataaatcacgaccattaatatatatataaaaaaataataatatccctataggatcaccgaataaatagatttaataagttaataaaatactaaaataatatctaccatccatcatttctcatttctaactaatacataccaaatttaagtcatctagaccatccattccaacttaaatacaaaatcaatttcattggaatagggctgtgcctgggttgggttggtcgggttggaggcatttgttgggctttgtgcccaaaataaaattttatttcaaaattttttctattcaattatcaataaagaaataga

SEQ ID NO: 172300 - DNA, 682 bp, Cannabis sativa
ctcttctggtagtatccatgaaatgaaatcttatctgcatattacgaatctcttccactgacagaagctcatgagcaattgcctgtaaatacaaaattacaaaaagaatcaaataaatatcatcactgagggaatcgttaaaattgaaaagaagaacatgctaagctaagcaaacaagagaaatattccattgaaaaattaccctgagagctcttttcttgaagttgttcattgtagagaaatgcttcagctttgccctcaaattttcaagagaatatgggggcgcatatgtgttgggattgtgatcagatggcataggttgctgcaatggtgggccatatgtgttggcattatgatagggtggtgtaggctgctgcaatgggagcccgtatgtgttgggattgtgatagggtggcgtaggctgctgcagtgggagcccgtatgtgttgggattttgatggggtggcataggttgctgcaatgggaaaccatatgtgttgggatagtgatagagtggcagaggctgctgcgatggggccccatacatgtagggatattgatagggcgttggaggaagttgttgtgaggcagagttatacatgttgggatagtaaggcgtcgaagaaggctgctgggatggtggtggcatagacatctgtgttacgaaaaagaatgagaaaca

SEQ ID NO: 172301 - DNA, 679 bp, Cannabis sativa
tgctaggttctactcatatgattttgattatgtctcgagcatctgactattttttcgtagtaaacgagatctacgacttgtggcaagtcaaattcacactttgatatttcaccttttcggcaagctggaatattgataaaatctaagagttttgattctaccggatttcacaaaaaaaaacgacatctctgagaactagtgaacaacttcaccaaatctaagaaattgattatgtagtgtaacatatcacttagacatcaaaaaatacaagtttagacgttttttcactcacccaacgtccagtttgacgttgggatgtcaacctgggcgctgggtcctgaacatcctttagtaaaacaaccataattctctcaatattaatttgattgatgcgactcaacttttattttaaagctctttcaaagacctttaagtcatatctcacactcatatcgcaattctaaaaaaaatcaagtccaaaatttgacccctaaacacgtgctattttttttacagattacccaaaaacgattcaactaacgagattcaaaaatcaattttagccagtaaataatcaccaatggccaagatcaacccaaagtgattttttcatatattttgtattattttcattttattttaatagaatctctttccctataaaaggagagtttcacta

SEQ ID NO: 172302 - DNA, 507 bp, Cannabis sativa
cacagttacttccaaacacaccctgtaccgctattccttattaccctagtaattactctacctagtaattacacagttacttccaaacacacccttaaagtttgattttatagactctggtacgcttattattgtttgattctcttgaattaattagggctatatacatatttacagtattctaacatgtggtatcaagagcatccctaaattagttcttgagaatatatggttgtgttggtcttccattaaattattttttgtatttgatgacttcatgcttcattaattataatcgtttatatatatatatacacgattgaagtaatatatcattctgcgattaaacctgtcgcacatatgtatatttcttctattttgaagtgatatatcattctgcgattgaagtgatatatacatacggttctttggttgtttcttttaatttgaattcatataaatcaaataagttgttgctttatatatacaacacttacttttgcttga

SEQ ID NO: 172303 - DNA, 618 bp, Cannabis sativa
atatggcagaaaaaataaaacagggtattatcaattatgacaacaaagtactgtaatagattcctcataaaatagttgaaaatagttttttttttttttttaatttttattttatgtgaaaattacacataaatttttatacaacttgtgtatatgttttttttttctcaaaaagttattttatagaaaaaattcaaaaaaaattaaaaattatgacaaaaaatagtatgatgcaactggttgctgttattaaagtaactggttactctaaattgtttttatcatatatttttttttaaaataatttcttacaaaatattatcttcaaacaaatttatatttttgtaaactttaccaaaaaaaactataaatgtggaaattcatctgttttagaaaattacaaattttataagttcttactgtgtaaaaatgtggaaaaatatggttttattttcttcaaaaagactattctatgagaaaattttaaaaaaacaggtaactaattatttttctcgtattcttttaatttttttttttaaattttctaatgaaataactttttttttttttggaaaaatacaatatttttgcaagctaaaaatgaaaattaattagtgt

SEQ ID NO: 172304 - DNA, 1232 bp, Cannabis sativa
attttttttatcttgaaatttaatacacactaatattagcaggccccaaaatccgttggtaataacctgattaatagggacggatgtggctcgctggtattgggtccgccggtaatagctgcaattgttgtagtgtaaatacgtacgccacattaattggcagaatattttgataattaattaaaaaatcaaatcgagtaattaattttatgcaaatgcaataaatatagaatatttatttatctcaaaattaatattttattttattctaaaactaaaaaaatattttaatgagttgaaatttacttataaactattaaatatacaatctatatttatatataaagaaaagttattaagagttgatgtggcattacataagagctttctttcatagtttcaattttctcaaattttctatttttttttaataatttttaattctatatatcatacaatgatttgattccttggtaagttttattgaaaacaaaaatcccacatggtttagaaacctttgtgagtgttgtgttatagcctatatatagtttactatttgtttcactttagtttgtcctaaaattagtgttgcattatttctacgggcgactaaagaatttagtcttgctcaattagttatgatattttttttttggatgaatgcaatatatatttttgcacatactttttttcatagtttctattttctcttagttttttttttttttaatactatatattatacaatgatttgattcatgagtaagttttatttgtgagtgttgtgttgtagcttatatatagtttactatttgttccactttagtttgtcccgaaattagtgttgcatttagtcttgctcaattagtcttaatatcttttttgatgaatgcaatatatatttttatgacatttttttcatagtttctattttcttagttttttattttttaattctatatattatacaatgatttgattcatgagtaagttttatttaaaataaaatcccaaaattaacgttacattattttttataggtgataagaatttagtcttgcttatagtatattttttgatgaatgcaatatatatttttgcatttttaaatcatgaaattaatattaatgcattacattattttttatgggtgattaaagaatttatatcaatctatctatatatctatataaagctaaatcttagattgatgatgtggaattctataatat

SEQ ID NO: 172305 - DNA, 514 bp, Cannabis sativa
acctaggataggttcttgtagtttcgaaaaaaaaagagaaaagaagattgatgaaataaaaatggatttcctttaatattgtaataaaaggataaaaccccctttttcttagtaatgaagctaacttcagctcacaaaaattcccacaacaagacaaaataactattgccaaaagacctccttaccccttctagataaataatttagttataaactcttaggggtaatttggtcaaacaaaaccccgaaaataccaacaccgataaaacttaacaatgatatcccgaaaaaagttctaaatcatataatacaattctctaaaggccccaacgccgctttccaccgcttccgaacacaaacacaaaaattgggtaattaaacattaaatagcataataaatacatacgaactcaataaattcacgtaattgtcttattatcaatacataataaaatctcatacataaaccctaactatttaataattcaaagtattattcatatgcggtctttac

SEQ ID NO: 172306 - DNA, 517 bp, Cannabis sativa
gactagccagtttgtctcccacctaacgcaatttccgcccaagagatatgccgcttgcgcctctctgaattctatctaccaggtccaagacataagctctgccatggctgcggtgagtacttcgtaatttattccacctcttaatattttgtctaaggcatctgatctcacacttgtatattttttttttagattaccgctgagaccggtcgcctttccaacactctaatcgaccatggttacgtcatgtccgaattcaggggcattgacgaggccatgaggatccttcaggatttgtctgccgaaaggcgggcgatctaggaggaggctacacggagggaggccctcgtggaggcgaagcttcggggggaggccaagcagagggaggcccttgcagaggcaaagcttcaagaggaggctaggcagagggaggccaaggtggaagcgaggcaccaggaggcgctgaaggtggagggtgaggttgctgcccgggccagacgcgagcttcgagaggcta

SEQ ID NO: 172307 - DNA, 641 bp, Cannabis sativa
  modified_base (599)..(615): a, c, t, g, unknown or other
ttactgaaaaaccacctgatctgtatgtgcttacctttggttgtgaaggagataaacaaagggtccttcttaaggagctctatcactttcaaaaccaccacatagtattgtacacgccaagtgttctgcaaaaggtcacttctgatgatcttatcttttctcctttttgggtccaatgttatagactgcctttcctgagtaagtctaaaactttagccaaagctttgggaaatatcattggtgaatttcttgaggttcatgatgattctttggaagaaggatggggtccttttcttcgattccgagtcaaactcaatgttaccaaaccattgctcagaggccgcaacatccaactaagacaaacaagggacaaattctgggttgatttttgttatgaaagattgccggagtggtgtatggagtgtggccgacttggacacccttaccagaaatgcatgatttggatggaaaagattgataatggtattgaacctaagttaccttatggtcctgatcttaagggggctgctctgcccacttctggatatgataggtaccgaacggatttctctaaaggaaattgtgacagtcagtagtcnnnnnnnnnnnnnnnnnaaataccgggtaagctgtgcaatccc

SEQ ID NO: 172308 - DNA, 523 bp, Cannabis sativa
atataatttaatataataaatttagaagaatatcgaggcacaatttttatataccattagtgtttaataatattgttcactatctttaacgaactatctttaaggaaagatctaaatttatgataagtttaacataaaaaaaaataagtttgtattatatttaactcactttaatattatatatgaaaaaagaaattaattgattatttaatattttattaaaaatatagaaaaatattattttttattcttttattatataaataataatagtaatatagtaatgtttagtggtattatttatagtaaataaaaaaatagtatttattatcgactaaatttaatgtaataatatattttgtattaaatttgacacaatttttagtatttatcaaagttagcacactttttagaacatcattcattagaatatattttttttttgttggctattaggattttcgcccactaaattttgacatgtatcaaatcatgtcttctaaacttttctaaccgttaaaaa

SEQ ID NO: 172309 - DNA, 574 bp, Cannabis sativa
aaaagaaagaaaaggaaatgtaggaatttattcctaaaatcagaaatccaaggtcaaaactgacctttttaccccagtcaaagcttctttcgactctctgcctttaaaccaaaaacgacagctccattcctaagagctacaagtcattttaatttactagaaatcctaaaaattaaacctagtgataaatatacatctctttcttcaaacatataacccagcaacaaaataaacctagtcgtagccccctccttcaatgttcttctctgaagaacatgaagaataacaatacccagaaactatcccacagcttagatcgaatctaccccaaacagagcctccttcttcgttgttcttctttgaataacacgaagaataaccctcttacaaacccagaaaataaaacccagcagtttcctctctaaaccgattctatactaacaaaaaccaagcagaaaaaagtataaaacacaatagaaaaatgagaagagaaaaggagaagaagacaccggttttatagaggttccccaaaaatattgtgctgggtacttcctcttcgagcttgcctcgttcc

SEQ ID NO: 172310 - DNA, 657 bp, Cannabis sativa
aatttataattagagtaaagaacagaaatgcacaagcttttatgcatatctcaattatttgaagtaatcgtaatcataatggaatcaacattgcaattattttgtttaatttaatttaaaaaacagtgtaatgtgtaggaaattaaatgcaatccgaaatgcctagattgcccctacacccaacaccccaacagtcacaaattgagggtaaaaccgacttttggttttgtgcggatctcaagggaatattcccttttcaaaccagatctgatttgttcaaaaaccctacagccatttatttcaatataaatgctttcttttctttaattgaaaaccctagcacaacaaagacccttctcccacagccggccctatcttcttctccttcctttctctttgaaaacttagcagcagaacacttttcttctcaagaaaagcaccagccgaaaactccttcttcctcactttcttcttgctgcagcagcagccctttaatggcagaaaaactacagctacatttttgtttctttttcctttctccttgctgcagtagcagccgaacccccaagcttctctcttcttctcttgttctagatttaaaacctgcagaaactaagaacaaaaaccagccatagaaataccaacgaaaataaaaaa

SEQ ID NO: 172311 - DNA, 565 bp, Cannabis sativa
  modified_base (502)..(508): a, c, t, g, unknown or other
aagatgactacgtgtcatggtattaggaataaattttattaattaaggtaatttttgttaatttaatatatttttagtatattattaaaaaatttccaacgatgaatgttatacggtactaacattctattgtaatttttcggttaactattgtgtccgaaaatacatgtcggaatatttttttttatggatgtgttcgttatagtaacaatattatctttgtaaattttttaaaaaagttaatagtttatagtgctaaaaataaatttgatttttttttaaatacgcgggataaactagaatatcataaactgtgttcatcattgtaaattattttgaatttttttaaaaaatttataaaaaataatattataactataacgaatatcattataaaaaatttgaaaaaagtattttcaaatgtgatttcagatatagaaattgcacatactgtagagatgatattatcttgttttggtattgttaattccatttttggcannnnnnnttgacaaaaatattttattattctttgtatatttcggctggcatatattgatatggt

SEQ ID NO: 172312 - DNA, 631 bp, Cannabis sativa
aataaaaaatattttatttgggtttttaggttgggtgggtcctacatgtgagcctaatctgtcttagactagatccggccatgtacgaaagttgcagaaatataatttagatattattaccatgaaaaattaaacttatgtatttatttacaacatgtaattaaatttagatatttataatacaaattactctgtataaataccattttgaaattttaattttgcaaaagttatagattagaccttctgctttattaaataacaaaattgatcttgtatattttagaatagtacaaagaagaccatgaacttaatttttgataattttttaatataactaactttaagacaatccctaacactaacatatgcagaaaatttaataagttttgtcataacacctctaggtcaaattattattaagctttactttgataaaaaaaatcagttcactgttctatttgtactattttgaaaaatacaaaatctattttatcatttaacaaaatagaacttttggaaaatactgtatccacccacatatttatataaataaatgaagagtaaatactattttagacactgtgttttacaaaagttaccaatcagaccttctattttgttaaatgac

SEQ ID NO: 172313 - DNA, 808 bp, Cannabis sativa
aaatttaaattttaaaacaaatacagagaaaaattataacttgtaattatttaactttacaaacattcgaaaggtcacattttgtatcaggatctcgtaaaaacttctcaaatattacaagttatcatttcatgccgacctaagcgacaaaagctgagattataaaatatttcttctcgtagacccaacccttgtggtctagtatggcctgaacatgtacaatacatcgctgagccctcgaacttatggctgatcaataacaaatttaccctttcctgcacagtagagcacccatgagccaagcccagcaagacaatataaataataataatacgcataataatcaaaaatcacataattattgatgccacttcatctatcatctatttgatatagacctacgtgttacgctcacacgtctatttacaataaggccttataacggtttttctcggttctaattaccgagtataacctatttatgccttacacgcataattctttatctcaatatacacagtatagtattgcattcaaaatcacttaaatactagagtaataaccctagaccatataaccgcttattttagggtaataaccctaatctcgatttctcacttaacatatgcataataacatacacgagtgccacaacacttaactctatgtgctaccttactgtcttacctggtaatccaagtatgtggagattccaaactcccgagtgttcccaagcaaatgtcagtattcctagtcacacgttcctgggatttcacaaataggattaatcctaaaattcactttcaat

SEQ ID NO: 172314 - DNA, 618 bp, Cannabis sativa
  modified_base (463)..(465): a, c, t, g, unknown or other
atggcagattaatttcttttaacagttgtgtccccatagccaggccttgggctccgggtccaggttcgggtaatgtgtctcgagtctagggtcgagttttgggtcttagtccctgttcaaaggcccagttgcgagtccaaatctccttggtctaggtctggatctaggttcgggtttggggcccaaatcccccatctaggtctggatcctaggtctcggtgtaggttcaagttcaggttcgggtttggatcccgagttttagtcttagtctaggtcccagtatgggtttaggtttgagtttgggtctgggtcgcggtctgagtccaggtccctattcgggtccggtcggggtcccgatccaggtcctagtcaaggtctaggtctcgaaccaggttctggtttgtgtttggatttgggttcacgtcatgagtctgggtctaggttcgggtctatattcaggttnnngtctgggtcctgggttccgatctcggtattggtatgggtctaggcccatgaccaggttagggttttgggtttagtgtttagggatttaatgtttagggtttagggcttagggtttaggggtaagtgtacagagtttagggtttagggtttaag

SEQ ID NO: 172315 - DNA, 556 bp, Cannabis sativa
atatatatatatatatagggagtgagatagtgaatgactacaactatgtttgttcttcttatgaaaaaagtgatggcaaattattggtacaaattggtttttatgtaaggtcaaattgtttaactaaattcactttgaaattgaatgcgaaagcttcagaaaaaatatttatgtctgtaataaaatatttgtattttattttttttattataaattattggttaaatattattttaaaccttgtgttttgtaaaagttatcaattagactctctgttttattaaatgacaaaatagactatgtatttttcaaaatagtacaaaataggactatgaactaattttttgtcaaaataaaatttaataaaaattcgatctaaatgtgtcatgacaaaattatttgcattttttgtatctttttcgtattaggaattgtcttcaagttagttatattaaaaaaaaattgtcgaaatttaagttcaggattctatttttaccattttaaaaaatatagggtctattttatcatttaacaaaatagagagtccaatctgtaa

SEQ ID NO: 172316 - DNA, 952 bp, Cannabis sativa
agacaagagagagtctaaaatgtcatctttgaaccaaaagttattatgttctatttatagggattcattaggttcagggttagaactaaatggactgatttgaaagatccaataacttaaaataaactcctatggctgtaccccttataaaggcccatgagttagatttcttccattattttgctcccataatgaagtaaacttgtctttcttcaataatgtcgtattttcgctctacttatttaaatactaattctatctattttataattaaaattaattatcaaatagaattgccatttaaatatatttattaattagaccttccaaggtctctgaattatgaataaaccttcaattctactttcttctcaattatgcccttcctttgtaaaattcacaaataagacatagtctttatttagaatctattgacctcaaatttggctaaccaatagcagagttgaataaaatgctatttcttaccacgtgttacacaattaaaataaaaaagtaagtagacacaagattttatggaggttcgacccccttagttagtgggtaacgacctactccccttttagttgaattgatactagagataataccacttagatcactatagtgataggatatgaagtggctctcttaagattataatgtgataaccagagttggcaaatctcaagtgagaatagagtaataagcatgtgagagagagagatgagatgagttatcaaacatagagcttgatgcttaggatttgagactttgggttttagggcttgattaatgatctttatataggagagcttacatccgtaatatccctaaaaaatatgtaaataagactattatttacataataaattaataaaatacaaatgactaaatttcccctcaaaaatagggaagttactgatatttctcctctatttttgtgggttgatga

SEQ ID NO: 172317 - DNA, 642 bp, Cannabis sativa
gcaatcgaacgcctatcatctgggcagtaggcccaatcggcatcagaatagcctatgatttgcagtctattgttgcagctgatatgcaggccgcgtgttcttgttccttttaaatatcttagtactctcttggctccactccaatgtgttgttgacggtgtttggaggaattggcttagcttgttaaccgcatacgctatatctggacgagtgtggcacaagtactgtaatgcaccaatcatgcttcgatagatagtaggattgtgcattggctccccatcagatagagacatcggttttcctacaactgtaggtgtgggacacggctttatgttggtcatgttgtatttctacagtaggtcctcaatatatttagtttgggtgaggtacaaacccgagtcatccctgtgtacttcaattccaagaaagaagtgtagagcaccaagatctttgagagaaaacaacttgttcagttgagtgataaagctatagacttcactgatgttgtttcctgtgacaattatatcatcgacgtaaataagcacaaggatgatggccctggatgttttcaagaaaaacagtgagttgtccgcctttcattgtctgaaattccatgttacaagggtggctttgagtttgtcg

SEQ ID NO: 172318 - DNA, 917 bp, Cannabis sativa
acgttccgcgtgcacatgagagataagagtgactgctggatgagtggccgagaaatctcggcgtgtgcagcctcctaggtgagcaactcgtgtccgaacaagtggacatcgtgtctttagacatgaatttgtcctaatttgtgtgtgcatgccccctatcttgtccgagttcctggtgcgagtgagcaccatgctcgacaccacttggactcaaaatttgaaatcatcacatcttctttgttttttatcggaattgagtattgcttaatttttcacaaggaatccaaataaattatttttagaatgaaaataaaatatttttcatggaaaaattcgtaattcacaaatattcatcaattcacatataaaccaacatgaatacatccaaattcaaaatatcgttttaaatccatatttttatgaaagtaaattattaactggctctgaggtaaattgttggaacttattttaccaggatctaaatttactaacatgtatattgattaacaccctaaatatgaattctctaatacgatgaaataaacacatataagaaaatattatattgatggcagtagaataatatgtctcattccgctcagatctctaaccctttttcctttatgtcacagagtaataacaagatctgagcctggatctccttctccttcagtttggttagccatcgtcttccgcactatgattgagtacttgacttgctatgtgtggacatggtactctatcactaaaggcttgagttgatagaagaacaacaagaggagttcaaaatcactatgaatgagtctatcataaactagttgtctgacagagttagaaaactagatttagataagttgaaggttggattaagatttcaactagggtttaagatttaattatatggattaaaaaagata

SEQ ID NO: 172319 - DNA, 528 bp, Cannabis sativa
  modified_base (211)..(214): a, c, t, g, unknown or other
atctaattataagcaaccgctaaagattggatccagttgtgattgaaatgaattgaatattatttttaaatatctaattggattggatcgaaatgttggatgggttgtccaaaaatcaaatacatcccacatctaatagaattacttaatatttcatttactttagatgagtaatttgattttatattgttatacataaaaatatatatannnntatatatatatttatgtatatatgaaaattaacattaaaattttacttttctttttagattggatggatccaatccaatccattaaatactagatctaaaatattagatggatccgatccgattaagaaaatagtagatctaaaatattggatggatctgatccgatttaaaaaatattaggtctaaaatatttaataaacccaaatgactgcaatagatatacatgaaatacattcaatggatagaaccgatccgatccaacatccaatagatgctgattaattggatgactgaaatgaattggatcggatgg

SEQ ID NO: 172320 - DNA, 710 bp, Cannabis sativa
tctttcttgtgcttttattcctgcgaaattctttgattatgtgttttattgattattcgatttggtgctttgttgtgtgttttagtgtaataatttagcaattattttggttctattgctcttctcactttgttttgtattctgctttgtgttaatttcattgttagttgttgttgtattgtttgtgtttttgtatatggtgaatcgtaaatttgattttttatttggattattttcatgtcttgtgctgtattatattcactttttcatgtaataatttacttagttttatattgttgttttggtgtcttatgaggaaaatagtttacttattgtgctcaatgattaaccatattaaaaaaaataaaaataaataataatacatccatatcttttcattctttccttgtcttttgttgtgtaattttttttttttttttttgaaagagaaccaaggtccttcaattaaaccgaaaaaaggttcatgggatccacagggggaaatccctccccttgacaattcaaaggtacattaggtgaacttctagcatccttagctaacacatcaacaaaggaaatagcattacgggaaacaaaagcacaaaagcaattaactaaactatttttcagttttagcacgctagagaaaagagtccaacatttccagcttggagaaattccttgcagtaacgacttcaccaccacctgag

SEQ ID NO: 172321 - DNA, 650 bp, Cannabis sativa
aatatagtgttatactggatgaatagtgattgtgcccgacaaattatataatcttctcttatatagatgatatttatttttcacgcagaatctctaaacaaggttgctctgtttggatcttagtccatcataacctttctattgattttgatgattggatctcttaattattatatgaacaaatgctgagattcatatgtaaataagatccatccaaatattattcaagaaaaacacaccaacttgctacacaaaatcaacacaacgaaacaaagctacataagtcactaaactcatagtcataactttgtgaaagcccaaaagcccaacccatagatgctacccacaaggccaggttcatcggcccaagatattgagagcccatcaaaggacaatagttaaggagttaatggcatattcgatcaataaagactatattaagaaaaatactgtaaaaaaaatgaaaaataatcaaaatgtacattaaaattataaatatagtctgtttcaaaatgtacattaaagtcccccaaggttcttcacttcgcttggaaagctatctcggggtgtctcccaactcgtacccaattgcgtacaaaacatgttcctgttgatcctcgctgtgtgttttgtaattctgatgaagaaac

SEQ ID NO: 172322 - DNA, 605 bp, Cannabis sativa
gaaaattgttggtttaacatatttatttatccattaaagttaacgggttaaactaacaccgttaaattaatcaattaataattttttaagaaaaaaattatttttaaatatttaaatttaatttaatttattaaatttaactttaattattttttatatttaaatttgaattagacgttaattcaattcattaatcatattttataacaaatttattacattgtttacaccaaaagtagtcctgatgtttttgacatgtggcaagaaagaaaacatctcagagttgagtagtctcgaatcatagcaagtcgacctaggaggggtccctagccctgtgcccaagttgactttgggaacttccaaatgaaagttcaaacttcgataacttattttcaacccattatcttttagtattttgtaccatgaacacatggagcaactaaatcgaggccctaggaactgaaaatacacgaaccaacacctctgaagttaacctggaacctagggtttcaccctgcgctcaagttgacatcctcaactaggattttagattccaggactgttgataactctatggtatagagttaatttttatgcttttaaac

SEQ ID NO: 172323 - DNA, 940 bp, Cannabis sativa
gtgaaggggaggaaaaggaaatctattgttggacgagctgagagagctcatcaggaggatgaactcattcaacttaagagtgaggctaagttgaagggaggtgcaagggccaagaaatatgctcaggagccctgaaatccagaagatgaagctgacgaagagcaggcgactccactcaaaaggaggaagaaacttccagcccaacccaggcccattgaacatgcaatttgcattagggagcccagttcacctgcttggccgccttctcccgttctaggaaaagggaaagtcgttatggttgagataagaggcttgtcaggtgatgatggagttttgagtcttgctcgggcaatcatcttgcatactactctgtcttctttttaagcttcttgactattatgctttatgcttttgatgtctgttttctctaaccatgttgtttttgttccgtgcagacatgtctcagaagatgcttgatgctcagaagaagagagttggaggaagctcaagcgcatcccctcaggccaagaaatctaggggcggtgaggggaccccttccaaggaaaaggcaccttccggggaggttatcgacctttcggaggagctaacagttgcgaacccctccactccaaaagttgataagtctaaggattctctaggaagaagttcggacaggcctgagcaaccaaaaggtggatccgatctggccaagagtggtcccaagaaaatgcgggcccctactccacctttgccagtgcttccagaggccaagaaaggcaaggagatgctcgcccactacatgaaccagttggttccagaggttagtgagaaactgggaggagtattgaaggaattcacaagggtaagtctttctttacagtttcctttaatcctctttatttggctcagattttaaagttttttctctgcgcaggctggt

SEQ ID NO: 172324 - DNA, 610 bp, Cannabis sativa
gatccaaacaacaaatgaaaatatttctccaaaccgagcatcaagaattaggtactttaggaatgatatcgtgaagcccaagcacaaaagcaatcccaaaaatcatgggattgtatcaaaggaatatgattagctgtctgaatccctcatttaatgtattctaaatatgtaatgtatgttcttaccaattaattatacatattgtaagcaaaagggaaaccttccctcatgcatttatccctataaatagtgatccatccttactgtaaaaggggttgaaagaattgtttcagagagatctaagagaaaacactcaaagatttcattgtgagagctttgagagaggaaacattgtattcttcattcccaaatcaatactatctaagaggaataggctactaccgaactaaaggggccgaacctctttaaaatcttgtgttctttattgcttattgattttttctctgtcttaattacattttttatcgcttattagttgactcattatcatcggctaaaaaagaggtcaacagttaggttttagttcagttgcattagtcaaccaatggatcttcttgtgacatatagattaagaacatggtagttcaat

SEQ ID NO: 172325 - DNA, 1025 bp, Cannabis sativa
atgctgtgggaaaaaacagctatagcgtgctgtgagaaaaaatcgcggtaacaaaactgtagaaaaaactaagctgagtgtgttataatattttttaattatgttttatcaaatgtaaaaaaaaaaattagaaagtcaagtatataaaaaaaaatttatgttgatgttatttgctaaaattaaaataaaatataatttttttttttttttaaaaataagaaatttaatattaatttattttattataattagtttattttaatttttttaatatataataaataagtaaatatagttttagtaaaaaaaaattattataatcttttaatcaaaataattttaacttctttaaaaattatgttttcttttactgtttaataaacatatttttatcacattttttttttaaatatcttttaatttttctaaaaaattgtgccaagtgccaactacccattaaaagatagggattttttcaatattatacctaaaaatgattttatttataaaaatacctttaagaaaattatttgcacaaataccgttgtgccacgtcagcttacataccaaaatttaaaataattaccgaaaatagaaaaaactggaaaaatctcgtttccaaaaatttttgctttttgggagttttgaaaaaagcaaccatttagttgcttttgatttaaataagatatcaattggttactttttcattaaaaaatttatttcagaattgtaacatatataaataataaaataatcattttaatatgtgagaaatataaaaggacgattaatattaaaagaaacttttttgtttcttttttataattttagactatattatgttattttattgtttaagataccttaagattcttattcaaaaaaaaaaagataccttaaggttactctattttttttttaattaactcatatgatgttgtagatactatttaatttatttacaaattattttataaacttattaaaatatttttatataatctacaaatataaaaataaaaaaa

SEQ ID NO: 172326 - DNA, 571 bp, Cannabis sativa
gtttggagaatcatttggcccaagatataacaggccaatgtttgttcaagcccgtattgaagggaaatttagtgaaaattacataatgggattttgtaacaaatatacaacaatatggtacttataagttcattacctttttatggtatttttcacattaatatttggtatgtcatatttttataaacttattttttcacattaatatttggtatgtctctacagttcgtgaattgaagtccatgattcggtcgcgctccccgaattttgttttcctgactgaactaaaagttgaagctacttctttgctacgtactctcaactccctctatttttattttaatattcatgttcctgttgttggtaatgcaagaggaattattttggcttgaaagattggatttatgtttgaatgtatagcgtgctctcgcaaccatatctatgggattgtttattcggaccagtggcggaactatgttgctccctgctggggccatggcccctccttacatttggaatttttaaatgtatatatatattcattcatgagttccctatattaattgctttc

SEQ ID NO: 172327 - DNA, 549 bp, Cannabis sativa
aatattaatcattcctcaattcatcactaagtccatttccaaccgaactctaaacactacattttcatactatatttactcaatgagataccaaaattatactcataaatggctttatctacagcgtcccaccaaatttaataggatattagagcatctccaaggatacactatttttagtattacactatcaccaaatttgacgtcaaaaggtatttccactccgaccacaacaccaaaaattacactaaaaaaatattactcattattatattaattttttaataaaataaaaaattaatatcatcttaattgacaaaaattaccacaatgtgtactcttgattaataagaatatgatgtctactgtgtttaattttaattttaatgtgtttaaatttgtattatttttattatttaatttactaataaaaattaaaaaaaaatatataataaagtatcacttttaaaaatgtgcatggtaaaatttcccaaaatacaattcttaattttataaatgcaatagtataaatatatataaatattaatt

SEQ ID NO: 172328 - DNA, 542 bp, Cannabis sativa
gggttctttggatggattagagggatgtagagagagaaatagtgggaggagggcgacgattccttttggacaagctgatgagagagatgtagagagagaaaaataatttttttaggtttttaaaacaaaataaatgggaagagtttttttgggtatagtgtggaattattaggataaaattgtatagatttattaaatgggtattttttgtaataggggttttttcaaagatagtaaatgatattttccttttaaacctattttaaataaaaaaaaaaactcaataaatagtatttttattaacattgaaataaaatacaagcatatgcgttttttaattttaaaatggtctattttttattttaaacttttaaatatttatctatgtagactaattaaattgtgttatgtatcatgtggacaatacattgtatacacataacaatccggcataacatttaatagcctaaaatagatgaaaatgataaattggtaatagattacaagttatttggagttttttttttttttttttttttttt

SEQ ID NO: 172329 - DNA, 1395 bp, Cannabis sativa
aagctcatcagagatttgcctcgcaagattagaattgtaggacatgaggaacattcattattaagtctcccaagattaccatgtgtcacaaaaatgagaattaatcacatggagaatccagatatattgtacaaggcaataaatccaacaaatccttcttccagttctataggatgtttcccttccactctttaggagctccgtttgttgtcttgcgggtcatcgtttagatccctcatttgtttgttaaaaaactgggagttagaaagcgattttaagtcattgattaaaattaaagaatcatattaactattatagatttccctattctaattttttacaaaattggctataagtttagtaatttttttaatctttaattttgtgaaaattaaccaaatggtctgctttcttaatatatgatcctctataatgtttctatctgttatataattaaaataaaaatctttcaaaaagaaagaaaggagtagcatgtgatatgtgatatgtgaataaaaatacacaatggcctaccaaaccaattctaagaatgataaaatttttatttatatttcttttttgtaaaagtgtgacaataatttgtaaagtcttattgttgtaccccacagcacagagcatatgtgataacattttctgatatttgcttctctcacagttcctatcattccattcccattttctctctaaccttttttctgaaaacaaactagctactgaagtgaagtgaagtgaagtgaaacatggctgaaggtggtctacctgttagtttgtctattctttgtatatcgtatgatgaacttttgaggatgaaatggaattggcaaacattaccccatcttaccactcttcgtattaatggatatggaatagaagaagatgtggaatcattccccaagggctactgcctaccactattaccaatcttcaaatctggggattttcaaaacttagagggctggacaaaaaagggcttacacaactcacctccttgcaatcactttacatcagcagctgccctgagttggagacattgtcagaagaagggtttccatccccatccctatttgtcaatataaatcctcagtctctcaagtgtgatatttgtcaattttctaagcactctcgccactctttcattccaagaccttatcaaccctctcacccattctcactcattcacggtgatatatggggaccatccaaaattcaaaatatcagtggggcacattggtttttattactagttgatgatcacagccgcctaagttgggcattcctcatgaaagaaaaatttgaaacaagtcatattttccaaaatttccacaaaatgatccaaactcaattccaaataaacatccaagtgttaaaaaccga

SEQ ID NO: 172330 - DNA, 902 bp, Cannabis sativa
tattgtttgataaataattttgcaagtggtgaacatggtagtagacttattgtgtgactgaggctaagctaagagggcattccatgaaattttggtttataccgacgagtatttctgttagtgttaatttttttttagtcaattatagatagtaaataattttagattgaggttatagatagtaaatggttttagattgaggttataaaaatctttgaatattatatcagagaccctatgttgaagaaggtgcaatcaaagatcctactaatctgcgaagatgggttggggatatattagtttgtgagaagctacccttttgattttactttgtttttcttgttatatttatgtcccttttagcaatgcgtcattggttcttagctattgttagtattgttgatgaaagtgtatatgtttatgatgacctccgtgtggtgaatcctgcattaggattagaaattatctgtgattttgtgagtattgaataggagaagttataattcagcatatttgtttctttaacaattttttgattacttaacctattttgcagcttgtaatattggatttagcatttcctaatgctttaagaagagcaaaaggccttgtacacgtaatggatcttgaagtactatttccgcatccccttgaccaaatccatccacattaggattactcattaatggttgatccagtttgatggcttcgccctctgaaacaagaagttcaggacctggaggaataacaaccacttgacgtccatcagatgcctccactatggttatttcgtatacccttttttcttgtcgtatgatttttcttactatacccgtcgttgtagcgttataaacattattgttactcttgctccagttgggataaatctgaccccttcctct

SEQ ID NO: 172331 - DNA, 721 bp, Cannabis sativa
acctgctaaaaccccaatggatccgaggactaagctcactgacaatgaaggcacacctctagacgatccttctgcctatcgtcaactgattggccgtttgttatatctcaccctttccaggcctgatataacatatactgttaatgccctaagccaattcatgtcagcaccccgcactcctcacatgcaagccgttcatcacttgcttcggtatctaaaacggtgccctggacagggtttattatacagttccagttcatccttacaccttcgaggattctcagactcagactgggcttcttgtcctacaacacgacgctcaacatcaggtttttgtctcttcataggagactgtttaatctcctggaaaactaagaaacaaacaacaatctctcgcagttctgctgaagcagagtacagagcacttgctgctgctagcagtgaagttacatgggtccaatacttgctcaatgacttacagatccctcaaaaggctcctgcattcctctattgtgacaaccagtccgccatacacattgccaacaaccccacctttcacgaacgcaccaaacacatagagttagactgtcatttcatcagggacaagataaaagcttctacactccgactcatccctgtaaataccactctacaacttgcagacgccttcaccaaacctcttccatccacaattctggcttctcatatccgtaagatgtct

SEQ ID NO: 172332 - DNA, 684 bp, Cannabis sativa
gctccacacttccaagtcttgcataatttacgtaatttttaatttactcataattttttttttataatatccaaacacttcgaaaatattttttatcaaaaaaaacctctatatactcgttatcaaaatataaaagtaaattaaatttttttacttagtttatacttttagctgtaacaaatgtagaagcttaaccaaataagaattaaaaacacgattcaagaaaattttgagtttgattagtttgagatttaaaaattgtgttttttaaaagggtgttttggaaacaaaaatttgaattttatatgtaaaaaattatttctaaaaatgtgattggttgtagtgtaattttgtatttttgagttttaaaaaattagatttgtgattggttggaaatctcaaaataaaaaaagtaagagagtatttgaagagtttttagattgaatgatttgaaaacataaaaaacataaaattattgttttcatttttaagcataaaactcaaaatttaggtggcttttggtaatattttttttaaatcaattttttattttcaaatttggaaaagtaaatatatttttcaaagacataatctataaaactgtttttactttttaattttttaattgagaattaaaattttgaaaagaaaaataactttcaatattttttaaacaattttttt

SEQ ID NO: 172333 - DNA, 697 bp, Cannabis sativa
  modified_base (484)..(485): a, c, t, g, unknown or other
caggataataatttggattttaatgttagttaaaattatgttaatttttaattaatttactaattttaaaataacttaactgaatttatttataaatttaaaagaagaaattgtttaattttttttcttcaaattatgttaaattaatcacatattcttatattttcaaattctataccaattacaggtttagcttcttaaaattcaaaaaaaaaaatttacatatattgaaccaatcacattttcaaaaatatgttttcaaatataaaaatttttattttcatttaaaattgcagtttttgaaatcataattttcaaattaccaaccaatcaggctctaatttcttttcgaattattattatgtaatttctcttttgattttaggccgtatttttctttaatttttattttgaacggggtaaatagtagcataagtacccaaagttttatgtttgtaggcggcataaacccaatgtttatttnnagcggcataagtacccaatgtttgcaaaactttaatttttctctaattttgtcagtacggactctgatattgtcttgatcagggcacatgtaaggcctaaatttttgatcatcgagtctagatagaaatatatagtatcagttactttcaaatgttcttttaataaattcaaaacagagtttgtactccaaaactggaagaaaattacagtt

SEQ ID NO: 172334 - DNA, 812 bp, Cannabis sativa
tctagcttaattatgtcttagacgcataaccctttatccaaacatatttatcaaggcataacttccaacaccacatatatcactaaggtaataaccctaggctactaaaccactcatgttagggtaataaccctaatcccggttactaattactcacatatatcatttccaatataagcgccaccgtgtataactctacgtgctaactactgccttacctgatgtcccgcaatagtagagattccaaatccccgggtgctcctgaccaagtgccggtaatcctagtcacaattccaagatttacacaaatagggttaatcccttattccacatccataaaatatatagttggcattcaaaacacaaatattcacatagatctcgaaacaagctttctaacggtataaagaactctcaaaacggagtctgaatcacaaagttatggctattcgaagtttgcattaggatatgcccagaaagaaaagggcgggccagggcatgcaaaagccatgccgcaacacctggattcaaaacccagaaaattcaacaaaaacttcaaatttcagccccaaaaccaccttcaaatcaacccaaatcaacgcagaactcaaattaatcttccacaagctagcaagtacaaaggtaggcattaaaatacataattttcatgcttaaatccagaaaaaacacatcacaaattaaaaatttaaacaacataacattcaaagctccaacttgagcaaacccatctataactcaaactcaagaacatagaacttgcaactagatacacaaaaaaccagcaactaaaa

SEQ ID NO: 172335 - DNA, 647 bp, Cannabis sativa
atttatttaattacttctatgaaacgaaattaggtatattgaccaatcataaaattaatttaccctttgaaaaaataaatatctaatttaaatttaaattaaataatataatatataaattaacaaatatataatttaaataaattaaatgaaaaaaaaatcattacatatttggcgtcagtagttatgggtgtatatgacgtcgattattttagaccttacattgtcacttggatcagcgtcggtagcgaattttgccaaaaccgacactgaaaggccttaaaaatcgcctgttaaaggtatttttgtagtagtgtaatgagtaaaattaccaaattttaaaaaacaaataaaaaatataaaaaattagaaaaaagataacatatagtaaaaaatttctagaatgccacctcacctccttttgtgatttcctttaggggagttctatttgcaccccataatatgataagtacaccccattatttaaaaaatataaacttaaagaatttttaaaaattactcttattattgtattaatttttttctcacattattttatgttaatttcaatatttattattttgattttattttcataattttttctaactcatgtgtatttgtttttttttttattttttctaaga

SEQ ID NO: 172336 - DNA, 754 bp, Cannabis sativa
aaccattttacgttaaaattggtaaattaattttttttttatgttaaagtttgattacttattttttttagaaaaaaaaaaaaactaatataaaagaaattaaaatgttatatatgattgccataaagtactttttcaactatttagaatactatatgattttttttttttaatatgaataacaaaatatattttagtaacctattaaaattgattagaatatttacttttgttgattttaaaatttgattaattaaataggaaaagaaaaagaaactaacaaagtaatttttatttcggtcaccttcattggtgatggcgaaaaaatatattttttgcatattaaaataataatctttaaaagtagattacaattagtataatttttgaagtcaaataattattaatgaagtcagaaaaactttataaagttttgaaaaaattaaattaaattaaaattaagaaaagagggacatataaatgttatttcactatgaaaaaaataaaaagcaaataaaaaagcaagtcaaatagtgttagtaaagaattgagtaagagggtttgaaaaaaaaatagaagaagaagagagtcagtcggtggttaggaaaaaaaaagaaatgatctcggtatacgcatacaatattattaattaaaattttttatactttgcatttaaatattgaggtatatttctataaataatttagaaaatgcgtatgctgaggtaattttcttatgattatatatatcattt

SEQ ID NO: 172337 - DNA, 923 bp, Cannabis sativa
  modified_base (306)..(308): a, c, t, g, unknown or other
tacaactaatagtgtagaatcaaaacaattaaattttaaacaatcaaacaataagcgatgataagattaaaaaaatcataaaccataatggaataaaaaataagggtgaatagagtgaggaaaactagaaaactaataacacagaaaataaagaaataaacaccaatgtatatactggttcaagtttgatagatcgatgtgatctatggcggtactccaattctggaacaccatgtcttctttattgattgagcaataacaggtacaatacaatcaagaaggattctctattgagttctctcaaannntttcaactctcacactcttacccaagaatcttcttcatatacaaaagattctttttacaaaatccaaacccaatctctctcttttctctgtacctctcaatcttttccctcacttactctcaatctcaatctgaaccatattctaaaataacaagccaaggtgctatatttatagtcttaggattaagatcctaaagtcggtcgctgcaagaatggaagttgttaagttagttaggcagtaacttactcaaccaactttcctttgagcaagatctcctgcataagccttagtgcatcccgaaacgtatgtgaccttgcgggatcatggaccaaaggcactcagtgaaggagcttccagataggacagagcttgttggagtcgactattcaaaactgcctttccaggaggaacaactggccatcaagaattccattgcggagaagggctagattttcttgaagacccttcctggaaagacaaggaagcctttcagcttctgtaagtgaacagctttccaggaatgacttttggagacctttttatttggatgaactatactacaattttacctagttacttcaaattaaaattatgacgatgatgaagaaagaatg

SEQ ID NO: 172338 - DNA, 501 bp, Cannabis sativa
tttttaattatttctttacttttttcaaaataaaattagtttgtttaaattatttattgaatttttaataattttggtttgattataaagatacgcgtttataaataaataaaatttgaaaatatttttttaagaataatttagatttttttaagtaaatttaatattttaattaagttttttaataatttttattattattttttagaattaatagaacataataatttttaaaattaattttttaataaaaatgggtaaaattatatattagtcaaagtttagaagtaaaaatattaatttttaagagtaaaagaaattgaacctaacaaaaaaaaaaatataattatgtaactactatattttaagaatagttttaagaagatttataatttatgagacataataatagtgtcgaaaatttaagaagttaacatacttgaaattccgtattttaatattcccagtttgattgtttaattaaatgattaattaaatgcg

SEQ ID NO: 172339 - DNA, 669 bp, Cannabis sativa
  modified_base (72)..(76): a, c, t, g, unknown or other
  modified_base (300)..(303): a, c, t, g, unknown or other
cagggtcagccctgagttgaaatgagctctaggcaaaaaagaaaaattaggcctttactataaagataaatnnnnnttttaaaaattattaaaaatatatatattttttaaaaagtaattttttatttgggcccctaaaatgagtgggccctaagcgcaggcctagcccgtctatgcctcgggtcggccctggttatgtctatcccattatgacctgatagtaatactctgcactgcccattatatagttaggaaaatttacaaaaatattgaaatttagattaatttttacaaaaatannnncacacggaaatgttttcaaaaatactgcattttataaaacaccagtagaacacaaaacagaacaactcataacaatagtagaacaattataaaatactagtaagaacttaacgcagtacattgcagtgtgaaacttataaaaaaaatacagtaaaaaagtaaaaaataccgtatgacaatatttttctaaaaaaatggcaaaagttagtatactatgtaaatttctatatagttatcattatatagtaatactaagtgaccaacacttaattatattacttgaggctagctcaagtggccatagggggtgcgtgtgtattggaggtcctgggttcaagtcctaagttatgcaatgttatatataaa

SEQ ID NO: 172340 - DNA, 638 bp, Cannabis sativa
ttttagggggacaacttgtaatttcttttaaaaaaatttgcatagtttatagtgtaagaaattaggcttaaatagttgcttaccacatatgtaagaaaacaaaatcacatgtacaacaaaacatttgaactttatttacagatggtcctatctaactaacatacacgattatgaaaaaaatcgaattaatatattcttctgaatgaggaaataagagatgtaccagaacaatcccatttgaggggtgtattatagatttttcgtatataatataggtattattttttttctttctttctaagatatatcagatcttaaatatatgtgttatatatagagagagagaggtgtctattcaatgattacattaaaaatataattataatggtatatattcttctgaatgacgaaataggaggtgtaccaaaacaatcccatttgaggggtgtattatagatttttcgtatataatgtaggtatcattttttttctctaagataaatcagatcttaaatatatgtgttatatatagagagagagatgtgtttattcaatggttacattaaaaatataactataatggttatattttttacgacgtgctataatataggttaccaacaggttattattaaaaa

SEQ ID NO: 172341 - DNA, 980 bp, Cannabis sativa
gtctggtgcaagtacaagccatccaaatcacggaaggggaaaagcaaaaaacaaagtcgtccgctcaagcctatgctcttggggttgatgatgtacagggcggtgctaaccagggagttgttgatggtatggttcttatctcacactcttgggctcatgtgttatttgatactagctggtgcatcgcattcctttatatcattgatgtttgctagtatgttggctttgagttggaaaacttttagtcctgcatcatatttgagtgtaccgatgggggacacagtgaggtatccaccatatgtaggtcagtttgtattgtgattcagggacacaagttgtctagaaacttaatagtgttacctatggatcagtttgatgtaattcttggtatggattggttgtctaaataccaagctattatggattgttcacacaaaagagtgactcttttaacccctagtggtgatttcattgtttatcgagccaacatcagtgcagtgagacaaaatcctatcttaagggcatgcttaggtggaaagagaaacttagagtgttatgggaatctatttgcgatcgatgatgagtctagggatttagaccggctcccttggataacagtggttagtggttttccagatgtgtttccagaggatttaccagggttaccaccagatagggagatcgagttttgcattgatttgatccccgaagctcaaccagattctattccgccttataccgcatggcacctgcagagttggctgaattgaaaaaaaaaaaacaattatgggagttaatggataagggttacatcagacatagtacttctccatggggagctccagtcttgtttgctaagaaagctgatgggactttgtgactttgtgtcgactatcgaaagctgaatcagatgacaattaaaaacaaatatcctctaccgaggattgatgaattatttgatcaacttggtggttcaaagt

SEQ ID NO: 172342 - DNA, 898 bp, Cannabis sativa
aaatatgtataatagctaagaatttaaaatatttgatgaagctcaattttaaagtcttagctattttattttacctttttagttattatagctcacttgttatgagtgctctaagagcatctccaatggagtgtcaaaaaggtggtacattactatattttagtacacttaagaaaaactatactctaatggtgttctaaaaagtgtgttaaatttggtacatgctaaaaattgtgttaaatttggcacaaaatataacattgtgtcaaatttagcccacaataaatattacttttttatttactataatgtcactaattattatgattaattgacttttactaaactttatttactttaattaccatattactattatttaaataataaaaaataaaaataataaattttgtatattttcaataaaatataaaatgaccatcaatataattaattattttttccttattttacatcttgtgtattagagcacaattgtaaatagtgggccaaatatagcacaaacttaatttttgtgctaaattttgcataaattttagattttccattggtgatggtataagattttggtaattagctaaatgctttgttaggtgtgattttaaaaaaacaataaataaataaagagaaatttgcggctaaacccccttatgtttcaattgttacacacttaacctcctaatctttgtttttggtggtaaaactcccttgagttttattctgtttacactttaatacatatgttaaatttggctgttataaatgccaaatagaactgccaacttgtacacttatgtacaagtggcatagttttattgccctaaattatttttataatataaaataataaataaaatatttttttcattctttttaa

SEQ ID NO: 172343 - DNA, 537 bp, Cannabis sativa
agcactataataattaaaaccttatttagatttacaatctttcttgataaaataaaaaggcatcgtaagaacactaaatgtagaaataaaattttatctaacaacactgatgttttggctggataaaggaattttaatccaattcaacatagaacatgttatccgcgtctctgggtttggacacgtggattccaagtcagcattcaggatccatcagtgggaccctcttcagtaataaagtaggccaagcctatctggatatgcctctcttggaaccatcctagtttcatactcgtaaagtcttccgcctttgtctgactgagcccggaagacaccttcggtgttatgagcctagaggggaaaaatattgtgttcccgaaagacccttccgattcccctatttatttctacaagtagataaggaaatgccattgttagatcgcgccataatatcgtatcgcaattaaaagggaaacttcccataataagtgcagtgcagttatttctgaataatcatctgttggaatatattttacc

SEQ ID NO: 172344 - DNA, 508 bp, Cannabis sativa
  modified_base (403)..(406): a, c, t, g, unknown or other
ttacagttgagagaatgacatgtacgaatgaatgcctactgaatacgttgaaaaatgtaattggtacgtacaattttctaacattaatgccccacaacaatttaatgttctcaaatgatcatatcatcgaatctaacaaaatatttatttatatatatttcctcaaattttatgtcacatctttgttttattataattaataaaataaaattaggacaaccacaaaaaataatctataatagtctcatctaatatataattaataattttttctgaagtacatcactgttactagtaaaattcgctattgtactgataaaagtaatttttaccagtcatttcgcaaactgcactggcaaagaggtcaaagttttaccagtgtacatttgcagtggctaaaatnnnncttttaccagcgcatttacacgctggcacctggaaaaagttatttttgccaacgcttttcattttatgctgacaaaagttctaataccaacattgatttgcc

SEQ ID NO: 172345 - DNA, 588 bp, Cannabis sativa
tagtgatcattagatatttttttactttcataaacttatgttaacaaaccacatgcatgaatctattgttaactagaattatatatatttttaatgtgattataattaatgatattataacattattattataattaaaattgtaataatttacgacacttttaaattaataatttactaaacatttagcacaatatttttccactactcatttatcgttatttttctcacaacacaattacaactattatttcccgcagcacaattatatcaaactgtaattatataccttactatattaatgttaaaaagcattataatagtgccaagtaccacccaagatatctggattgtatagtgattgaaatgtaaaaataattgattcaatcaaatccatacatatttataaaaaaaaaattaaaaattatatatacaattaatatttcaatgtaaaaaatagcaatttaaaagtctagtacatatattacaattatatttcaaaacttataatagatcaaatgtctattctattcttatatataattttttttctacatacaatttaaaaataaattaaacatttcttta

SEQ ID NO: 172346 - DNA, 969 bp, Cannabis sativa
aaggtcaaataatgtgggttttgatcaaagaaaaaaaatgccttcaactatctatataaacaccccaaaactcactcaataataatctatatcgatatatatagcaaaatcaatatttatatataattacacagaaaaagaaaaaagaaaagaattgaaaatggctgatgaattctgtcctggtgcaggtattaaatccaatacttatatatatatatacacatataattatattagttaattaattatctcagtaattttattgctagctattatatatttctattaatatttataaaatgagcattattttcaggtaatttttttaaagatgcctaatccctcccaaaaaaataaaaaagttatatgtatagtattaatttttatcaacatataacatatgaaagtttagtataaattaaaattttacgtaatattataaaaaaaaatatgagatataaaataatttaatataatacaaacaatacatgaagacatactaaaccaaccttatattacttattatatgggactccacattaattaaattatactaataataatataaaatatatctacgtctttttaatatttgtatgataaagtaaaataatattttgtaattaagaaagagcttattattattattaattataattgattatatatatttatatataggtaaaagctcgtggccggaactagtgggaaagaatggagaagaagcagtgaagacgatagagaaggagaatgaggatgtgaaggcaataatagttgtgaaagggactgatgtgactggagactttgactgtggaagggttagggtttgggttaatgagtctggcattgtctatttagtcccaaccattggttaattattaataatatatattatgcatgcatgcataagtacgtatacttaataatttaataaatatatgtaattgttacaataatatattaatgaaa

SEQ ID NO: 172347 - DNA, 571 bp, Cannabis sativa
aacaggagttaccctatatcaaggttcaggctaccgccgggaggacccttcgactggaaacaggtaaagaacggatgccttctgggcctaagttgctggtccaggtatccaatactggggctcctgatgccagcacatccggattcggtaagtctcccttaacggtctatcacgtcccttctgtccaagattattcccggtgtaggcctatagaattttacgagcgtctccttagatttaggatgccccccacttggtgggggtgatcatgcaaaggccttttatttttccaacttaggccattttctaggccaatcccggatggggtccggacctcttgcacctattcccctagatcattcagcttatttgtcttccagctggtttctcccctcagacagctttctttgggatgatgaagccagtattgtagtgcaagactttgctagggctgagttagatagttagggtaggagtagttttacagctttgttttcgtgtgcatattttctcatggccactctgacacttaatttatttgtctttttgaagcagccaagccaatggagga

SEQ ID NO: 172348 - DNA, 684 bp, Cannabis sativa
  modified_base (193)..(193): a, c, t, g, unknown or other
gcaacccaaggtcatcgttctcttaggtttttacaaccaaaaaaatattctaaggatctacaagaagatcaaaaaatacgaaattgtatcaagaattatgtacataaaaatatgaaaatatcttctcttatttattacctgtatctactatttaggcaaaatatcgtcacccattgttactaagaaactgaangcaaccttagaaacgaaagaaacatatgtacaaatataaacaacttcagaaacaaaaggactaaaattctacgataagattatcctaagattaaagttccgccttagggtcggtcaaattaatatcgaataataaacaagaattgttcttgtctttattaattgcaactaaaataactcttattttctttataaaataaagtaccgcttgtttggtcaagttatgtcccctaatgtcaaagacggggacattactttgtgtgtaacgcattatttcatattccacgactaacttagtaacgccaccttaagggtcggtattgtactaaaatagatcactttatcctatccttaaaaggaaaccaacctagacaatgtatggttcaacaccttataaagccgtctcgaggcccttcccataccctcgggtgttagactaataatggagaccatgagttgttatattatttataataatataatatatagatt

SEQ ID NO: 172349 - DNA, 836 bp, Cannabis sativa
ttttaaattttattccattccacttcaatgtgttttttgtcttgcccttagtaaatttttattttacaccacttcaattaaaggtatatattttctgtcttatcttatccttaatgactcagattttattttctatcttgaaatcacttcttttcatattattttccattctcatttgtaattccgattttcttccctaagcatgatgatcattgtgaagaaaatatactctacccaaccttcaagcacttatgtgcaagatttaatactaaaattgatcatgtaatatatattttttttttttaagaatcgccaaagcgaaaacaaacaagccccactgaacagggacgaaacaaggagcaaacgctcaaaagagaaaacaaacaagcaggcaaaacgaaataattacaatcatgttaattttattatttatttttatgtagctttccatgcaaagcaatgtatactctattttctatttttttttcacttttatatattttttttataattttttcatttttataaaaattatttttattttgaggttatgttgtttttattttgaagttatattgtttttatttcgtaaaacttattttcattttgaatttatgtgttttcatttcaagattatgttgcttctatttttataaataaataaaaaaaatcaattataaaaatataaatgaataaaaagttaattataaaagtataaataaaaaagcaatattaaaaatattgtatttattgtgagctaaaatttaactaatgctatcttttatgttaaatttggtataatttaaagcttgggccaaattttacacatttttaca

SEQ ID NO: 172350 - DNA, 621 bp, Cannabis sativa
agcgagctcaggcttgtgactgatgatctctttgacaaaatctacatggccgagcatagccgccacatgaagaggtgtctctgaaaaactattattgttgatgataaaaggtctatcaagaattaaagtatcttgttgaagaagttcccgtaaagcggcgacctttccttcccgggcagctcggtagagcaagctactactgtccatgtttttttgatactaagaacttagggcactttgagagaaaactttattactttgatagaaaaaaaaatagcatgttcattaattatatacattcatattttaccttaagtaaaatgacatgcactttttactgatgttaaaaaaattaaatgctatctacctaacattttgatctcatgtcatattaaccatatacttttgcataataattgtgtggggtgaagtttgtgaacataaggactgttttgaaacgtggctattaatgtgttgaaacatgttttatagggcttattattgagttgacacgtgccctattataactaaatttttatcaagtgattttttgtttgtatatgcaactcttcaataatttttgttttttgtttttttatggaagagaagtgaataaatttt

SEQ ID NO: 172351 - DNA, 1066 bp, Cannabis sativa
  modified_base (1034)..(1035): a, c, t, g, unknown or other
ttttttttatttttttttatatatcttttttcactataaaccgaagccatggaaacaaagtggttgttataactccggccaccaattttagtggagaaaacattgaatgtcaacgtccatcaaggtataaatatgatttctactcattttagtaatgtacattgctttattttttgttttgtaatttttttttttgatttttccatattattaaaattatgttgttgtatatatgcgtggtggtcggacttttgtcgcaattgattgtcgcattgcgcttattaagtaaaatttaaaccttaatacataatatatatgtatgtattttgttttattaaatatttgtgtatataaatattttgtattgtgtgtacatatattgtgtattttatttatgaaaatattgtaattgtattgtatatattctaagtattgtatatatatattgtgaatgtgagtgagataggagagatttaattagtttaaaataaagtttttaaaattttattagtttgagatataatttattatatatgtatgtttttttttttaataatttatgtatataatttactaactagtaactagttatttttttttttataactagtaagtagttaaataattaaatttttaattttgttgtattttattatattgtaggttgtgaactaattttcaaggttctgaataatttagagttgatcggattttagtttgctagaggtatatacattcactaactttttgttattaattatttatcaatgcttactggagtttaaatatcttaaatgttcatccgtagtgatgcagattttgcgagtgagtggccccagagtcaaacaatatagagaagtaagagttgttgactgagagctgacctgttacaactgaggggctagcctatgcatctgcctgagttagagcaaacacccttgctggagcgagttttccagtagttttctgttcttctttcttaagttgtggacagtctcgtttgtaatatcttgctgttgggttttgtgccctanntaaaacccatttcaatataataatatttact

SEQ ID NO: 172352 - DNA, 508 bp, Cannabis sativa
taataagcatctcttgttgcagtagcattattccaaaaataaatgccttatatcttccctctgtttatcaccaactaagcaaagattatcttgacacatgttaaatctcaatatctctcatttgtctgcaatcgacctctaacagcaagccacatattatgaactggtgtttaggaacattaaaacaccaccaaacattactgttccaattaacatgctcttgactcagattatctaatatattattttatacaaaagtattattctaacattttattcatacttttgtatataaaagtcacaagtaataggtttgataattttattatttaattaaaaaatataagtgaagaaaagtctcaaaatagagccatattttttccaagtcctataaattgcaatacatatagtgttgtaacgatccattacttagattattcatgatttatttatttatttatttctggcacatataattgacaataatattcttcttgatgagttgatg

SEQ ID NO: 172353 - DNA, 908 bp, Cannabis sativa
gtgccacctatcttttagggaaacaaaactagaactaacacatttgttgctggaaacagtaagacaccagtaaatggtttgacagaactcgacttaggtactagacttgattggttggaaaaaccttcttgatgatttgtaagttggtataggccatctttaagagtcccttgcagcagcaccctccttgactccagatccttcacaaaacaattttgagcaaagaattcaacaaacacattattatcatgtgtgagtttagaaatactaagtaggttcttagtgatgttaggcacatgtaaaacattgctcaaaattatggagttgttatcaaatgagggtattagacttttaccaacatgggcaatttcaagtttattgccattaccaacagtcaatgtctcctcaccattgtaatcggtcttgtgagtgagattgtttgggtcggctgtgacatggttgcttgctcctgagtcgacataccaggcagtgtcctccaccatttcaggggtagctataaatgcagaagcaccgttgctattgttactggtttgtcctcctttgtttccactgctggatccatttggatctgaacccatatatgtttcatcgtagcgattataacagtgagcagcactgtggccatatcttccacatacttggcatgtgggtttagtattgccttgattccttcctccacgacctctgaacctacccgagcctctgcctcctcgagtttggttcgagttgccacgatttccttgtccatactgcccagagttattagatctgttgcctgcaaaaccagtgtttcttgtagcagcaacattagcagaaggagaacctgagataggttgtttggaagatccagacaatgttgttagcctatctagcttgctgtcaaaact

SEQ ID NO: 172354 - DNA, 734 bp, Cannabis sativa
  modified_base (667)..(697): a, c, t, g, unknown or other
cacaaggcttcgtatcctcttccttcgagttggatacgaccccaatttgttttgtagaaatctttttagcaatcttcatcaactcttcaactttacgttcaaggcgttgagtcttatcattataggattctcttccgtgaatgcgatcgttgatatggtttgtcaaatcatttccgtgggatcttgctttttcaactttagctctttccttcttggtgtttaatcttcttcggagatcaatagtagaaaggcttcctccaatgtcatccaataccagatggacttcttcaacctactcgtcatgttttggaatcactggcaggaggtgttttcttttgtaatccaacatccaaactccagcatccttcttgtttttcttcgtgactctacctctagaatcagttttgtcatcgttcctttcggcatggtttcctttcctcttctgttgaggttggttagcagctttagacttcttaggctgtttcgtagaattccacagcgatgccttatcccttgtctttgtagatgcctaaagttctagggtcctttagatcagctttctcaggtgcatttgttgctggaggggatagtacattaggagatggttttttcatggcagttatcacagcctacatgttggaattaattttaccaagatcttagatcnnnnnnnnnnnnnnnnnnnnnnnnnnnnnnntatgaacttctaaaacgataaaaggaaaacacatata

SEQ ID NO: 172355 - DNA, 762 bp, Cannabis sativa
gaaatagacttgtaatattttgtgcaaatatttgcaggatcctgaaacatgtatcttttggttatttgtaaagtttaaaattactacaagttttattttcattgtgttttaaataaagtttaaatttctcgcacttacgtttctagtaatcatggattaggggattaggaaattagggttttgtaatcagttatcgtggcatgcctaattgttagggcattacagtttggtattagagtgccaaggtttttaaacttcctgtagaccggctgaacatgtacaatcatcgtcagagataagctcggctcgtggtgtagtaagtgttgagagtaaacacttcactacttatgtgattatttatttatcgctttccattttaggcagtatgtgagcatcaagtgtatttatgtgatatgaagccatgtttcgagtatcaattaataaatgtctatataattggaatgaaatagttgagttagggtttaaaggcaataagtacataagtgtggtattggtgcctgactccccggggttgttaatttcagtgttatttgtaaaaatagaccctccgcaatcatctagaccatagggcgagcaagtaaagcctggtgtagaccaaaccaatccaccggcagtgcctgcacccccgcagaatctgggggataatgtgggggttggcataatgctaatccgaatgctgattagtagcagatatttcaagaaatacgaggtatcatacttcgtcaagaggaagaattgcgt

SEQ ID NO: 172356 - DNA, 766 bp, Cannabis sativa
atgctaaatagaatgaagtgtcatccttgttttgaagctcgaaacaggaaatatctagagctgaggtcaattaagcagactactaaatcccaagtaccaaaagctaccccaattaagtttgattttcaaaaaataagtaaattttgagatgagataaagagagtgggaagggggtcaatttgtggctgagcaaaaacaagaaaaatggttttcaatttcaataaaatttcctttttgctaaacataaatcaaataagtaaaattacaaaaatgtccgtaaggccacattccacatatacatgcattacaagggtaaaaatgtcattagtcacacaccacattatccaaataatcctcagaatattcatgtaataataaaatggcaatataaaatcctgaaagtgtatttcagccccaaatctcgtttggcccgaaatacccgatattgactataccgcgccgacctttcagaaaacacttaaaaaatgacacatcaagtatactatataataatatagtccataagcacgcaattaaattaaatttattgttttacccttctcgagtcaaaattactaaaatgcccttggctcaccaacgggtcttaacatgtcatatatcagattaattcacatataattaagagtaatttgtggcaaaaatacctagttttctcccgagtagcagataaatacctaagtcatatttttggcggtaaaaataccttccgtcacacttctggaacttccgtaggtacctctccgtt

SEQ ID NO: 172357 - DNA, 533 bp, Cannabis sativa
tcaaacagaacttggcatttagttatgttaccaccaggttctaagaaaatagattgtaagtggattcttaaaaagaaattaagacttgatggtactgttgaaaagtacaaggcacatcttgttgccaaagggtttagacaaagagaaaatgtagatttctttgatacattttcacctgttactagaattacatctattcgtgtacttttttctcttgctgctattcataatcttgttgtgcaccaaatggatattaaaacagctttcttgaatggtgaattagaaaaaatagatttaaatggatcaacctaaaggttttgttgttcctggtcaagaacataaagtgtgtaaattagataaatctttgtatggtttgaaacaggcacaagcaatggcatgagaaatttaataatcttgtcatctcacatgcttttaaagtaaatgaaagtgacaaatgcatttactataaatctgaaaataatgtctgtactattatttgtttatatgtggatgacttgctgatttttggatca

SEQ ID NO: 172358 - DNA, 592 bp, Cannabis sativa
agtcagacagatttgggcaagacaaaccttgtatcattttctcgagttgatccatttgtgctcgcactaaagggtcaactttagcttgtctttggcaggcccggttttgacctgccagcccctgcctggccaggatagccggtgggtggacaagaaattggctagccagccccctactgggttggctgggtttggcctattgtgctctattggtggagtgtttaggggcaggacgtatttgtcccaagcatttcttcttcagttcagaccaacctgaagatctccctaacatgggggccattctgcaaacacaaattctttaggcctcaagtcagaacatggttgattgttttgaggcggaatgttgttattgtgtccaaaattttaatctctccaattagtgcgctcatcacttggctgactagtggcactatcatcattaggattggggtaagactccccattatgagacctgctctggccttgtattggtgggatgtcttcccccttcttcatctttgagcaggctttgaaattggtcagtcctggcatatgatctttcaggcaagacctggccatcattgggctgata

SEQ ID NO: 172359 - DNA, 960 bp, Cannabis sativa
tagtaaaatatttaactgtcacagtctgcagtagtagaatgtaattctgtcactgcagaacacagttttgcagaaacaaacagaaataaatagtgcagaatttaaaaacttgacacaagagaattgtacgtggtataaatgttctttcaaacactactagtccatggggctatgcccaaagaatgaaatcaattagtaaagtatcaaagattacaaaagcaattgacttaaacaaatttagactccctctagtgatttattgcaaccctttgtaatccaccttgctaatctgatatctgaaacacaccaagtagtaaactcccttcagctattaatgtgtgcttacttcctcccgaagtaaggcttaaacaaatcttcatccgaagttatatgctcacttcctcccgaaatgagacttggaaaagtcttctcccgaagacccacacttgttcaaagctcctcttcaacctattttatgaatagtatgagatcataataagaaaaccaaaacctagttgaacactctaggtttttataaatgaaacactgttctcacaaagaaagatatgaaaatatgagactagaagagataaaaattgtttggctgctctctaggccctatttatagaacatggaaaccctaaagacagacacaataatgatttcccagcaatacaaaagtttcttaaaaaaattcctaatttgtaacatcaaaatcaggttttgcagcagtagatcaagaccagaaaggaaactttctaaattgaaccaagatcacaaatttagatttcaaacctgccaaataaagtttatttgatttgttctaataaaagaaaaaccgaaatcatcaattagaaaaaggaaaagttaagtttcccaaagtcagacaactttccataagagaattccttctcttacaagaagtttcctaaaccaaaaagagaccagctgagaagaaat

SEQ ID NO: 172360 - DNA, 561 bp, Cannabis sativa
  modified_base (154)..(168): a, c, t, g, unknown or other
aacttcaaaatttcgtttctcactaaaatcaaacccaaactcttttaaaccttccagatctgctctacataccccaataaacatttccaaagcatcaaaacaacccagaaatcacagataagaaaaatgtcatgtgagctccaagctttgagtnnnnnnnnnnnnnnnggctaaagctcacctacaagcattaaaacctaattaaaactacacaaatatgcatataaaaacttctgtaaacaatggaaatcaaccccaacaaacacagcaacaaaactcatcaatttaccttgaaaatcatagtttttgagccaaaattcaaaactttgaataacacaactagcatgcatcacaaccagctctattctactcaattaaacatgattaaacttctgaagactacatcaataattaacagcagcaacaacaaacaaaaccaaacatgcaaatcatcatgtttcttcaaaaattccaagaaacatagaaaatggttacaaggaccttaccaaccacttgaattacacttagaattgctgtacaagcttgaaatgctaaggaaaa

SEQ ID NO: 172361 - DNA, 809 bp, Cannabis sativa
ataaaacatagtacctataatcttattcaacctaaatttgactaaaattgtgtttatctcctttaaacttaaaattgcaatcttcacattttaacaatactcattcttaagtactacttaatcatatatttattaataatctaaatttaattaatattagatagatagttgtcagaaaaaattaatactgtatcacttagtgctttagcagtactatatataactattcatattattatctttcaatactaaaaaaactataaaactcatacatattaaactcctaaactttaattacccacttatttcagaatcttcataagaatgaaataaatcaaattttccaattcatatttaatatcccatctcccattgattactaaattcccatatttataatttatacaacaagactaaaattattttatatatctaattttaataaaaatcttatttattatagtcaatacaaactaaattaatattaattaataaatcataatccaatttagttttttgacataataattccttatttattctttaaatagatgggttggcaaatctgttaaatattaaagccattcaatttattataaaaattatttaaattggtatcttcttatacaactaaaaaacaaaaaaaactcatctaaaagaaagataactgatttgaatcgcgtcctccctctctcttgttttatcggctgtccaccagctttcccattcaagaattcatgcacacacaatctaaattggagagtttttcggcaagcctaaagcaatggtatagacaataaacttgagga

SEQ ID NO: 172362 - DNA, 911 bp, Cannabis sativa
ttttatctttttttttttaaaagataggttatcttttcttttagtaaaatatttcttagtattataaatatgacctcttagattacggatttcatcattctagagctacaaaatagagagagagcaagaaagagaaggaggtcgtggcttcgattttttttttctccttcaactcttactaaaattatgatttttgttataatgtctagttcagagtagtttttttttagttaaggattatttcaaaactcgagacatgaattcttagtttcattattgaatgttaatttctagtttccattatatatcaaattatttcttttcttctatgttcaatatcatgactattgctttaatcttgtttagacgaaattatttactttaatctaccgtcatcttgtttagacggtcgctaaattaggttttactttaataaggatattgagataattgactgtttcagctttatctacgggattaatagtttgattggaaactgaaattacattcactaataggaattaggaatgattgttgagggtgacgaataacctttaactagtttctcatatcgtagcctctctttaaacttgttttctttttatcttattattgttattcatcaaaactcattttataattctagttactaatttgtgaataattgaacaaacatggccctcgtgggatcgacccttacttacaattatactaaaataattagaggtattagaataaaaaaaaaatagtaaatttgatacggcatacgacacgcatcacatatatatttttctttttcctttttaataaatgtttatgttgactggatttttagccaaccgaagcagagtcgtaataaaagagatttaaaccaaaatcacaataacaaatgcagttaataacatcgaaat

SEQ ID NO: 172363 - DNA, 1731 bp, Cannabis sativa
tgttggcgtcgatagggagagtcttaagggcttggctcaaagaggcagaagctgggttcacatttggagcagccttgttggtgcttgtagaaattaggggaagaattggatcctgagtttcagtctcagggacatcgaggttaacggtctgggaggccttcttcttgttagcagtggttttcctttgccttttgaggggctccacctcgacatcagaaggagcctccgaagtggtcaccctcttcttccctttcctctgcataagagcctctaagtgcattcctgcgagacaagataaaagtgttagcattaattaaagaaaagtaaaaggggagtttggtacataaattttctgcctaaaggaatttatgatagttactagaagacgaggtatcactagaagatggggtagaaggaccatagtatccactaaaatctctacaacccgtgatcttaaatatatcgaagggatcaactggttctaaatcccagctcacgtctaagtgacttgccctatttgtcatggtaccatattgctcggctataccattgtacaactcattacagttaatttggacacagaatctgggataccgactatcaaacctatgtgttatgcgatctacgaggaggggatggaaaaatataaaagttaaagtagctatctcggaatgtaactagagtgttacgcttggtcctaagcaatgttggtgaccaaccacatcgattactttgggatgctccttcaccgactttctgaggggcagtgttctgaaggtactatccctatctttctcctcgtctgggactggaacctgctgccaagaagaatacttgggatatttgtaatcacaagtaaactccttgtcagttaggaggtccacagacctcagatggacctcatttagaaagaaatcgcatgacctaagttcgtagggaagagtcaacaagagcctgtgtcgctcggccatctcaggagtgggagtaggtcttttcgagacagctgtcgaaaacaaaagttaattttagttagataacttagaataaaaaacatagattaatttaattaagtctaatgccaacaatcacttacaaattataccgaaagtggttgtgccaatcagggaaaggctgatcgtccaaaagaagtcgtccttgaaggaagttttttttggtaaatccacaatgattttgtgctcgccggagtgagtgccgagatagtaaaagcctcctgcagcattcttcctcgctggaacggctttaattgagtagagatactctatttcaagaggagtggggcactcccaattcagaattttgtacaaaacccttaaacttgcaaggattctgtaagagacgggattcagttggaacggggcaagcccaaggtggtttacgaagtccttgaaataatcacgaagggggattatggcccctgccctgatgtcctcaaggctccaagcgcctattacgtcaagccacttgtactggtctcgctactagcccccttaagggtctcacttgtaagacgcacaggcgagtaacaactaaattcatcgagtcgtactgatctaacccgaaagtctcgcctatactcaatttcgtaggtccttagtgaatcacctacataacctaagatagttcgcaccctcgactctattaactctgcctcgaaggtgacgttagggtcctggggagtctttgatttacgtggcttgggagacattattt

SEQ ID NO: 172364 - DNA, 568 bp, Cannabis sativa
gaggcagacctcgtggcttacgaatcaggagacgggaaaatgctcatgaagaacaacttgggaaaaaagaggttccccctgaaaatcccaatgattagccagaaccctctcatagaaatgagaatgggaggcaaccagaaacccacgaacaggaaattcctcatggaaatgaggaagaccctgggacgcaactcggggaacgtagttcactggagaggaatcatcagcgttcttcccgaacccatagagagaggactcgtacaaccctaggggggaaatatgacaaaccactcttagggggaaagaacaaagcgtgaaaaagcgagtgtggcctcagggtgctcaaggacccatagttgatcaactcgaggaagataaaatgctcaccgtgctaatgatcgagaatgcacggggaccagtaaatttgcaagtcactcaagtatgagatccatgagcaaaacaagatccgtaagtaggacacaatctgtgagtagaactaagtcagccagtaattattcccaccagatctgcgagagcacttgatcagaaaaaacctgatcttcaccaa

SEQ ID NO: 172365 - DNA, 575 bp, Cannabis sativa
ttaaaaaagaattaaagagttccacatttggatatgaaagtggggtcactaatttatgaatgattagggttttgtggaaagaagacaaatatgaatgactcaaaatattgacagaaacattaactaattagtggtcactaatggtgttttgaatcttttaaacatattagttaacaatacaaaaagttattttattaaattatataatacatgatacataattacactaataatgatatttacacataagaaagtactagtcactaataatactttttaacatttctcaaacaacaataagagtgaaagtaactaaaggaagaaattgaagaatacctcctttattttatacatttacatcaaccaaatttaccttcaaataaaatgaggataacttaggtattgtaccaaaattatcttcacaccctcacatacataatttcaaacataatagatttgtattttttaaagacggatgtataggtttgtagaaaaattagggcaaaattttaattagagaagaatagagactatcgtaaagtgatatgagtaaattagtagaatgattgaaaaaa

SEQ ID NO: 172366 - DNA, 611 bp, Cannabis sativa
tttgaccctataatgaatttaagcacatctcatctaacatagccctaattgaatgcctacataaaaaaagtgaagaagatagaaaacactaatgtctgatcttcctcttctctttcattcacaaaattttgaattcaccatgttaccatagaatttgaattctcactctcaaaagtatgttctaaagatgagttgagtattagctcacattatccaaggtaatactcagacctttatggaagattatgaaaaactttcactttttaggttaaagaacgagatctaggttcagtacttgataacccagaaactttccttggtgacgtggacatcaatatttaacacgtggcatgaaggatgacattatgatactgagtagactgagtcatagtaatcgacctgggaggggaccctagccctgcacccaagttgacttcgggatctccgggatgaaagtttaaactttaataacttatttccaactcactatcttttagtattttataccatgaagacatggagcaatctaatctaagcctcgggagctaaaattacacaaacttgcaacccagaagccaacctgggcacctagggtttcacttggcacccat

SEQ ID NO: 172367 - DNA, 505 bp, Cannabis sativa
gttcgagtctcatgttatacatgattgtaatatatgaacgtttaaatcaaaaaaaaaaatattaccataagataacactttacaagtcattaacgattttttataataattatcaaattaaaatatattaaacataatattaaaacaagggaaagactatgtaagattaatgtcataccaaatgatgattgtttgctatgcaggaatgacaaagagaagttggaccatctttttttctgctgcaatattgtagcaggttgttggcagcagctcaaagaatagctgcaatggcagatctgctcaagtatacttcaacaaatagtgagatggctgtaatgacacaaagcaaacaacttcaagacgagagtgtaagctgctgctttggcagctttagcatataatatttggcaagcccaaaatggagttttttgggaaggaaagagtgtgcaaactgctcaaatagtaagtaaaacaaaaatatacatcttgtatagaattaaaagtg

SEQ ID NO: 172368 - DNA, 962 bp, Cannabis sativa
  modified_base (679)..(680): a, c, t, g, unknown or other
tcttctgacaatgtctccaactcacggcagttgaagatgcgaagtacttgcaaggaggtgagttgtgtaagcccatttttgtccagccctctaagttttgcaaatctcgatatgtatagaaaggtaagagtggtaggcagtagcccttccttcgggaatgattccacatcttcttctattccatctccatcaataaaaagagaggtaagatggggtaatatttgccaattccatttcatcctcaaaacttcatcatacgatgtattaagctcacacaaactaacaggcagaccaccttcagggaaactctttatcaacggacaaccatcgattgacaaggactctaaagatgagagggaagtcatcttctctggcaaccacttcaatttagggcatcttctaatctccaagtcactcagcttgggagcaataagtccaccatttgggaaagatacaaaactatcacaattaccgatagataaagatgttagttcctccagagatttcccatctgacactgtgatagcttcaaagtagtcgctggagacaatccaaagagttttgagattgggaaataaatccatatggagggatctaaacgataatccacaacaccacaatttaagagactgaagaggagggttatagtggagtggagtgagagtggaacaaggattcnntggctttattgcctcatacaatgacttcgagttctccaacttccaaatttccatttttttgacacgtggtaatctcgggagacttaataatggacgatgatcgttacctattattttaatacttatcaatgaagtgaggaagcaaggcaaatctccgacaagcttaggacagttagtaatcttaagttttttgagcttcccatatgttgttgcctcttcagtttgcattgaattccattgctcccatgatgacatctccctgaaccttaatgtttccaatga

SEQ ID NO: 172369 - DNA, 669 bp, Cannabis sativa
tttacagagaggagcatcgaatccgaaggttagtctttcaaatcttcttttgaattctgtttctgggtttgagaaaaagctttgcatttctgaatgtctttaaactttggaaaaagggttgaaaatgcatgcttagttgtaggaaatacacatagagttttactcccttgttagaacggggtaatccccaggagaaaacagacctgtaattggcataaccgccaattcaggaagaatactttgaatattcgcatctttttgattgcttatctctagaatactcgcgggtattttggatgagcatctcgaatacttgcataactgctgcctttaggatttctagagactttatcgcttttacccgttgtttagaatttagggttttctctatcttctcagtatattttgttgtgggaatactggttaagtctttcaaatggtgggtgtgtcgccgtattccaatgatcacacgtgcaatcgcatgttccttgaggtactgcgatacacccagccatttgcgacatacgctagcgttcccttttcccattcaaccgtatattttgactagtagctttgcttgaaacagtgaggtgtttccgttagcccaaggtttatgcgagaaaggcatgccccttgagatataggagattcctctactgtttcttgaga

SEQ ID NO: 172370 - DNA, 846 bp, Cannabis sativa
acaaattcaacatatattttcaaagaagaataacagtgatcgaaatagctactatgttcgattaattggattagttgacattatttgatttcttctacgaaaaggtcttgcattttgcggtcatgatgagtctcaaaattctactaatcaaggtaacttttttggctaatcataatgaaaaaattagagctgttgctttgaagaatgctcttgaaaatcttaaattaacttcaccaaagattcaaaaggatattgtaaatgcatgtgttgttgaaacaatcaatgttattattgaagacatgggagatgttatatttttttgtgttagttgatgaatcccgtgatgtagctatgaaagagcaaatggtcgtaatgtttcgttatgtggacaagaaagggtatgtaattgaacgattcattgggattgaacatgatccaaataccacagatgtctcactaaaaatagcaattgataagctattttcaaagcatgggttgagcatatctagattatgtggtcaagggtatgatagagctataacatgagtggagattttaatggtttaaagagtattatcatgaaggaaaatgaatgtgctttctttgtctattattttgctcatcagttacggttagtgctcatgggtgtggccaaaaaatatgatttaataagtattttctttattattcattatctttaatactcatttcataaactatgtttttaataattaataatttttattttgtaaaaatataggtacttcgttgtgctaaaattagatatacgcaagtgcacgtagtcacaaacaagtaatacattgataagtaatgagtatcgtctcc

SEQ ID NO: 172371 - DNA, 1272 bp, Cannabis sativa
tcggtccgggttttgttccgggtctgggactgggtccaagttggagtcagggtaccgagtcttagttcgagtttggttacgggtttttcggatctcggtctggatccaagtctgagtcaaggtccacgttcgggtcttggttgtgggtctctagttcgtgtctgggtctgcgtttgcgtctgggtctaggtcccgtgtttcaatcctggtctaggtctggtcggtatttgggtccgtgtatgagttcgtgtccatgtctacgtctaaattccaatttaggtcaggggcttggtctgggtctgggcttgactcccgagttcgtgttcaggttctggctcaagtctctgtccgagtcttggtctgggactgggtcgtagcccgagttttgggactaggttcgatctagttctgggtccgagtcaaggtccaggtcacggtctgggtcctgttccatggtcctgatcaccttcttgttcaagtttcggttttgggtcctaggtttgggcctgggtctaggtccttatccagcttcgggtccttgtccgagtccctaatcaagacatcgactatgggtcttgtccaagctccggttctctgatcacaggataagatctgcatcccaagtcagggtcttggtttgggtctaggtctaagacagagactggggtccagtctgggtttcgatcccagttttgggtcccgaatcatgttcaatgttctggtctaaatttaggtctttgttcgggtctcgagtcctggttcgggtttggatttagattttggacccaatcccagagtggctctttgaccgagtttgggtcttggtcgggttacagttttggctctatgttcatgtcttggtcatggtttattcttcggtcctaatctgcttctagtttcgactccagtttcaagttacggggtacgggttttggtcgagtttggatccgactctgggttcgggtcatgatttgagtttgaggcaaggttcagttccgggtttcgatctgaggtaggcctcgaggctgggtctaggtcaaggtcttggtcccagtcccgttcaaagatcttggtcccgttctaattcatgtttcggtttttgttcccgagtgtgggtcagggtcttggtatgtgtccgggtcttagtttgagttcgagtttgggttcgggttctagtctatgtccttgatatagacattgagtagtggtcgggtccaagcatcgatccgggatcccaggtcccgacgtgggtcctatgtccaggtttgggtc

SEQ ID NO: 172372 - DNA, 628 bp, Cannabis sativa
tcctagtggcagaactcccattggctgcaagtgggtttacaaagagaaattaaatgctgatggaactgttaacagaaacaaagctcgtctagttgcaaagggattccaccagcaagcaggcttcgattttacagagacgtttagcccagttgtaaagccagttactattcgaactgttctgtctcttgccgtgactaacaactggactttacaacagctagatgtcaacaatgcatttttgaatggtgacttaaaggaagaggtctatatgacccaacccccgggttttgaacttgttgatgctcctcatttagtatgcaaacttcacaaggctttgtatgggcttaagcaagcacctcgtgcttggtttgacaaattgcaccattgcctcgatacactcagtttttcagtcatcaaagtcatatcaaagtttattcatcaagcatacaaccagctctgtcactcttatacttgtgtatgttgatgatataatcatcactggtagtgactcctcacttatctccactctcatctgtgatctgaattccaagttttcacttaaaaatcttggccagttgcattactttctcggaattgaagttcagcatacatctcaagggattcattt

SEQ ID NO: 172373 - DNA, 1285 bp, Cannabis sativa
taacaatctccattacatcacattacctaatcaagcaagttgattctttaatctaataatcttgtattgcattgcctaatcaggaaagcctgcgccatagcctggcacccattatatcgcataactacatcacctaattaggtcagcccatgccaaaatcctgcacccatatatatcatataattatatcacctaattaggtgagcccgtaccacaacctggaactaatatatcgcatcgtctaatcagacaagtctgtacctacacctgttaaataattgcatcatctgattaagtgagcctgtgccacaacttggcaccaatatatcacatcgtctaattagacgagcctgtaactatgggtggtacttatcatatgtcactgacgcccgtacctacgcccgctacgttgctagaaagaaaccaaacaatggtttcgatctatgccataactaggcattttcatatcactgacgcccctatctacacgttgctaggaggaaacctacaacaatttcattctatgccataacctggtaattttcatatcattgacgcttgtatctacacgtttctaataggaaacccttcaactgtttcattctatgccataacctggaaattttcatatcaccaacgcccgtatctacacattgctaggaagaaaccctacaacagtttcattctatgccataacctaaaaattttcatatcactgacgcccatatctacacgtctccaggagtatcacatcacctaatcaggtgagcgtgtacctacacttggtactcatatatcactgacgcccgtacctacgcccaatacgttgcaaggagtatcgcttcacctaatcaagttagcctgtacctacactaaatactcattatcacatcacctaatcaatcttttcattatataacaatattaactatatctctatctcaatagtaatcaattcgtaacactattaattatattataatacaacgtactatgaagtacaatatacttttcatacctcaagttctggttcagatatgttggccaacctacttggagtatgatcgatgatcccaggccctatgtcataacaatgataaaccaataagtgtttatctcaaaacactgctcaaacgttgcaaaggacaacttaaggtttcctaccaaaactcatagttcaaatacactaaaataaaacatatattttggttcaaaaatatagaccatatggtagatcttgttggaagcttcaaaacgttatatagaacatccaaaatagacaccc

SEQ ID NO: 172374 - DNA, 1279 bp, Cannabis sativa
  modified_base (303)..(334): a, c, t, g, unknown or other
  modified_base (1247)..(1252): a, c, t, g, unknown or other
gtccataacactcttctcactctccacaagctttttaacccagctcatcgaagatcagtctcgactggacacccattgattatgcaagaagacgaaggagatgaagaaaggaagaagaaggagtgggtgtgggttcagaggaggaagaaaagaatgaatcaaaataaaaaaataaaaaaaaaaaaaagaaagaagaaaaaaatgaaaaaaaaaaagtagaaaaaagaaaaagaaaaaaaattaataaaaaatgttttatttttttttctgatttttttttattttttttaaatatttataatnnnnnnnnnnnnnnnnnnnnnnnnnnnnnnnnaaaaatttgccacgtgtacaattgtgtacacgtggacagtccactgtggcacttaactgtgatttttggacggaagtgtgcagagcaaaacggaactacagtttaggtagtttagccgccaaaaattcaatttttgtggttaagtgttacaaaccgtaaagttcatgtggtttagccgccaatatcccataaaattacaataaaagaacttaaaaagattaatgcgatcacatatatataacataattgaactaaattgagtcaagagcaaatttttcttctgtaggatgttagtaacacgttgacaatttgtttcatccttcacgttatgaaaacccaagcctagagcaaagcaacaagccctgtagaattgacatagcttcaactactggaggagaaagaaagcccaacgttggagtctcaacggaagtcacacaaatcccctgttggtctcgtactatgacactgtaccctaggcgacaccgacagtgaactccctaaacgcttgcatccacgttcagtttaaaataacccccatcaggtgacacccacgataaaactaccagaaccgagaaaccagtggcccacctcaacactcattgttgacctcgaaaagtagtcaaccgacaacgggctcgtattaatctaatgtttcttacgtgttacacaattagaacacaatgatttttatagaggttcggctccttagttatcgggtaatgacctactccccttttagttgtattaatacatactcagatcactataggtggaatctgatataactctcttaaagttacaatgtataaatcagtaggtaggtctctaatgagagagagataaagccttggaggcgtgtgagagggagagaggtagaaagccctttgggcgtgtagtagagagagagagagannnnnngagagagagagagagaggagagaaata

SEQ ID NO: 172375 - DNA, 592 bp, Cannabis sativa
  modified_base (412)..(416): a, c, t, g, unknown or other
atttctatttctattgtaaggtagtttatttagaacctcactttgaggtgtgatctctctatataatttgagatgttggattgaattttaaaatgcaaaaatagttaaatcctatatatgaatgataattggtataggggtagagttttttataaaatgggtaacggaatgattcgtttggactattgtacttaatttaatttaaggaataatttcataaatatacaaaaacaacaaaaaaaattacaaaaatatgattttacagaattttaaatatttttacgaattttttgattttatttacagaaaatacgttcttttttatataattttcttgttattttcgtgttgtttttactggaaaccgtaaaaatgtaaaaaaaaaaaaaaatcattaaacgtaaaaatgtannnnnttttacaaaaaatagtgtcttatgtaattatctcttaatttaaatataattttattaaaaacattattgtaagtaagcaaattgtatccatatctatttttattttatttttttaaattttacatagattatacagggccggccctgaaaatttatgggcccaagacgaattaaat

SEQ ID NO: 172376 - DNA, 533 bp, Cannabis sativa
tgtcaagaaggaactcctagagaattaacctcgcctgaactaaactcgcgagatgatgtgaccatgaaagagtctagtcgcattactacgcttcgcgtaatataaaataagcaggactaagaagggataatacaagtcgcgcatatcccgagatatatgcgatgactaaatagccttctcctgcgaccaagtaaagatctcttctttacataatgaattagtccgaatgacaaagcgtattcgataactcgatagggactcgcatgtcctatgttgtcgacgcatatgaggtgtccatttatgtgacccagtcagaatacaaacaccttaacgtgaggctcgttagtcctccttagaaagatagaacgcacccaaaacctgcgagcttgtgcgagaatatgaacaggcaactcgcaccctagaggtcgcgtacgttgatatacttattgaaacggatttaaactattcttcatttattcttttacattttatgataatttaatgttgatattcaatgtaaaatggttctataa

SEQ ID NO: 172377 - DNA, 678 bp, Cannabis sativa
atctttgaaccatgaggaattctcaaatgcagagtataagattgcaacaggttataaggtactggttcaagagcaggaaaaggtggtctggtgtaatgaggtttgggctagaattaacaccccgaaacacagttttctcacctggttagccattcagcagaggctgaaaaccagagatcgtttatgcaggttcagcgtaatagattctccagtctgcagcttctgcatcagcgaagatgaaacaacagagcacctgttcttcaggtgtgtattttcccagcaatgtctggtgcaagtgaagaaatggcttcaatggagaactcaggccgatacattgcaggtagttctcaaaacagttcggaaagccaagcaaaccaaattcaggaaaaatgtcaaagcatcaagtattgcagcacttgtatacttgatttggaaggcaaggaatgatctcatttggcaaaagaaggtccccaaagttgaggaattagtccagcggctacaacaggttgttaaaactagaacactgcttgtgttgcctcaaaaagtgaaaatcaaagatagagattggtttgatagtttgtaaataattgtatagatgtattgaggccaatgttggtgctcttaggatgtaaataaaagttttgtgcaatgaaatcttctgattcatcaaaaaaaaaa

SEQ ID NO: 172378 - DNA, 584 bp, Cannabis sativa
ggtatagagtgtaaaacaaggaaaaatgacaatggacccatttgtttttttatattattaaaatgttcttaggccaaaaatttcttcggctcgacccttcacatacaatatattttcatttttacgggttttaaggtatgagtttttaatagtatgactttttttttaataaaaagttagtttatggaattttttaaaaaaaagttaaaaatatgaaaaaaaaataccagtatatgataattggttatccttaattttttttatattttttaatttttcctataaaatatttttttgaaaaagagtcatatttttccacagaagatataaaaatctataaaatttataatgttttttaaagttagggtaaatattattttagaccctgtgtttagcaaaaattattaattgaagtctctgtttttttaaataacaaaatagaccttattttccacaatggtaaaaatcggactctgcgctcaatttttaacaattttactttttaatataaccaactttaaggcagtttctaacacgaccagatacggaaaatataaccagttttgtcataacatctccagatc

SEQ ID NO: 172379 - DNA, 511 bp, Cannabis sativa
tctctctctctctctctttcgttcgatcttagagcaactagggttgcttttgttcttcaaatattcaggaattcagctgggttttaagtgattttggtcaaggtaaggctcttagctcctatcttcatgttttgttgaattgtaagaaaagaatttttgcatgctttgagtttatgcttgctgtggtttctatggttaattgttgttgtgttctgaggttaaagcatgtttgattgtgttgatttaatctagttatagtggttgttggttggatttaagtaagtttggtgtttgaactcaaatcttgaatttcaatggtgaaatggtgatttagctgctgtagttggtgtttgagtttgggtttgttttctgaggttatattatgattacttaaggtggtttaagcaggttttgggtggcttgtttgtgggatgagcaagctttgagttttgaactcaagcttgactcatcaatggtggtttttgtaattatgcatgaagctttgttttat

SEQ ID NO: 172380 - DNA, 653 bp, Cannabis sativa
gaaattaatgagttctaataaaatgatgtgttcatttttagattatattatgttgtgttgttgtttaagaaacttttgtatcattttttagcaacatttgtgctacctttaaacttatttaagaggctaatgtgttacaatgatacaaaataatttacataaataattagcgagatttgtaaaatatctgagttattcattgttattttaaaaataaacgtaagttgttaactaaaaaaataataacagaatattaactaatgagtatataattgatattataagtaatttaataattttttttatttaaaaaaagaaaaaaaaaaataaatatatgtttttcatattttaaaatgtttacattaaaaaataaattatgatgggttttttaaaagtttaatcgaacaataatgtgctcaagaatgatttttcaagttagaaagaagagagaaatataaaaagagagatatagaagctctgctagggaaaaaaaaaagataaagcagttacattatatgttttttttttttgcttctttataaagtatatatatattagggtgattctacaatgcacccccttaaaagggatgtattgatgcactcttaacttatttcggcattcaaaaaaaagaaaattagtctaattttttt

SEQ ID NO: 172381 - DNA, 758 bp, Cannabis sativa
taacgttttcaaacagtaccccatgacattgaaaaaaatacctttttattattaatagttgtagccagagctagcaaaactgaaaaaacatcgcaacaccaaactaaaaaatacagttatattagaatgacaatcttcaaaataaaaataaaaatataaacttaaaatttaatacacaacccatatcactagctagctcaacattactaaaaagctaaaaacccaacataatttctaagtataactaactaaaggtattaccctttggctagtaacaatgtgctagcaccctaatttaaaactgttgaaaatcaatatcaaacagattatatttaaaattaaacttatcgataaattctctataagtgtagaccctccacaaagcaacctaaaaaataataaaaaaataaaactctattaccacacaatataatgaaaaaatgtaatgtgaaagaacgatggtaaaccaatccatattaatataatatttctgttaaatccagaatatatagttattcacaattacagtgatgtcatcacagtagaaagtaattgtgattatatgttttaaagtacttagtccgatgatttattagtgcactgaatttatactgacgtgataatcaacgataaagttcacttacacttatttaagtagaatgttcattctagggtattagcaaagtataatagtatcagatatattgggtatacattggaccgatattgacagtgaaaaagatatcattaccgttata

SEQ ID NO: 172382 - DNA, 594 bp, Cannabis sativa
  modified_base (534)..(546): a, c, t, g, unknown or other
aactttatgcttgatcaaatcccatatatagatcatgatctatatttaaaagttgaacacctatatccctggccatctccatcatcattagtgacaacttgttatcttatagtaaagtaaatatttaaggatacattacttctaaaatatgtacaaatatatagacatgtttaatgttgcactttgttaagcttttatacaatgctggtgtggcttctcctctattattacctctcgatgatgattaaaaagattaaggactagtaatgatgttcttgttaattctatttttggcatatttaattgataaatataatttattaatttattgtttaatttcgactgtgtataaatattggttttcttattttatatgtgaattgaatattaagcaatctatcgttggaaggaaagttgtctaactttccaatttatggaaattaaggtaaagatggtaagtctggttactcaattctttcctacctaattgttggaattataaaactaggatctagatgttgggttttatgcccnnnnnnnnnnnnnatttcaatgtaatctctattattcgatatcaataaagaaacagaagta

SEQ ID NO: 172383 - DNA, 689 bp, Cannabis sativa
  modified_base (244)..(256): a, c, t, g, unknown or other
caaaatttcaacacgatattaagaagcatcgaaagtgtttaaaagagcatttttttttttgggaaacttataaaaatactgaaattttggttaacttttacaaaaatactgtcacacgtaatttttttcaaaaatactgtgtttttataaaacaccagtaaaacacaaagcagtataactcaaaacaacaatagaacactagtataacactagtagaacaccagtaaaacttaacacagtatannnnnnnnnnnnncttataaaaaaacacagtaaaaatataaaaaataccgcctggcagtattttcgtaagaaaatggtaaaagttagtataccataaaaatttcccttttttttttaaattaagttaattaggatttttgcatattaaattttggcatgtactaatcatacttcttaaatttttcaagtcgttaaaaatttttcttaaactattgaaatttttaaatttaagcatttttgtctaattttattcaatttccttaatatgacattgtccatatactacattgtgccccctaaattttaatatttataaaatcatgtctttaaactttaacatgtatcgcattatgtttcttaaattttcatcaacgttagtctttttctagtaaaattgaacaaagtttttagatccaacaatctcaatagttcaagaagaattttta

SEQ ID NO: 172384 - DNA, 767 bp, Cannabis sativa
acatttaataaataaaaatctaattaatagagatttcaaataaaagaaaaactaatattacgtagtttatttttatatatatatatatatatatatttgtatataaatattaattttttaatttatatatgacttgattaatgaatatttatttacgaagctaataaaaaattaataaaatgagaggactaaagagagaataaataagattaattagagagattttagagcgtcatgtcaccaattcatacttctcctttatatatatttataaattatatagtagagcaagttctataacatattgaacaaaaataaataacacaaaataactcaaaacggttataattgaaatataaccggttctgtaacataaagaataaaaacaaataaaacaatataactcaaactaattataaataaattagaaccagttttatataacaatgttataatgaataaaaataaataacacaaaataacttaaactggttataactaaaataaaaccggttatataggcataattaatgagtatttttgaggtagatatggtatgggtgtaattatttggtgggttggagtctgttgaatgaatgtttttgtttaagttattttatttaactggtttttgtgtgtgcgtttttatcttagttttcttacgaaaccagttttttgtcttaaatttttaactagttgataaatataaacggtttccttatattatatttgagctattgtgtgttattatttgtgtttatttattt

SEQ ID NO: 172385 - DNA, 686 bp, Cannabis sativa
ctccatttattatagagaattgttaaaagagttttgttattgggggtagtggtggccagtactttttataggtgtcactttatgattgattagtgatattacttaaagtttatcttttttaagttatatagaacccgctatttaaatgcaccaatagcagtatgacactaaagaaaataagcaccagtgatacccttcaataattttcttgttagaagatattattagtatttagtgctttctcgatgttatattgttattggtataattaattattgggttccgtataacttaaaaaaaataattaaaaataaaataaaatcaataattgaaaataaaaataaaatttatagaacacacttttatttttgtttttaaaattaaaaaataaatataatacatttttgttctttattttttttttttaaaaaaaaatacttttattttggtggttaaaaaatctaaaaacaaaattattacctaatgtcaccataatttttaatattttaatattttaagacaagtcaagaaataagtttgtttaaccttaaaaaaggtaacgagatacgaaattgttatggcagataatttagatttatgcttaacatctattgtaaattattttagaattaaagaaattaattaaaacttaagggttcgtttggtacgttgtattaggtcgtatt

SEQ ID NO: 172386 - DNA, 707 bp, Cannabis sativa
caacctgaagttgcagaaataattagggttaaagaggcgttaagttggattaaaagaaagaagtggggaaatgtggtgatcgagaccgatgctttgatggttgttcaggcaattcaaagtttgataagtatgccatcacaattcggtctgattgctagagactgtcgagagcttctttctactttaaataatttttctttaatgtttgtaaaacgatctgcaaacaaggttgctcattgcattgcaagagggtctagtttaaagtcagattgtattttcagtgggactgatgttccttttgagttaaggactattgtagctactgaaagttattgaataaacaccatcttttattaaaaaaaaatgtatatatacttttttaaaaaaaaattactatattttttttatataaagaaacaaaggaaaaaaaaaactatacattcttaaaaaaaaaaaaaaagataaactactaatagggataaaaaaattagttttttttaataattaaataaataaagaaataaatcaataaaaaaacaaacaaataaagagagacaaaaaaatagatactaaaaaaataataaataaataaactactatactaacctcttgtagcacagaaacctccccggcaacggccccaaaaattaatgtcgcccaattagttacactgcggtcgcagtagtaaacgggctatatgtcgtatc

SEQ ID NO: 172387 - DNA, 514 bp, Cannabis sativa
ttttctctattcttttttgaattagtgataattaaaatgacaatttattttgagaagttaaataaatagttacattaataatagaaataataaagccttatgattttaaaatatgatatatatataacatgatagtaatatataattattatgtcaatatctatactgcacattgtgtcaactaaaaacgaaaaaaaaaaaattatcattgttataaaaaatgtgttaagaaaataaactaaatatatgtatctatatttacaaaggaacacacgtacaacaaaaaaaaatttaaggaataaactaaaaatatacaccataaaaaatacacatgaataaaaaaaaacaactgttcaaccaaaaaaatattttaaagactacttaaaataactaaaaaatagcaaaacaaatgtgcgtatatacaacaaaaaaattatctaaaataaattaaaaaatatacaccataaaaatacacataaattaaaaaataattgtacaaaaaacaaaaaaaaaa

SEQ ID NO: 172388 - DNA, 1256 bp, Cannabis sativa
cccccctcgatttcttcaagttctaaagaagaggaacccatggaggatccctctgttgattgcgagaacaaatccatgtctctccattctgaataagagattcctgaagacatcggagtttcttctgacagtgaagacactgaactcgaacccgagtcacctttgcccaaatctactccaacacctcctcgaggatcttcagcaaccaaggcatctgctgctgccaaaggcaagcaacctacgaagagttcttcacctggtaatatctctccatctcaagctctcagagcttgattttaccttcgtgataatgagcgtgattggaatatttatgctactcgaaagtttgaaagtgaaagaaattatgattttcatgctcatagggtatatggtattgttaagtttgttcaataccaccaatgggaaaatactctcagtggttttcaagggtatattgaaattattgtcaaagaattttatgccaatttgactaatgacatgcttgatgagaattctgagttctttggtaaagactatgttaagggacattgattttcttttaccgtcaaggatattgcagtggctttgcaattacccgaaggtgtgcctaatgctactatgtctatggatcaccatttgatgctcactgaaattactggtgcacgggttgaatggaaatctggggagagtcttcgaattacacatctcacatatgctcatgcatcactcatgaggtttgctcttagcaattggctcccaaattccaacaaaactgtggtgtctcaagatttggcatcctttctttttcgaatcacctcgggggcatctattgatctggcttcttcaatcttagaccagattgtttcatttcgaagaggtaaaaagcgaacttttaagcttgtgtttctaaatttaatctataaaattttgtcctctcaaaaagatgtggcccaatctcatgaaagacttgagcctcctcttactggaactattttccaaccctcggagtattttgatggagcttttccaaagcatcctaaagctggtactgctgctgctgctgctggtgcaagctcaagttctgcttctgcagacgtccaggaggtcaagaatgagatgcaactggtgaacaatcgactttctgccatggaggaggttcagcaagagatgtccaaacaactgtcctcatcgatcaagctatatggggcataagttttctttctttttatgtttttgttggacatatttctatattt

SEQ ID NO: 172389 - DNA, 715 bp, Cannabis sativa
  modified_base (361)..(363): a, c, t, g, unknown or other
gtattgaacggaaaattaagatcatttaggcatgaataaagcagtgaggaatatattaaaattatagaatctttaaccaacggttgctagtataattcactgatgcccgttattcagttaagcaatctcgattcaaattgctgatgtagtataacatctaaatgaaggtgttgtatataataaatattatatatgacatgtatcgatatgaaattaagttgcctttatcaaacatgttgtttactataaatacataattcatatcataaaaattatcaatagtagatcaacatgaatcttgagtaatcacaaactcatgttcatcttattagtttctttaattcactcgttaaagtttctnnnagaagatgattcttacaacttatgttttgggaatctagtagtacagatgattgggaacatgatctacaattatagaatcttaattttcctaatggatcgaatatttgttccctttaaatgttaattttagaactaaaaagttgtgcacaaatttagattagatctaaattatacttttactagtgaattaacagtactaaaggataaaaaaaaaagtaattagaagggtaaaacagtaatatgacaaaaattaattacgaaccgacacaagaagggctaatcactggaattgattatattaatggacactgtagtaaaactcagtaaatataattctataagggaaatttca

SEQ ID NO: 172390 - DNA, 501 bp, Cannabis sativa
  modified_base (467)..(476): a, c, t, g, unknown or other
agagagagagagagagaaaaaaggagggtaggaattctaattctttcttgatttttcttaattgattaactccaaaattaacaatcctaggctgatgtaataagtggccagctaccaacctaggggcatgccacgtaatcctcaatgcaaaataccaaaaatgcccctctttcttccaacttacgcaattctaagcctaggagtaaaatggtccaaaataataaccctccttaaacccagcattccaagtatctcaaatgtttgtccaataagaattaggttctaaacttatccatgtgactctaacggccatccatcgcattttccatcgtcgccgagcaaaaatcataaaaaacacacatttcatattaagcttaaataatactcttaggaggtgtttggttaggatgaatgaaaatataggaacaagaatgggaatggtaataggaataggaatggaatggaannnnnnnnnnaatgcataaaaaaattaataaaaaa

SEQ ID NO: 172391 - DNA, 578 bp, Cannabis sativa
tatatatattcaattttgattatttatataatagttgaagaaatatcatatgtgataaaatcgataattaaagattatatatcacatatatatatatgtataataataacaatcaagctaacatttgtatacatttttaactcattatatagaaaaatgaatataagaataaaaagaactcgtgaaaagatatattattaattattatcaatattgtactaactaaaatataatatagatgtatttaatttatgtccaataaccttaattgtatatatttacattaaaatggtctctatagacagaattaattaatgtatagcattgactcattgagcaataataagtttaaaaaaaaaaaaaattgatcggatcatttcatgcaattttggttgattattttgttttctggaaaatgaagtaagaaaagatgtgatttgttttggacaattggatttggacagttttattgattatttaataagttttttttttttttaaaaaaaagtatgattattttataagtattaattatgtaaattaattaattatattgcgataataataataataataat

SEQ ID NO: 172392 - DNA, 624 bp, Cannabis sativa
  modified_base (315)..(315): a, c, t, g, unknown or other
gattaataaatctaagagtagaaaatttttaaattttaaatcaattacagaataaaaacataacttgtaattatttaactttacaaacattctaaaagattacatttatttcgggatcccgtaaaaacttttgcaaaatgttacaagttatttttacacaccgacctaagtggcaaaagctgagaataccaaatatttcttcttgtagacccaaccctcgtggtctagtatggcctgaacatgtacaatacactgttaagccctcaaactcatggttgatcataaacagacttaccttttcctgcacagtagagnacccgtgagctaagcctagcaagaaaatataaatgacagtatacattataatcaaagatcatttaattattgatgccactgcatctattgtctatatgacataggcctacgttttatgctcacacgctatttatgtctatattgcatagacccacgtcttacgctcgcacgtctatccacgtgtaacactcacacgtctatttacaataaggccttagaatgatttatctcagttcttcataccgagtctaacctagttataccttgcataactctttatataatcatatataatacattattgcattc

SEQ ID NO: 172393 - DNA, 1471 bp, Cannabis sativa
ggtattagcgaggtggttacttctccgtataaatggcgagatgaatgaatatagttattatctcgccttgaacacttctgttatgtactctgtctatctcgagatggacacattgtctcattaattgtacctattaatagttattattcttatctcgcatatgcttatgtgacagcgagtttgaatatttctatcaactgtaatttattgagaaaaattatttaagtcgcatttaataatgcaatctaatattataatcattgagttgattcctattcctcctgaagtacacgtgattatttttggttgatagccgaattttaagtataacaaatgattacgaaaattataacataaattaaaattttaaactaattaagtgatttaaaaattatttatttcttactaaacaattcatttagatattaaaaaaatttgaaatttaatttttacacaaacttgagtatattttatttttcttaaaaaatgtagattcgtttagataaacataacattttcttagtttaatttataactttttcaaaataattttacattttattgaattttcgttatttttctttatttgttaagatatgagtttacaaatataaatgagtttaattttttcttcaaaaaattttagtttatttaaattattattagattctcaatcatttcagtattattttttaaaatacgtgtttataaataaaataaattttaaaaatattttttaaaaataatttaagttttcttttagtaaaattaatatatattttaattaatttaatattattatcatatttttctaataatttttattacttttttcagaattaatagaatattttaattattttaaaaaacatagaatattataattttaaaattatattttttaatgaaaaggggtaaaattttgtattgtcaaagtttaggagtaaaaatgttaatttttaacagtaaaagaaacaaaagttaacagaaggtgcataattatgtatctgttgtattttaattgtatttttaacaagtcgtaaattttaagaagcaaaatcagatagtgctgaaagttcagtggtaaaaatactaattattccaaaaaaaactttttatatagcaggaaatactttagccatttattttaaattttgtactattgtatacaatattattattaaatattagtggtgcctaaagtgtcggtcttataataattagcaattttttatatttatactcgtgaaaattacatgaagtatggaattttgtaaaaaagttacaaaaatatggcatttataggtttgtcactcttctatggcatttttcacatttaagactttttctggtatttgatatgccatatttttgtaaacctattattcaaactcatatttcatagttttgtttctaacttaattaatttttttttttagtttattttacatttacattttagggtttcttt

SEQ ID NO: 172394 - DNA, 764 bp, Cannabis sativa
gtggttgtttcagtacttctgtaaaccttgcacctctattgagtaatgtctgagttacagtatcttcaggaatctctttttcagaatggagagactcggatttggtctcagaatcaacagagggatcctccatgggttcttcttcttcagaacttgaagaaactgagagagggttcaatttcagcttcttggctggaggagctggtttgtcatggcttcgtttcatgcgaagttccttcttgatagatgcttgctgggcacgagtacgagtggaaggacctgttggagttgatgtaacaactcccttccctgatgcagcaggaggtgatgcgatagtaggtggatgggaccccttcgaagatgaagacgatgaagtccaacatttgtagggtcgcacagattttctaaccacttgtttaggaattatttttggcttgggcttcacgagctaagattcacgctgaggaagtgatgaatctcatgggtttgaagcagttgcagcagcaggcagcaaaattggagcaacaggaggagcattggaaggagtagcataagattcttccacccgttttggttgccttaagttctttgttttagccatggtgatctgaaagaatgaatgaacaacaaagaagcaagaaaacaaagaaaaagaatcgggtaggtggtgagaataaatgacaaggaaaattggtttaaataaacatgaaaggatggagcacaaaaggaaaccaatttcaaaaataagtaaccgcctgcccacg

SEQ ID NO: 172395 - DNA, 627 bp, Cannabis sativa
accgtgtctttatatcaaaaaaaatcccttcagccgaaattaaaaaaaagtcctttgttgacctagtttcaagtctttctttgtacccttgtagctcaaagtcaccctgtactgatacattagactatagtgtgatagtaacaaattctccaatcacgaactcaatccctactctatttaaatcttcatccaactttggtaaaatcttgtcctacatctctccaaattaaagcacccattacaaattttatttcctagattgatagagaatctcaccgttaaaaatttcaatcaactttaactgtcaccattgcctcccatctaaattcttccaaaagaaaagtatttgaggctttcgtgatccgcatagacttcacatttttattatatagaaaatggtgcccaactttcagtgcaaaacgattactgccaactcaatatcatgaataaaataccacttcgcatactccaattggtctaagtaattaggcaacaactttcctaaactgtgtcataatacaatctaatcgttgtatagaagtatcacatcaaatcacattttcccctcactgactaacaatgttaacattggtataatggttaatctctgtttcaattctttcgatt

SEQ ID NO: 172396 - DNA, 930 bp, Cannabis sativa
aagatactgaaagtttacaaaacagttaagtgctttatttttttttgaaaaagagaaagaggccattgtctaagattgacccctcccccgaaatatatagaaaacctcactcgtggcggaggaataccatgattacaagtgttctatcacaaacatataaaacatttaaaacaaaatcaaaacagcgagacataaataattcatgtactattaaaccacattacacaacaatctccaatctctactcaaatctaagaacgaaactgctcaaaacttttagttttataaacccaaacagctgtccaaaatttgacttttttccacaagtcttcagctgaggcttcaatcccttcaaaaattctgttatttctttcgagccaaataacccacataattgctagaacaactgtcttccataggtatgatctaccctttctaccccccaccttgctcaccatcattaatggtactgattggggaaatacccattgtatcccaaaggcgttcaggagctttatccaaagtttttgagcaagacaacaccccaagaacaagtgagccacttcttcactacttttcttttcttacaacaaacacaccaccccggggacaagcaaataaaaggtcgcctcttttgcatcatagggtgcacattaatttttcctaatgcgaccaaccatccaaagactttcactttaataggacacctgcttttccataaagtcttcgtccaaaacagatcaccaaaatcctggtctgaagtaaaccagttgaaagctgacttacaagagaaaattccactaggatctggtttccataatctaatatctctgatatgttgagcagcctaatatgttccagtagttgcagtaatacaataagattaggcatttctctctccatcaaattccttctaaacttaaaattcca

SEQ ID NO: 172397 - DNA, 602 bp, Cannabis sativa
aagctgtcaaccatcttcttcgttacataaaaggacatccaggtcagggactcctatattccaaacattcttctctccatcttcgagggttctcagattcagattgggcatcatgcccggttactcgacgatccacaacaggattttgcatcttcttaggagattgtctcatctcttggcgtaccaagaagcaaccaacgatctcgaaaagttcagccgaggctgaatatcgagctattgctgctacaaccagcgaaattacctggttacaatatctcttacaggattttcgaataccacaaccacaccctgctttcatctactgcgataaccactctgcaatacacattgccaataatcctactttccatgaacgaaccaaacatatagagttagactgccacttcatccgtgaccaaatcaacaacaacaccatcagattaattcctatttccaacgcattacagcttgctgatgctttcacaaaacctttaacttcaccaattttgggaactcatatctccaagatgtcagtatatgacatacactctccatcttgaggagggggtattaaacttactgattatttactagtttagtta

SEQ ID NO: 172398 - DNA, 545 bp, Cannabis sativa
ttgtattgattccacaaggttgcttttggattctcaactctgagatataacctatagtttagtcctagtctttattcatgtattgctaatgctttagctacaccttaaagagaatagttattccttaccagcttttgttctatttagtgaatgatttataatggttaaaacatactatttatttatttatgtattttatttttaaaataatagttttatttaaaattagtcaaactatcacattgcgatttgtcactatttaagtcatcttattctttgtaagataaatgtgtctttttaagtcatctatagcatttatttattttatttttaaactaatagttttatttaaaattagtcaaactatcacattgcaatttatcactatttaactcatcttcttctttgcaagttatgtgtgtctttttgagtgttgcctaatttgtaagaatcccattcaggttgacttactaagtaaaggttcattttccttaaaaaagaaatatggattattttttttttgggctttttcatttttacatttc

SEQ ID NO: 172399 - DNA, 845 bp, Cannabis sativa
  modified_base (661)..(668): a, c, t, g, unknown or other
gggtttacaaactatttgggctttctttttggcttgggcttattacgccaataagggcttgggcttgggcttgggctttttaggcccattgtacttttaaccagccagggtatggtgactagtagaatgagaagatgatgactaggagcatcttcaagcaattttcttttgtaatttgtagcatagggctgttcatcaaaccgtccgcaccacatcgcaccacaaaaaaaatacggtttgaaattctttacggtgcggtcacaatttgaatttttcataaaccgcgtggtgtggtgcagtttgcaattttgaattgttaatatgcggttcaaactgcaccacaccgcacattataaaaataccaatttttatatttagttaggtccaatatgtgaatgtctaaccgaaagcccactaattattgtattattgaaacttatttttttcagatttattttcaagccttatggtatttttgacaagtgttgctcaagctttgttgtatttgtaatagtttaattattggtgatagtctaaaccgtaaaaactgcaccgcatcgcatcgcaccattttttgcagtgccgttttcgcggtgcgggtgaggtttgaaaaattagaaaatccgcatgtgcgggttagtttgaaaaaatggtcaaaaannnnnnnncccgcaccgcgaacacccctaagcatacccgatatttaaaggacaaataccattttataccctgttttacaaaagttacccattagatcctgtattttgttaaatgacaaaatagatcctgtatttttcaaaatggtgaaaatagcaccttgaacttaatttttaacaacttttttt

SEQ ID NO: 172400 - DNA, 555 bp, Cannabis sativa
gagagtggtaagagaacagaccctcatacttaaattttaacacttagtataaactactaaacccgcctctaagttaagtgcatgcatacttcagcttggcataaaaaaattaaatccagatacttatatgtaaaggtaatggagagttcagttatatgtagatccaaaacgaatgatgagttcaaagtacaatcaatacactattcaagcagttgaactaatagaagagtagggagaagtttcactatactctttttagtttttcaaataatattccatatattaggactttttcaataattttttttttctattgtaagatcgaatattttctttaattttagttacataatgtttgcttttctttggttcacatattattttaataaaataaatcattcgcatgatcatacatttagatacaatctaaataaaacaacaaagaactaaactctaaatgaaattaatatttacgtgcatcggcacgtaacttctaactagtatatatatatatatatagatcgcatttacatgcatggtataataatttatata

SEQ ID NO: 172401 - DNA, 673 bp, Cannabis sativa
ttaatttgcacctgcttccccactcttgagtcggtcctgagcataattgaaattgttctatacaattgtatttaatgttataattatttatgtataatattaattatttaatggtgttaattttcagcttataacaaatgacaaattcaaaagcaatgagcatagagtattagcaagtaaaaatggtccaagaatatcagtggcaagttttttcagtactaatatgttgccaacttcaaaggtgtttggacccatcaaagaattattatcagaaaataattctccaaagtataaagaaatcactttgagagattacaatatcttttccttcaataaaggccttgatggtataaaggctttggatcattttaagctttgaactatgtatagaacttcattattaaatacttatttaattatgcctatatcttataatcataatatatatatataaacacatgaatatggatgttaatttgtattttgtaattgagttgatgttgttctctacttgttgtatctcttgttctgagaaaaatacttccttttatactgatctgtgattctgatttaggacagagctctattgatatttgtaactgtttttataactgtttcagttgtaactgattttatgttctttagtcttgatctttgttgtatttgatgtaag

SEQ ID NO: 172402 - DNA, 756 bp, Cannabis sativa
atagattataggtatagttctaatatggggttgagtttatttaactaatttaagtagtcgaaattcaatttattgatactaatatatgaacattaactctaagaatactaatatatcttcttatgagttgtcattagaatgctatgcatgtatattttatttatatagacatggtagaaaagaaattaaagacaaaaatttataacatagatttaattaaaataattaatttattattatgtttagtgtaaatgacataaaataattaatatttttattaactcaatataatttttttaaaatttttaattcggcgagttataattaaaattttgctatccaatataaaaaaatctacccgatcttcacttttttttatgtaattattattgttagtttctaatattcaaataattaattttaaaaaataaaaatatattatttatatttcaagttaaaaagtgttatagtctaaattaattttaaaaacttttaacaatatagatgaattaatataaaatacttaaacaaatattcataaaaaaaataataaaaaaagaaataatatggtgtagattttagatttcaactataatatcaaaatacaataaaaattattaactataaaatttaaatttcaaattaaacattataagcccaaaatttaaatacaaaataatttaactaataaatgtaatttatgtaatatattatatatatacttttatttagaaaaatataaattattttattttt

SEQ ID NO: 172403 - DNA, 953 bp, Cannabis sativa
tgcggattgaattagatctaatatatgaaatccacacttagtgtagatcagatgcactataagtaaaatagtgcagattgaattggatgaacaaccctaaatatgaatacaaaaggaagttacaagaatattataaaattagggaaagtgtacaaaagtattataataggaagttttttatatttttactgtattaattttacaaaaatactgtgtttaaaattttaaaattacaaaaatactttgtttcagtaaaataaaaaaataactcaaaaacaaccctagaacaacttaataaacaacatgaaaataactataaaacaacaaaatataaatacaaagcaacagaaaaataacaaaatattcaacaagcaaaataatatcaactcctcaatatgttttgtattacaatttttttttacttagttttgacaacttgatttattatttttactattacaatatttttttttcataaaatttgttgttacaattttattctttcattgttttttcctttttgagttaatgatagtgttaaaaatagctataaactgaaaaataacataaaaataacaaaacaaatacacatatatacaaaaaaaaaatgtatggaataaactaaaaatatacacaataaaaaatgtaaataaactaaacaataactgtacaaaaaaatacataaaaataattatataacaaatatagaacgcctaaccaacaacataaatacaattatagaataactagaaaataacaaaaaaaaaaaaaattataaatcaacagaaaaaataacaagacatcaatcttgttaaaatatgtaaatcattcatatattaactctgaataaactacaaaacatctaaaaatatatattattttttattaatcatggaaaagatagaaaaatatagaatgagtgttcttaattttttttgtaagagagagagaga

SEQ ID NO: 172404 - DNA, 583 bp, Cannabis sativa
gattttctaggttcatttgagttgtaaatagccttaagcagctggttttgatgtttggaattagttttgtgcaagtttaagctttgagttcaaagctttgatctctaatggcataatttgtttcattgagtttttctgtgaattactggctggaatatgttgtgtataccctaattcggtactctggaaggtttggttgcgtttagtggaagattgagcaagaaacgaaaatttttggggtgaactggtgtaaaccggctagtcggtttcaccagacctctctagcgccggttttggcagggggtccccaaatgcttcgttttcttgatttttgtccatttgagtgccgtggttgggtgtttccctaattctagagtttgagtaacctctaggggtatatcagaacctagggttatgggtttcccgggattagggttttgatcttataacttacccggtttcataatgtgattaggacacccatctagcacgagactttccgttcaggtcggccagcacacttgaattcgaaaaaaaggtaagaactgtatataatgtgcgatatcaatatctgagtgtatgt

SEQ ID NO: 172405 - DNA, 809 bp, Cannabis sativa
  modified_base (768)..(768): a, c, t, g, unknown or other
actggaacatggatataggacctggacccaacacatgaccattagagctgggattgagaactaggatccgacctcggacctggaccctgacctagaatttgggccaggatctgggacccgaagtggaactagacttggacccaagaccgtgaactagatctggacccggagcttcaacctaactcttagttcatgtttgatctgggacccatacccgtactctccaaccaagacatttacccgacacaagtcttggtcttagaccaggaccggtcacggacacggaccaagacccaagatccgaagtggaacgtgatcgggaccaaagattgggatctggatcttgacccatgacctgaggctttgacccaacccatattcggcatctagatcttcgaatcataccaagacccaaatctagaacaatttgtagacaaagcatccaaacccaaactcggacccagacccaaaatcggaagaagaatcggaataaggactatggaacaggaattgaccttgacaaaaaacttgatctagacgtggaacagaacactgacccggaccctgacctagaccgggatcgatacacggacccaaacctgaacccagacgcaaactaccactaggacctacgacccagaacctggagcccaagacccgtgactcgggacctggacctagaaccacactcgtaccaaaactcagactcgaaccaaagactaggacacagaccaagatcaggactgggacccagacccggactacaancgagacctgaacatagactaagaacagaacccatactggaa

SEQ ID NO: 172406 - DNA, 612 bp, Cannabis sativa
  modified_base (545)..(551): a, c, t, g, unknown or other
acagttttctacgagcacagttatctacgagaaaatttatttgtggtcatagttatctgcgagcacagttatgtacaagcaaacttatctgtgatcatagttatctacaaacacagttatatacgagcagacttatctgtgattataattatctacgagcagacttatctacgagtaaatttgtttgtgatcatagttatttaagagcatagttatctacgagcagactcgtctacaagcagatttatctgtgatcacaattatctacgagcagattgtattttgaggctatgagcgaacaagattttctcctttcatcactttatcccagtttgactttgggaattatatatataaattctttgacaatcacttaaatagtcaataagtgaacaactcaagcacttattattatttatgcaaataaaatatcctgaacgattacaccattcaacatttctctcatatatataaatatatgtattcattctaggccatggattcaatccctcaccccgtttttttcagaccggtcactcacttannnnnnntcatttatttagtaaatttagactttcaggaactaacttatatgtatgtgaagcaatatat

SEQ ID NO: 172407 - DNA, 739 bp, Cannabis sativa
gagagagagagagagattttatttttgtatcagatctggttttagttttatttttttttactttttttatttttgaaattagatctaatttttagtttaagtaataaagatttcatttatttattttaattttgggttctaggttcacacgggatccgaacaggttcaacatgttctaccaaactcgattcgatagtgtatagatcaaaagacacccgattcgatgctatacaagttctcaaattaaataggttttggggaacgagtcaagttagatgagtggatttttaagatttttttaggtctaaatgtttagccctaatcgacatgattataatataatatgattaagataaacacgaatatgatacatttattaaacctatcgaaaatttaatcactaaaatgatacgattaattagggtcaaattgacatgattatcaagataaacacaaaaattctaaagaaaatatagaaacctagctatgttatttaatttatgctatcgtgtcgatatgattattagataaacataaacatgacattattattaaaaattaaattcaaacacagacatgataccattataaaacatatcacccaattttttgtattttatgttgaatcatgtcgttatatcttgacctatatatatatatatatatatatatagcaaacagcgacgtgcgagacacgtatactaaattttatgctagtttttttttatgttatttgaaa

SEQ ID NO: 172408 - DNA, 854 bp, Cannabis sativa
ttttaatttttatattctctttcaaaatctattatacctacttcttttttcaatcattctactaattttacccatattacttcacgatatttttcattcttctctaattaaaattttgctccaactttccctcaaacttacatatctatctccaaagaacacacaatttattatgtttgaaattatatcttaatcgataatttgagtacaatactcataaaaagagagtgaattaaattttatttgaagataaatttggctaatgtataacaaaaaaaaagtattcttcaacttctcccaatttttttttgtatttcataaatttttaagtacactttattttgataattttttattttttctaaaatatatatctttaatttatacacatttttttaagaaaaaaattattccttctcgtattcttagaaaatatattttaaataagacaaaaaattaaataaaatattatataaaattttattagaaaaaaaaaacacatgatttaaaaaaaatgtgaaaataatcattcgagaaaataatgtgaaaaataaatattaaaagtgatttttaaaaattaattaattaatttaagttaataagttaattttttatttttttattaatattaagtgtctttctaattctatgggttgcaaataaaactctgaattagtataattttattagtctgttatttttttaaaagtaatttgccgtataaatacataagtttaatttctagctgcaaataatactttataattttagaacttctgtaggtacctgattaagtaaattatcacgtggcaattcttgattggtctaaattattaaatttttattatttaaaa

SEQ ID NO: 172409 - DNA, 585 bp, Cannabis sativa
aagaaaatgaatattatgacttcacagtggtttggaaaaaaaatcatctgtcccaattattctatcacaatcttactccttattagataacaatcttcttcagtataattaaattttctaaaatatatttttcgagttagtaataaacttcaattgaacaaaagttctattttttatttccatatccaataataactacacaattatatataaatttcacactctttacaaattactaataaacctcatagtattttcagtctaatacacaatgtgcaaattttgggttaaatttaatccaaaatataccataaaattatattttgctattttttgtagttgtgcttcaatgaagaagatgcaaattagctataataaaagttaatattactattaattgctgcttgtttggtattatatatggtagttcgtgagatggttttaatcatttttattttgatattgatttcggttaattaattattttgtgtattttattaggactgaacatcgagcgggtttaccgggtttcaggttggcgggtttcgggttcacgggttttgggttcaaaaaattgaaaccgaa

SEQ ID NO: 172410 - DNA, 562 bp, Cannabis sativa
tttaaaacaaaaattacagaaatataacaaattttcatttttagtttttcacctcaaatttttaatttttttaattttataatgtggtgaaattttttaaaaaaaatactgtgtaagttgtattatatgtactatattaaattttcacaatattttcgagaagattttttagtaacagtatttttataaaaaataatttaaattacagtatttttgtaatttttttttattatttatatttatttataattgtggtctgatttttcattgtttttagtttcttttttctttttactttttaataagcaaattatatttttgtaatttttaagttttataaacatacttttataattaaaaattatagaccataaaattataaataagatttttgaaaatttcttcttatttaatataagtttttttctcaactattttttaatacaattatttttatctaaaactgcaacatattgtttaaagtttcacaatgtaaattattttgaaattctccaacatagaacttctaaataaaaaatttctaagctaatgagaatatttt

SEQ ID NO: 172411 - DNA, 1263 bp, Cannabis sativa
  modified_base (1110)..(1113): a, c, t, g, unknown or other
ttatggtactgtttgcattagatgcttatgccttggtatgcctttcagaatatgtattgttaagcaattatataatttgtatatgtaactaccttgtgggtcttgtatatgtaagactttaaccaaatgtcaccaaatattgtgttacaatatatgatatgcatgtttagttatgatcttagatattatctgtataagttagaaatattttttcttattgaaataaatatttattgtgtgattcttatctcaacttaagatgtttattatggtactgtttgcattagatgtttatgccttgatatgcctttcagaatatgcattgttaagcaatcatataatttgtatatgtaactaccttgtgggtcttgtatatgtaagacttgaaccaaatgtaaccaaatattgtattacaatatatgatatgcatgtttagttttgatattagatattatttgtataagttagaaataatttttcttattgaaataaatagttattgtgtgattcttacctcaatttaagattttttacactatacaacctgctattctgtaactatacaaaaattgttactttgtaataattaatttttattcatattttcaaaaactatattataaatatgcattgtaaaaaattttatattaaataaaaagaaaaaagtttaactcattatcctttcagctcttcatgataaataacactaaaaaagataaaataaacctttacaagaaaatttaaagcaacattgtttaatattttgaaatgacagccattaagcaaaaaaaagcaactagatataaagaaatcacaactaaataactatcaaatttaagttctttctttttgcccttcgaacatacttcatcaagttgcatctccaaattctttgtgtattgactcacagcttcacgtttgagggtgataaacttaacatccagtgcagcaagttccgtgtcccaagccatctcttttagcaaccgttcttcattaattttgtaacattttgcttcgatatccatagctcttctctccaactcagtgatttttttcctcaaagtatccatcttttctttaacttatcggagctcacttgattttctcaannnntctaaatcattgtcaaaatacttaacctcaagaccattaagatactttagggaatcttcaggaagtcgggaatgaactttgggtgtatatgcctctctaagaataatatcatcaatactattattttgtttaagcatgggattgaaagta

SEQ ID NO: 172412 - DNA, 697 bp, Cannabis sativa
ggcggttcctcataggaggcagggagccttgggcgccaggtggataagtcctccgtccaagattacggaggcgcgccttcgaactctcgaccaagacgggtacctgggcgagctggactgctacattctcgcccacgacaatcgtgccacaaaccctgataaggggatgtgtgcctagtcgggggctcacggccagaagggggcgctgatgcccttgcacaagtacttcagggatgtggctgacttctttggtctctacccagcccagatcactcctaagggcatcaagtatttatccgccctcttcgtcctttacgcttcccaaggatgggatgctccttctccccacgaggtggcttggttctttgatctgaagtctacccccaaacaaggcaggtcggggtacttctacttttctcagctaggcttcaagtggttgaccggcatggatgacaaggccattagcaaaatagggcattttgctgatgagtacttcatggtgaaggatccgagcattactcggactcggtttcagcaacttctgacatatcattgtcctccccttactcttgctcttagggatagagctcgataacttgcccggtttccgggggaagacaggaatattatccagttgacctccgatgacaatctggtgaagtacgggctttatcacgaggacttttctcctaagtcc

SEQ ID NO: 172413 - DNA, 583 bp, Cannabis sativa
  modified_base (188)..(189): a, c, t, g, unknown or other
tatattttaattttttttaaaaaagccaaaatcgttaaggtatatatattgattaatattttatgtatgtatataaacgaaatttacgatttgatttaagttttaatatttttttagaatttattttttattttttaattttttaagaatatttatatttttaaggaaaatttattaaaataatagtnnaatatcaatttgtagatttatgtttttttatagaaaaattattaaattaatagtaaaataacaatttgtagatttagctataataaaaaatattaaaattgagagaattaaggagagaagagaaaaatagttttgaagtgattttagaatgtcatgtcaccgcctcatacttctcctttatatatattgattgatgattattattattattatatcttacttttttttaaaaaaaaaatgtacagattagaagtatcatttttacaatattattattatatcttaattttttttttttaaaaaatctaaaaatgttaaggtatatatatatattgattatattttatgtatgtatataaacgaaatttatgattaattatatttgatttaagtt

SEQ ID NO: 172414 - DNA, 708 bp, Cannabis sativa
aaataaagtgcggtaatagtattttttttgaatgtgtggtaatggtatctagagtattgctattagacacctgtagtgtatagtacctctagacatattactttgcgattggtcaatgcagaccgtttaaaattctcaagttctgtcacagtcttaaaaatctcggtagcgataataaaattataaaattacaataatactaatatttttaaacattaagtttatgttgtcttgtatctattaaatgacaacacactttttactacaacacccgtttaggatattacagattttctcttagttttttttaaatgattacacgttgaaaatttaataatatatatcgtaggaagctattctatggtgcactccctaaaaaaaatgtattgatgtacccctatctaattttttttttattagtcatgtacataatagttgttaaagacattctgcaaaattttaagaaattcaaaataaattagattatagaaaagagtattcaaacaatctacaatatctactttaatatttgtcccttactattctatctccaatataataataaaatatatattttgtaacttatactataattataataagatgtagaaattaaattatataccaattttacccctaataaaattataaaattacaataatactaatatttttgaacttctttctttatagaagtttattttgtct

SEQ ID NO: 172415 - DNA, 1155 bp, Cannabis sativa
gaaatattaacagtgagaaaatatcagggaagttactgaattttttttattttccttttaaataaatatcaacaaattaaattaaaataaataaatcaagggaattagtaaaggcgggaaaaatacccaaaaatttaaaataattattccattaaataaattacggctcattatgacatgtgaaattatttttgctaaccggtttcacaatatccaagctcatactagaaaggtcacgggttcagaaattggagaaccgaagggtaattataagggaaaaaataatcacaagggtataaagtaattcttctcacaataattatgttgactgtggatttggccaatcaacacagagtctgactaggattagattttgcttatgattgtcacatgagaatgataataaatgtaaaatacaccaagatttatagaggttcgaccctttttatttaggtaatgacctactcttcttttaattgtattcactctttagataataccaagcaaattacagattgtaaccttgtaatttctagctaggctctcttcagtattacaatgagaatgtattttgcaggtgagaagtatgagaaaagagagaggacttattgttatagtgcttctgagcgtgattgaaacttaagttctgagtgtactggccctttatacagtaatagggcttacaagctgtacatagagatattcctaaaaaataaggaagttacgctgtatatttgaaatacaaagtaataattaataatccctaaagaataggattgttacttgttgacggagagtccctatctttgtgggcagtttgaactgtttcgaagtcgtaggaatgctaaaggcgagttggaaggcttgtgtgaacaacacaagcgttggtgtgttcttgtacacttgaccgactagccttgttgaaggttgcccggtgcttggaagctgtcactcctggtcggccagctataggtccggccaggaccttgctggcatggttgtacatctctctttgcttgtggcattgatattaggacaaacttgcttgtgtccatcgtgtaaccatgggatcttgcaggttggaaggctctacgacactaacctgctagattcgaaggttgcacgatactaacctggcaggttggaaggctgcgc

SEQ ID NO: 172416 - DNA, 609 bp, Cannabis sativa
aaaccatttgagatcagaccacataacttttggtgtaataatttgatcaatttggaccgttttaaattctctgatttagtcatgattttagaaatctctataacggttcaaaccaaaccaatctgtataattattatatatatacttaatgtattttttggacaaagttctaatatttgagaacaaaattaggtagaatattaatattgagtttatattgttacgataataattttttattgttatttatatattataaaattattaaaagtaaaaaaatcaaaaaaaattagaacaactacaaaatacaaaccatggctcaaaccaaaccaatttatttttgagttgtttggttggtttaatcatttaattgatctgatttagttttgaatttttaaaaacccataatactagtttggtatgtaggaatttcctatggacaggtcaagctattgctgctggtcctggcatgattgtttgggataagttgtgttatcctaaatccaatagtgagctatggggaaatatatttgggccatttcaaacaaggaagatagtctttggatgaaatggatccattgtgtgtatatccgagatgaaaattggtgg

SEQ ID NO: 172417 - DNA, 650 bp, Cannabis sativa
tgtggtgtcggtgatattgaaattattggaggtcgttataaaagacaagagacatcaaagttataacagattagtaagtaatgtaatttttatataaaatttactttatttatttttctttttacttattataaaattctattaattttttatgtatagttcgatcacattaaagataactttatgggaaaaattgggtgagatgttcaatccaaatttatgtatgaaagatagtggtccatttattgtgatagtaacttctactaccgttaaaaaatttcgaggtaattatttatttagattccacccttcaatattttaatacaataatatatgtttgtgtatattaatttatattttttctaaatagatgaaattaacttctctacaagtgcaaccaaattctatattaatctttaaataaattatgtagcatcattaatctaaaaattttcaaacaactccaagagtgtggaagttattgaatttgagagttataatgttaagaagacaactaagaagatatatttctcaacagggtctgttcaaaaattattagaggccaattggagtgatattcaagtgaaagtttttattttttggtattattattactattattaaaaagtttcaatacctataattttact

SEQ ID NO: 172418 - DNA, 1082 bp, Cannabis sativa
attgcttccttaaatccaataagtaataattttacacagtcttccacaaagatctgaataccatcttcaatagtttagattggtactcaactcactaatgatacaaaatttgagagaggataattgagagtcaattttgaattgtataatttaaggaatacaagcttttcttttatctgtgtcacttagattaggttagtgaaattacgctttatcatattccttatataggctctctttagagttaaattaaaatgatttggactagacgaaagactaatgagctcaaatcaaagccatgattcaattccataaggatggcccatggagatttttgccattttatttcaacttaattaaacaaaatatctttttttaattttaccatttatctcatctaattatttaaataccaattttttgtttaataattatcaaataaaaataaaatttaaatatatttataaattagacctacaaagtgtcttaattaacgaataaatctatatttctcttttcttctcaaaatttcctaaagttagtgaaaattcacaaataagacataatttattatcgaattctaattgacttattaaatccattaattgagtctacaaagaaatattattatcctagataatgtggggacgaccacgagcctatgaaataaagctcctaataagtagatctaagatatactaagtaaattccataaattattaatttctcttgactctactatagattcagaattgaactcttgattacataaaatgctctatatatccaatatatatatacgctattaattatctattgtttcaatctaaataatcaattatcctctatagaaagtttacatcaaatatggacaaaaatactgttttaccattcgatgtatttttatccttaaatcacttaactgcttataaaagatacttcagtaaactaatataagtactgaaataagagatcttccatttatatcatttaactaagcactaatgaaattattgtttcactactaaatagttatagaatctataaattctatatttatgattagggctgagcataaaatc

SEQ ID NO: 172419 - DNA, 772 bp, Cannabis sativa
cacgaccggctagcctgccctccaatagggcttggccagacaagaggtgctcttcatggtttcttgtgcacttttacacgtggacaacaattcatgggctgcaaactgggccctaaaagcccaacaatatggcttaaaaatatctagattcaagggcattttagtcttttggaattacataaaaaattatgcaaatatctagtgtttcaaactgtaatctagggtttaggcctcttatataaaggccttaacactagcctagaaacctatgttgaatctaagtctgaaggttgccgtccaaactctgagtctaagtttgacaaattctctcttcttcattacctctctcacacgcccgtacaagcatcatctctatgttgagctttgtgcccaaaataaaactctatttcagtaatttttctatacaattatcaataaagaaacagatttattttcattacttatttagtgtgctatttggttcatgtgataatttatatgtttatctaatttataaattcatccaaatccttatcacataattattcttgtttattgtgtcgaaagcataatggaatgtaatcaagattatgtgataaaatgtattcctatgatttatcagtatacagaattcaattgattcaattgataggataatctacaatgtagttcacttgcaccttcgataagttctatgtcctttccaggcctgagattggtaggtcctagttcagttgcattatttctattcttgaatttatttgttaaagtc

SEQ ID NO: 172420 - DNA, 720 bp, Cannabis sativa
aataaacaagacaatttattaagatcatcactcttattgaaaatcgtaacatgaaacctctgcaaagcactgtagagaacaataaaagttcatagatcacttaattaacaccacgagtaaattttttccatgtttcaagaccccaaagtaacaacaaagagtgtgttaaactattagcaggagtaaaaattgtagaacatgaatccgtaagctcccaaacagtgggaggagcccaaagctttgactgcatgcctgttgaagaatgagtcgacgactcataggcattagcttggttaagggaacttgttgttgttgttaataagttgataagagtattgtttcgataaatatagaattcataatatatgaacttattagtttatcgccatctatttgagtgattggtttcaacaatccattctggttctatatttgttcgaataaaatgcttagttaattttatgcgtctaaccaattttttatttgtctcccacctaagctgcgcatgaaaagtccaaagccaatctcgaagaacaataaagcttcatagggtcattctctctaaatacaggtagtccacatctttacagattaatatgtttatttcactgagtctctttttaagactcagattgtcaaaggggtttcttcattctcaaatagatattcctatatctatatataaaggctaatttattaataatatgcaaaaaaaaaaaa

SEQ ID NO: 172421 - DNA, 633 bp, Cannabis sativa
tagggcataaaacccaacaagagggtggtaagaggaatggtgaggatggcttgccagatatcggcagggaagatagtatggattcgagggatatcccaatctttcgtaggggttaggagatctgctactaccatactaccatctgaaaggtgtctaaggtaagtaagcttgccatatcttgggatccaagcatcattaaagattgaaattgtagtaccgtcacccactgatttcaaaagacctgacatgagaagctccttgccctaagagatactgatccaaacaagagaaggccgacaacacttaccaacttctaggagggatgtgttagtgagattttagtgaggttgcaactagggaatgaggagcatgaagtaaacaccaagcttttttggccaacatcgcctggttgaaagctttcattcaacgaaaaccaagaccaccatggaactttgaatagctgagggaggaccatttttccaatggattttatgattttgttcagttcctccccaccaaaattgagccatcatagactcaagcttggattatgttatagtgagatttttctcacttagaaactcgagactagactcctgtttggaggacacgtgtactcaatttccccaagga

SEQ ID NO: 172422 - DNA, 1485 bp, Cannabis sativa
aacaaaatattaatctaatttcaataaacaaaataatatcaattcctcaatatatttttctattacgatttttttgatttagttttgaatgttagattaaaatcctcaatatgtgctcatatgtattgatgtaatgctatttaaaatttgacctaaataatgtgctcattttggtaattgtgaatcattggctattaaagaattatgggctaaatatgtagatatctcaaaagacatttctgatttattacgagattatataatattagtggtcctcaagaaacaagagctaattttattctcatcttcccccatcaagagagaaaattagaaaatcctaggtcttgttttcttgaaagatcattactcaaaatcaccacaaaaatcatccctacaagatggattataaccatcacaatctaacaattaagatatgctcccgctatttgagttcttctctttgaatcaacaaagttattctttagatctatggttatacacttataattatatgtaagatatttatctatgaaattgaatcttattattgtatattttatgagtgataaaaaattctaacgtgtagtataaaagccacctttgattgatgttgttggaagaatttagacaacactatataaataaaaatatgcgattactctgcccagaatggcgagtattcaaattatggacacatagacgtactagaaatgtaaataacacaaagggaatatagtggttcaatcagatcacagtctgcttagtccactgttgcaagggttttctctcttgtcttatttcatattggatcactcctttatatacaaagcaagtgtcctttgattacatagagattgccttgattatcaatctatttttacattgaatatcaacatttaaatcacttaaaacataaatataatgaatgaatgatacttttggcccaattcactaattacaacaacatatgcgacctgggtggtgctaattgtctgttcatattctcacataggctcataggctcaagatgtgtacaagacaaattgagtctcatatgcataagatatttgtgtcctgttcaagtcacatatacggatatcttgtaaaaaggtcaataacttaggacatgtgagtccttatcgggttatcgagcacgttaggtcatcaggcccagcttactgagtaaagaattgatctttactaactcacaagaacctttatagtcatcgcatatatctcagtatatgtgagtcttgaatccagtcctcgatccttcatcgtgtgaggcataataatgcgactagactctgtcaaggtcacatcatctcggtgagtcgagttcaggcgaggtttatactcaagatgtctccttttgacatttcagccctcctcgaggagagtgagtccacgtgtcatattcatgggagcctggtctcgagtttctaggtgaaaaattcacattataacacatgcccctagtttcgc

SEQ ID NO: 172423 - DNA, 601 bp, Cannabis sativa
gggtatgtgtatttctcacctttgttttagataggcaaatttaatataccataaaagatgacatactatgtgaattaattgtgtaaattatagtgcaaatttaatataccataattctttttttaatttgtatttgcattaatattatagtgcaagtttttttgagatttatattcaaaagagactattttgaatatttatttgttacaatgacattaattttagaaattatgaaatgtacgtatattttaggttttataatgatagagtgttgacattgttttccagtcttttcttaactttagagtatattttcttttaatttttggaattagaaacaatatttttttaaaaaaaaaatcaaaatgtgattgtttttaacttattttataaacattttgcatctaatttactattcttaaaactttatgtattttcaattaactttttcaaattaagcatataactaagtatacgtgcattctacctagtatatatatacaaatcaatcaatctatctatctatatatatataaaggagaagtatgaagtggtgatgtgacattttaatatcactctaaatgcatcaatctcttctctc

SEQ ID NO: 172424 - DNA, 692 bp, Cannabis sativa
  modified_base (652)..(656): a, c, t, g, unknown or other
ctgtaattgttgtagaaaattcccctgcccgcgtgcgaggtactttagcttgcatttacttctcttattttaagctttcacatattttatgtctgcttctaactgcattattttatctgtgcaaaaatgtctgagaagattatccaagccttaaagaagagagtaggagacagctcggacctatctcctccggccaagaagtctaaaggttgtgagactccgtccaaggagaaggcgccagttgatgaggtcattgacctttttgaggagcgacccgtggtggaccttccaattcaaaaggtctcaaaatccaagagttgtagaggagggagcttggatgggtccgaacaagctaggactccttcaacatccgtggcactgtgcacagaggccgagaggggcaaagacatgttccaatattatctaaaccagtcacatcctgaagtgagtgatcaactatctggagcgaacaaagagctgtccttggaactgatcctaacaggagttttgaaggaagttactcgggtaaatatctttcttttttatttcattctcttttatgtagcttggattttaacacacttgccgtgtaggtcaatgtgaagatggcctatgcctattctcgagccaaatcagtgttgggttttatgcnnnnnataaaactcatttcaatataatagatcggaagagcg

SEQ ID NO: 172425 - DNA, 512 bp, Cannabis sativa
tcgattagcaagcacttttgtaatgattgtagcgagcacattacatagagagatcggtctaagctccgtcatcttgtctgggcacttattttggggaattaataccacattagtcttattcaaaccaggttgcattgcttccattctaaagaactccctcaccgtatgtactgcatcccctcctactatattccaaaacttttgataaaacgccgggttcatcccttctggccccagagatttgtcaggatgcatctggaacacagccgtttttacctcatcatccattataggttgtagcaacactcgattatggttctttgtaactacatgtggaacacaagataaaatttctctccaatctacaaccgaagcctgaaacaacccttgaaaataataaaaaatgactctattaaaaccactttcccaatccacaaagaccccattctcatttttcagacgcacaatctgattatttctacgtctagcactagctctagcatgaaaaaact

SEQ ID NO: 172426 - DNA, 577 bp, Cannabis sativa
ggaggatgatttgttggtatattcaatcacatccgctgcgcctggtacatgttctgacgagtctcttgttccttcacctgcctcgatcataactcccacaatgtcttcacctcctccacctccaccactccctcagcctcctatagtgtaaactaggcaccccctcctccacctgtttcatgtcctacacctgcatctttgtcatcagatatagaaatcaaagatgatcttcccattgcaccacgtaaaggtaaacaccaatgtacttttcttatttcttcttttgtttcttataatcatctctcctcttattcttgaacttttattgcttctcttgattctattgctatttctaaaattgttcgtgaagcaatgtctcattatggttggcttgctgcaatgatagaagagatgaaagctttagttgcaaatagtccttgggtcttggttaatttaccttcaggaaaatgggtcatagggtgaaagtggttgtttattgttaaactcaatcaagatggaacaattgctcacttaaaggcacgccttgttgccaagggttatgctcaaacctatggag

SEQ ID NO: 172427 - DNA, 821 bp, Cannabis sativa
ttattattattatgtcaattatgatctttaccgaatttaaagtcgttaaaaattgttcttactctaagtatgatttggtatatgtaaaagtttaagatcataatttagtagatattaaagtctagggagtataatttagtatatggacaaggacaattaaatgaaattgaacaaaattcaaaaagcataatttagtacatctcaaaattcatggacaaaaatcctacttggcctcattattattttcctctttcattgttgaacttgagaatacccactatttttccttttattaatttgacaaagttttttaaaaaaaaagtaaaaaggaattacataggaatattttttggtgagaggattaactaccgtcaatctcctattataattttattcaatttctatgcctgaaaatacatattaattttatttttaaaactttttcatagcagtattcgttatagttatcttcatctctataaatttttcgaatagtttatttgaagttttttgaatacgcgtgataaattagaatatcaagaactttatttttggtactgtaagctattcaaaaaaatttaaaaatttacaaagatgatattgtaactataatgaatatagatatgtaaaaaaaaaatgaaaagaaaaaaaaacattttagcatgtgatttcgaacataaaagttgactaaaaaattgtaattatcactcattttttttttgtacatagagaaattgtaatatcattacattatagtcatacatgcacaaaattttttaaataatttatgatatcaaaaaataaaatttatattttcaact

SEQ ID NO: 172428 - DNA, 777 bp, Cannabis sativa
gattgagttctccgactgtccaagttgtgagaagtatcatattaagaatttcgagcttcaaatcgtggccacgcaggcttgtctggttgccgtctctttactatgcctttcccacaaccttcgtaagtatggcacacagaggattctctgcctgaaaaaaaaactagaataagaagatgaactatagaagatgggggagtataattattaaacattaaaaaataataaagaataatttttaaatccatttaaataaataaaaaaaaaagtaaagaacctgtcacttttgtgacatcccacgtccaatcaacctttttattaaaagaaaaactttaaattttgatgtgggaaaatcatataaagatacgtgtaattagtgaaaaaaataaaaaaaaaatttgtacaaaaaaaagtagtatattgccgtataaaacccaaaacatacacagtaaaaaagataaaaataccgtctgatagtatttttataataaattgagaaaaaataatatatcatataaattttcctaacaatataacaccgaagaggatgctagacactaataataccttttaacaattctctaaaatataatattacaccactgtctattttataatactccataaggagtcttgacaacaatgttattattattttttaataaatcatctaattttattaaaagtaaccaactaaaataataacctccaatgcacactactacaatatgggcctttagcttccctttttttaacccattttataaaaagggaagc

SEQ ID NO: 172429 - DNA, 620 bp, Cannabis sativa
  modified_base (217)..(226): a, c, t, g, unknown or other
  modified_base (253)..(254): a, c, t, g, unknown or other
  modified_base (447)..(452): a, c, t, g, unknown or other
gatatattgatgtgttgataatgaattattaccatattataaaatatagaaatttttgttaacattatttaaaacttaagaatttaaaatattttttaagtgattattttattattaaaatataaatataaatacaatatacattggagagttctatgtgcacctaataaaatgataagtatacctcattattaaaaaaataaacttaaataatttnnnnnnnnnnctcttaatattttttttaaaaaaattnntcacgttattttatgttaatttcaatacttatttggattttattttcattttttttttctaaatcatgtatatatattttttatttttttatttttttcttaataaatataatttatttttttgataggtatattttttaagaatataaattggaagaaaaaaattttaaaaaacttagtacaattaaagatnnnnnntttatataaaataaaaattataaaatcgggtgtctttaaaagtgtttggggtgtaaataaaatttctctatttatttttatatagtatattatatatagataaacaaattacgatatatttatatcataatataaattgtggttgttgtataataataataataataa

SEQ ID NO: 172430 - DNA, 700 bp, Cannabis sativa
tattttttataatcttataatttttataatttataaatatttaaaaacaaaagaaaaagaaaaaattgtaaaaaaaatattttaatttttttttctgattttttttttttatttttttaaatatttataatttttttaaaactaatattacgtggaccactaaaaatttgccacgtgtacaagggtttacacgtggacagtccaccgtgacacttaactgtgatttttggatggaggggtacaaagcaaaacggaaccagggtttaggcagttctgctaccaaaatttcggtttttgtgattaactgttacaaactgtaaaattcaggtggtttagctactaatttccctaaaatttaattagataaaccaaattaaaaaataactcataaaataacctttgttgtattatgtactatttatcacaaattcaatttggtgagggacggagacatgggaaaattttcaggattagaaaattttgaaaattagaattttttttagttgagttaagaataattttgaaaattagaatcttgaaaatttagattgtgggggttagtatgtggagaacttaaaaattttgggttgaattgagaattttcgcaacaccagattatatgatattattagtaacaagaagaaatttacgtgaagaacaagtgcgagtattcaatctagaatggcgagtactcaaactg

SEQ ID NO: 172431 - DNA, 924 bp, Cannabis sativa
agagaagtagatgaagagaaaaaggggttttaaagttaaaccacgaaatcctcaagtttaaacttggtgacgtggctcgaaagaacccaattttgtacttttctttttcattggtggtggattttattgaaaaattattttacatgttattttttaatttgtttttaatttacgacttgagttgttacggtagtttctatgtggattgttattacaaaatttatgaacaattacgtaagtgtacgtaatcgtttgtaagtttaaactcacacaagtgagtatgatccacacggaattattatcaagtaccacaaaattagatttgtatttctatttggcaaatcgattagaaagattgaagaattaaatgactagaaattcaagaaacaagaaaatagtaataacgagtgtaataaattatggatgagtgtttaggaatacgaatcatgttagtttagtttcttaattgctaatgttaattattaattctctccatattggcgatgacagattatcaatttaaccctaactcttctcagatcattaagatcctaaatcatatatcatctactcgcatctctgcagtaaaataacatacaacttgcggttaagaacagaatctacaaatcacataagttatgtaaatactctcgttttacatcaatttatgtttgtcctattagagcattcctaatattcacttctcagaattcacattaggatcataagtcacatttaagatagccagtctaaaatatgtaattaaagcaaataagaacaaatcacacaatcaaggaggaaaactaataatcacattaactgaatcaaaataacgtcatctatcaattatcatatccctagattggaaatttagttcatattcatatccatgatagcactaaaacagaatttaacataaaagaa

SEQ ID NO: 172432 - DNA, 1667 bp, Cannabis sativa
caaaacattaaaaggcatttggcggggcctctagttttggcaaaaccagtaatctgtttactatgtcagtaaaaggcatttggcgactcctctatctaacagtctcaaaagacgcgattggtgcagcaatagtgcaagaagagggaaagcgacaacaacctatttactatgtcagtaaaaggttactgggggcaaaatcgaggtatccccctcttgaaaaacttgccttatgcctaatcctcccatcttgcaaattacagccttacttccaggcacacccaataaaagtgagaactgattaaccgttgagacaagtttaatcaaaaccagacgcttctggaagattgataaaatggtcaattgaactggggcagtttgacataacttattaccctctaacatccatcaacggccaagctttggcaaatttattaatgaaggaataactccagaagaaaattcacttgttcagccgcggacacttagaagttattcgtggatggtgcatccaatgagcagggctcgggtgcaggggtaatattaatcttgccagaaggctttaagtttcattatgctttgagattccaatttgacgcatcaaacaacgaggctaagtaccaagccttgatcgctggtttgagaatagtcgaaacgttgaaggtcaagaatctcacatgtcatagtgattcgtaactgattgtaaatcaggttcttgaggaatactaggctaagggcctgaaaatgggtaagtatctagacaaggttcgaaagaacttggaaagattcgattattttaaaatcgagcaaatcccaagagaacagaactctaatgctgatgccttagcaaaactggcctcgcagaattacttggatgaaataaacttggttccagtagagatgttaaatgagccaagtataagttaaaaggaagacgccgagatgatagatagctcacctacatggatgactcctatagtcaactatctactcgtcgagcaacttccaactgacaaaaatgaggcgcaaaaactcttttattctgtacctcgctacacaatagtcaaaggcaaactataaagaagaggctattcaatgcctctactgcgatgtgtttttcctgcagaagcaagcaaaatcattagggaaattcatgaaggtttctgtggggatcatgcaggttggcagagtctatcgaaaaagatcattaggcaaggatattactgaccaacaatcaacaaggacacccacgagtttgtcaaaaaaggtgataagtgtctaagattttcacacatacctcctgtaccacaaacggaactgaggatgatgacctcgccttacctatttgctatatgggggattgatctaattggggaacttaccagagggcgagggggaggcaagtgcgcagtggtagcagttgatttcttcacaaaatggaccgaggttgaacctcttgtctccataacctgcaagaaagtcctcgactttgttgtcaaaaacattgtctgcatgtttggaattaccaagaagatagtgtccgataacggaactcaaatcgatggtgacttattcaccgagttttgtgagaggaacaagaatggacaagtggaagttgttaacaaaaccttgaaggatactatcaagaagaagttagatgctgccaaagg

SEQ ID NO: 172433 - DNA, 942 bp, Cannabis sativa
aagccaagaaagagaagtgctcgccaagagcttccaccaagagcccgacaaagggcaatgaagtccagcccaaagtagggaagcaaaaatagatcctcacttttgggatccggcagacagctttggacttatggaagaactggaagaagtggagattaatctcactcttccaaccagaaaattaaagattgggaaaggtttagctccaaaaataaaatcagttttcttaaaatttctaaaggtgaaccttgacctctttgcatggtcacattgagacatggtggggatagacccttctgtgatgacccatgcactaaacatagatccaaacttccaacttgtacaacaaaataggaggttgttggataaagaacgtgcccgagctctaaaagatgaagtcgaaaggctgagcaccaatgacttcatcaccgaagcattgtatccgcttcggggtatctagccctgtgttggtacctaaactgaaaaataagtggagggtgtgtatagatttcaccgacttgaataaagcatgtctaaaggactgcttcccacttcctaggatcgaccaggtagtagatggtatagttggtcatgagatcctaagcttcatggatgcttattcaggttacaaccaaatcaagatgcacccaccagaccaagaacacacaagtttcatgatagacctaggtttgtactactataaggtcatgccttttatgctaaaaaatgcaagggccacctatcagagactagtgaataaaatgttctaagatctcatgggctgcaacatggaggtttatgtggatgacatgttagtcaagtctaaaaaggttagaaggcatgtggtgttggaattaattttaaccaggatcttagatctactcacaagtatgttgattaacaacttaaatatgaacttctaaaacgataataaataaaaca

SEQ ID NO: 172434 - DNA, 700 bp, Cannabis sativa
  modified_base (236)..(246): a, c, t, g, unknown or other
tatgcataccatccgcgcgtgcacgatggtgtgtatggccgagaaaacacgcacaggggacaaaattaagacaactcagcccatcctgaccgagaaatctcagacattgcttgtctgaatgcacgtgaacccctgaaacgaaagggatccgcgcgcgtacgtggggtgacaccacccctattttttctaattttaaaaaattcctaactaattcaaattacatcaaaattgagttnnnnnnnnnnntgaattgcttaattttttccaaattatcgaacaaaaataatttcagaaaaaattcaaattattcttcgtaaaaaatttgcaaacatcaaataatcatcaaaaaacacataggtcagcatgaatcacatccaaatcacacatatattgttttaaatccaaatttcttgaaagaaaatcaattaccatggctctgagtctgaatctccttctcttgaatttggattcttcacagccttacacactatgattgagtaccaattgatgtgtgtggacactcactcttataactttagggcttcgattttgaagagagaaagagagagatgatttcgaaataggaagagtgaaggtggctcaaaattttactgaaggatagagattgcatcatcttttcctttgagccatcactacctatttataggaaaccacttatggttaggttagatttatttgg

SEQ ID NO: 172435 - DNA, 627 bp, Cannabis sativa
  modified_base (565)..(589): a, c, t, g, unknown or other
aaaaaaaaaaaaaaaaagatggccttgtaaaaggcagtagcttagcaatatgaggctacttgaaacaatagacatagctgagaaacctaagcaagctcaataacaccgtaccaactctcacaccttcatattcagcacattgatgccagcatccacattcagcttcacagctcccacttccggtggacacaaacccacccactcccacacaacaacagttggcttgatatcgtttaagatagtctaatccccgtgagcgttttccttaatatttattttttccaataataattactttcctttttctagtttctttccttgcatacttctttcaaattcaccacactgatgagaccagatatttaataaaggagcatagctatttgacaatttaataaggtgcctaacaccgatgtgtcaccctataattgattagctatttctcatattatttattaaattttaatttttttctgtaaaacatatcatttattaaattaaaatatgtgagactcgatattgaaatgcactaataacgtatgctactgttggaatttattttacnnnnnnnnnnnnnnnnnnnnnnnnnatgtttattaacatcctaaatagatcggaagagcggtt

SEQ ID NO: 172436 - DNA, 621 bp, Cannabis sativa
  modified_base (316)..(322): a, c, t, g, unknown or other
aaactaaattcccaacaagtcacacgtcctttagattcacaatttcacaaaaaatacaattacctctttcttgttgatctgaagcacctttaactaaatatgtagaaacatcaaggtaaagatacccaatttcatagttctacaatttgcatatatgccaataatgacaattagtggcatttttattagtggcattttttaaaaactgtcacaataatgatattttaataatatttggtaaaaaatgtaactataatgagaataaatgacattttaattagtgacttttttaaaaaatgtaactattaatatattnnnnnnncattttgtaaaaagtgtcattaatttatcaatatttaaatttagtaacatttttaaaaatgtcactagaataaattaatagtggaatttataaaaatgacaccaaatattagatttagcgagattttaaaatgatatctaattatgtacttttagtgacctttcaaaagtgttaaaagtaaaaaaaaatcggggtacgttgaaaaatacatcttttattaatcaattaactaaatttatctctaatttatatttaattgaaacataccttttttaatatgtactgtacccaaaatacct

SEQ ID NO: 172437 - DNA, 594 bp, Cannabis sativa
catccatctcaaatacacaggcccatacatttttatctctctcaccagatgaacagttaagtaggtcattatgtcaaaaaaggatggaggaaaaaattgttctaaataacacaacacttcaacgatttctaatcgaagatttttcaactttgacacatctaccactttgcaacaaagagatttaaagaataaacataacttggtgatagcatatcaaactttttgaggtaaaacagaatagatactcactggcagaatatgttgcatcagtatatgatgatcgtgagacttcagtccggacaaaattaatttttccatatgtaccaaattggagatatttgaagaatacccttcaggtactttaaccatagacaatgatgtacagaaagaccgcttttcttccttagtcagggcataacacaccagtggtaaaaaagtccgtttaccaacaaaatcaggatgtaaatttcctctaatccccatctctttcaaatctatacgggatttaattcaatctttactccgaccaggaatattaaacaaggtattaattaagctatctgagacatttttctcaatatgcatcacatctaa

SEQ ID NO: 172438 - DNA, 612 bp, Cannabis sativa
atttattattggatgattgtattagcgttgacttatgacctataaattcgatgataaactaatgctaaactcttttgatattatttagtgtgtgtgaaaaactgatggattgtgtacttaacctgttatgcttacttttgatagtatatatgaattctttgttgttctacttattctatataatatgttttgtgtgtataggtagatttggttgatattaagataactataacttgtgtgaggcgaaatcctaaatctttgttgtgtaaaaatgattaaggcaatttttttaaattgtttgagccaaaaagctaacctcaatttattatcctttgttgtcttattttgagcttaatttttctaatttttattctttattaaaaataaaatacatatttatccttgattatgagccatgaacttaaataaattatctttaccctattttgtatcataaacataggctattgtgtactaaatgaaaaatatgatgtaagtgggatggaatttatttatttatttttttgagaaatgcacttggaaaggatgcatgtgcatagaaaattatgatcccggtatattatgttaaaaagttctcttgttatatatata

SEQ ID NO: 172439 - DNA, 528 bp, Cannabis sativa
gctattctcaatgtcctaaacaatgatgctgacatctctcccttcaattccactctgattaccttgatccccaaggttaaaaagcctgtctccctgaaagactatcgtcctattagcctttgcacaactatctacaaaaatcattttcgaaagtcttggctaaataggctaaaggttattctcgggccattgatttccccaaaccaaagtgctttcctcaaaggccgccttatctcggataagattcttatggcgcaggaaatcctgcattccattaataataaaaagcaagggcgagaaagttggatggcggttaagctcgacatggccaaggcttttgaccgagtggaatggaaatttctccataaaatgatgcagaaatttcagtttcctagcagattcatcaagctggtcatggcatgcattaccactgccactttcaaattcaacatcaatggccaagctcatgggcttgtcaccccatctcgaggaatcaggcaaggggatccactctccccatatctcttt

SEQ ID NO: 172440 - DNA, 723 bp, Cannabis sativa
atacccaaaaactgctcagcaacactcggaccaaaaattccatatttttctcaaaactccaccaaatgcaaccagaccttccagagtacctaattagggtatacacagcatattcaaaccagtaattcccagaaaaacacactgaaatcaaacattccattaaagacctaaactatgagttcaaagctcaaacttgagtaaattcatcccaacacaaccaaactagcatacataacttaaaatcaactcaaattaaccttagaattcgaactgaacaagaatcaaaccttaacagctcctatatcacaaagtcacatactcaaactaaactttaaagcttcaaaacataagactatggttttagggttaccttagcttgatcctccttgaatcccttgctgaaatcaccaaagttcaacaacaaaaccccctggttttggctggttcaaagagagagagagaggaagggaaagagaagttgttcatgaattttggcttttctttgatttttctttttaattttcctcaaatgaaataaaggttaattacattaaccttggctgaagtattttactactaggtgtcatcatcaaaattagccacctaacccaccatttgaaattactaaaatgccctccataaccttaactttgacattttcaaacctaggggtaaaatgatcaaattctataaccccgttcaatctcggtattttattttctc

SEQ ID NO: 172441 - DNA, 946 bp, Cannabis sativa
tttcaattggggaagcttcccatggtgttcatgacctcaaaacgattaaaaataacccaagaaaagcgccccaaatagacggatcgaagtcgtctcgatccttcgttggccgtgtaccgtcattaatgaagccaaaaatggcaatttttgttcagggccttaaagcttccattcttcacgtcaaaaatgatcctttaggtctcataagcttaaatacaaccttttgtaaacccaaaaataattcaaacacgtttaaattcctgatcgctcaagaacgtgtatgaacatgcatgaaaatggtgaatctcgttttgggtattttcgaactgttttaatatgctcaaactctttcttagaatctcaaaagcccaatgaaaactctcaaagtaaccagaacacgcccaacccgaagacggaaaaaaagataaaaaaattagttctacggtagttcgttacggtcccgccccacacactctctgcctctcactctgtcgcacgacttctgaaccctagaagtcgatctccagcacgttaaaatgagaataaagaggatcgtttgaaccaaatatttgaacgattcatttccacaattttagctattgtaaccgtacgtataaaaaataataaaaataatacgtttacaactataccatataataccattatataataatatttttctattactgtactaaaaataataataataacaaatattattattctatattgtattataaaattaacacataatatcattactattatacccataacaataacattatttattgcaaatattaagcattatacacatgccaaaaaaaaattaattagtatatcgtcataaaaaaataatctcatacatatttaaacatataaatatgtaaaatgacaaaaatatgttttcaagttagcggatataacatgataacctttcagtcac

SEQ ID NO: 172442 - DNA, 1286 bp, Cannabis sativa
tctctctctctctctctaagctctttctctcttgatagagctacgccatggcagggaggagaagaccaccattttgaatagaatgttgctagaaagatgacattggtgaagaagaaggggccaagctagctccagtgattcggttgatagaagaaagtctatagatcagatcttaggaattgaagagatgaaagtatctgattctgaatcgcaaccagacctgatctttgttcttcctaagaatgtgatgaaatcgagcattagggatgatggagtggggattgtgtgctatctcccaagtcatttgaaagataatttatgcatagatttaaggtgaaatctacgttttctaaaagttatgggggctttggcaagttcaaaaattggagtaggtaacacttaaaacactcaaaaatttcctattttgagatttgaaaaggaggtgatgggagaaatttggggatgtgcaaaaaattgtagaagaggatataagggatgacaatcattactggtcttcagctcttatttgctatgtgttaggtactaatcctcctactcatgtaatggatggattttttagaagaattttgaagaatgagtgtataaatagagtgtgtctttttacgtatgagttgctcttggtgatattttatataggtaaagatagggatgctattcttgaaggggaatatcaattcttcgataagaagccccttattatgaaggattgggatcctgatgtgagattcactatagaagaagtttggaaagtgcctatttgggttcaattgaggtagttggaagaaggcaatgggaaaattagttactaatttaggcaaaatgatcaagcaggaccagggtacattgaatagggataaagtccaatattctctgtaagtgtcgttattttgtgacagattatttgagtacaatgtctagtcatgtcttgggtttcagtctgttatatctgcacttgctatctgttaagtctgttatcattaggtgttagttagtgccaggtggactgttttgttggatataaatagtcggtttcattctgtaaacagattatccataaaatcgtaatagtttgttaattcagttgtgatcgtgggagttagagtcgtattttgctattcttgttgttgtatctacaggtctgattgtatagcttgaatatggtcatcaatggcggaaaagatcagagcctgaagttgctgagttctaacggaagggagttcagtgtcaacttcgtcatcagatctgaagggattttaggttgaaga

SEQ ID NO: 172443 - DNA, 679 bp, Cannabis sativa
ttattaatataactaatcatttaatatctatatatatactgcaaaacatttttaatatttatcatttattcatttgaaaagctgcaaaaaacaaatgaaaattgataactcagaaaattatattgcatcaaaacatcattacaacctaattgagcattttttttttactaataaaaatcttacttaatcacaataaaatgtatgattgaatataaaaaatattattcttatatcgtaattaataacaacttatatctaaatattatattttaatcataaataatttttatttgcgactaaaaatcacatttaatcattaaaaaaattatgttgtaactaaatgtaactgtttttttatagtgtgtaaaaaactgcaaaactctatttagccacgacatacataacacaacaattttattaaaatataattgtttagcatgaattcaattgttaaaataagagcattgcttccatcaaaaataaaaataaaagctaaaaaataaaagtattgttataaagcatcaataatacttagcatcatttagagatggcgtcttacaatttgtataacaatatttcataataattattatattaaattatatgaactcgatatttaattgtaccaataacgatataacatattaaataatattattaagtatcactaatatttttt

SEQ ID NO: 172444 - DNA, 594 bp, Cannabis sativa
ttaaccacgtcaaaaaaattaaacataaaaaaataaagctctaataaaatttagcataaaatataacatgaactaaatttacaccataattaatattacattttttatttactcatttgctactaattaataatttttattaattaaaagtgttttaatattttattattcattgaaataattattttatatagtttcaataaaaaaattgttgacttttgagtgtcaatagacaccttatgcattggaatataattacaaaatttaagcaaaatataatattaaaaataattagtacttttacctcttgaattttcgacaatattgattcagctccctaaaatatacgatttgttaagaattcctgttgaatttttacatttacaaaaatttagtcatttttttaggttcattcttattatttcgtttaaatgctgatgtatctttgtaaattaacaattttatcccctaaactttgacaactattaaatcgtaccccttcaaaataaaaacgaggaaaattcaattttttttttagtaaatcttaaaaattaatttagatcttaaaataaaatcattttgaatgattaaaaa

SEQ ID NO: 172445 - DNA, 719 bp, Cannabis sativa
tttgtacttaagttcttcaatgaactacaggcaccatatataagaatgttttgaatgaaactttttcgattggtttgcattattcgttctaggattttcaaccctaataacgttagtctaattataaaacgacaataaagtgatggtttcactttaaaatcgacaaatattttagttagaaatagaaagcttgtaaaattgaaagtactctattatgtaaaagctgaaacacttttggttttccctttgccagatttttttgtccaaagcttcaagctttaaattcaatattaaacttgttcacctttgatatcaaatgaagttaatttagatggcttgcttaaggtgtggtatcttctcataactcctcaaagtcaagggaagaatcatttatcatgtaataaagttgagatttatgtcactatgcgcaaatttctcttatttctgtagctgaattggtattatttaacatagggctactcaaaaaaattaacaaattcctcaatttgaataaaccgtccaaaccgaataaaccggcaaaaaatacaacttgaataactttacgaaaattttaaactgcccaataaatatattgggcgggtggaataaattttaaaccggccaataaatattgaggaaattatactctatactatttttatattgtcctcttatttttaccctcttttttaaagtacctctttttttaaacattgtac

SEQ ID NO: 172446 - DNA, 570 bp, Cannabis sativa
ttcatcacatattcattgtagcatgattagttttggaattatggttgttgcttgaatgttgtatacactcacataaagttttattaaaaagttgtggtgtttttagacataagtctaacataaatgccatgtggcactctcgggttggatatatttcaaataacagttttgttagttggttttgggggaaaatattttctctgtacagaagctatataaactgtaatcctgatgtaattcaagtgtgcttaatttgagagacactagattagagagagaggagagactgagtgttttgggaggataaggagcttgactcctttgtaatcgatcttcctgttgtaaagatcaaacacttgtactcatctttgattcatcaataaagaaagtatgttgattgtttcccgaggatgtaggcatagattgcattgatctatgttcgaacctcgttaaagaaaaggtgccaatttctgtttttcagtttattataattgattgcttattgttcatacttgattgaattttattgctggttaattggattgcattttcggttctggtttatgattg

SEQ ID NO: 172447 - DNA, 1510 bp, Cannabis sativa
cattttttttacctgtaatagcaacttaccaataggttaaattcatttctaaaattaaattaatcataattactaattttcttaaaataattaattttaatttaaatatttaataagagcctttttagcaattaacatttataaataattttatttttatatgtgagtctctattataatatttttaacatttaaaccatttacctataatatttacaataaaattctttttttttttttttacaaaatttagacttctaccccttctaaaataattttttgaatacttaattaatttttttaaaaattacatctaattattattttgcaacaacctcttgacccatcttctttctttataaaaatatttataaattagagtttcagtttgtgctgacctaattaacattatgtaaatttttcactgcgatacaatctcctatatctatgccacaaacccatttctctattcaaccaattacagttagagttttccttgattttttaataatttgcttgctatttttctactgttatgcttatttgcgaaaaataagcaacaatttcaattaattggtaatctactttgataatttttttttacaatatttagattgatgaagatgatttcaacaaggagcgaaaatagttaacaatcattaattttatagttgttattatattttttttacttaattttttcattttttaaaagaaaacaaaagactaaataacttgaactaatcttggactgacacactaatttggcacttaaaagtattaaaaaaataagattgagcataaaattatctttaattagaggtcattcatactatttttcattaattaaggttatgtgtgataactataaattataaggagttttgttgcaattatttcaattatttaagttaaaaaaataattgctaaaagatctctacttgttaacaaattccataaaattaattaataattattagtaatgtaattttaaataaaataaattttaattaagtttttataaggaaataaagtatcaagttacaagttatttattatttatttttcttttaatttttaaattaatcacaaccattcaacaatgatctaatggttaaaaatatgtaattatgctgattacatatttgatgtaaccattgaaacctcctccatatatatatttatgtatacttttctaataaatatccaccttctaaaactcaagctttcaaaagatgaaaattaagattaccaacaaagtttttatggcttattaattttttatatgaataatgtgagcataaaatttaaacagccgcacgcgtgaagcgtgagctaacttctagcattataaaatagcactcgcctttaatcttaatccccatacagcggtgatgtaacgcccttacttatataaattaagatgccataaataaactggcgttaagatactaatgttgcctttattaaaaaaaaaacaattttcaaaacatgggtacccagttgaaaa

SEQ ID NO: 172448 - DNA, 587 bp, Cannabis sativa
  modified_base (215)..(222): a, c, t, g, unknown or other
tatcaaactatttaacccacaatttcatactaaataataatattattgctattttttagggatttttttatttttacacttctaaataattttttttaatttctattgcaactagcagagcaacttaaatcgcaacaaaaaattgtatagcaacccacataaaaactactagagaaactactttagaaacaaaaattataaatttaaaaaaaaannnnnnnnttaaaaaaaaatataaaaaataattcccctttttttatatggtccaaatgcttgcattaatccaagagagtgatggcaaggtagaacataaatacctcttaaattctacactggattactcgaatatatatacactaatttagtggtaagtgtagatggctcctatcactcgtttctctctattatttttatcaatgatatgttttaattagaatgtaataacttattagtaagaaagaagaaaaaactaattattaagcttaaaaaaatatatcttactattataaaagtgtggtaataaggtgatagtttgaagacatttttaccctttaagaaggtaggtattaataattttgcccttttgt

SEQ ID NO: 172449 - DNA, 501 bp, Cannabis sativa
atgaagacttgaagaggatattagctaacgacccattatcgatcattgtccttgctacaatcatattggcgatttgtacttctactaccaaggggttgttgtgtgggtatcgaacgtgtttggtgtcgtcctcaaagaacatgattgactcatgttcataccgaggttatttaggaggtcgctcctggacagccaacacatcgtcacctggctcatgtcacagagaccgagcgtatttctcctaggattttctagagttcccggcaaggtgaggtcctccaaatataatgtccaaacagccagcaacggggggaggtaacaattgttggtcatccccaactgcttgtttttgtcgtgggggccgatcgttgtgtcgacgtacatatcttttcaagtgggggttgtttttctgatgaggaactctacttcctcatttagattgttgcactcatcagtgtcatggtcgtagtcattgtggaatcgacaaaacttgttcatgtc

SEQ ID NO: 172450 - DNA, 561 bp, Cannabis sativa
ttgaaagataattaatattaaaaactgattaaaataacttaaaataaataaataaatagatatgcaacaaaacaaaaagaagaaaaaaaatgacagttagtagtaaattgttgaaatttatatgtgcatgtaattattataaaatattgtaaagccaccaaatttaatatttggatttatattccgttgaaaatgtatatatatttatatagataaacatgcttcaaataaaaaatataagtattgtttgaataattaatttcaatattaaataaaaatagactaaataaattggcaaaaaaaaaaaagaaatagacacttaattaatacttaatgattatagcaattaaaattttatgattatataataattaaaaaatcactctactaattataatacaaagtggtatgaaaataaataaagaatacaaaatcaataagaagcatcttaaacaaatattttataacttaacaatatctttcttaactctcatagtcttgccaataaactttcattttttcaagaatgaaagtgttgtacttgaaattgcctccactcca

SEQ ID NO: 172451 - DNA, 1083 bp, Cannabis sativa
  modified_base (870)..(870): a, c, t, g, unknown or other
ttgttcgactcttgcctgtaatttaaagtaaatttattgttatcaaattgagaaaaaaagacataagttattggatattaagttttacaactttcaattaaaacatgctgttttgggtctttctagtaggcgataacctctactcacacctccagtgtcaccatttctggacgtgatatcctagtcgcttctttctccccatatctttgaatattctccttccatgccttttttcgtatctgctctctagtcacgtaatccttttgacattgattaatgacgtaatttgcgaacataagattattagttgggaactcaaacttgttctggaaaaaaaaataaacattaaagtcatatatatattatttttttgtataataattttggttaatctattacaataaaaattaataaaaattagaatgttacctctattctgtcccatatagtctaaatgaccatatcctcaacgtcctcgaactcaaacttgatcaaaggaatggtgttgcgaacaagaaacttgatataattattaaactttttgccatagtcgtctactagggccccagtcaccatatgaaatctaaatttcggattctggcctgtaagcagcttggctaatttttgttcaatatttttccccttgtactttcccctaactccatttttcttacttccgcttgcacctgcatcaaccattctacacatacaagctacaaataattaattaatcaaacaattaacaaaagagacatgtatttaatttaattaacagtgggttgaaatattacaatactttaaatctacaagtcatcatcatcatcatcatcattaacatgtacattattttcattatcactatcactagtntcttcatcatcactataaacaatgaagccatctaaatcttcatggttaggctgctcacggtccctgttggtcacttcaattaggtcaacatcatcatggacatatttgacatcgtccagttgtgcaagttgaacgactaacgagattcccgaagagtttctttcttgtatagttgtggtctcatcatcatcctcatctgagaaatctcaaaca

SEQ ID NO: 172452 - DNA, 1305 bp, Cannabis sativa
tctttactcacggattcttttaacactactacaatatgcacttttagcttttattttttcaacccatcaatataaatatatataaaaaaaaaagtatgagacggtgacatgacactctaaaaacactctaattaactctatctatttctcacttaaagtaataaaataatactctaaaatcactatatatctaatttttaatttttaattattttatatatactaattgaataattaactagaaacatatttatacaattcaaaaaaatttcaaactatttcaaactaactaaaattaatactaatcgtgtacatatctcatttttttaattttttttttaatatttatcttttttttcctaattttttaaaaagtattaagcaatatatattttttaatatacatatcataaatcaatagtacaggtacgaaatttgtgtttttcatatcaaaattcctaaaatactctttctattaattaagcaacactactaaataatcctaaagctatgtatgttttatcaatttggctgctctttctttctttttttctattttttcgtttctttagtttgttagaacatacattcttcatcttaatttctcattctctaatcttatatgtttttttttttaatattttttcttttgttgtttagaatatcataatgagcatagcaatgacattaatggacaacatctagatctcgattttctattgggtatatatattttcttttcatattttataatacattttcatagaactctctttttatgaattcattacaaagttctcaatttttattaatcattatattatatttttttttcttttgtggatctaaattgcatagtgattatttttttttcttttatgaatttcagatccgacatttcatggtaagttttctatagatttctctttccatgagtttctttacaatttttttaatttttagtattttttatctttattttgtatgttaccccatgataatctcacggaaactcatgaggttaagagattatctaatttttgttatttttaacttatgatatgattttgataatttgataaatattatgtttggtgtaattttgtgtaaaagaaaataataacagatgtaatgtggtagcaatgaataaaaattttataattaggttttcaaattaaatttatacaaaaatatctgaaatatctatactaataattaatatatataaaatttaaatataaatgttaaatattttttaatcatatatacaataaattaatctattgaatatatatatatatatat

SEQ ID NO: 172453 - DNA, 530 bp, Cannabis sativa
aaaagaagaaaaagactctcattcaactctctcgaaatcctttgagcaagctagggtttggttttctttttgaaattcaagcttaattcagcaaggagttggtggtttcaagcttcaggtaagcctctagtaactccttcatggttttcttgagtttgaagttaggaattttgcatgattttaaggaattgagttaagtagctgttgtttgtgtttggatttgttttcagaagcttatttatgtttggatatgttgatttaagcatgttttaatggttgttggttagtttaaccaacagttttaagttttagaactcaaacttggagctctaatggtggattgcgattttgagcttatagaagtgttttattgctttgattttgttctatgggatataaatagcaggtctggaagtttttgtggcgtttggagttggtttgaggttgtggtgaatttttgagggtttcctgcactaaactagaattttggttcagagggacctgtataaccggaattccggttggtcctc

SEQ ID NO: 172454 - DNA, 761 bp, Cannabis sativa
catggcatacatcggcaaggatagtccgacagacttgatgagagtaactggcccagctttagataacgtcttagccttccaaccctggagctttgacgacaagttttccataatgaaattaaaatcggcgtccttttgtctggagcgaaaaagaggcaaacctaaatatttgatgttgccttcaggggacccaattcccagctccgactttatagcacttctcatatcaatgggagtattgttgctaaagaagattgaggttttttgtttattgacttgttggcctgaccaagcacaaaacttctcaatgcattgccagaaccccttcacttcttccaagttcgcctttccaaccacgattaaatcatccgcaaagaaaatgtgagtaattatgggaccacctctactaagcttaatgcccttgatcacgcccttccccttggcgtcaatcagaagtctggacaaaattttcgccgtccaaatgaacaaatagggagacaaaggatcaccctgatgaagaccacaggatggagaaatctttccaacttgccccccattaaggcataagctaagagaagtagtagttatacaatgggaaacccacccacggaacctttgaggagccccaaacccgtcaagcacttgatctataaagttccaactcagcttatcataggctttcataagatcaatcttcaaggcgaagcaaccttctttaccttttttcctgttgaacgaatggatgatttcttgaatgatta

SEQ ID NO: 172455 - DNA, 796 bp, Cannabis sativa
attctacaatgtactctcttaaaaaatatatactgatataccttttacttgtttcagcatcttgaaaaaaaaattagtctattttttttttcatattcatgttatagttatttaagatatcttacaaaattttgagaaattcgaaataatttataatatagaaaataatgttcaaacattttattttaaacgcgtataaaataaaatagtcacgcgtgcaatacactgtttgaacgtagttttcggtgtgttaaacttttttgaatttttttcttttgcaagatgtcttacataactataatttacttgactatgagaaaaaattatttcggatactaaaacggataaaaatatattggtgcatcccttaagaagtgtattatagaattggttgattaatttttatatatacatagaaattttacgtataataatataaaatataattacttatccaaactaaataaaaatactaatcaatttgattggatgttggatgtattggatttttggacaccccatccaccatgcgatctgatgcaattggatatttaaaaataacatccgattcgatccggtcacaattgaatatctaatgtttgacagtcaattctcattggatttgatcgatttatgcacacccctaaatataacgttcaactttcaatatacagtaaaatctttattcaagaatataattgagactaagtaaattatattctaattgagaggttagaactaaatagagttacactagaaaaaaaaattaaaataccaaaaaatatcaatgtaacaa

SEQ ID NO: 172456 - DNA, 509 bp, Cannabis sativa
cttatagtatgatctaacactaccaggtacaagaacaatgactctccctcaatttttttcgataatattagagccttcgttagatgttatttaagttgttgtaaggcttctttacactgaattgtccattcaaactcactagttcctcaaagtacattaaagaaaggtatgcatgtatctgtcgatttggaaacgaatttgctaagtgctgtaattcttccagttaacttttgaacatccttgtgttttctaggtgaaagcatctctagaagggctttgatattctccgggttcacctcaatgcctcgagaactaactatgaaacccaagaatttccttgaaaaaactccaaaagtgcatttctttggatttagtttcattctatactcttggatgatggaaaaagcctcttctaaatcttcgtgatgattcatggaggtctttgatttcactagcatgtcatcgatataaacttccatgttcttccccagtacattcttgaacatttt

SEQ ID NO: 172457 - DNA, 556 bp, Cannabis sativa
taaaaaaataacctcaaaataatcatagagaaggaaaaatgaatgtattttatagcctccatcttccacacccatggatagaaccaccacaacaccacgagaatacccagaaaacaatcattaattccagcaagatggaataagaacagtgaaatcgatgttaaattaataaattatggaaaacaaccgtaaaacaacactaaaacaaataaaaaaaactaaaaaataaacacagtatactgcagtatactgcagtatgaaacttataaaaatacacagtaaaaaaataaaaaataccgcctagcagtatttttgtaaaaaaataataaaagtcagtatatcatgtaaatttccttaaaaaattgaacatgccaaaaacttgaattcattattaaaattgaatatttttttttaggattgttagtttttagggtttcaattattttagaattagggctatttacataaatatgggaaaatatactatagtttacatatatatggcaagaaaactaaatgccactaaatatgacattcaaaacaaaaaagttaacaa

SEQ ID NO: 172458 - DNA, 777 bp, Cannabis sativa
agtgactcacaaatgggttttccgttgtgaatgagaactgggatcatgctgtgaactgggttcatttcaagaagaagagagctcttgttggataagttttcttctttgacctcgtattgaatatctttctcagctaaggcgatttttactctcattgcataagagctaggccagaaatccaataacaccactttgtcttccattatggctgaacttgtaattggtcttttgataatattgctgtgtactagtagttattatataacacacttggatacatatatagattattaagtgacttggtcattgcttatgtttgagtctcatttttatatttattggtttcttctcctctactctttgttctttcttgttgtatggcctctttttatttaattaatatatctcagcagagtaaacgcatgcatatacgtcataattattatgatttttaaaagcatgattgtacgtacgcagccactattgaataatattgatccatgtgtggatattgccaactaaaaaagagaaagtcatttacagagatagttagagctataaatagttaatacggttcggcagacgaggaaattactctccatattctttttatattttcttcttttatttttattttttttttaaagtctatcatttttactttttttttaaaatattgtaccaattttgctactgtcactttaagatattttccatgtgattctgagtattttgaatacgatacatataaaaagaggtatgtttcaattaaatata

SEQ ID NO: 172459 - DNA, 851 bp, Cannabis sativa
ccagcaaactgaccctcactgttcaaaatactcttttctggtttagtacttgaactactaccattagttaagcctctttttctttcttcttgaacaactgtagcataggctttattaacactaggcaaaggatcacgcataaagatctgtgatctaaccatgttgtaagattcattcagaccaacaagaaactctaacaatcggtcgtcatcttgatactcttggataatcttcatagcaccacaactacaaacaggttgtggtctatattccctgatttgattccacagtgatttgagtcgagtaaaataggttgtcatagtgttcgcgatccttgagtaagactctgcacatcgtcttctttgctttgaagatccttggagcatttttctcatgaaatcttgcatgcaattcctcccaaatctcagcagcattatcatgatacattatgccatcaacaatctctcttgaaattgcatgaagtatctatgaaataactgtgttgttgcatatgcactagctatcataatcctcatgatcctcatctagttgtggaagctttccattaacaaacttcaccttgggtaatatccgataagcctaatggtaaataaatagggtttataattatataatgggttaatgagataataagtgggattatgatcctactaatctagttcaacataaattttaaatttgctaaagtggataaataagcataatttaaaaattacggatatttatacggtatatgtgaatgtaatatgagttaccactgtaataaaaatattttctggtttggtgaccttggagactcgatcgggatgataagttgatagtatatgtat

SEQ ID NO: 172460 - DNA, 751 bp, Cannabis sativa
cctaaggtatgaccggctaggctctggccaatcctaggccgcagctcaatcaaaggccaatcaaccaggcccctacagcaatatatccttctgtgcaagcatagttggatcaaatatgagacattctcaagggcttagcttgtccaaaaccttcagaactcaagttggacagggcaaggggatcaccattctcagcatacatcaatgccttgcccttgccaaaattcaagatgtcggcttggaagatgtacacaagaaaagaagaccctctagtacacctgaagtactttgagatccaaacagatctcctacaagtatctggagatgtctaatgtcgaatcttaccaacaactctagcagaaataggctaaaaatggtgtttcaagctggccccaggaagatttaattcttgggaagagctctcccaagagttctatattcagttctctgcttcaagacaaatacgtgcccgacttgaggatcttgtcaaaataaagcaaagacaagatgaacccttgaaggactacattcaatagttcattactaaggccacaaaggttataggcctaatagaagaaggcagatatacagccatactcggaggcatcctactgctgagtgacttctggaaagatatcaggaggatctcaacgaacaacaccgaggatttccttgagcaagctgatggcttcataaagttggaagaagttgtttggcaagcccagacaagagggcaggataatgacgaaca

SEQ ID NO: 172461 - DNA, 534 bp, Cannabis sativa
tttctattgacttatggtacctgggaactaatattattgctgaactcaacaggaaacatgaactcggccgccgataatgaaggccagtggcgatctagcatggtggacctggaaaacaacactctgaatctgagaatgaatgaatgataaaataaatctgagatacatatctacatagagagataaatatatatatatatatagagagagaacacataaagatagatagagatagagggagttttgctttacttgctaagccatggatgatcatcggacagtgaagagaggaggaagacaagccagagagagaaaaaaaagtgtttttaaaaattttaaaatcaacaaaaatctatttttaaaattctaaaaaattttgattatgaattaaaaaaacaaaaaaacaaaattacttaccgaacacaattttagaatttattttcatttttataattaaaaatagaaatctacttttaaaaacattaccgaacaagctcatagttcttgttttagtgagtaatcatctctaatgga

SEQ ID NO: 172462 - DNA, 529 bp, Cannabis sativa
tcccatgctctctcaaatgcctaccatacaatacaacaatcatattggataagaaaaagacttagctagtaattagttagtttgaatgtacgtaccgttgtgtcatcttggccattcccttttgctccaaaatcatcaacgttaataatttttggtgtttgaatcgaaggtggttgtggcttaggttgaggctttggttggggttgaggtcgaggtcttggttgaggtgtgggctgaggctgaggagtttgaggtgttggctttggtgcgggctgaggttggggcttcggttgaggagttttaggagttggatttggttgaggtgtaggctgaggttgaggagtttgaggagatggttttggttgaggttgaggagtttgaggtgttggttgaggttgaggagttggttttggttgaggtgtgggctgaggttggggcttcggttgaggtgctggtgacgttggtttaggttgaggttgaggttgaggtgtttgttttggttggggttgaggcataggctgaggttgag

SEQ ID NO: 172463 - DNA, 617 bp, Cannabis sativa
ctgccagatatatgtacaacttcttgcccttttatagtttagccaacaaaggttgatttcccagatgttcctttaagcttgtgaaggcccaaagaaaattgtttatttcccttgagggtatcaaagaatgggagacatttatcaatggaccttgatataaacctattcatggctgcaactctcccagttagacactgcacctccttcctgttcttgggtgactccatgtctattaatctttttagggtttgcttctttgcttctctcatttaccatgaatccaaggaattttctaaaggacacacaaaatacggactacaatggattcaacatcattcgatatttgcggagggtagaaaacatctcgcccagatcctggattagatccttggctttcttggtctttactaacatgttgtcgacatatacctccacgttgcagtcaatttggttagcaaacatcttgttgacaagttgctggtacgttgtgttgggctttgtgccctaaataaaattctattttaatgtaatcttctatattcaaatattaataaagaaacagatttaatttcattacttgtttaatatgttatttggttcatgtgatcatctattta

SEQ ID NO: 172464 - DNA, 784 bp, Cannabis sativa
aaaatcacaaagttgtcatttaaattgattttaatgagtcaacactgaggtggattaagacacgctgcaaagtgtatctcgccaggccaactcgctaggtgcttgaacactcaatagcaacaataaccctggcagcgagctggagctcttctcatgtctttgtaaggttaaaaacgtaatgctccatctaaaaatcgcagttccttgtgccaagatgaatttcagcagccaacatcatttgaatgtcagcttctttatgagagagctgatgtgacagagtagtggagcccactgaaagttgtttggagctgattagtgaaggtaccaagattatgccttcctatatcgagatggatgtcttgctaatcgccattcatgtccttcaggatgttacacttagttagtataatgtatattatatgctaagtgttctattaaccaacacgtctcgtcattacttctctacgtattgcgaggtagatgcctcactacgtattatcgatctcctccttacaactgtgttctttgacgcaaaatggtttctcatcaatatgcaaatcaatagttcgtacatccttgtcttgctaaagaccgtacagtctacgagtcataaacttaccctattgactttgcatttaatgagttattccatttaatattctttaatataattctcattatatttgttgttttgtattctccaaggttaacacgtgtcatcctttgaagtaccagcaaaattttgggtataacaattgctctacaatattagcctttagaggca

SEQ ID NO: 172465 - DNA, 814 bp, Cannabis sativa
ctacttatgagagtggtttaaaagggatttgggagagacctattgctggcacgaaaatgtttcaagtggtaaccaagatgaaacaactcaaacacaagctgacagagattaataaggagggttttaatgatttgcagggtgatgtagctagaaacaagatggatctagatactttgcaacaacaaattcatcaaaatccttctgatttccacctgcattcccgagagaaagatgccagagaaaagttaagtaagtctcaaagggattatgcatccttccttcaacagaaagctaaagctgcttggttacagagtggagattgtaatacagccttgtttcatgcctgtatcaagcaaagacagcggcaaaatagaattttatccattgaaaagctggatgggagcagggttagtgaaccttctaaggtttcagatgcttttctggaatactataagagcttacttggtactagaatggaaaagaggaggaaaactgagaaaagcatattggctaggggacccatactcactgatgatcaaggaagactgcttactcaacaattcacaagtgatgatgtgaagaaagctattttcagtatacttgtgaacaagtcacctggacctgatggatactcaagcagcttctttcaagacaattgggagtatactggtgaggatatcagtgcggatgtgctatcttttttggagtcgggtaatattctcaaagaaatcaactcaactataattaccttggttcctaaatgtaaatgtcctaactctgttaaagattttagaccaattgcttgctgcaatgt

SEQ ID NO: 172466 - DNA, 626 bp, Cannabis sativa
taattagcctttataatatatctatgtacaaaagcaattgtttttgtatagatttcaaatatagttaactagtgcattagtgttttttttttttttttgaaaggtcgtgcattagtgatttgtgagatatatattactagcttcatgataaatgctacgtgtaattaaaatgtagtcaacgaagtcttatgtaagattaggaaggagctaattggcatgatttaatctaatttgatctacagagtggggatatttgcatttgtgcagattggattggattaaaaaattcaaagttcgtacttatgaggattggatgttgattgatctgtaaaagtaactgattcaattcaatctacacatttttgtaaaataatttaaaaaattataaaaaaaaaataataattttaaaatacaatatgtataatataaatgtatttaaaaatttaataaatcaaatatatattctatttttatatataattttttttatatacaatttaaaacaaaattaaacatttatttatatgtacttttgtttcttttaaatttattaaagacataaaataacaataatttgttttattttgttgctagttatgtgataaaaatatatatatttttaataa

SEQ ID NO: 172467 - DNA, 539 bp, Cannabis sativa
aggagagatgggtactagctctttggtaaattcctacactgggaaatgttagaggaacaagtatacaagttggctagtgtgaaaacttacagagatgttctctattctaaatttttcaagaaaagaaaactccatgttctatttgtactcgccatgcttgtatgcacctttattgttatcttgttacttgatgcggaccttttatgtttagtccaaacatgcttgttgcaggatcttcattgtcaaggagtgttctttagagcgctaagtcttttacaaacaatttcctctctttgacttgtttgttgaagcacttggaaacttgttattggcagacatgccactttaagttggattggtctcctctttcttcccttttgtcaagggattctactagtaagatttggtttacttcttgatcattcattgttagaccaaaagtatgagagcatactgttggcagactaggccagcaagggtatagaccaggtggccaaccacgttggagcattgcctggccatttggaagaggctatggc

SEQ ID NO: 172468 - DNA, 526 bp, Cannabis sativa
taaattagtgacaacttatatccaaacattatgatttagtcacaagtgaattttaaactaaaattcatatttagtcacaaaaaatttatattgtgacggaaaaattattattaaaagtaattgtgttttgtagtatggtcactcgctagcttacataaatcctatatataaatataggaaactttttaagtggaggtatcctttttttggtgggagtgttttttctttcgcaccttaagaaattatatattccattttttaaatgatattgtatattgtagttacattttcttcgaatttttttgaatactttagaatgcgggtgtttgttggatcacattcaatagatttggactcaaccgatccaattcaattatttattggatatttaattttgtcatctgattcaatctaatcgaattgtgttatccgattccgatccaatagatgtattggattggatcggttccaaccattagtttttttttttttaatttcatgagttaaatgtatattaaatcaatta

SEQ ID NO: 172469 - DNA, 667 bp, Cannabis sativa
tcaaatttacgtgtataagtaaaaagactattttcaataatatgagaaaaattattaatgttatgataaatatgacataaaaaataaatgtcactaaagatgacattatctaatcaatcaaactaaaattatggtttctaaaaaaaaccatataaaacaataaaaagagaattttaatttaagattcataaaaaattaaaacttaattgaattaccataaaaaatattacaatttctttcatatttatcttttttaaaaaataaaacaaatgaaactacagtgatcgtcggagttgtcacttgtgctggaaaagtcaccgaagtttgctgctggcaccgaaaaattcgttagagtagctgccagtgccgaaaaagttactgtcggtgccgaaaagtcgtcaaaattagcattgacgtcgaaaaaatcaccaagaaactggtttcttcttgatgaagaaactagtttcttggtaattttatcggtgattttaccgttgacaatgccaattctaacgactattccggagtttgccgtcggtgcctaagaagtcactagagtagctgtcggtgtcagaaaattcgccgaagttactgccgacgtcagataagtcatcagaattggtattgtcgccagcaaaatcaccgaaaaaatcaccaagaaagtggt

SEQ ID NO: 172470 - DNA, 651 bp, Cannabis sativa
atcaggtctcatataatttaagaaaataactttaaagaatatcgctaaccaattagaaagcgtcacctatagaatgtgtaatagtgtcaatagcaatgctccacaagagtgcacttgatatatgtttggttagaatagtcacttataaaaatatatgcctcacttataactacatttgtcataatacttattattaagttctattttaataaaaaaaattagttcaaagtactatttagtattattttaaaaattatatattctaatttattatttaacaaaatataaaatctaatcaatatcttttacaaaatataatttttaccctgagactagtaaatattaaatagtctcgacaaggaaatataaacttactactaaaaaatatttacataaattcatatatatatatatatatatcttcgtataatttaactaccaaaaagaaaaaaaaaacatttgctagttagtttatatttacctcatccaaggtttgaatgttacgttgtaaattaagtgaatactataattctcccaatatttacttttgagtagcaatggagagctagcctctaaaaatgttaattattaataaatatttagtttatataaaatagtgaagtcttcttattggatatatagacagttgtg

SEQ ID NO: 172471 - DNA, 1099 bp, Cannabis sativa
  modified_base (1050)..(1053): a, c, t, g, unknown or other
aagagcactcacaatattagatgaactatattagtaaaaaatagaaaagagaaaagtaaaaatatgacaaaaaattagttcaaattaggaatgtacatcggtcggtttagtcgggttatagtgtatttttgccaacctaatataaatatcgggttgcaaatatctaattataacccgtccaatgaaaatataaaaaaagtgtaacccacccaatattttttgtcggtttggtcgggttaacccgtttaaaccgatatttattttttatttttttcattgttgttagttttgggtgctcaaataattgatttgaaaaaataaatgtaaagtatatgcctttcaaattaaaatagttatagtttaaattaatgttaaaaaataattatgaattggataaacattaaagtattgaacaatatttttcaaaaaaatagaataaaaaaatatattcatatgtaaattctaaattttaacttcaatattcaaatacaatcaacattattaactataaattttaaatttcaaagtaaacactataaaattcagactttaaatgtaaaatagtttaactattaaacgtaatttatatattatgttataaataattttagtaaaaaatatgtaaatcggtttattcgatttattcgggttatttgggcgggttagaataatattcaacctgcccaatatattcattaggcggtttgagtttttcgtaaagttattagggttatattttttgttggtttattcggtttgttaattttttttgcaacactagttcagataagctattttagctcaaattttaaagaatgttataatacttctctacatgtagagaagcactatttattttttaaacaacatttaataatattttattattatgtattttatttatatagggatatttaaatgaatgtattaaaaaataaaagaactaatgtatgatgtaatgtgaaagtttaagataaaataataaaaaaattagagttttagtgaactattttaaaagatagagtacataagtgttggaaattattttannnngatctatttactatcatgtatgttagattaacaacctaatatgaat

SEQ ID NO: 172472 - DNA, 541 bp, Cannabis sativa
aaaaaaaaaaaccaacaacgaagaactctagacgagaggggatcgtctaaccagcatgaaggagaagagctttgctgatgagaattgacttcctcgaaaagagaaaaaaaattaactgcaaataaacaaaatataaattagtgaagaaaaaataaaataataatcataataaataaataaatattattgaaaattttacaatgtattttcactacaaaataaataatcatattgaaaattattaaacatatccgttctatataaaaaagagaaaacttatcttgtcaaattgcagttggttccggcattagatcctagacacagattacttaaacaatttaataacttgaataactcaataactttataactctattaaccaggaactaaaattctataacaactaataccactaatagttataataaaatctctctcatatataattaataaataatatagtttaatatgagaatttaaaaactaacataataagctaatacaacaaaaattaacacctttaataataataataataata

SEQ ID NO: 172473 - DNA, 547 bp, Cannabis sativa
tggtaaaataaattccaacattcaaaacacccagaaatatacatacctcaagtatattatctgctttattgataaccccttggtacaaactaccataccaacttatagtgagtcttccgttgaatatgttgattcatcaacatctgagactctccatcattaccacaaggtttcactccctggttcatgcgctactattattttcttgcaatcatcactatctctatatttagttaatcactctaaaaatcattttaccctcgattatgtagtccattgtttaataaataacctactatgtgatccaacattcaccaatcactcgaatacatgctcattaaattgcatctcaattcataagcttttccccattcaaggtaagtatgcctttctataataacttaataaagtaatctcttcccaaaatttcaatggtctccttatataccatattgaatatccagtcaattgtgaagtactctccatcattaccgtatcaccttaagtaatttaggtaatcttgtttactttagtgataccactactc

SEQ ID NO: 172474 - DNA, 566 bp, Cannabis sativa
gggaaatctagtgtagctctccttctttttacctcatggcataaagaagttaaatgggccaataagaattaagaaaagaaagtgtacacctaatattagtgtactcctttacagccaatttgttcctaaaaaaaaactactttatcaaagagacatataatgcatggtgggctgattttatttttatgggtctttaatgtttttttttttttaatatttcaataaaaacaatccattatatttgttatactataaattatttacaaattttcaaaaattcatataatattccaataacaataatatatacaatcatataacaaaattcacattataactattaaagatctaaaaatacaaaaatataccaatataagtgtcaatttacatattttaaataagaaatacaattaaaaaaataatctaatatttttacctataaatttatgacactacttaatgatattccttataatatgcgacccgtaaaaaatactcctcagtataagatagttgtagaaatgtggccattttattactttttgttatgggtgactattcaatgg

SEQ ID NO: 172475 - DNA, 1512 bp, Cannabis sativa
  modified_base (1457)..(1461): a, c, t, g, unknown or other
tttgtagtagtgctcgtaaaagtttttctcttctccattattaaatttagtatttcttaagctcttattttatgagtttttgaaaatctcagtaaaacattttattactttcattaagagctgaaacaagatctaagctacggtgttgctgaaactacggtggctactcaaaaaataattactaaaaagactcctcaaggcagcctcaatgcagtcagtgtaaatctagtgtactgacaaatcatgggacttaaactttaaaacatataatcatgattatattctattgtgttgacaacactataattaaaaataatactatatgttcaggaacattaaacatataatcatgaaagaaatcatgtgaatcatgcaacataaaataatttctgatcttttattaactagttatctgattattttgaaaatagattttatttagggcataaaacccaacaaactcctatttgcactaatacaaaactaaaagtgtattttcattatctcaacatgtccatcaagtgtggtatgtagtattttcttggtaataagatttgacaagttgtactcagtacaaactttctccaccattacatctccttagtcataaaatctttgatattgtgaaattcctttctatatatttactcctcttagggtactggattctttactatttggcaactatatctgtgttagtcaggaagtaacactagtagttaatctattactagaataatgccaaaaactgtatagaactttccatagactgaataattatctagtagctcactttaacattcagtctcactggtagagttagagactctagattagtttttatactttttcaaaaatcattgctccacccccagagtaatcatcatcccataagtaaactttctagcattaacgcaagtttataaaccttatttggtgtagtctaagagtattaaaataccacccttatcgaccaacatatagtttatcttttgatcttaatatttatttgattatcttcctatattcttttcctgcattaaactgatacctactcataactctcactcaacaacaggtttctggtctaatgtataccagagcatacatgagacctctcactattgatgcttgaggaattctttcatgattttttttttcccagaattaaactgttcttagataaataaaatttatgtctaggagccaaaaaacttcctttatagttagccatttagaaaaatgcttcaacatcttactaaagtaagttgcttgcactagagtaagtaaattatcaagtataccacaagccataggtttagataatctcaaacctatgatactaggatcgggaaattttgttaagtttattgaatagacttattatcgaaatttctcttctagtccttataatagacaacttttggttactctatatgaatggttttaaccatagnnnnnttggctttgcttcttagttccttattctgattatccattacttgtttaaac

SEQ ID NO: 172476 - DNA, 1814 bp, Cannabis sativa
agtttatcattgtgatacaaaatctcattgatatcccccatgacaatccaatgaaccaaaggagttgtatcatgcaatctttttaaaagatgctaagtagcatacctttgagacacaataggtgcgccataaaatccagaaaagtgacaagtaggaccatgaacaagagccatgtagcactcaataaaatttagcttgatgggatttctttaaacgacaagtttttttagtgtggccaaattttttacaattttggcactgtggttttccttttaaccagcagtctttctccaagtaattttttcttttacaaataccacatggaggatacttgtcgttattttcttttcgttttgcttgtgtctttttcccattagcttttggtttttgagactacgaattgattttagactgaaaggcattttcagcttcactttctttatacctttcccgtctactttcatatgcttcaagagatgccattagttcagttggtgatagagtttctaaatctttagtttcctctatcactgaaactactgaatcacattttttttgtacaagaaatcagtatcttatactatattcttgttagaaattatttttccatatatcccatttgatttactatttttttttaattctagaatagtaatcttttgcagtctcattatccttcattttaagattctcaaaatttcttgtaagcttttgtagtctaactgtgtgtaccttaactattccttgcaactcctcctgtagcgtgtcccatgattcttttgtcgttgctgcgcacataattcgtagaaaaagattgtctgccatagcttgctgcaagtaatataatgtaagagaatctttttgttgattatcctctagtgccttcttttgatcttccaaaagagatgtaatatcttccaaaatagtgattccttcttcaacaatttttcataaattttgtgataaaaataggtcctcattttgatggaccaaaaatcataattttctccatggaaattggaagaggtatagaagagcgattagactacgaactcatgttaatgagtggaaaagattacgcccaatgatatgatcgaacggagctctgataccactgatagaatcactactagaaaatttgattttagtgacacacattgagtaactctaaaagtgtatactgacacttcaacgcgcgtcactaatgagggtgactggaaagataatttttagtgacacttcagacgtgtcactgaaaccttttgcattcattttctgagtgtcactataggcatatagagtcaggttttgtttgactaaaaaaaaaacagtcacacacataaagtgtcactatatctttttttttttcttttttattaatatttttagagatatagacacacaaaaagtgtcactatattaaatatttttttaaaaaatatattatttcatttgttttaattcaaatttaatatattgtaaataataatttatattaattatatataaatacaattaaatataacaataatagttttaattaactaaatgtaaaatttataaattacataaacaaaattgtattttattaaaataaaaacctaaatgataatttacaagttaatacatgaaatgttcaaatgattctacaaacacaattaaaaaaataaactaaaaaattgaaatatattacacatgtaatattcaaaacaatttaaaacacataaaaaatgtagggtgattctacaatgcacccccttaaaagggatgtactggtgcacccttaacttgtttcggcatccagaaaaaaattt

SEQ ID NO: 172477 - DNA, 506 bp, Cannabis sativa
acttgtgtgagaagtgtttcttacgcggttctcttgactggcactccacttaggaatttttttcctcaaagatgcctacgccaaggggaccccatctccccttcttattcttgctttgtcaggatgttctatcaaagatcattcttataagagctaaagagaaaagtctcatccatggcattaagattgcaagatctgtcccttcaatctctcacctaatgttcgcggatgatactatcttgtttccctgtgcaaatgagagagaggcaagaaccttgactgagtgcctttctttgtatggaaaattgttcggacagtcttgtactgtctccaaatctagtgtccttttctctaaaaatttgagcagtgggaaaattcaatccaaataatgctgaattttgctcaagttagaggcggggagagacaccttagaaacccttttatctttaagagaaacaaagggaagattacatcaggttaaagacaagcatgttgaatagattgga

SEQ ID NO: 172478 - DNA, 643 bp, Cannabis sativa
agggttaggtggctggttgtggttttggcacctaggaattttaagggcagcaaggattaattagaaatccttttcccttccaagaaaatcaaaaataaaaaaaaaaaggatagaaaaatacaccttttggaactctccctctctttctctttcggctgggacaaaccagagagatttaccctcaaagtttggtgtttttttggattgaagctaaggatttgatcattcatgaagtataggtaaatcctagaccattagttttatgtttttaagatttttcttgagtttgaggttatgaaattgtgatttagtggctgttagggtttgggatgtttagggtttgatttttaaggttcatttgagttgattaagagtcctagcagctggttttagtatgtggtgttgattttatgcaagtttaagttttgaactcaaagctttgatcattaatggcaagttgaattttaataatttgttctgtgattttctagttgaattatgttgtaaatacattgtacaggtatactggaaagtttggtagagtttggttggattttgaggccatgggggcatttttttgggttcccagcacagaactggaattccggttctgggggacctgtaggaaccggtcgaccggttg

SEQ ID NO: 172479 - DNA, 564 bp, Cannabis sativa
attcagaaccaagattaacacttgatacaatgtcactgccaaaaacaactctccaatagcataataacccaatcccaaagcctttccgaatttgctgcactcacctgaattgacttcaaaccatcatctataaaatcacataacataattcattaggatttcaatatttaattttttatataaacacattacatatatatacacatacatatatatatatatcatataaccaaaaaagatctcacataatttcatgaacagttgacaaaatctccttttaaaaataataatgaacaaatatatacataacacactatgaaaaatcaattgaaattatatatttgaacactttaaaatttattattgagattacatttatgttgtaaactagaagaatgctaattctcgattgtatggtatcaaaaataatggaaaaattaccattcctttggtaaaattgacatgggttgtaagccaataccattgagataaagcctcttatatagtaatgttatccttctgaattagatccttaagaaccgttgtcccctccaaatagcttac

SEQ ID NO: 172480 - DNA, 532 bp, Cannabis sativa
tccatatgatccatcaatgcatattattgataacaaatgggttcaccgaataaaactaaatgctgatggctctttagacaagtacaaatcacggctagttgccaaaggggatctccaaactccgggcattgactatcaagacacttttagtccggttgtgaagcctactactgttcgaattgtattaagcattgctgtctcatccaattggtcagtgaaacaacttgatgtaagcaatgcttttctttatggcaatcttgaagaaaccgtgttcatgaaacaacctcaaggctttgttgatcctactcatcccactcatgtgtgtctcctacacaaagccctatatggtttaaaacaagcccctcgggcatggaatggtcgactcaaaagcactttatttcagtggggattcactgcttcttgatctgataatagtctgtttatacatggatcgggcaactctcttgtatatctcttggtctatgtggatgacatattgatcaccggtcctaattcatcattgatttccaaa

SEQ ID NO: 172481 - DNA, 503 bp, Cannabis sativa
cctcataaggaactagaggcataccggttaggccagcattgacctagccatgaatacccgaaatccatccaaatctgcaacacagttaaaggagttcggttattgttttctcacgcccaaacccgaactcaacacatctttttcttagtcatttgaacttagaagaagaagttgtattaaagtttcaatcggacaaacgcgaacaatgtgccccctaagtagtttggattctttctttttagttttgataagcaaatttattcatacattctttctttaatgcattgtaacatagaaatgaaacttcaaattgacattggtaagaaattataataaaaatgaaagaaaactgatcattagtgtaacttcttacagaaaagctaaaaggttaattaagaatgtattaatttctcatgatttttttggaaagcttgtttggaacgaaaactatattctaactatttaattagaggtaattgaaaaaacttcaattcactaagaca

SEQ ID NO: 172482 - DNA, 773 bp, Cannabis sativa
aattatgtttatactatggataaataaataacagagcttggaagtgtaataaatttaccatcaaattgcttggctgactgcgattataatgattttacctgcaataagttatgtattgagaaatcttataaaaatggaagaaaatgtgtacacaatcttagtgggggcggatttaaaatattgttgttataataattaaaatttaaaatatatccttcatcatcaaataaataaataaagagtaccattataataattatagttttatcattatttttactattactatcttttatacattaatatttttttttttttgcaagaaaatagtaaaatgtaatttattaaagatttagacttcacaaaaaaaaaataaaaaaaatagatagtttaaaatgttgaaatcgtagtttaattgaaataataaaataaataaaatagtgacaaaataaataaggcaaaaataacaataaaataataaataaataatagactataacatttattctctaataatttctgtaaattattattctctaataataataattattttgtcactattctctaataataataataataattattttttttgaaaataatagtaatattgtttgtaagaaataagtttttattatatttattgtactaattaatgatattttatattaatatttatgctattaatatattaatgttattacatttatattattttttcatataaatatttatactattttgactgacatatataaaatatatttaaa

SEQ ID NO: 172483 - DNA, 766 bp, Cannabis sativa
tctcctcactcaaaagctgcaatcgtctcctaccgatacatcgaaaccatttgcttcacatgtttatggtaaaatcaattactcctctactcatttatggattgttgacagtggtgctacacatcatatatgttgtaatctttctttattttccaatttacacaaaacaactattactaactctatttctcttcccaatggttctaccactaaagttgttagatcaggtgatatcattttttcaaaagacttaaccatctacaatgttttatatgtccctgactttcaacttaatctttttagtgttcccagttttcttcttacaattaccaacacaattttatccactcataattcttgtatacttcaaggtacatagcacaagaagattgggatagctaatcgcattggcaacctatttttcctgctgcaatctgtcaattttcctagtcactgtaattcgactttttcctctactaaatcatgtagtagtgtccattcttggcactctagacttggacatccttcattgtccacaacaaagataatagatagtcaattacattctgagaatattgatttttccccttgttctctatttgtcatttggctaaacaaaaacgattaccattcaattgtcaaaataatattgttgaatcttgtctcgatttagttcattttgacatatggggcccttttcatgttcaaagtattgaaggttatagatatttcctcactattgtggatgatcacagcagacatactt

SEQ ID NO: 172484 - DNA, 903 bp, Cannabis sativa
caacacaattttttttttcttttcactcattcgcttcatttcactacactataatctactacactacaagctatactatatatttctcatttttggacggagcatcatacacgaagcattatatacaagcaatggataataattttttttcaaaaaatcttgtttattgttgttatatttagtttaaaatattattttgatgcttgatctatggattgttgttgttattttgctgttttgtttgttaaaatatttgttgtttgtgaatactgcatttttcctagtttttacaatttttttttttatggtccgatgtaggtccgatggtggtccgatgccctgtcaaagttggttgacaaggatgaaggcctgatggaggccgatgggggtccaaaaattggttttttatttaatttatatgatcgggtccgatggggtatccgattgtggtccgaaaaatgggtttggggattttttttgtaggctcgattgggtctccgatgggtgtcaaaagatgggttcgtgcaatttttttgattggatccgatggagtctgattgtgtatagatttattgcattttcaagattttggataacttttatgtgagatttttgttctaaattgtaattgtattttttttaatgtatgtgacaggttcaactgttaatacgtttgttatgtataatggtgtttgggagcttgagggtagagattgtgtttataatcgggccaaaaatttgacacttgacattgatccgaacgtaagctactcaggtttggttaatcttttgtatgaagaactggatattgacgaattgcagtttgacttgaaattggaagtaaattacaagtacatgaaaggcttaatgtatcgttctgaagttattggaaatgataagcgt

SEQ ID NO: 172485 - DNA, 952 bp, Cannabis sativa
tttaacttgtgactattctcaaacttcttcaatcagatccaaagattcttcaagtaaagcatgattttgagtagggtcataagtttctctcttatgagaagacatgttggtttcgattgggattactgcctcgcacgcacccatatgtcattgaatacacagtgtggcctattaaggtcctttcaatatttttatatgccaaaagaagtcttgaagttcttttggccaatgtgctttgcaagcttgaagcatctttgtcaaggttgtcttcaaaatattgttaacaacttccacttgtctatttgtctaaggtctggccacagctaaagagctctcaatgatttcgtgcttgacacaaaaatcagtgaattgatcactgctaaattgctttctattatcaaaaacaattttgtgtgcaattccatatctgtacacagtgtttttcattaagaagtccaatgcctttttggaagttactacattcataggctcagcttccatccacttactaaaatagtaaacaaccacaacagtaaatttgactcatccctttccagttggaagtgatcctactaattctattcctcaaacagcaaagggccaaggactattcatgagggttatctatgttggtggagcccttaggaccttggaataacactgtcattgttcacatttgcatacgtatccattgcaatccttcttaatggttgaccaaaaatatccttgacaaatgatttttcttgaacagagtgggtacagacgtgagatatccataaaatccttcgtgaatctcatggataacagcacttatcttggtcccaattgtgcaccttaagaatcacatcgataatcctcttttgtataactttcaatccatgattacatacctaggagcttggtattgtatcttttgtgaagctgctctatcctgttaggttttatgccctaa

SEQ ID NO: 172486 - DNA, 500 bp, Cannabis sativa
gattgagtacttgaattgatatgaataggcatgtactttatcactaaagctcaaaaattgatgaagaaaaagagaggggatctcaaaatagcaagggaggaggctctcaaatttctagttgtgacaaaaattgaaaactaggttatcaaatatggatgagaatgagagcattctattccttttacagtgtttcaacaagggttatgatttaaattatatggaacaaaaaagataaaataatagcaaattaaacactagtggccaactataagatgtggaccccactagttacaattgtgccattttattcaacaatttatcttttctttcacttatgccatattttaaaattttgatccaatgaatgtcaaaattatttattaaatagttataattagttatcgaataaaattatcatttaacttattttattaattagacatttcaaagtctcttaattaacaaataaatcctaaaacttcttttctttacaattaagc

SEQ ID NO: 172487 - DNA, 1427 bp, Cannabis sativa
tcaaacaagactatcatcatttcacccaaattctcaaccatgcatttccaagaatataaacacaaaattcatgcttttcaatcctcataccagcaacaaatttaacaagtaaagagggtaaaaactaccttaaatccaagccttcaaagtacaacaagaaccacttccaaaactaccactaaaaccaagtgatttcctcacaacaaaagcttcaaagcaaagagtaaagagagaaagagggaggtcggttcaaaggggctgagaaacactccattaaatttatctcattacttaccattttctttttgttgaaaaataactcaattaggaaaaattacaataatacccctagggccatataacacatatacttcatccatgggcgaaattgtcattatcgtaccacacatttactcaaataatttttagaatattcacacactaataaaattccaacacaaaattccaaaattgtatttcgacctcgaacccagttcggcctgaaatacctgattgtgactataccgcgccgacttgttagaacacacctgaaaaaggacaaagtaggtatgctatataataatatagtccataagcacgtaattaaattaaattcacaattttacccttcccgggtgattgaggctcaaatttgtatattttaagcttttaattgcgtatataatatttttatggttttaattttaaaaatattttaattggaaatatttaatttaatttaattttgtgttatttttcagatttgagcaaagtgttgcaaataaaattgggattcaaagccaattaaaagtttaatggcccaacgctcacttgcaatttcgaaagtattacatatgttgggtcttcacctgattctcttaaaaggcctattaatttaagcatttgaagatccatttttcatcatgctaaggctcattgaaagaggcccatcattcacatacatcaaaggatcacattcctttttttttttcctaaactccaataatcactattgcacactacgacactaggtgtcccagtctctccagtatgagacaccacttgcttgatgcatctccaacaattgctgacgcaggcagcttccaagccattcttcgcgcgccacgtgatcaacttgtctcccactctccaaccttttcttaagcgtgggtcatatcaattatcaactttttaagccacttcccctactgagtagtacacgaattttaccagtttggagagtaaatgtgcactgtaaataggagccaaatacaatgaaaacaatatcagatttttagagtagtaaaattatactctttttattgttttcttattctctcttagttttacttattttatgtgacaaaaatgaatgaactattttagaaatattgatattgattcttttgtgcttcatctccatatct

SEQ ID NO: 172488 - DNA, 750 bp, Cannabis sativa
  modified_base (440)..(444): a, c, t, g, unknown or other
ccacattattgttaaatattttatttgccctttaaaagttaatatttatcaattattgagattgttagatttaagaatttttatcaaaattcattcaattttactaatttttatgtactaaatcatagagcattgctatttgacatcagtagtgcttagtactttctagatatatcgccttacaattggctagcgatactccttaaaagttattgcattaaattatatgagacacaatatttagttagaccaatagcgatattgacatgtataagagtgctaggcaccactggtgcctttagcatttctcataaatcatgcccccaaactttgatatctaccaaattatgtcactcaaactttgacatgtactaaatcatacctcctaagcttttatccatgttagactttccttactaaaattggacaaaagtctttannnnnaataatctcaatagttcagagggaaatttttaatgaccttaaaagttcaaaggacatgatttagtatctcaaagttcggaaggtaaaaatcctacttagtcacctgtggtgcttaaccttctagatgtgtcgcattggaattgattagcgatactccttaaaagttattgcattaaactatatgggacccgatatttagctagaccaatagcactattcacacgtaggagagtgctaagcaccactggtgccttttagcatttctaataaatcatgcccccaggctttgatatctaccaaattatg

SEQ ID NO: 172489 - DNA, 811 bp, Cannabis sativa
agcataatggcttgccgactacgatcctcaatgaccgcttgttggcccttaacgtttccatctccttgtccctccgttcggcgaacatgcgcctctgctcttcaaatgcgagatttaccgtagcgcagagttcctcctgatcatggtgcaaggtgttggtatgaccttgcatgattccaagagcagcacggaggttctagattttagtgtcatctccaatggtcgtttgaacattggtaagaggaggaacgattgtgttatgaatgccctggctggctactgaactggtattcccagtctcttgcacgcaagatgcgatttcactcacaggagttgtcacaccgtgacccgtagttgatggctgtcggggatttgctattggcgaaacccttgtgttcctagggttctgaagtgcaggatccaccgcctgtggatttgctggatcaaccacggctctgcgagtctgtaccaccatcatacttgttattagatttgagataaagagcgatccttgagttcagctctcaatgaacgcactaaaatgttgacctcacttttagccaacgataatgattctgatttgtaagcgacaagtagtttattacgagtgtaatatagtaaaaaaaataaagacgcaagaattttatagaggttcagccctgggtagttcggtaatagcctaatcctcgttatttgtattgacttaagaacaaggagaatagttcattttcttagaactcttagaacaatgtctctgaatatatattcttagacaaaatgtttcgacccgttgcccagtgagtatgaatca

SEQ ID NO: 172490 - DNA, 754 bp, Cannabis sativa
ttttaaaaaatatataattttatcccacagtacgtatatttcaaaagaattgaaaaagtaatataatatttttagttttataaataattcttttgtagctattcataggctatttttagatataatagctcatttgatatagaggatggtatttcatattatttttaccttagctaaataatttagctattagctattttactctatatttcattaatcacatattgggcatcatttaatcataatgttgcattgcaataattttccactttttatattagaaacactctcatatattattaatgtgtaaaaatatttttcaaatttaatatgtactaaattatgtttataaatatttaagttattaaaaatttctctggaattattaatattgttgaatttaaaagttttcgctcaattccgattaatttactattaaaagcctaatgtgacgagattgtccatttaacaaataatgtctttttaattttgacatgtactaatccctacattttcaatttatctattagtaaaatttgaataaaatcggacgaaaatttttaaatttacgatctcgaaagttaaaaaaaattcttgtaacatcttgaacaatttagaataagatacacttatttatttaaggagaattaccttaaatactttttttaaaaaatttacggtttgagtttctaaagtggttgcagctacttgcaataagagtttctatacattttttgttgcaatttagattgca

SEQ ID NO: 172491 - DNA, 1231 bp, Cannabis sativa
  modified_base (1006)..(1017): a, c, t, g, unknown or other
acaatgtgcaatttattagctgagagaaatagtaaaatagaaaaatgagccaaataaatggaaaggaatagaaaattatagtgtattttgaatttgaccttttgggtacttttccatgcattgggacacttggccgcatcaaaataatttgaaaatggttgatggaaggaggagacgacacttggcgagcatgtattggttgctgaaactcgaattaaaggagaagctgccacttgtcgcgcatgtggaggctgggagagagagaagctgctggcggatcccacgcatgtagaaagtaggtggcttggcaggagagggacagggaccactcgcccttgtctggagtgggaagcacgcgcccatctaggccgtaagactaacacacggatggcccagattgaggagcttgctgatgcgcgagtgggcttctatcaggatccgaaatctgatctttttgtaaaaaaatatattatttttttcactccaattcttcactttaatataccataataattttaattcctacaaaaaaagacaataaattaaatttaaattaaatattttcaacataaaaatatatctcgtaaatttcatgaaaatatgattttaatttaaactttaagcttattaaatgtatatattttaccattaatcacaaggcatgaagaatgatattgctgagtatgttgtaagtgtcttacttgtcatcaaatgaaagctgaacatcagaggcctgcagggttgctgcaaccattgaatatcccggagtggaaatgggaggatattgtcatggacttcgtggtaggattgcctagaaccacgggacagtacgactctgtgtgggtcatagtggacagatttacaaagtcaacgcactttttacctgtttggatgaacttctccattgatcagtatgcttagttacatcttagagaaattattcgtcttcatggtgtcccaaagtccattgtttcgataggaatccaaagtttacatcaagattctnnnnnnnnnnnnatcgagctatgggtactcagttgaagtttagcacaacctttcatcctaagacggatggacagtctgagaggactattcagttcttagaagacatgctttaggcatgtgtgcttgactttgaaggatcatggataaagtaccttcccctaattaagttctcgtacaataacagctatcaggaaacaatcgcgatggccctttatgagcttttata

SEQ ID NO: 172492 - DNA, 547 bp, Cannabis sativa
tggtatcttctccacatcagtaggattccaatggcctgcgaaccagaagcctgccaagatcaacactcgaacccagaaaaaaaaattcaaaaaacccacgaaaaatacaaaaaggccagtgaaaaatacaaaaaaaaaaaaaaaaaacacttgagcttcaatgggttgcgaacgttgcccagatctctgccaagaccgggcgtcccatcgaagcctcttcgagatctccggcgagttgctccgcctggcatcaagcaaagagaaacagatctgtttatttcaggtgggatttcggtgccgaaaatctcagccgtactgtttagaagtcggacctgagggaagagtcgtatccaacttcgatttgaagctcgctctctcggtccaacttgacctggcgaactgtggaggctgatgatgaagcagcaacaaccattggtgagggttcaagaagaagaacgacaggaagaagaagaggacgaagaagaggatttcaatttcttttgtgtttatttgttagttttagtttttaggttttaattaatgattt

SEQ ID NO: 172493 - DNA, 689 bp, Cannabis sativa
aaataaaatctaatttgttgtgtttctaagcaatttgaaatggagttattctcatagtgacaaataagttatctttgcatgcaatgctatgttgttgttgattggagagataatttgtagttgtatgaaattttatttactaagtaatgacctgtttagacatgttttgaaccaaaatggacaatacttgattgaatagctactaactactagtaacctgtttagagaagttgtgaatgaacaattattcatttgcatctcttcaccattgttgttagtatttgacatgtttatgttacgaggtaacctcaacctcatcaccctaatatctctctctcacgtttccagctgtactagagaactttaagaacgaaacaccgccgccgatcatttctctcagacccgctgccgtccataccaatgaacctatcctccctcacaactctggactccaatctactctccaaccctaggtgcagggccttcaaagctcactttcggacccatgtttctcgtcccagaaacatcgttgtctgctccttcaaccccccggcagctgcttcatcatcactcagcagcgttgctgagtccgctacccataagtttagtcgaattgagtcattgagtcaggtctctggtgtgttaggctgccagtggggtgacgaaggtaaaggcaaactagtcgacat

SEQ ID NO: 172494 - DNA, 756 bp, Cannabis sativa
aatcataactaattcaataaatatccaaaattaagttctgtaaaagcctaaatttattatttttttatctactttctaaaaacaatactttaagtacgacagtaaaaatatgttttgtcgaaaatttgtaatgaacatacattcatcaattaagcacataaaccaacatgaacacattaaaatcatcacaatcatcgttgtaaatctatattttataaaagtaaattattaccatggctctgaggtcagttgttggaatttattttgccaagatctagatttactaacatgtatgttgattataatctataatctaaccctaagtatgaatttccttatacaatgaaataaacacatataaagtttagaaaaccttatattgatggcaaaggaataatatgactccttccgctcagatctataacccttgttcctttctgttgtagagtaataacaagatctaagcctggatctccttcttcttcagtttggttaaccaccgtcttccgcattatgattgagtacttaacttgctatgagtgggcatgatactctatccctaaaggcttagaaattgatgaagaacaatagaaggggtacgaaatcactatgaaaggagtctctcatctagtcgttgtctgacagagttaaaaagctaggtttacattggttgaaaggttggatgagaatgagagcatcatgttctttttatagtatttcaactagggtttatgatttaattatatggattaaaaa

SEQ ID NO: 172495 - DNA, 556 bp, Cannabis sativa
atatatatatttttttatcattaagatgaccgaaaccaaaaaaaaaattagttagttcttttgtagttaatttgctgataaattagttatcgaacttaaaatttaaacaaaatttaatacactaacaaattttatagattgtaattatttttaatttaatatttaaaagctatcatgtaatattttaaattggtctatttttaatgagaatttttgttagatttcaatatatatatatacatatataagaaagctaaataatatatcttcaacatcatagaataaattaaattacaaacaaaattgactatactaactaattttttgacaaacaatatggttagttctaatattttattgaaattagtaacataatggttgctcagaataataatgtaaatatattataagtaatacgacaatataaatataatcttaaataactaaaactatgattttaaaaataatttcaaatcattaaaactatgatttttaggcaaagcaaacttgactccaagttaaaaaatgcaatttgctacgattacctgactcaccc

SEQ ID NO: 172496 - DNA, 843 bp, Cannabis sativa
aaatataaatagagtaatttgtggcctaaatacttaagtttaatctttagttgcaaatacttaagtttagtttttttacggtaataatacttaagttataattctagaacatccgtaggtacctcgccgcggaagtcccttattggttcaagtcgttaatttttatttttattttttttatttttaaaaatactattttttatgttttatttataattttacgacctaaaatttttatttattacacttataaaatttttaaattataaaaatacactttttttcaaccaaaaatataaaaaataaaaaacaacaagaaatcaagacgactataaatcaattatcaataaactataaaacaattccatgaaaactataaacaattataaataaaataataaaaaaataatttattatttttactggagagatatttttataaataaaaaaataaagcgtaaaaataaaaaataaaaaatctgtgttggcgtatttttgtatttttttttttaaatttttggtgatttatgtaaatttttcaaataaaaaaaaatcttgataactcattgggatattatataacattactctatattctttttagtaaaaataaatgaatgtaaatagagtaatttgtggttgaaatacttgagtttaatttatgattgtaaataaatatttaaatttaatttttcatggtaataatacttaagttatatttttgaaacatttgtaattacttaaccatgacaatctttaattgatccaagttgttaaatttttattttttatttaaaagttaattaaaatatagggaaaaaaacaaaaaaatacaaaaaagga

SEQ ID NO: 172497 - DNA, 879 bp, Cannabis sativa
tccaagatgcttaaaaatattggtcgtcttctaacattatgtctactctcagcagtaccaatatatgcgggtatatggagtccaagaatgcggggattattttttctacaagtccatcttaatattataaagttgtgataaacttgggggcaaatgttatctctcaaaaaatccaggatatgaatttttgttctgtatatggaggtccaagaaagaggagcacattggccaaagaggagctcattggccaaataggagcacattggcgaaagaggagctcattggccaaataggagctcattggccaaggaggagcacattggcaaaagaggagctcattggccaaggaggagctcattggccaaggaggagctcattggccaaggaggagcacattggccaaggaggagcacattggccaaagaggagcactttggccaaggaggagcattttgggcacactaagctcccaactccgtcaggtgctaaggcgcaaagagcaccttaggtgccaaattatctcatggacctgatgggcatgaaccgaacccaattggctcccctcatgtacccatgaccattcgggttcgctaaatacgagagacacgtgcttttaaagctatttcaaaaatatagtcaaaaaatgataagtgaaggtttacctatctttaagggattttaaatcctatatgaatatctatataaggggtgaaatcacttgtaaagggaacctgaaattgatactcacgagatcatactctttagctccaactctcaaattttagaaactcacttgaggagtgaactcttggagaacataactctggagaactctcctcaagcactgatatcaataacactccaagtggactagcctat

SEQ ID NO: 172498 - DNA, 566 bp, Cannabis sativa
taagaaatttatgtgtgttttatcgttggttcttagtttgtacttttttttttggatgacgttcttaaattttacgagctcgtagaagaaatttttgatgtaagcattactgtggaagaaatgaaaagacatttatccttttttgatgggaagttggttggtttgaaaaaggcagaaggtagtctattgaaaatataaaatcagaagatataatgttgaacttattagctttctatttttttgaggaaataaaatctttggacattttgttattaactcgtaggagaaatgaaagtttgaagatgacgcccgtccctaaagatgagggaagagtagaggatgggttgattaagagcaacaatgattgtgttttaggcaataataatgtgtaattaatttatcatgtcaataaattttatttttctctatttgttatttgttatgtgataaaagtttgattttaaaaaaaatgaaagttatttgatttatttgggagatgtgaagctagaattgacaagatgatataccataaaaaatttgttcatgataaggtggaagttgcttta

SEQ ID NO: 172499 - DNA, 581 bp, Cannabis sativa
acccgtagtcggtgtctagattcaggactaaaattaggtcctggaccctcctccggacccagacctaggacccaaaaccagaacttgaaccagaactggaccaggtgcctagaataggaccaggactgagaccaggacctgaacctagaactagaactagcctcggacgaaaaacaagactcggacccagacgaggatctaaacttggaattggacccaaacccagaaccaaacaaggacccgggcccgaacctggcacctgacccaaactcgaaaccaaacctaaaaccgaacctgaacccagaccaggatgcaaacccatataaggatcaaaacaaaggactcggacccaaaacctaacccggaccaagactgggatcgaaacgcgagattcagacccacacctggacccatacttagacctggaccaaaacccaaacctaaacttggacccagacgtagactgggatccacacctagacccgaactcagaccaggactagaaactcgacccagacccaaaccacaacctagacctaggacctagattgggacctggcacctaaactagaacgagataa

SEQ ID NO: 172500 - DNA, 620 bp, Cannabis sativa
agggtgtaatttataaacctaaataaatatatatatattgcagcagccattcaactaatcaaactttctcaatcgaaagatatatttgaaatagattaaactacgtattaggatgcaattaattcataattttatatatatatttgaaatatttaaaaaaaaaatctccccatgaatttctcataaacgaattcagttatttaggcacactttatatagaatagatattttttaaaaaaaaccattatttttaagaccaagcatgtgatagaaataaatggtggagaaaattaagctaagtaactaccttttatattttaatttattaaaatttatactcatttcaaatgattttacattaaattattcttttgttatcaattagatttttttatatttagtaagtgacaggttgatttgtgcgtcaattatgtctttgtaattgtattaatttcattcacttttttaaaatcttaaataattttaagtcaattttattatttatattttattatttatttcttttaaaattctttatattattgacagccaattagcaattttaattataataacaataatttaagtatataattttttctaagtttggtttttacaag

SEQ ID NO: 172501 - DNA, 535 bp, Cannabis sativa
attaaaatataagaatgtatataattagacaaaactaataaatactttcttaaaataaattcaaaaaagaattcaataattaaagaaaacaaactacggtacccaaaataaaatgataaattacttacattttcaaagttgtgataattttattttatttttttgactaacaattccaaaactaacggaaattctttagttaacgtgaaataaataaaatggacaaatgtcaaatgttgattgttgggacagtaatgagatagggagtttgggatagaaattctttactaaatctccaaccatttacacttgaccgggtaatggtaatcatgtctgtaggcagtgaggaagttagaggtagttcgaaacgtcttctttgtccatttggaagattatgaacttcaggggttcaactttaaactcaggatgcatgagattggttcttagagttgctagatgagccgttgctattactagatgaaccgttagttgcagtattatttttcaatattggctactgatatatagcagatga

SEQ ID NO: 172502 - DNA, 663 bp, Cannabis sativa
gaatcaaaataatgggtaaagtgggcgcctcttcgcttgccacaaagttcatctctcagcaaaggtaactaatggttaatggttatttgtgttaaaattattttaatttagtattagaattaggttaatcaatctttcttagtttccttctgattgtaaattttactttatttgagttttagtatttgtgacttcatgtgattatatgaatatatatgttgcaagtctttcagttcatctattaatgctctcgcctctcttgccattttgttaaaaatatgtgaaaattacatggaatatgatattttataaaaaaaattataaaaatatagcatttataagtttattgttattttttttgtttgtgttcctagactagtgaagtgtagcacatgctcttgctcaatttgctttttatatcgatgggcactatgtatagtggcccagtgaccatgattgtattattgacttgatttaaacaaacattaattaatcaataatatctcctaacactttttttcctcctaatagaagttttaaagaggctattttctcaaacaatataataataaaaaagttattaaatatgataatattaatacatattcgatatatatatatatatattacaatattcacatacaactttaatatacatgatta

SEQ ID NO: 172503 - DNA, 901 bp, Cannabis sativa
  modified_base (372)..(373): a, c, t, g, unknown or other
gttttcgttttcatttttttcttacttctgtctgtttttcttttctgtctgggttacgaaatttctttatgctcaatatgaattccctaagttcttctactattccccctctaatgctcactcctgatgagaacatggtctataccatgactgaaattccagatgacacctcccctgatattagtcttcttcttaaactctgcactgttaagcactttaatcgagcctccctgattaaaactctagccccaatctggacctctcaatgccgttttcctgttactatttctgaacactctgatggcctttttcttgtcacctttctttgtgaaggggataagcgtaggatccttgatgggcagccttggcatnntgcccaaagtctcaccatctttgcagcccctgacacctcttttcctattacccctgaccagatgcattatgtgcccttttgggtgcaggtgtatgggatcccttttaggtgtaaatcctatgatttagcaaaacttatagctactggggtaggggatttgattcaagtggataacactacccttaaggatgggactgggccctatcttagggctagatatctgttagatgtaaacaagcctattaggaggggaataaatatttgtttcattaaaatgggcagagagttcactaagtggcttgactttaaatatgagcgattgcctgacttttgcttctactgtggtaagcttgaccatactaaaaaatattgtcatgcttatttacaaaaatgtgatgagtccattgttccaccacactgtccctatgataggttactttgtggtaaggaaaaactatctgagaaacctctaccatttgagtaccctcatgctccagctattactatagctgatcttgatatcactga

SEQ ID NO: 172504 - DNA, 520 bp, Cannabis sativa
tttttttttttttttataataagtattttaagcacatattttatatttttagcttggtaagaaaatgtacacaaaaaaaaaaatgtaaaagttttttttttttttcaaaaatacggactaaacaaacaatctgcatctaatccttccttcactagtctctcttttgtattattttttctttctttccttctttaattagctggtaaatgttacttagttcttatttacttttttttttttttttaagaaaagcgtgcatacattagattaaaaacagtcagatcttgcgatcattacaaaatatagtttcgggcatagaggatagaggcacagagccgaacctctgatgggaaaaagcccacttggctacattatgcgccataaaattacattgtctactaacaaattcaaaaatacatccaataaagaaagggggggtgattttacaaaaagagacgtagttatcaatctcccaccgggaatcctttccattaagagcattgatcaccaccctcgaatc

SEQ ID NO: 172505 - DNA, 709 bp, Cannabis sativa
ttttccataattttatgtagaaatttccactctactcgatcaaaagccttggccatgtcaagcttgacagccatccagctaactcttccttgctttttatttttgatggaatgcaagatttcctgagccataagaatgttttcagaaatgaggcggcctttgagaaaagcactttgatttggggaaatcaaagggctgaggacaagtttaagcctattagccagaactttcgagatgattttgtaaatagttgtacagaggctaataggacgatagtccttcagagaaactggcttcctaaccttaggaatcaaggtgacaagggtggtgttgaattgagagatatcagtaagattgttaagaacattgagaacagcttcagtgatatccttgcctacaacactccaattttttttgataaaattggttattgaaaccatctatacccagagctttatcaggtcccatttggaagagggcctttttcacctcagagggagagaaagctacttcaagaagttgacagtgtgaagggtcaatcctaggaagggggtcagagagcccagcttctatatctagatcatggggatgttgggaagtaaacaggtttgagtaatacgattgaattagggagaggattgaatcagagtcatgaaaaacaattccatcctcagaagtcagggaatcaatcctgttacttcgcttcctg

SEQ ID NO: 172506 - DNA, 813 bp, Cannabis sativa
tcgagccggtctatctacgacaatgaaaaggcgagttagcttaaaatctcaagacaacccaaaaattgcctaagtaaagaaatacgcgacatactaggtcgacggttaaagtcagtgctaatcctggaaccttgaacacataaaaccacttcgatttccaatctcgcatgctggaaaccatgccttccaccccattaatctccaaagtggcccactttctgaagcaatagaagccgttgtggaggcctacgctctttgtatcgtagaagtagctgaactcttgtaccgagggtgccctatgcacgtactccatatacattgcgtaaaagcctagggctatgcgataactgttaggggttagttgaaagaaggacacgtcgtactgcttgagaatagcagtaatgaaaggatgaaaggggattgatactccacatcgaagaatgggtattgagactaccacatcctctgtacgtatgatcgcagggttggcaaaagagaggtgcgctctctgggtaggccgaggacgtaaagaggaaagccgcagtaagtttaacctcgtgaaggtggtaagatctgatttggtaactcgcgagaccaagtccactaaattcctcccacttccctctaggtcttcttcctcgtctgattcccgagctggagctgtccaatcatcatccatctcctcgaccttgacattaggagcatgcctagaatggatgagataatcacgcgctgacatcgtagacttgctgtctcgaatctcgatggttcctggttccgcgagctcctgcaccatcctttcaatgtctgcag

SEQ ID NO: 172507 - DNA, 533 bp, Cannabis sativa
tattaaaatatcaaccaacataacctaatttaattgaattatataacttaataaaatacacaaaaggacaaaattataatatgggcaaaaagaccaaaatgcccttgtccacacaaaatctttataaaatcactaaggtgtacttttggaaattctaatatcccgactatccccgagattcccaaagcctaactataacgccccgctatactaaaaatactaggatgtgattctaatagacaaacaccgcgttctaatgttgtcaggcactgagtatgcaaaacttatgaaatttctatgtatgacatataaaatgcatcctgagttcaaataaatcaccataaattaataatttaaaattaataaataatttcaattattaaaccctaattatctgctaatttccaaatttatgctaagtggtctttatagtgtcccattcttcaatatcctgcgaggaaacaagcaattcgagtggacggaggaatgtgaaaaagctttccaagaggtaaaaacacaacttgcaaaacctc

SEQ ID NO: 172508 - DNA, 884 bp, Cannabis sativa
ttaattaggtctcttcatgccattagcaatttttgattcaataatccgtaaactatttgagaccatactaaataaatttaggttaaattgaaaaacacttgtatatttttaatttataattaattgaaatatatttttttttacatgtactctatctaaaatatactgacataaaagagtcacatagagagtatattaaagtgacagagacaaaattgataaactgttaaaaaaaatgatagacttcaaaaaagagaataaaaatagaaattttttctgttttaggctaagagaatctaaaataaacacttatgtacttcttaaaaaaaataaacatttatactatttaatatttacaaaaatattatttttaaagcttactaattacaaaaatgttctcaagtatataaaactgagaaaacaaaagtcaattttgtgggtggtgttcacttacctactcattagaaaagttgtggcctgtcttttagtcatggagacgacggtctttttgcatcatccttttgtgatggtggatagtgattcagagattgttatcaagaacctaaaaagggatgaatctatttgggggattgagaactatgtgcgatattacaagttcctctcttttttttttttatggctaattgtaatttttcttgtatttctagaaactataactatgcggcctataatgtggtcaaatagacgtttgccaataatattacgggcatggtagatatatctactatacttattaatattttttgtaatgacgatgaagtctaactttacttttatttataatttttttttagaaaaaaaaagaaagaaaacaagagtcacgggcgggcaagtgagtggaacgcgttagtgtggagaatata

SEQ ID NO: 172509 - DNA, 816 bp, Cannabis sativa
aatattaacttctcaatatgttttcatattataattttttttacttagttttaacaacttgatttatctttttaattatactactaaattatttttatcatggaatttgttgttgctacttcatactttaaacttttttctcttttcttttttgagttactagcagataaaatgataatttattttttaatagttaaataaataattacattaataacagaaataataaaattttatgatttcacaatggggtatataatataataagtaatatataattaatatgtcaatatctgctactgcacattgtgtcaattaacaataaaaaaaaaaaattatcattatattttaataaaatgtgtcaaaaaattaaactaaatatattatataataatctataaagcaacacacatataactaaaagaattatcaggaataaaaaaatacacatgaataaaaaaaaattgttaaacaaaaaaatattctaaaaaccacttaaaaatagctaaaaataacaacataaatgcatatatatatatatacaacaataaaattatgtggaataaactaaaaatatacaccataaaaatgtacataaattaaacaacaactgtacaacacaataaaacaactaaacaacaatataaaaataacaaaaaagacaactataaattaatagaaaaattacaagacacatcaaccttgttaaaatatgcaaatcattcataaatgaattccgaataaactacaaaacatgcaaaaaaaaaacactacttttataaatcatgtaaaagagagaaagatataggaagagtg

SEQ ID NO: 172510 - DNA, 959 bp, Cannabis sativa
  modified_base (136)..(139): a, c, t, g, unknown or other
  modified_base (312)..(326): a, c, t, g, unknown or other
catccaatttgatcttcaacaaaaccaaacctagtttttatttcagacaactagtagatgagagacaccttatatacagttttcgaaccctcctttgtttttcataatcgacctatagtgatagagtgtcatgccnnnncatagcaagtcaagtactcaatctgcggaagatggtggtaaccaacccgaaggagagaaagagatccaggctcaaatcttgataatacgctgcgacagaaaggaacaaggttaagagatctgagtggaaggagtgattatattctgcagcaactaatgtaaggttttctaaannnnnnnnnnnnnnntttcattgttttagagatattcatatttgagatgttaattcaacatacttgttcgtaaatctagatcttggtaaaatattccaaacaggttattgatcttgaatacgtgttattgaaaaattttaaaaattaataattgctattggttattgatcttgaatatgtattattgaaaatttgaaagttattaattattattggttagggatcttgaaaatgtgttcttggtaaacttagcaatcgatgttattgattattattaactattgatttaactatatcgtcaacaaagttagtacatcatttactagttattgatttctaatgtgttaccgataaaatatacatatatgaagttgtatgttattttcaagttgtctctaaaacatgtaacttgaagatatacatatgaaatgagagtttagatatgatgtataaaccgtcctatttttagactgaatgattaattattcaaaaatttattttaaaagaggtggaagtataatttttataaaataattgggtaaattgcggcataaatacctaatgtttccaattttatacacttaaatacctaatgtttatttttggtggcaaaaatacccaattttacaattctcttacaccgttact

SEQ ID NO: 172511 - DNA, 678 bp, Cannabis sativa
tcgaacccaatctcaaatcttggatccgatcccaaacccgaacgaaggtaaaaattagggttgaattaataggctcatgaaataagttgttttgaattttgttttcaacactacaaattatttaaaattttataaaaatttctaaaagatcataaataattaaatattcaccatcataaaaaaacaatattgaattaaaattcttttggccaaaaacataaatactcttacagattattgccccattataaaaacttatatatttatatggaattgatagcaaaaagaatcttatctaaagctttacaactatcatcataatatatatggaataatatatatacataaaaattataaaaatatatagatataagcttctcatctttttatcttctatggtatgatgtgagaaggtatgggtttttttttcttttctttttggagaatggaggtatgggttcatttaattagaaaatatattccgtacgtgatattaaaaatatctaaatggaccaacagtagtgtcttgaaaaggatcgactgcatatatactatattattatagttacatattagaatttgtaccaatattcatggtcaacatgaatatcaaaactaggtaatactgagtaggctaatttgaatttttttcaacccaaactttgatatgtactaaat

SEQ ID NO: 172512 - DNA, 555 bp, Cannabis sativa
aaatgataataattaataatattttaaatgatagtggatacaagaaccatatatatagcatatcggttagtggactgcccatatatatacatctttaataaattttatataattttctttccataaaatagtttttctttattgtattatcaaagatatggtcttatatagttatataaacacaagtggaagaaataaatattagtgtatttttcaccctttacactaccacagttttagaaataagtatctttgtttataaattacaaatgttttatgtggctgagttcactattaataagttgatttccaaccacttctactttttaatttataaaataaaactacggttaatattttgtgttaagaaaattttatttacacctaaatttttttaaaaaatacttaataatttttattttataaaaatttatgtatttaattgtactaatgaaatttttttcacttttttcttttaattcatattcttaaaaaatatagagaaattatcctatatactgtttttttaacttttttctcaaatttacgatttga

SEQ ID NO: 172513 - DNA, 839 bp, Cannabis sativa
taaaatcttgggggggccatggccgcaccaccccctaaactacctccacccctgtatacacgggtgattcttagtgatccactagtgacaactaggtgacattcaggtgatcaccagtgcacatgggtgtcggtagacttgtgtgtgacacgcgtacataagatatttacttgaggttttgctgcaacaaataatatataatcataatatcatctctaatatataatcataatatataatcacaacttatcactacacaaataatatataatcataatatcatctctaatattgatttctttgaggttttgctgcaacaaatatttttgtaatggtttctatatattttttatcatctcttaaactttcaatttttatagaaatatgtgagtgtttaatcaattacgaatgtattttttggtatagtgtgtacatgtatcactttatatttaaattatcttactcatgtatttcatatatttcttactaattagtgggcataattttataatggttgagttgctaagattttatattgaattaagtttattccggagacaaattggcactactgctctcctattcatatcgttccatccaagccaaaagcataaacaccatcaatgttttttcttaccaatgttgaaccaattgttgggtatgatgtttgaggtctttccaattattttttaattattattatatatttgagtgataatttttttttcttaataacctaaatatatagataaatatatattttaaataataatataagttatgtacaatgaacacttaaaaaatacaaagtgtatatatataatttattaaattattat

SEQ ID NO: 172514 - DNA, 653 bp, Cannabis sativa
aaaaaaaataaaattacatattacatattaatttatatttttatttgatttgttatttaaattataagttactaactttttaaaatttataatatcactttattacattttaaattatatattacatgttataattcaattatttttttaatcattcattataatttaaaattaatttttttaaaatactaaaatattactttacaaaatttttcattacatatttaaaatttatgttttatcttatacattatttttttatcaacaattaatttattattttaatcttattaataaattaattttatttcatttaaactattaattaattttacatcatctagctactacaaaattttggcaacataacaacttaaaaatcgtaaacccaaaattttcaaaacctataaataacataaataaatattccacgacaatatatgaacaaaaaatgatccacccatctgactgccgtaaattttattgtagaacctacttcactaacatgcataaacatactaacttataacaaaaactattaaatttacaatactaatatgaaggaaaaaaaaacaaacttgaagcagtgcaaaaataacaacaagtaaccaggggcggaggtactctttgggttggggtgaccatggcccccc

SEQ ID NO: 172515 - DNA, 627 bp, Cannabis sativa
tttcagtgatcatagctgtaatatcttaagattaaggaaatggagtagcgaatcctaactagttgaatatgtattatttgagattatgttattatataatttattatatgtgaattaatgtgatgaatgacatgttaagacccgttggtgagtcaggggcatttttgtaattttgacccaataagggtaaaactgtaaattaattacgtgcttatggactatattattatatagtatacttgttttgttcatttttaggtattttttgacaagtcagcgcggtatagtcacaattgggtattttgggccgaatcgggttcgggtccaaaatacatttttaggattttgtattggcgtgttattgatatatgaataatatgaatttatttgaatattttatgcgatgaaaatgactttattgcccttgaatgcatgtatatgtggtatatggccctaggggcattttggtctttttaaccatttgtattatttgcaaaatatgtgatttttggaaaatagaaaagacttatttttctggttgttaagcccaggaaccaatcctctctatttctctaaactcatccctttcatctgttgattttcgagaaattgatcttgattcaagct

SEQ ID NO: 172516 - DNA, 905 bp, Cannabis sativa
  modified_base (744)..(745): a, c, t, g, unknown or other
cgtcctgcttgattctcttatatatcctcagtattttaatttttcattacccttaattgtctttttaagtttctttttcaaacatcaaacctcccgtgtcatttagtcttcaccttcttaattaccgcattcttcatcttcacttgcttcaccgactttcaatatcaccattcaccactctccaaaaatcgacacgtattatactcaagcctcctacttcaccttctacttctttactgtcaattccactcccacccctagccctttccaatctctcaataatacaaaggggagttatatttacactccaaataattaccctaacaaattaaaagatttctatttacaccttttaaaataataaataaaatttattattaaaaaatatatataaacttaccgctagatctttccaatctctcaataatattaaagagagttatatttacactccaaataattataagtacaccctaacaaatcaagaaaagttttatttgcacctcataaaataataaatacagtctattatttaaaaaaaaaatataaacttaaataattttttaaaattactcttaatattttttttaaaatttatttccttacattattttatgtgaatttcaatacttattttgattttattttcattatttttttttttcaaatcatgatatagatttttgtttttttctaagaatattttatataattttttatttttaattttttgtcataatattnnaaatataatttatttttattttataggtatattttttaagggatttttcatttttatacctcaaaacagtttttttttttttttttttgcattaatacggaattctacatagaaactcatattgcaactagtgctcctacttaaattgcaacaaaaaatc

SEQ ID NO: 172517 - DNA, 807 bp, Cannabis sativa
tattctctatagtaatgttttgaaataaaaataattaggagtatatgttgacaagattttaaggggacaaaaaggaaagaatttcacaccccaacatcatatactttaacattatattttaaaaatcttataaaatgtctttattttgttttaattataactatattgtttccttttattatgtttaatattaaatatttaatatttttttaaatgacattaataatttaataaagtatacgtgcattgtacgtaacaactcacctaataattaataatatttttttaaatatacataataatataatcccacctaaaaactaataatattttttcttcaattgtatcacttttaaataaaagagaaaaaacctagtacaaaatttaatatatcataaacatgcttaattattctaccaaacgaaaaaatactccaaataaaatctaataaaaagtttaagggtacgtaaattgcaattaagtgtagtaatactttgataatttttttgatttttctttgaacctttcgtttttgggaataattacacatgtcttttagcaagtctcatgtatatatgtacgtattaattaatagctacatccatgcacgtgaatatgtcttttgatagtatttattattattattatttatataattataataatttactaataacaataattataaaataagagctacttgcaccacgtgaatttgtcattcattataataagtaattctattattttgatttgattattaattgtaattatttggatgcggcgcccatcaatcaaatccaaaac

SEQ ID NO: 172518 - DNA, 611 bp, Cannabis sativa
ttaaggattctgatttgatagccgtgcttccttctccttctttgtcctattttatttctccttcaggtgcttaggagttgaataaactgagatgtcattttcctgctttcatcattgatcatatcttagatatacctattgcaggtcatatgtgctctgatgttttaatctggggaaaggataactctgggatttttaatgttaaatctgcatatcatcttgctattagtcctagagatattccctcttcttcatctcctttgggaaataaacggttttggtctaaactctggttctctttcattcctgcaaaggttaagcattatgtttggcgtattcttctaaattctatacctgttgcctctaatctctatcataggcacattatccctgcacctttatgccctctctgtcatgtagcaccagaaacggtcacacatgctttccttgaatgttctagagttaaaactgcctggaagaattcctctttttatattttttatgctgaaaacaaatttttgaacatttatgcctatatttcgaaggcagttgagacttttgataaacaaatgctatgtattttcttctgtttcctctggatggtgtggtca

SEQ ID NO: 172519 - DNA, 898 bp, Cannabis sativa
ttgaattggaagtataccagactaatttagaatttcagaatgtcgattggaagattagataaaattacccaaatacccctaagttttaaataacttaaatttttgtgaaaagggtagaatggtcatctccttaggtttaatttcttgtcttttagcacattagttatttgactaatgggatttatattgattaagttttttttaaaagaagaaaagatgaaaggaaggacttagaacttaagtaatcaccaactcacctcctctctttctctctctcgtgcaagcttggaaccagccaagctttgaggagttttcctctgcaatttatccaatcctagctaaaatcactccttaagataatctaaagacatttgaggtaagttcttaactatgtggattgagaattttaagttttaagttgggtttagactagggattgtgtaatttcgtggctgtagaatgaaattgagtttggattatgtttataggtctgatttaaggtttgtttgagcatatttgaagtgattctaatgactgtttagtttgaatgtgtttaattaagtgatttgagtttaattttcatttggatgaatgattttgagtgaatgattgagttgtgagtaaatgatgcttgggataagttgtaattatggtattgaactgttctggagctgtgtatcaggtttggtgaaggtttggttcgagtttggggaaaggaaccctaaatttcctagtctgccagaaccggttgaccggttggttttggtgtaccagaatcagtcgaccgattgtaagcaggggaaatttttgggttttcttcaggctttggtgttggctcagggttgtacccagtatctattttaggttatttatgtgtggtattacatatttttggggt

SEQ ID NO: 172520 - DNA, 878 bp, Cannabis sativa
  modified_base (409)..(422): a, c, t, g, unknown or other
gtcccatatgcatctactctatcagaagttatatcagatgtagtttcactctagttaataacttacttattccacctctctctctctagtactcctctggtttgtatggtttttttttttgtaataagaaatcacttggatagataccttcaaccatgttatcataatgtgggaatgtaagaggtatttcacatgatgaataagacggggtcgctatgagaggagtaatgcttaatacaaaatttgttatatacaattttttttttatttatatatatatctttatatattaaaagtgtttatctaacggcatttcttggtttaatattctgttaaatttaatgattaggtttgatctcccgttaacaaataaacccaataatgaaacctaaaaaattaaacaatcttnnnnnnnnnnnnnntctctttttaaattaaaaaaaatcatcctagccccatatctctctaacaaaggagaatattaataattttttttatttatttacccctaaaattaacctcacgttatctaccaacaaaataacaaatgaaaatatttaataaaattaaaataaacgaagacccctaaaattccttcaagaaaagttctaaccaccagtccaaattctcttttcgaaaccaactctaccatgcattgaaatccttctagatctcatcgtgtaaactgatatatattaaacaaaatacttaaaaatttatatattcaaattttattattttttggttcatattttctggtttactttattcagttcctagctacttaaactcattatgttgatgatggtatgcaggtgacatatgggtgtaatgcacagagttagtgcatcgaacaaatcaatttacaaatctctttc

SEQ ID NO: 172521 - DNA, 528 bp, Cannabis sativa
tttaactttcatcaacttcatattaatattctaattactagcctaggatccttaattattcacaacgtttttccaaatcacaagtgaatctaaccaatagattaattctcatattcctatcaagaatttaaatctatcaatagcattaaatcccaattcccaaccctaagttgactacctaggatgattaggtatactcctatcctaaacacaaattaacaagaacatgtcaattgtcctaggctatgttgattaggtctaggttttctcttccaagctccacctaattatagaaatcaatttcaaaggtttcttttttaattaacaaaatctttttaaaagttaattactctttgaaaatcattaaacataaagccctaccgtaagtgtccaattcaattccaccatcaacacaacatattcttctgctggagttattgagaagcaacctacaaataaaacatcaaataaacgaaagcaacattagttaaaaaaaaaaaaaacaaaacaataaacaaaaacaaagac

SEQ ID NO: 172522 - DNA, 886 bp, Cannabis sativa
ccccgcctatacctagggcccggcctggtgtcaatttttgttgaagacataatccgcactgttcacgttcttatatttccagctcttgaaaactaagccattttcttctttaatgttgggttgaatgaaccgaactttaattccctcattttggtctagcttcttcttctcgtcatggttgagaaaagtcacctaaactgatctgattgcgtggcatttgaagacgattttgtcatgatagagtatcagtttggaagagctttctctgaataaccaatttgaggttgagagaagattggtcatgatgatcaccaataataccacgaataacttggaccagctcttcagaaataggcggagggtttggtccatcaattacaccacctttacagcttgtatcattcttatcactcctctttcttttattggacttatttcttgcggccctggtttcttctgatctttcaggcactactagtagtcagggccgaccctgaagaaataggggcctaagacgatataaaattttgggtcccttaataaatatataatatatttaaataaaaaaaaaactgattgatttaaaaaaattatgtgctacatatcataatataaagaaaataaaataaatatagataaatttaaaataagttataaatattacaaaaattaatgaatttgtatttttttaattaaatgtatcatttatgataaaaaaaatttatcttgctaaaataaatcaaattcttaaaaagaaaaaaacaattaagtctaaatttacttgtagctaataatttctaacaactacattaaattatagtccataattataataagatatatataaaaaattaaaatcaaatcaaataatattcaagaaaaaaat

SEQ ID NO: 172523 - DNA, 723 bp, Cannabis sativa
tagattcaaaattgaaatttcgtttttaatattaccatgtgaaattaacaaaaaattcaattaatgtggaactgtcataaaattatttgaatagaattaaaatctgttctatcaaaaagcgaacctaatagatcaaaataatactgtagaaagtaaacttgcagaaattaaaatgacacatgatttttgtacgtggtaatccttgtagattgtaactagtccacaggccacgcctagaaataagattcatttgtcaaatttcaacaagtgcaaaggaatttacttaaacgaaacatagactccctctaataattttgccgcaagcttgatatactcctatttgctgaatgaatcttcttaagacaccaaggtttgaactcccttcaaattacttgatgaatgcttgattccttccgatgcaagacttgtagaaatcttctcatgaagatagtggtgcttgctttctcccgaagcaagacttgtagaaatcttcttccgataatagcggtgcttgcttcctcccaaagtaagttttgtagaaatattctcccaaaaatagcggtgcttgcttcctcctgaagaaaaacttggacgaatcttctcctgaaggttattctttatgttcttcactttggaatttgtttcacataaaagtaatctcaaagacacacaaactcaccaaggaatagcagaacaactatcctttacaaaaaaaaaaaaaaa

SEQ ID NO: 172524 - DNA, 575 bp, Cannabis sativa
aataattattttttcctaactttttaaattttaaattatctttttaatatttataccattaatattaagtggactaatgaaatttcgtcatatgtacaaaatggtagtttacttttgcactttacatactaaagtaatcagaaggagtatagagtaaaataattttataaattgaggagttcaaataattaatcgtgccaaattttaaaattcaaataatttgaccgcaaattacctaacaaataatattttactctatatcaattcaagaggaaaaaataatattaaactgataaataaaatatttttttttgaactatgataaataaaatatttgaaaacaaaaaattacaacaaatcatcttttatttaaaaaggaaaaaaaaaatcatatttacatatatgttactctatttttaataattatgtaactacttatttattttattttattttaaactatttatttatattgttactccgcttaaaaatctccattttatcttcttgtattatacagtactagtattgaggcagtgcattgcactgcgctgatttttatatgcaaagaagag

SEQ ID NO: 172525 - DNA, 737 bp, Cannabis sativa
gtaaaataatttccaacaagtccctccctctacatctacaacacttcgaaagctaatcacgagccattgtgcaccgaagccaagatgcctgaatagtaacccaaggggacacaccaagttctgaaataaaaagaagaaaaacaaagctatttagccttagctcatgcctgagaagagccattgcgaaatgccatcgctaaaatcgaaagtgatacaaccagaagaagtccaccgtcatgactctcaccatctcgagaaaccggagatacccacgcccattgccgttgttgtcttgtgcccaagagaacgacttcaattgcaactcccaaccgacgagaaaagacgacttggaagagatgtccaaccactgtggccagccgccaaatgccgaaaaatgcaggcaccactgagcaggtcctaaggagtgagacccaacacccacacaaaccatccaataccaaaatccaccagaagggagctctgccgttgcacgaaaaagaactagatgctgggctcttggacaccactagcccatagtcggctggcggcacccatgggagcataagaaaccttcaaaaaaactagaatgagaaaagaggaaaaaccttaaaaactacagaaaaggagttaagcttaaaatgctttgataaagggtttagagtagtacttattgatttaaggtggcgtttggttggagataatgaaatggaatggaaatgaaacaattttcattccat

SEQ ID NO: 172526 - DNA, 652 bp, Cannabis sativa
aaaaataataatagaaaagactatgtggccaaattatcaagagttttaattttagaatattgacgaaaaattatttgaattttttcttaacacgtaataataaaaattaaaattttaacagtaaaatctactgaatttagtttccgttttgctcactacccttccgttaaaaaatttcagttaagtgtcatagtgtactgtctacagtaaatttttcgtggtccacgtaatattaattattaaaatattataaaaaataatataaagatatataaaaaaacaatttagaaaaatataaaaaattaaaaactttttttccctttttattttctctctcgttctcgttctctttctctttcttctcaaaagaccagaacccccaaccccctgtaacttcttcttcctcctccaccttcaacccaaaccaaactccatctccgagacaaggtctggacccccacaaattaatccaaaccaaaccccatctccaaaaaatattttagctttcagagctctaaacaaggtatgtaacaccaagggctcctgcttgccaaaacgctcaccggagctccaccgtagatggtggtggttctcggtcaaatgagatgtatgaagggttgggccacaaatccttgaagctcttgacgagggg

SEQ ID NO: 172527 - DNA, 589 bp, Cannabis sativa
atattataattaaataataatatcaataattcaataaataaaagataattaattaatttaatttgatttattttaataataaaataattaaacaaaattattgtgggccatattttaaggtccaaaattaatttctcaattttatcacaaataatatttattgtttattataccaataaataataattaattaattctcattaatatcttattgcactaggattaaaatgaatattatttttactaaaataatatatttatctctttaatattattaagaataatattatatttaattatttaatatagttttatcaaattaaactaaatagttaaatactaattcattacacaattcataattattataatgattccaagaaataatttgtacaaattaatattttgctcttgacaatttatttgtcatagaaattactttttactcaaattttatcatcagattaaacttttccctgtacagttttgtatagaagtgacttggggaccatgaacgcatattttgaagctccaataaatacttaattattatcgatctcatcaatataataatttggtttattaattc

SEQ ID NO: 172528 - DNA, 800 bp, Cannabis sativa
  modified_base (64)..(65): a, c, t, g, unknown or other
tattgagattattgtatttaaggatatttaactaatttcattcaattttggtaatgtgtcgatnntccttatactaaattgtaccccttgaactttgatatctactaaatcatgccctgaaactttaacatgtaacaaattgtgcccctaaattttgatccacgtcagattttttttttagtaaaattagaaaaaagttcttaaatccaacaatctcaatagtttgaggaaaatttttagcgacctaaaaagttcatgagccatgatttggtaaatatcaaagtttagaggacaaaaatctaaattagactaatatataattctttataaaattttaaaagtaagaaaaaaaattgataaggattataatgaattgatgatatgttaatgtgtttcacttattatttattattgaattttcattaatattatcggtaaaaaaaattcaaataacagcttgcgaagcgcaacatgttttctagttatatatataacggaaatatatgagacgatgatgtgacgttctaaaatctatttaattaacattaattgttgtctccttaattccctcttttttttaaattttttttattagtttcataaataataattgatataaaatatatatttttatttatttatttatttttaattttctctttttttttttcaaaaattaataatttttgttttatttttcttcatcacattttttcaaattaaaaaattatattttaaataaaaagttacaattcacatcattttaatttatataatcataaatttatatatgataataa

SEQ ID NO: 172529 - DNA, 699 bp, Cannabis sativa
taataagaattatatatacaagttccaggggggcccttgatttagaaccgagtgataaactctgtttatgcagcaacgatctacatgctctggaaaaatagaaatggttgtatctttgatttagtttgtacttctcctcttaagttgagtatggagattaggaagatttctcattatagaatcttgagtatggcttgtattacccctaaaaagtaagataattacattatagaagttataaggggctgttgctgtgttagcaagagtttggctctttgagtctttgtgtgtaatctgtttgtagttgttttcagttttgaataaagtttatttgttcaaaaaaaaaaaaaaagaattacatatacaaataattgatagaattttaactttatatatttggttgtatacataaattgagagtgtgtttcttacagtaaaacaaagaattctacaaataatcttttttgtttgggatgatcatagttaattattgatataatgaatataaagatatatcatatacgcattttttatacggattattttataaatacacaaaaataaaaatatatatttatgaatttactatttttttaagaattttaattctatatctaaacttataattttatatccattttaattttatattagtattatttaataaaatattatgtttgatattgacttatattaata

SEQ ID NO: 172530 - DNA, 548 bp, Cannabis sativa
taaaaatgaaaatttgcttttgcaggacccttttgtattcccaccatatcacaaagcactaagagagccttttgactactacctgtttggtcaaaattatattcgaccattaattgacttcaggttagttgaaacttccctgcgttctcatctctagttgcaatttatgtccctacatgtatttgtttgctttttgttctgaaaatcatgccttctctgacatgaacttccaaattttaggtgtgacttattggcctaaatttagaatgctgttgggttattatgtcagacattgggctaattgctgttgaatgtaaaatatgacaaataaataggcagaaaataatcaatgtggataagacattaccgttaatctaatgttttttatttggtaattttgaaccgcatgaatgtggttatctagtggttatttattgttaaaaaaaatatttgcgtagtggttcactaatagtgtcttaaactgaagagtttttttcgtctttccaaataccttatccttcatggctcatttatttttttttttgaaa

SEQ ID NO: 172531 - DNA, 764 bp, Cannabis sativa
ctttaggtgatagtattacttttgctcttaaaagtaagaatatttttgtagcttttgatctttaatctatagtagtaattaatttggttataatagagtatctcttacaagattaataattttttttatttattatttttttaaaaaaaaaaataccacccatttacaattccattttttaactataacaatcattccacatttccaaccatttttaaaataataataataaatagaagttaatacactcaatcttttaaatatcgacgaagaagtttattatttatttgtaaacaaaaattcttaatttttgcttttaagtactaattatttctctagaatgatctctttcattctttttccttatatatactgaattgattctagaataatgtattttgggatcttctttgaaagcattcatatttaaaaatgatcttaaattaagtttaatttttttttttttgaatttcgatttatgaaataatttttatttataaagtagatccatgaaattattaattttgatgttaaagaagatacatgaaaaattattaacttcattttttattttaataagagagtttttttttatataaagtcaactttaatttgttaaaataaatattaaaaaatttatcagcatgtttaacaactcattttaatcctatacattttcactattgaaccaatcaaaactaaaaaaaaaaaatgctctcataggtgagagcaaaagtgacgctctcacctaagaaaaatcataa

SEQ ID NO: 172532 - DNA, 675 bp, Cannabis sativa
tgttcaagtatgtttgggcaattgttaataaagaataaaatttgtgggttaaatgggttcatagtgtgtacatttgggaagaagatttgtggggctacatggccccatcacaagggtgttggtactggaacaaggtagtggaggccaagaacccaatccaagcactacatctccctcgggtataagttacttgttcctccccaacatagagtccattggagtaagtatgggggaggttcaacactcctagaaccagtttcatcatgtggattgcaattcaaggaagaatgaggacaaaagagagacttcacaggttcgaaattattgatgacctcgtgtgtgtactgtgtaaaactcatgttgaaacttgtgagcatctcttcttttcttattcgttttgaaggcagggacttcaaagaatcaaagaatggttagggtggaatgcatccactttggatatcacaagactcacccaatggattgaaagaagcaaaggcagcaaatttaggaagcaagtgctctcggctgcattgtcaagcttagtctaccatggttggaagactaggaatgattaaatatggaactcgaaactaggtaatgtaggcagagttgtatgtacagttaaagaaatggtaaaacaaagaatatatagtattttgcctaagaaagttgggc

SEQ ID NO: 172533 - DNA, 558 bp, Cannabis sativa
gatattaacaataactacaagtgaaatacgctgatgacatcattaaatgtagtagtgactagaagtgacatacaatgatgacagttattttgaaattatatgataagttttcaataaaaatatagtcttctttttagtttagatctatattttgtgcaaacattttttaatttttatttttttttactataatatatatttgacgatatttttgtatgtgttttattttgaatatatttagagttctttttatataattttttaataaatatatattttaaattatacataaaaataaatttaaaattatttgatacgattttattattcaataaatatttatgcatacatttaaaatttttataaatagccgcaagcgaagccggcctgttgattagttaattaaaatacataatttattttttatatatgagccgcgaagcgcaaaatatttactagttgtagaaataaaaccaacaaaaataagcctagactcaaaatgcaatattataccttccattgaaaacgcatatcgaaaaaggaaaaaacaaaatgata

SEQ ID NO: 172534 - DNA, 608 bp, Cannabis sativa
aaaaaaaaaaaaattctgacaatagatgtcaaattcgaaaaaaaaagagaaataaaaataaaatgttacaatgttgtcgaaaaaaaaaaaaaacatacaaattttctctcgtgaataagaaaaaaaggggtatcaggtttgtttgtgaaaaaatattgggtgacatgattatagaaatttatggtataggtaagtctaaatgacaattccttgtacccgtatttaagcctaacattacaagcttaaaaagacattttaattcttagttgcatgggcattaatttatattagtagagaatagtaagtattccaaacttatagaatattttgtgttagtagattgatagttgtaatttgtatgtgtaaattgtttcaattgttagccaagtgctaattatagtttcatgaactgaataaaagattgaggtaaatcaatggtgtgaattcctataataatgagaagataagatcttccaccacacttcaataagtcttgctcagaaaaacatagcaccattaatgcataataatatttatatttatgtgacatattttaaattatctgctataagttttttttaatttttttttttattttttatgttatt

SEQ ID NO: 172535 - DNA, 513 bp, Cannabis sativa
gtatacattgtgtacccatttcactcacaaattatccttctttttttaattgcccatacatgtttaaccattgccgcagcattccaataagggatactcaccagccctaaaccccctgatttttttggacagcataacttctcccatgcgactgccccagccccattcatgaggctcttacctgtccacagaaagcttctaaaaactgcttcaagctctttaataatctgtttaggaatgaagatgatttgacaccagtaaacatgtattgacatcaaaacagatttcaccaagaccaacctaccagcaaaggataaatgcctagtgctccagactctgatccgagcagtcattttctgcactaagccgatgcaatctgaagtagaaatccttctaacacagataggaaaataattttaatacatatatattatattaaaataattttgtttgaaaacgactcatgggttgaacaacataaaaatatttgtggccactttaaaaatgatagtt

SEQ ID NO: 172536 - DNA, 616 bp, Cannabis sativa
cttgagtttctttgaataatggctaccgagaaatgtgttcccttttttgtggtataatggaggctgcctcttccaaagaaaattttaggttttgtatccttttcccaacataaaccctacacatgtcataaatctagcatctccaagtatttgctccaacagccactactagaacgccactttagctattttttgccacatcaattaatgaattgccacgtcatctttttctacattagttttaacaatcagctctgctacttttgctgcagcaaagttcctacaaaacttcagcaaaacattgcactttgtctattaagcccttttatttaccaaaacccaaataaaacttaataattctcactagcaactccaaattacccaaaattacataaaaatacaaaataacatatattctcacaaaagaggaggaaaataactaaatgtaagtaaaatacatacacaaattaagctaaaaaaatatgacaaataactctttattcaagagttatgaatgcttgttatgattcatacactaccaacacttgtacggtagcagtacaaagtgcattggtaaagtgtatgatgtctgaagagtacaccacggtgttacgag

SEQ ID NO: 172537 - DNA, 539 bp, Cannabis sativa
  modified_base (507)..(513): a, c, t, g, unknown or other
tttctcaagttcagacgttctcatagatcataccggtcgtgactgctattggaccttgctcttcttatatgttgcactatgcctttctgattatcgatgcgtcaagtgttctttcctcttcgcattgattgattacgagatactgcatgcttagtggtagtccttgccttaatgatttgattcatctcgttccccttataagggtttcctttcttatgaacttggagagagggttggcgatttccgtccaattttccacatatcacaggctgcgtccctagattttcctcagtttcctcaagttgtatctcttgagaattttgagaatatctctgggttgtctcctgccccttggtttgcgagttgcgaggttttccttgtaaatcatttcttccaaggtcaggttggtttcgcgaactattctcctgcgctgcccttactacggctatttcacactctaattcagcattacgccggtttgcttcctccaatcgacgcctaagatgnnnnnnntctaactccacgattggtatgtacct

SEQ ID NO: 172538 - DNA, 586 bp, Cannabis sativa
tctctcactaattacccaaccgactataaaagccaaaaaatgaaaaaaaaaaatcattcattattagcgtcgttttaaaaggctcacgaatactttgtgtagcgttttaaaaccgactgtaaaaagattgcgagtgtgagaaaacgacgcaaatcctcctattcttcacttaccccccaaatcgacgaaagagactttcatttcgaagctctcgcgtgcgctttgtactgaaattagctctgaaggtctggagcaatttcgaaccggcgtaggtctcccactgctctcagaccgtaagtctctctctttctctcttcctttctctctatctctctcagtctctcgtgctctattttcatttcgataagctctcgtcctcagctctgaaggtctcgaacagggatgcagtttcgctcatcagcgtaggtctcctctcccacctccgtaagtctctctcttgctttctctcaactaatctctccctctctctctctctcaatctctcgtgcaagaaattgttcattggtatgttaattttttcaaattgggggtttctgatttgaatgttagaaatttagattgttag

SEQ ID NO: 172539 - DNA, 513 bp, Cannabis sativa
ttctagctcgggatgtacaggatcccgagataattgtcgatcaatgcgaggaggggatggaacttgtcccagtaatgatcgagaaagtacgagcacgacaaagactgagagttactgtaggacgaggtctataagtaactatgacccacagcggtcagatctttatgagcaatggaactagaagaagcctgacttacgtcaacaactcaatcaaaagcaagaggatcctatcccattgcgaatcattgagttggaggacaagttcaggagataccgagatgaggaatatgggaaactacctggttatgactcggacgaatagcctgagcctttccatccaaatattatgagcgttgaattccctagggactaaaaaaccttctcatctcgtcatacgatgggactacagattcagtttctcacctctataattttaacacaataatgcgagctagcaatgttacgaataacttacgctgtatttgttggatatattttaccaggatctaaatt

SEQ ID NO: 172540 - DNA, 509 bp, Cannabis sativa
atcaatatatcaatataaaggagtcttttaaggagatgaggtggcaatgtatatgagttttatctcctattctctattttgtgattattttgatgttttatttcatatcttatattactctaatttttacaataaattatacttataatagagtgacttattattacaataaattactcatataatagttaaagttacatcaatctccattatcattaatttatttaacaactcacatttacatctaacttttaatttaatttaattaattttagaataataataataaattgtaaaaaaaaaaatataataacaattaacaataatatttatagagattttttcaaaaaaaataataatatattattataaaaataataatatcaaatatctgtatatctatatctatctatatactagttaaaagttacgtgccgaggcacgtaaatattaattttatttagagtttagttctttattgtttgatttatattgtaatttatgatcat

SEQ ID NO: 172541 - DNA, 790 bp, Cannabis sativa
ggggaatcgccaatcgccattttcagagagagagaactctgatcgtgttttgtgtctcttgattatttttttttattattgctttattgagacttttttatttttacactttaaaatatttttgttagcagttttacaaaattttatatagaaattcttataaaaactaactgaacaacttaaatcacaactaaaatctatatagcaacccacataaattattggagcaacctaaatcgtaaatttttttaaaaaaatattaaaagattgtatatgaaataatttccccagttcatttatggaacctttagttgaaaagttgctatccttttttaatcgtaaatgattcttatttttgtatgatgaattatggcttactaatatgtacatcttcatttttttaaaagaaattatttatggagaaatgtacaggattttcttaaaagcaattgttactatttacatgcttaattaattattttttttttctttgactgagactaggtaatatgtaaattagtttctttagggatagttctatgtacatgtggaagcaataagaaaaaacaaaaacaataaaacaaaagaagaagaaaaagctccaaatattaacccctactccacaatatttgtatgcacgaaaatatattaatatattgttttttttttttttgaagaaaactattaatatattattgttaaaaattttaagggctcgtttggtacaccgtataaggatcgtattgtattaaataataaataacactatgtttggattaaacaatgtatt

SEQ ID NO: 172542 - DNA, 511 bp, Cannabis sativa
taataaaaaattataatatatataagaaaaaagaaattatatttgtagggtattttaaaatatgatatattacttttctaacaatatatatgtttaggaaattatactgtttatagttacacatatatatttatttatttatttatttaaaatagaaagtactaaggacataaataataataataagcaatattttccaaaaataaaccaagactgaaaggaaaggtggtctaaccattttcgctcagtcctcctcacgattcacttcactgtatatttgcattttcttctgttccctccctctcgatctcgcctatatacaccatgtttcaaaatgaggataacattattcaaaatggaaagaagaattatagacattatcatcgtttttgcctctgttgttttcagacacagtttttttagactcggaccacacgattctccatcaccaccacctccacctccacctccgatgatcgattctccatcaccaccacctccacctccacct

SEQ ID NO: 172543 - DNA, 718 bp, Cannabis sativa
ctggcccgatatcactttggcatgacccaacccgacccgacttttcaatttaattgggtttgagtttttgattggggctgtgatttaggttgggtttggagtgttgggagaatggtttctggtaatgtggggttttaattcaaggttgggttttggttcagtgtgggatcatgttggggttgtgattcgggttgggtttggggtgttggaagaatggtttttggttggagttctggttcaatatgggattctactttcgtgtgtggttgtgatatattgggcactaaatctcaacatcctcctcttcctaagtcttttggctcttgaagattcttcaacttcattataaccaatgatctctacttctaggaacttgttgaaccagcatgatcctataaaataagaaaccaaagtcaaaatctaacaataacacaactttaaatagcaagaaacataactgaaatcaaatctctagaataacaaaactttaaacagaaagcaaataaaaaattagaaacatgcacaatattaatttctaacctaggctactgggggggctttgtggggggatttactgcaatggcattgggtatgttggaatgcctccatcatcatccaaatgccctaaagtgtcctcaacacagtccatgatttcagaaatattctgatcatcacgtggatttccatcatcattaacttctccatctctttcatctcc

SEQ ID NO: 172544 - DNA, 591 bp, Cannabis sativa
ctcttatcttcttagtattctactataggtaagttggtttctattaatctatacaacttcaaactcaatcaatacatacaaattcaatctaattaatttcctaacaaccattgcttatcatcatcattaagcttgttaggcagccccaaaatctggagtttactatcttgttggacccgttggatgatgattcttgtatgccacagtttttgatgccaaaatacatcatttctggctttcaagatatggtataccagcccagcaagagcagtcttcaagacacttcttcttgcagtaggcactgttttgttcttgctgaaaatctttgctagctactgcatatttgttgtagtcgatctccattgcagccaagtcttaagcccttgtaagcagcttcggctatactcacattcaaagaataaatggttgcttgtttcctcttcttctccacaaagcatacatgtagaatcgatggttgtgttgtatttgcatatcctttctttggtgttcaatcttccccaaaacacaagccaaagaataaacttgtgtttgggaatgatgaatctgtcccaaacaatcttggaccaagaa

SEQ ID NO: 172545 - DNA, 741 bp, Cannabis sativa
ataatcgagacatatgcatgcctcatgactttttaccaatgcctattctactcgattttgtgacggtcaaataggcgtcgatcatagagaccgacggcaataccatacccgatcatttttagcagtctaaaatcctctctctttctctctctctgcgtggtggtcaagccctctactgtcaagtgccatcctgccaacctccaagaagccttgtcttccctagatgcttacttgtggcaagagaccattgatgatgaaatggactcacttattaagaacaaaacctgacattatacaaacttaccacctggctgcaaaacaataagttgtaagtggattttgaaaaagaaattaaaacctgatggaactgttgacaaatacaaagcccgtttagtaacaaagggttatagacaaagagagaatgtagatttctttgacacttggtaacctgtcactagaataatatccattagagttttaattttactagctgctataatttagttgtgcaccaaatggatgttaggacagtgttccttaatggtgaattagaagaagatatatacatggatcaacctgaaaggttcgtaatcccaggccaagaacataaggtttgcaagctagataaatttttgtatggtcttgagcagacacctaagcaatggcatgagaaatttgacaatttagttattttacatggctttaaagtgaatgaaagtgacaaatacatttattataaat

SEQ ID NO: 172546 - DNA, 698 bp, Cannabis sativa
ttgggaggctgcacaacactaatcttggcaggttagtgacatgtcttcaacgtattttatgctttttgccacgtggaggggtgtggacgaaatttgggataacactcggattgaaccaatttaaaggtcgaaaatatcagaattgatatgaccatgaaacaagctcagatatgtcatgaaaatatctttctaacacaacttgaaccaaaccatttcgataagaattgagtgaattatgaccattttactaaagagctgcacaaagagaatttatgttgtaatgtgagattcgccatcttatgtgagttatgccctctttttagccaagaagatggtgcaactttcccatacatgttcttgaacaccttgtgtaatgccctaacaattaggcacgtcacgacaactgattatgaaactgtaatcccctaaaccgggattactagaaagataagcgcgagaaatttaaactttaatcgaaaatagaataaaaataaaacttataataactttaaactttacaatcaaaagctacatatttcgggatccctaaaatcttttacaaagtattacaagtcttttcactagccgacataagcggcaaattcagagttacaaaagtacaacactagtagaccccaactcgcttggtctagtgtggcccgaacatgtacatacatcgccaagccctcgcactcatg

SEQ ID NO: 172547 - DNA, 516 bp, Cannabis sativa
cggaggtggtggtgcggtgatttattgcagggcggttgggtcttcgtgaatggttggtgcagtcaattgagtcttcgtggagggttgggccggttgggtcttcgtggagggttgggtggtccgagagagggggctgcgtggagggttgggacagtcggtgggtgggtggtgatgatggttgagggttgggggtgaaagagatgccgagagtgagagagaaagataaatgcaagagagagaggggtgagatttgaatgaagagggtaatttgggaatatagcaattgttgacatatcttacaaatattaggtattttaagtttaggggaaaaatttacccctaatgtatgcataaaaaatcaaaatttcctatggtattttggtgtggagacaaatgtggagtggcatgtaatcgtgtaccatgctcgctggagttgttgggagacggaaggaatttggccgcatatataataggagaatttttaatagggaaatttgaattcctatacttacatta

SEQ ID NO: 172548 - DNA, 561 bp, Cannabis sativa
attacatacctattattattttttgaatatgtttgtagagaattcgggttgctcctacatatttagttaagttaagactccaataaagggtgctttgataagggtgctccaaaaagagtgtgtgtgagagtgactttcttgagagagatgagaatgaaaaggaaaagatagtaaataggaattagttttattatgaaaaggataaatttaatactaacaaaaatataacatattttgtttaatatttaacagggtagtaaatgataaagacatgcaacattattgatggtcaaattttccctttcaaataagagcattgttattaggcaccagtagtaattagcaccttttcgatatattacattgtaattggctagtaatactttctaaaagctattacattaaattatatagaactcgatacttagttaaacaataacgatattgacacatataaaggtgttagcatttctcttaaaatattatcatgtttatgtcactgtaattgattgaattataaaacatgtccctaccattgttatttatttatgggatattggc

SEQ ID NO: 172549 - DNA, 505 bp, Cannabis sativa
  modified_base (298)..(309): a, c, t, g, unknown or other
tgaactgtatatccaaatatttcttcaccgttatcagttcgcaagatctttaaccacttaccttaatggtttttcactattgctagaaattcatgaactttcttaaatatttccaatttctttgcataaggtaaaatctaaagtgatcgttttaagaatttaatgaacactcatatccacccctgaatgtacatccatatataaacatagatgatcttactttcacgtgaatattggcatatttactctttgcaaagaatgatcttgtcaaaacaactatgaacaagatgcaaatgcnnnnnnnnnnnnagaatgtggttgtggtcttttcatgactaaggtttagttataacaaagagttcttagaatagtccaagtagattttggtcacagaaaactaaactcatttaccatacataaacatacagtttgaatctattgacagaaaatggatattaaaaacttgtgaaagtcatactgcaatgtataatgtattctaggaaac

SEQ ID NO: 172550 - DNA, 560 bp, Cannabis sativa
tgtgtgtgtgttaataatatattttgttggcgttaaaaagtcaccaataccaactcgctagattggcgagataaataatgagtataagtaaatcatttagagaggcacaagttgagtagttcactctccatgtcacaatggtaatgaagctacgtctactccgattttttatttctcatgagattacaagaaaattggctaagtgtgaaagatctaatttctagtaagagaaattagagagagatggtgtgaccttataggtacttttctaaatgaaaaaaatgagctagaagaactctccttttatagggaaagaggtcctattaaaataataataataatattccaaaaatattgaaaaatacatgtaagctattttcgatcgttgatgatctaacagtgaaattggctccaaaggccaatcgtcaatttttggagcttgagttgcgtccacgggacccacttcgagtaagttgtagcttaaatttataactcccttgaggtgaaatttggagtcgataacttcataattacagttagagtgtgagacatgacttgat

SEQ ID NO: 172551 - DNA, 1132 bp, Cannabis sativa
ttttaccaaagcttgtgtggagcgtagtttgggtatgaatcttaatactggggatgaggattttggtggctggtttgaagatttctgtaactctcatttaactgagaatattgagaagttggcaatgattctttggagtgtttggcaggcccgcaataatttattttggaatgataaggctaattctgtggaaagagttgtttcatctgcaattacttatcttgaactttagaaatttgctcaaaataacaatggaggaacttcgtcttcttctagtcagcctcttgctggtgttgagcactggattaaaccgtctttgggagagttgaaggttaattgtgatgctgctcttttttctggagaaaggagtcatggattgggttggattgccagagatcatgctgggttgtgctttgtcgctgctgctgtcaaactccgaggtgaagttgaccctgttgttgctgaggcgctgtccatgaaggaggctttgagttggattaaatcctgctggggagaaggcagggttgttgaggacttttgtcctacataagttattttggagtcggattgtcttgtgttggttaatgctatcaatagcaaaagccacattctttctcctcttggtcttattatttcggattgtattaatcttatacgatccttatttagttttcatgtttcagttcagtttgttaaacgatctgggaaccaagcgattaactggttaactcgttcttctggttcatgtcctgatcgtatttccagtaaggggtctgtcccttctggtttggaagctattttgttagctgatttgcttcaataaaagttgcaatctttgattcaaaaaaaaagatgcaaattaaaaaaaaatcattaataataattaagaaattaatttccttttccaaaaaataaaataaaatatattttcttaaaagataatgataatattgtaataaaaataactattaaagacattcattaatactaaatgataatattgtaataaaaaaaaattacataaattgtctattacattttagtatacgataaatttaatactgttataaaataatataatataatatagaatagatgagaagaaagaagaagaagatgaagagagaaagag

SEQ ID NO: 172552 - DNA, 792 bp, Cannabis sativa
gtaaaataaattccaacacaaaattgaataaaaaatttagcaaaaactttagacccccaaatcacatccaaaactctaaattgtgctctaaaaatacgttaaacaccaaaccaagtgtaaaatccacacaaaaataaaaataaaaactagaaattagcaacagaaattaaacattattattttttttttcaaaggaaatcaactagacttataagattaaaaacaaagttgagaaacttgggttgcctcctaagaagagcttgatttaaagtcactagcttgacttttggagaagtgcttatcaaagagcggctttcgcccatagagagtggcatatgccctcacataggggtctatgttttggacgccctcaagcttggcgagagtgaaatttgcgagctccaatgttcaacttattttctcactatattgatacccaattacttgttgtatgagctatggtggtggaattagcatttcttcaacgctttgctcaaataatttctcaacaccttgggtagagacagaattcaacaaatttgaattttttgttttctctcctttttctttattattttggattgaagtaggctccatttgatgctcaaaggtttcctcacacttctcaaaatcttcattgtttttccaagtgtttcttcatcatctagctacacattttgtatatcacttggaaatacaccttgagaattattatgcaactcccaagataactcctcaacttgcttctctagattctttaaggatgtggcattgctatgaattaagtcatca

SEQ ID NO: 172553 - DNA, 544 bp, Cannabis sativa
aatgaataaaaatgatagagtttctgctctctaagtgctcaattttttggttccttttcccaggtcatgggtgacatcttatataggaaaaaaggtcagtgcttcttgcctcaggagacacgaccattgcggagatatattaactgtctccttgattttcataagtggttgaaatctgattcttatggtaatatctcgttatttcgtgggtttgtagctatctttgagtttcttctgagatttaaatatttgaattagttactaacgatgaaggtctatcccagagtatggtatgactgtttatgtaacgcccgtatttaaaaatttctaaactcaaaagataattttaatatattataattatataaacatatggatcgggatctcgagtatcaaaatacaatttaaaagtattttactaatacaatatccatttttttacagcaggcaactaaactatacttcaaaatattataagaccgagaccctccaagttgcactgccgcgatatgtacaatcactgtcgagctctatctcactgttc

SEQ ID NO: 172554 - DNA, 1074 bp, Cannabis sativa
ttgttagaaaatctattgcttggctttaggttttggttggtttttggggtgatttgattgtgttttggagctgaaattcgtggaaatggttgttggattctgggttttgaacccagatgccgtggcatggtatttagcatgccgcagcacacctcctttctggacctgggagttggtcccaggtgtcgcgacatggcttttgcatgtcgcggcccgctctcgagtttctgggcagattcatgtgtgcactttgaaaattcataactttgtgatccaaactctgatttaggagttctatatatcgttggaaagctcatttcaatctctatgtgattatctaaaatttaaatgccatgtgaatattttataaatgtgaaatcaggggttatgtaacaccctaactattataggcgtgttagtgtgatttttaacatattgtgcagctcgttgctaatcaacgagattattggaaatcgtgattaataaaaattttgcttaattatttgaaaattaatatattacatttataaaattctgggaacccatttacaaaatacagttataaaagtttactctttctttacaaaatatttgtcgcccaacgactaaacaacaaaaggccctgatgtcccaaggatcgtacgctccaggcctagccaccccaacatgtacaatcttcatctgctcgctctcacgtctcctcaactttagctttgcccttacctgcacatagcaatagcactatgagtcgagagactcagtaagaaaagcataacataaaaacatactaatatcccaggttataatcaggcgcccatacaccctaatcataaccgtaactgaatcaggatcaatattgacaaagtatgattaaccgctagccaacctatactcagtactctaatcgcactgatgtggtagcagttaattcatactatctgatagcctagcctatatctattggcatctcgggtgcatctctatgtacactaaacatgtatatacatatgcataatattatactaatcttaccttgattctgaattcagatgtgtcggccaacctgagtggaac

SEQ ID NO: 172555 - DNA, 779 bp, Cannabis sativa
tagctaactagctaggttggtaccattaccactcagcttataataaattaaaatatatcaatttaattatttccaattaacgaagaaattacattatttaagtacttttaatttataaccttatgtctagagtactattattgaccctgaatcacctctagaattaaaagaagaaagaggagcaataaacttttattgaagtaagattataatcttacttaagttaattgtgtgataatttgtgtaaatttaatatatgattaaataaaacataatttattaattacggagattttatcaaattatgtgagtattataaataccttttttttttaaataatatattttcaggctctacggccgtggaaactcgaccggttggtctgcaggggaaaatcttggtttgcttcgaggttggatcttggctcgggctgatttccagtacctagtttggggtatttaggtgttgtgtagcctattttggagctaatgaaagtgagagtttgtccggtttcggttttagggtttgtgtcaaaatttggttacatttttatcagattttgttgtcatgacataggacccagaatcgtcgagcatggttccacccaggtcggcccgcacaccttatactagtttaaggtaagaaaagctgcaagtattgctaggcatgtaatgtgagaaatgatcattatcgtttgtgactcgattatgatcgaggtatcgattattatcatttgtgactcgattataatcggggtaacgattattatcatttgtga

SEQ ID NO: 172556 - DNA, 657 bp, Cannabis sativa
gatcttcaatttagcatttttaaacatgttaaatgagttctatttaaaaactaaggatcgaattcccgcaagcgcgattttcaatcatttttattttttaggtggatcaatttttaaagaaaaaaatagcatacatatttaatattttagattttatatacttaaatatttaatgtttattcttgaaagtaaaatacataatgttacaattctcttacaccgttaaaaccacttcagtgtaaatatagacacgtggaaggttcaaatgcattgtattttttttttatttcaaaacttaatattcttaataccagaaactaaatgctacttgtttaaaaaaaaaaatcgattctcataacaattttcacataacattagcacttcaatttaataatcatgttctatatactgcactggttcactcagctatggtaatttagtattgcatctctcttattttttaaaaacaagtagtatttattttttgatattaaaaatattaaattttaaaataaaataaacaaatataatacatttaggccctctacatgtccatatttatgaattaacggtagtggtagtaacagtataagagaattgtaacattaggtatttttacctccaaaaataaacataaggtatttaagtgtataaaat

SEQ ID NO: 172557 - DNA, 769 bp, Cannabis sativa
  modified_base (529)..(532): a, c, t, g, unknown or other
cacgggcctagcccgcctatgcatagggttggccctgcatatatatcaagtaaatttggaaaaaacttatttatttgatcatgtacatagaacgcaaaatatgaagttttcataaccacattatcttcattttaattttaacgatgaataaaactaacagaagaaaagaaaaaaaggaacattaaaagaactaaggggagcaatgaataaaatgctaagaagtctctttaagggtaaaaaaaagtaagaggaaatatcaatctgagaagcctgatccagttccagtggcagtggatgagtccctgagtgacggttatcactcggatcatttttctaatgatcctatttatgatgtagcaatataagaagaaaatgattatcataaatttgaatttactcctaaggaattttcattcccagttggtgatctagacaatcaagatggaaatctaaataaccaatatcaaagaaaattattttggtactgaacgtgtaattaaaattttgttataatataaagtatttttcnnnngttcttttaaattttcttaataatattcacttttttttatgtaattttgttcaaattagtaatttattaataatttaattggttaagttattttttttagttctatacattgtaatacataatacgactatatatatcaagtagatatgagaaaaggttatttatttgatcatgtacgtagaacgcaaagtttgagaatttcatcaccacatgatcctcattttaattttaacgatg

SEQ ID NO: 172558 - DNA, 683 bp, Cannabis sativa
  modified_base (461)..(504): a, c, t, g, unknown or other
agatttttcttaaaatataatatatataaatacagaaacactcacatttttcttaaatatataaacatatgcttttagcgaaaattgtatataatgtcaactttttatgataacaactagggaacccattcatgcttcgaaaaagatgatcgaaagaattattgaaaaacttcattttaaatggtcgaagttgaaaaaatgtcaatttgggcataggaccagtcacaggagtcaacctgaacgttaaaccctattatttgtccccataaattattatttttcctttaaaatgacttatttccccgtttttgatgaagatggattcgattcaaaagtcgaatctccgatcgaacacttaaaaggcatctaggttggcaaattgtcaacctgggcactgggtgctcgagcccaggagccttgggtgctgaaaaattaacttgcactacaaaaaatcttacttnnnnnnnnnnnnnnnnnnnnnnnnnnnnnnnnnnnnnnnnnnnntaattataaattattatttttatcatgttgtcactaaaaagtccgtggctaaaggtataaatcacaaaaattacaatttattgtgactaaatgagtttttagttacaatacttaattagtgacaacttgtgtctgctaaatggtatgttttagtcacaaataattttttgttgtgacta

SEQ ID NO: 172559 - DNA, 533 bp, Cannabis sativa
ttagtagtttggtgatatatacttggtccagttaatataaggaggccaatcttcccctaacaagccatatttttgttaggtcgaatgactttcatgatatttaatttacccataaattttaatttataaaggagagtaatatgagatggaagaggggagagagagagagtgggacacacaatgtaagaaataaccaacatgcagggattcgaatccattggccgtacagtcgtataactataaaggggaccaaattaagggtattaactgtacaacagtccacacatccatgtgatatgccctttatataccattcctttcttattattggctatttttacacacaaattttgacctaaaagataacccaactcatctcatcctcatcagtcatcactcctttcaatttaattcacacactatcatcacttcactagtggctgctgtactacgtacgtcgctttgtatgtacaacccacatgcaaaattatttatatatatcatcatttcttttttttttctttttctaaaat

SEQ ID NO: 172560 - DNA, 627 bp, Cannabis sativa
aatctatagttgtagctgatgtctgaattccaccaccatacatgtcgtgccatgaagtgataatatattattgaattgttatgtaaaggtatgcatcttcttaaattctctacctacaaccttactgctgcttggaagaggtaaaaggatgaatggtttgtatatcttggatagcattgatactgctgcttgaaaccttactgtgacagcaaacatttggcactctcgaatgggacatccctctcacaaacgtcttactttactttgcaataaatttgattgtagcattgataattttcataaaaacaatccttgttttgtttgtcctttagctaaacaaagaaagcttccttttcacaaacattctggttttgcaaaatctaaattagatttgattcattgtgatacatggggtccttatcatattcattctcatgctaatcacaaatattttcttactttggtagatgataagactagatttacatggatttttttaatcaaacaaaaatcagatgctgtccaaattattcctgaatttttatcttatgttcaaactcaattccattgcattttcaagtgtttcagatctgacaatgctcttgaattaattttcaaagatctctt

SEQ ID NO: 172561 - DNA, 664 bp, Cannabis sativa
caggtcatctctgagatcatgagcctttcccaatctattaaatataaatacaccaggttgtctcagtgactggttggtttgaccgatcaatcagccggaaccgttaacttgggtggagttattaggtatgacttctcctgacgaattactagacaaggtttgtccgcctatcgcttggcccacatgcaaaacctgcgaccggggattggacggctgaccgttaagggtttgagaagcattcacggctggatctttgtttgactcgcccagcgggatgatggtagcaggttgctgattggtagcctgataggccctctttatcagcatagtggcctgccttgtacagtcatcaatggctgcttgctgagccctcaacatttccacctctttatctctccattcagcgaacagacgcagtttctcttcaaatgcgagattcaccacagcatggagtttttcctgatcatgatgcagggtattagtatgaccttgcatgagtccaagggcagcacgaaggttccggatctcggtgtcatctccaacaattgttcgaacatttgttactggcggaacttcagtgttgggaatatcctgattgggtgttgaactggtatttccagtctcttgcacaccaggcgcgattccactaaaaggagtcgtcaca

SEQ ID NO: 172562 - DNA, 648 bp, Cannabis sativa
gcttccatttgtgcacgttgttcaagtgtcattatttgtgtcatcacctgaagttgtctttgcatctgagttacggtttaccttaagtcaggttgtttagtagctgcagcaagttgtgagctccattttgatgattgccctttcaatttgcaacccactcctcgctcgtggccacacctctctccaagagtctcacgaagtatctcaatctcaacatctttctgtacattgactatcgtattttgtcttcatctgtacctattttatgaataatttagaaaccaaacaaacttacaattatttagatatatttaaaagtaattagtttagataatcttacatattaatgtttggcatactcattgacaaactcgtatgtgcccttctttgtatgacaaaccttctaattctcaatgcgacctatgttttgctgataaatataaatcgtaagaaaatcataattaaattaaacttcataaaataaatagtatatatattaacttacatttttatgaatggtctcattatcgacccatgtgttgaaggaaatctcatattctgttgattgaaagcattttgtttagaacgagcaataaactcaggagatgtgaagaacttacatagtagccgccattgttcttcattgag

SEQ ID NO: 172563 - DNA, 616 bp, Cannabis sativa
caaatagtcacttacgtattatgcagaaggtagttgtattgattggggagaggccagtcgtccagaagaagtcctcttttaaatgggttttgtatggcaacccaacaatgatcatacgatcgcttgtgtgagtcccaagataataaaaaacctcctgtagcattcttcctcgcaggaacggccttgacaaagtatatatactatttcagggagtggggcactcccatcctaagattttgtacagaaccattaaacttgcaaggattttgtatgaaataagaacaacctgtaatggggaaattccgagatggtctaggaagtccttatagtaatcttgcagggggataattgctccagtcgtgatgtgttcgaggctccaagcgcctatccctgttgagccactcatacatgcctcaccattggtcccctaggatgcttcgcgagtgagtcgttctggtaggtaacaactaatctcgccaagggctactgatctaactcgtcatttttgcttttggtcaatgccacaagtccttaggatgctacctacgtaatcttcgatggctcataccctcgactcaattagttcatcctcgaaggtaacattacgatcttaagg

SEQ ID NO: 172564 - DNA, 858 bp, Cannabis sativa
taaaggttgtcactaaaagtaacagttttttgtagtgatagtcaactttagaaaatatcataacatttctacaatgcacactcctaaaaaggatgtactgatacaatccttatttgtttcggcattcagaataattttttagtctaattcttttttatagtcgtgtaagttgtagttatttaagacatcttacaaaattctaaaaaatttgaaataatttacaatatagaaaatagtgttcaaacagtctatttcacacgtgtttaaagtcacgcatgcaacaaactatttgaaccctattattttttggcatgttaaatttctttgaaggtctcaaattttacaagatatcttaaataactacaacgtatacgattgtaaaaaaaaattagattaaaaaatttctcgaatatcgaaataaataagatgtacatcggtacatttcttttaaaaaagttcattgtaaaattttcccataacataaatacatgtatacataatgtttacaaagacagttatttaaaaaattatagacacaattttactacactaatttgtttcaaacatgcagaagcaaggtaactaccaatgtcacaaatttgacatgtataattgaacaaaatattattatataataaagcaacctacataacatatatattatatgtaagagttattttcgatgtaacttctttaagtggtcatgttttgtaactaacccccaattctaaaattttagtagtaaaacctcttaaactcgtgtcctgttagcagtttaacatttctatccatttttagctgttaactgccatggtggaatatctacgtatacacagtgtacatgtggcacaattttat

SEQ ID NO: 172565 - DNA, 851 bp, Cannabis sativa
ctgtaatatttttgtctctgaaatgaaatcttgattttgcatattgttaaagaatttctaacacaaacaacatgttaaatcttacacccaaatattaagatgacattaaagaagggaacttttccaaagagcaaacctcgtcaaacgaaggagaacaaacataatggtggagttgtgagagaacatgaaaagccttgtttttggcattttcgttatctgggtctgaaagggcatcatcagagaccgaattaaggaagtcaatcaaatctgccaccgaattttgagattgttcagggtctccttcttcaacagactattcaatgaaaaagaaaatgataatcaagttcaagctttaagtggaaagctagaaaaaagaaaagaaaaaggatcttacattggatactgagttaaggatctcatgaagacgagaggaggaggttgaaggtgtaagaagctcctcctcctcctcctcctccgatgacgagaggtgttcgtcgtgtatgggtttcgtggacattgtggattttgaattgaaatgagtaagcaatctccactctccactgtggcgctggaaattgcaaaccacaggttatttgattttgttaaaacaaggtaaattctaaaagttattaattggaatttttgtgttcttaaatgataaaatagactctgaattttttaaaatggtataaatagaatcctaattaatttttttaaaataaaatttaataataatctgatttaaaggtgttacaacaaaattatttatattttctgtatctgttcgtgttaagaattttcttcaagttaggtgttggtcattctgcagcaaccaatttttttgattggtt

SEQ ID NO: 172566 - DNA, 647 bp, Cannabis sativa
aaaatattttaattgtgaaaaatcatttttaacatgaacaaataacaatacaagaatattgaatagtacaaataaaatttttaaaacaaaaatattttcataaatatatataaaaaaaatttattaaacaaattaattactaaaaacaaaattttaataaattacttattgagtaagacattagtcaatcactcataaaagattaaaaaaaaaaaaacaattcttggactaaggaaataaacataactaaagtattatttataacctacatagataacacctaaaatctttttaaacgatgtgggattttcactttgtatgtgtgtattattttctaaacaaaataagaagatgtgtcataaaattagaaaaataggaagaaaaaaaaaaaaaatgtaagatgtcacatagacttatatgttacattcttcttaaaaaaattaattaggcaagattaaattctttaatcacacacaaaaaataatgtgactaactttgtgacaaaataaagagaagaaaataatcatctatataaagcctatgatgcaacacactatttaaaccatgtggaattttttcataagaattaggtgatgagtaaaattactaatatttaaaaaaacaaataaaaatatataaaaaaaaat

SEQ ID NO: 172567 - DNA, 1340 bp, Cannabis sativa
aataaagcccaaaatgtgcaaagctcagaaaaataaagcccgtacgtgtgtaaacaagatgagagcttgagagtaggggtccttccttcaatcattttggaaaaaataaaatataattacatattacgtaatctgatacatttgtcaactatagactacatgcatttagtcctttttaaagttttaattggttaaaaaaagagaaatgttgaaagtcactgccaagcaccctcctacatgtcaatattactattggtctaattaagtattgagtcccaaaatagtttaatatcctagtttttaggaagtatcgctagtcaatcgcaaagtaacacgtcttaagggtgctaggcaccactggtactcaataacaatactcttaaaaaaagcaccgtatattatagattaattacacttgttcctacaatagcaattccatatatatatatatatatgaaaagatattgaaaaatgttatctattatatatatatatatatttaatttttttttatattatatttaagaataagttgagcaatacatatattttttatatatttattaattaaaaatattttcatatcatattttattaaaatgtacttacttttgttagtgagttatctaaaaataatcctctcactaaaaataatccaactcttatgggataaatagtcccaacaaaatacatgagattaagtggaataaacctgaccactcttctcccaaaatccaacaacatcaatgccatatttgtgtgatgtttcttaaatatgtgtaatgattttatttaaatatacaagtaaattatttaaataaatttattaaatgataataactattttttcttgcgtataaaaaatattttaatattttttttttcaaaacaaatattttaatgtattgataatataaagaaaaaaaaattaataaaatgataaacccattttaaaaaaaatatacgtacattttataatgttaattgtaaaattcaattagtaaagaaaaaaattataattcaaatttttttaatttgttattttcttaaaaaagaatacattttattaattttatatttttaccaataaaatataaattttatttaattaagcttttgaatttttttttaatacaaaaaaattaatccaaactcataaccaaacatataactagattcaacataatcctattctattcaatccaatccaatccaatgcaatcatgcgtaccaaacgaatataatgagaatatcatctataaaagtagatatataaaatgtggctatataacagaattcttgggttatgaaaaattattgggtgacttttttttaaaata

SEQ ID NO: 172568 - DNA, 884 bp, Cannabis sativa
aaatcaattcaaacaatttgacagagtgacaaaaacttcctttgagtcattttttcaaacatatgttttgcacaataatagatattttgaactaaagaaagacaaaatcattgaagaaaaatatggcatagagagacctaaagatgaaaaaacaatcaaagctcaaagttcatgattggaatttggaatgatgaaaacaaagtgatcatatggatttgaaaacttttgttaatattctttcattttgattaattcgtctctgcatgtatggttccaatcgatatatatatcacttgctagagagcaacacttaaagttctgaaaaatcatttcaaggggtgacacctgaaatggtagatcgcaaaagacaatacaaaaataagaaatcctgtacaaaaatttttggaacaaaataaggaacggatgaaaattcatttcaactttttactgaacatagagagcctacatttcaagataaagcctgtgtttctatcctcccatatggagaagtcaaagatcggtagttagttttgaaatcttcataaataatgaaaaaattgactacaaaatattcaagactacttaaaacgaagattctcaagcaagtaaacaacatcaagaatagaatcaatagcaattgattccgtcagagtcttttgctgcctgcaatccaaaaataaagttaaaaattgagagagatgccattgcttaccgttcacctcccttgagatgcgatcgccagttcaccacccctgccgtttgcataaattcgtatactccaaggactcaccttcaccaccgccactcattccgatttcgaattaattcagatggattattgttctggttgggcctgctctcatcaatgtcactccaccatcaaa

SEQ ID NO: 172569 - DNA, 582 bp, Cannabis sativa
aacaacttcagttacaacataattcattaagactctccgctagatcagtagtcacagaacctagtctataaaaaagataattttttccgccatttttgattttgagagagtgctttagggcaactccaatgcagaaacccaaatttaatgttaaatcaacactaaaaggatactatttcaacactaaatttttttccaattccaaccacaacactaaaaattacactaaaaagtatattctttattattatattatttaattaataaaatagattattatataattatttgttttttaaaaaggattatttaattattaaaaagtacaaaaaaaaaacagaaaaaagtaaaatgcagttgtctacagtgcccactattattagtgggacactgtagactcccaccaaaataagtttacttttagtgttgggttggaggcttttggtgaaaaaattacatcatatttgggtttttaaagtcccattgaagatggccttagggcaactccaatggagaaagccaaatttaatattaaatcaacactaaaaggatactatttcaacactaaatttttttccaatt

SEQ ID NO: 172570 - DNA, 598 bp, Cannabis sativa
ttgtcgatacattttcgaaaggttttcaacactaatgtctcaatggcaggtatgacctttcccgatgggttgtcgataggttctcgattatttatcaaaatggcaaatagttttgcatttccaactattcttgacatgttatctttgtgttatcgattgtttgtcaataattttttggtggtgtgtataattgtgttttcaaactttcttaacccatgttgtcgatgatttctcgacgtgttctcgacagtttcttaatgattgaatgattattattttcaacgattgttgattaattttttgcaggttcttgattggttcacgattatttgtctacactttcccattattgtaattttttattatttttgttattctgattctgttatttgtggtttgtattgaattgcaagatcgcttgcatttctggttatattgtatgatggtgcttggagtgttgagagattttattggatgtataaaagtaaaggaagtccgatgagcatttattaagcaaagtataactacaaaaattaaaaacaaatttatattaattgatgaatatttattcatatcgacaactccgtcaataatctat

SEQ ID NO: 172571 - DNA, 551 bp, Cannabis sativa
  modified_base (58)..(61): a, c, t, g, unknown or other
aatcaaaatttaaagctaattaaaggagaagaaaaaatcaaaaactcatataagctannnnattaagaaaaagaagattaggaaaaaaactcatataagctgccacataggaatcctttgtgcattcctttattatatatattgatattgatattgattaatgatttgtatgttttatgtaatttatttatgatttagagaaaccctatttttttcctctgcatttatgtaatttatggagttagtgttacttgcttcattaactggtgattcacgtggttatgctttcgttgagtttgaaatagaaagagatttgcggcgtgcattcaaggtcgtatgattatttgtttgctcttcttttttaatcggcttcgttgttatagttggggctatgaaggaagagtgggaataaaaaaatggagctcctggggaaaggataaataattgttatcccaatttttgcactctgacgtggcatcacgtgaatggtgacacgtggagtccacttggaacatctgctcgggaagatagtccgagcaggatgcctcgct

SEQ ID NO: 172572 - DNA, 927 bp, Cannabis sativa
ttaaataaaaagctaccactaactggtggcaaaatgataatttattttatatatatattataggaaaattttataatgtacctctttaaaagaaatgcatcgatacatctctatctattttagtatctgaaataatttttgtcaaattttttctcatagtctgagagaaaccgagagagagaaaaagaaaaatactttatttctcaaaaatgaattgaaaatgaaatggtacagagtcaagtgcttttatagcagcaataatcaagaacctagttggtcaaatataactaaccaatcagttagttaataatagaaataccaactggtaatagaaatggcagacaagtgaaaagcctataactaactcaactaattacattttaatagccccccttaagttggagtgtaaatattaatgacacccaacttggatacaatgcttgagaaagatgaaggtagcaaaactttggtgaagatatctgcaaggttctgttgagatgagacatgaagaagcttgagtgatccttgctgaattttttctcgaatgaagtggcagtcgatctccacatgtttgatgcgttcatggtaaacgggattctcactgatgtgcattgcagcagtgttgtcacagtataatgttgctagaactttgggagagatgccaatgtctttgaggagagcaaggatccatgttactttggaagtggcatctgccattgcacgatactcggctttagcagatgaccgagatacaacctgatgttttttaaatttccacgagacaagtgattggccaaggaacacacaataccctaaaatggagcacctagtatcttgacaactgccccaatcggcatcagcaaagaatgaaatttgaacattggatgctgataaacttgtttcagcatatgctgagattgttgggga

SEQ ID NO: 172573 - DNA, 527 bp, Cannabis sativa
gttgaagcaagtcctggtcaattttgtgttttgcttccccaaaactcacctgggtcatctgcaaaagacaacactcgagatgagtgtttggtcaggatatcgaacattgaattgggaaatatgccgactaggagtactcaacagatgaaagaataaaaacattcgacaaaaagtcaaaactcggaagttcaaaattttcgtgagttagggtaaaaaaatttcatgaagcttagaataagcaaaatgaaagacaggcattatgcagatcaaaaagccagcattatgaatgatgaagtcgcatgaatcgttacaaaggaaaattgtagagtttctaaacttagggtttcctacatatcttctacaacaaagttaaacttgtattcagaaaacaaatgtgcaaagtaaacgtaaaagaaatcggaaaattactcaagcatcgaacttttttttttttttgtagggtaaccgatacaggttaaaataacaaaggtaacaaagttacacaaccagaggagaattttcttcca

SEQ ID NO: 172574 - DNA, 610 bp, Cannabis sativa
ttgaaaagtgggttgtaaattcttcataacaaatacctttgaagtgatacaaaagagcttatctttttttaccattgctactttgcaaattttcttaagttccatttcaatctcatctactttcttactttctgacataattacttagaggttccggccactaagatcattgacgagttctagccgtcaacagtttggcgccatctgtgggaatgataaaatttaaagttgtgttaattccttgctatttcactaaaatcgaaatttattatgtaatagttaaatatcatagtaaaagtgaaaaactatgtacatttgatttatacattaaatattatttatgtaaattaattacaatttatgttatttaaattatttaaatattatttgttaatggtaagaaaaagtataatgaaatttgcaatacaaataaaatctacaatattacaaatatatacaaaacatactttttgttaaaaaaaataataaaaaatgcaagaaacccttccacaatgcgtattcattagatcacatttattggattttgactcaaccgatccaatccaattatttattagatattgaattttgttatccgatccaatccaat

SEQ ID NO: 172575 - DNA, 1156 bp, Cannabis sativa
acgtgtaggcagatcgactcatcaaaaatatcgttcttgatgacttttttttagtgactttctggtagtttttgatggtacaacccttgcatacatatatagatatattatagtatcatacgactttttgatgaatctggcctcataattaagaaaacacaacattggtaaaattaatatgttcattaattttatctacatgcattaataaattaaagaatacatgaattgctaaaaaatattattggtgtctagcatattttacgatattatatggttattggtgtaattatcaaatcctatataacttaaaaaaaataatttttttaaaaatatcactaactaataatatgacactatataataagaaaaaatactaaacactaatggcccataacaatcctcttttataatactaaagaaagttatatgtgctgtgcacgtggagcaaaatatttatgaccatataaatgttgagaaaaaatactacttatactcaatattattataagatattatatcactattattataattaattaaatattaattctcactctaactatttgtaaggtgaagactatcctcactcaaaacaatatatatatatataaatatagaaaaataaaaaatacactccaaaaaataattgtacaatatatatttatatcgtgttttcaacacataaatagttattattctattatttttataagataatgcacactttagttatttagcttctatataaaattactttaagagaataatttttcaatagaatattaaaaaaaatatatatttttactaataattttttttactaataacttatactatcatattagtttagacgacaatagcaattaacaagaaaataaggtcatttttgtaatttaagaagcccaatacaatatttcctcttttatatatttatagattattaataattctttttttttactaataactcattacaatattaatttagatttaatattagtaattaacaaaataaataaagataatgaaataatgacaatttttacattacattaaaactaataaattagaggaaattacacttagtatgggattttaaaagtttttatgataaatatgacatatttaagtttggccaatttatatggtattt

SEQ ID NO: 172576 - DNA, 731 bp, Cannabis sativa
agcattaagtttagtaatgtcccagcccccattggggagtaaaagatcagccaccttagagtcctcgttaccatacgaaacaactggcttcggggaaaaatctttaccatgtggtatccaagggtccctccaaacgctagtatcttgaccatcaccaaccagtttacaggcacccttcctcagtaccacattcgctcggatcacatttttcccaaaaccacgaatcgagctcttatatttatgactcaaggagatccttcccttttagatattttgcttgcaaaatccgacaacaaagagaattgcacccgttcaacaagttccatccccatttcgccaggaacgcccagttcatctctcttgtcttcctaaatccaagacctccatgggacttcgggagacagagcttatcccaagctcttaagtgcacaccatggtttcctttgtcaaaaaccccaccagaaatctctcaccatcccatcaattttgctaaccagacggttggataatttggtggtttgcattgcgtacatcggcattgaaagacctactgatttgatcagggtagcacgcccagccttagaaagggttttcgccttccagccttgtaacttagaagtgaggttctcaataatgaagttaaagtcagcatccttttgcttagaccggaataacggaagccctaaatatttaatatagcctaccggagacccaataccaagagtttcctt

SEQ ID NO: 172577 - DNA, 680 bp, Cannabis sativa
tcctactgtttaagtgctctccttttacaatcttttttttttatgtctgttccgccaataggccttcttttgagacaaggtaactggccaagctatctttaaacttggaatattattttttcagtttttgaacaactggctgatcgggcagcctttaatcctggatttgaatgcttttgttattctcaatgaatttcatcccttgtttataatcatcgtgcaattatgttcattttgtttttgttttttaccaaatgctttgtacaggtataggtgctccccaagtgactgagcagacttttgtctcttggtcacttattttttcacaagtatgcttttttttgtttatatttttgtgtatgaccagaccttttgtaagcactagattgtaaattgataacatgctaatgaactcgactcaatttgaatttaaataaatatctttattcatttattggtcggaaatatgtctgttaccgtagtaacctacatcaaagctattatgttgatctgatatgatctttagcttagcataaataaaacaaattgtagaaaataaaaatcgtactttcaaaaattttcatccaacctgagtacttgataattttatctgaaccttttggtgtggtctgcccagaaggccattcacttaataacaaatgttcttttatttcgtactt

SEQ ID NO: 172578 - DNA, 506 bp, Cannabis sativa
aaaaaaaaagtgaaaactgagttataatacatttttttttaacttaatgaataatacttttctataataatataaatatattatattaatttttttaatatatgagtgtgtcataatattatattaatgtattagatttctattataaacgcatttttttttaaaaaaaaaaaatgtattagatttctaaaaaaataatacaatatttaaatgatatagataaaaaatagatggtgtaatgtaaaagtgtgaggtaaaaaaaattaatgaagtattttaaagaataaagtagagaagagtgctctaaacctcctataatataaataaaaaataagcatattaaatctttcgggcatgccttattcagataaaaaaaatcaatacaagctctccaagtcctgttaggctttgggacgagaataggattggctattcacgagggataaaacacctcgcgtataaagtcattgactaacaacttgttcacttcctgttttagtgcccct

SEQ ID NO: 172579 - DNA, 605 bp, Cannabis sativa
gttgaactcagtgatgtttttcacaagatgaccctgtaggtcgtcccacagttcgcctccaacaatgaagagatcagtagtgatccctgcctgaagggcggtaagttgggtactatcatccaaatttcttactctcgcagaagtcatgctagaacgacttaagtatgccttaagcatctcaccaggttgttgctttatgttggtgagtgagtacacttcgggtcgcctatcccttgtagcctggaactgctttttaaagtccttagacaactattcccaagaagtgatggagtgatgagtaaatttattgaaccagctgcttgctacttcaactagtgaggtgggaaacaaaatacaatgtagattatttgtaacattactagctcgcattattgtattgaaattattcaaatgcgagactggatcagtggtcccatcatatgacgagacgtggggatttttgaatcactgggggaaaggagtattcatgatgcctggatggtatggctcgagttcctcatctgagtcatgtctagattattttctttgcttcccgacttgataccttctaaacttatcctccaactcttggattggatcccctt

SEQ ID NO: 172580 - DNA, 573 bp, Cannabis sativa
  modified_base (84)..(85): a, c, t, g, unknown or other
aaatgcctaaataaataaattaaggagactatttcataaatacattaaaacaacaaaaacttacaaaaatacggttgtacgaanntttaaatatttttacgattttatgtacaaaaagtaccgtctttttgatgtatttttatgttgcactcttgttaattttttgttatttgtatgttatttttgttgttattttgctgttacttttatgcagttttattgttgttttcgttttttttataaaataccgtaaaaatatattaaaaaaacttttgaacgtaaaaatataatttttttttacaaaaaatagtattttaaataagagaaatttgcgataaaaatacctaaggttaactctcagttgtaaataaatacttaactttaattttttgcgataaaaatacctaagttatatttctgaaacttatgtaagtatttacatgttaagtgttaagtaaatataacttaattaaacttacgtattattacagcaaaaatataatttagttattattactgcaaaaaaattaaacttaaatatttatttacaactaaaaattaaacttaattatt

SEQ ID NO: 172581 - DNA, 616 bp, Cannabis sativa
tacatgtaataaattgtttatcttgaaaaagtgagaaacttatttggagtttcccaattattaatctaacatctcttaactgtagaagcattaaaataagagtatagatattgaaaatgttaagataaagaactcaattcttttccttatgccataagacctggttatacagaatgacacacgtcacctagaaagtccctacaaaacatcaatttcatatacgaaatgaatagaaaatgttacatgcatatttttgtgatacttggctcaacatttggcataatccgattacaatttcaatagagaaaaacttataaggacacgaaagacttcgaaaatcatagaatgttatggcataaaatgcactaaacttttaaattgtaaaggcaagaatagaagaaaagaaactgctttgcaaaagtatgagaatcttttcttggagtttaggaaaatagcttctatgttatagagtgattcttcatcacgcaagtcaccttggaactgacaaaccaagctctgaatcattacacaaattagtcagagcacaagaattaaaacactgttacaagttatcatgcaacattatgcacattgcaaagttcatgaatcaatctca

SEQ ID NO: 172582 - DNA, 618 bp, Cannabis sativa
tacttttaatatcttttccactcaaaatacttttacatttcaaaaagtctttctataacactttaactctctcactccaagtcttattgtctccaccctaaagccccaaaatctatgagctcaaccgctctgaaatcctcgaaatccctacccatcgttggagttctcaactcgctcactttttgtgtttttttttgtttggtttttgacgatgttgtgaaatattgctaaatattgctatatcgcaaaacattgctaaatgtctttaattctcatcactaaatgtctctaattcacaacattgctaaatgtctttaattcacagtaatataattatggatggcatagcatacgctcagtcaatactattctttttaggggtgctcaatattattaataagggtgttcacggattggtattggtttggtctaattggtctaaattatttttaattttttcaaaccaaactactattacggttttttaaaaattcaaaaccaaaccaaaccaatgaaatgattaaaacaaaccaaaccactcaaaaacggattggtttgatttgaaccatgggttgtatttcgtagttgttctaattttttttacaatgattgttcatt

SEQ ID NO: 172583 - DNA, 606 bp, Cannabis sativa
ctctttatttcaacaaaaatacacgctaatatctacaagaaaaacataaattgaatcaaaatcaaatattttcatttataaaatatattacaataatttcacaaaaatattaattaaaactcaatttaatttatcatttaaaataaataaaagtgtatttttaactactaatcataatctgcaactagcttattggtagtccctagtaattcaagcagataaaataattatcaagttgaataaacaagtcaaatcaagtaaaatcatccaatcattttaaaaatattagtagaaagtaaaaaattattattaatgttactttaattgtgactaagagtcatgtatgtgcattaaactttattaatttttttcacaaatcataacacaaatagtatcgaaaaatttcaaaagtataaaggtcttaactttaactttcttacaagtattgaaagtgtgatacttttttggagttaaaaaagtaacaatttttttaaaaaatgaaatatcaacttcattaaaactagcattctgaatacaagatggcatgaaggtcaaccataatattatcctcaagaatgccgatcagagtagaatcgagagcgtcta

SEQ ID NO: 172584 - DNA, 676 bp, Cannabis sativa
ccaaggcatgataaccaacagagcgtcgcagatgatccaaggacgtctattcagaacattccatgcatcctcattagatgcgaacgtgcagtgtaggatcccctcatcatcctccttccaactccatcctttgaaagaactccaggcttttttcaaagttccagcaatagcttttcaccctagtttccctttgcaaatgagtttccccagcagaatgttaccttgaggctcttggacttcggattctccaggatcaaggcgacatgttaagtcctccgtggtaatctgaactgtgtcttcaaagaggtggctaaggctgttgtctgccatatcaatgttcacttgttgtagcacccctgaaagaagtgtatttgtcacgatgatgtccacaacctatctggaaagtgcactaggctctggtaaaaaacttccgatgaagtcacactctgaagaaagagagagaattcctttataacggatcattataatttatctttgttatacctaaattagtcttcttcttatatctctctatattaatatgtgtgaatgttctccttttcacttccttgtaataaaaaaaagagtaaattgcggcataaatacttaatgttttcgattttatacacttaaatacctaatgtttattttttgtggcaaaaatacctaatgttac

SEQ ID NO: 172585 - DNA, 888 bp, Cannabis sativa
ctatggacattcagcaatttgctttggttcactacaagatatctaatggctacaaggctctttgtcccccccaaaacaaagtgaattggagccatgaggtatggaatagacttaatatacctagacacagtttttgcttatggattgttatccaagataggcttagaactagggaaaggctccataaattcaatatcattggagaagacacttctgcttgttctgcaaagaccaaactgaatctttagtgcatctattcttctcttgctccttctctaacctttgtctatctcaagtcaaaacttggctcggctggggggttgaaacaacagctttgaataggctgttaagatggttagaacgtgcaaaaattagcaggttttgcaaggcagtattggctgctgctgtggctgacttggtgtatcatttattaaagaaccgaaatgatattctgtggaactcaaggaagcaagcacatgaacaagtggttcatgttacaaaggaagatgtgaagagtagagtggtttgcaattggcctaaaaatgtcaaaccgattgatgttgtttggttttcaacattgtaactcaattttttttattaacaaagttaaatgtatgattatacattgattttattgtacagatagaaaaaatcagatcttcaattaaagatgctagtaggttgtaaattgaaatttttggagtaatgaattttactaattaaccaaaaaaaaaataaataaataaaaaagtaaattactaaaaaattccgtaaatgaaatacaaaaaactccattatcatttgcgacaataatatacatgtattatgtgataataatgttgaaaacctaaaagaaaaatataataaataataatgaaattatctttt

SEQ ID NO: 172586 - DNA, 881 bp, Cannabis sativa
  modified_base (571)..(577): a, c, t, g, unknown or other
cttgagaaaagaaggaatgaaattttgaatgcttactagtgactagtagaatactgttatacttattgctctaatttattgtaattttatttcaagagatagttaaactaacaagattattaagtttgtgtattatttttattactatttgaagtagcctaaaattgttatctaaaagataaaataattttgtttatttacttataacataattatggactctactttatgcataagagtgattcccattttatgacttttgtaaaggtactcatagaattcgtgtatttaatttgaaagtattgctattgaaaacttaatttgctatgctattttaatttgatatatacttatgactagttttaatatgaatgtaaattgtcatagaataattacaatgtaatgtgaggtattcataaaagaacatgatgtcatttctacaagctttataaaatgtgttttatcagtacataacaacaaatcgcaggaaggtgagctttaatttttctttatttaattttctaattctattcaaaatatgagctgaaaaaaatattgtactcataccttnnnnnnnaaaatctcttgaaatgaccacaatataaggtgactgtttttctttttaatttaaaatgtgtagatgaattttgttgaatgaaccgatgtgtatatataaataagcaaaactagtttccactaagattatatttgattaggaacaatattttgaaatgaccatcattaggttgcaatcatgtatgcgaggcacgcaatcaagcattggaaatatttcaagataatgaggtgactttcaattgccaataaatcaattatctattgaactagtaggtgttactagtttttaaaattgttggctttat

SEQ ID NO: 172587 - DNA, 885 bp, Cannabis sativa
  modified_base (136)..(139): a, c, t, g, unknown or other
taacccctgagtttttcttttatagtttttattctactcttttttctctctcctagctagtagctagaagcctaaaaccattttgttttttgtgtaaatagaggtaaagcgcacacatatatatatatctatatannnntatatttatatatatattttcttttccaaaactttaaaaagttttttcagctaaactatttattattttaactcaaaaattgtacaattataatctattttttatgatgatcattttgatatgtgagaagcatatattttttttgccgctacaaaaacaaatgaccggaaagagtaacttttaagtttcttttctatatatctagctaacaaaaataattaaacttttaacttaaaccaaatttaatatatcaaccaattttataagttactaaataataaacttatacaattagcttattttgtaacaattttgatatgtttctaaaataaatatatggcaatcatagtacttaaaattcaatacaacaaccaccatcacaagttactctatattttttagaattaattacatctcaacatggaaatatcaaattgtttaggaaattgttgttgttggttatctaaaacatcatatgagttacattaaaaaaaaaaaaaataacttcaatgtatcttaaacaataaaataacataatatagcttgaaaacataaaaaagaaacaaaaaagtttcttttaatattagtcgtcattttttagagacagaaaaacatatatttctcacattttaaaatgattattttataatttataaatgtataaaattctaaaataaatttgttaataggaaagtaaccaattgatatcttattcacatcaaaagtaactaaaatgttactttttt

SEQ ID NO: 172588 - DNA, 1479 bp, Cannabis sativa
catacttaatataaatttcaatgtacagtaaagtgagatacggtgataacactaactttaaatgtaatggtaattacaagtgaattacaataacatcaacggttttaaaatcaaatgaaagtattatatagatttattttattattttttctatagatctttattttgtgtgagaattcagttctaatattttttttcactataactttgaagagatctctttttgtgtttttttttgttgataagaaatagtatgataattttatatatatatgaaacactttttaatgagtattactttttgattggcactaaataaatttaactataaatattaaatttaacaatattaaaccatagattttgatccgatgacaaataataaaagagaaatttgaatttttatgtttaatttagctacttaaataaaaaaaatatcaaaaagtacctctttttacactatataatatatataaaatgtttaagtcaaactcatctttttttatcttttttttttgccaaagaatttattttattattatttttttcaaccgatggaacaacctctgtccatataatgtaaaaataagagaattttctaattaaatacaaaaattaagcatcaaaactcaaatgttcttaatattacctatgaatgggtaatacccattaagagtgcgcccatatatatatatatttctataaagtcctctatagatttatctttttttaatactttaattttttattataacctataagaatactgataattaatatattgtaaaagaaataatatataaactaattaggatttttgccttttgaactttgatatgtaccaaatcatgtctcatgaactttccagatcgttaaaaatttctcctcaacaattgggattgttgtatttaaggatttttaactaatttcattcaatgttggtaatgtgtcgattgtccttatactaaattgtaccccttcaactttgatatctactaaatcatgctctggaagtttaacatgtaacaaattctgtccctaaattttcatccacgtcagatttattttagtaaaattagacaaatgttcttaaatccaacgatcttaatagttcgaggagaatttttagcaacttaaaaatttcatgagctaggatttcaaagttcagagggcaaaaatgtaaattaacctaatatataattctttataaaatttgaaaagtaagaaaaaaaattaataaggattaaaataaaattatgatatattaatgtgtttcacttattatttattattgaattttcatgaatattatcggtaaaaaaatttaataatcgcttgcgaagcgcgacatgtttcctagttttttaatataaaaagtattttacttatttttgatgtgagtgattggtgaatttaatcttgcccattacaatttttttttttttttaaagtgaatgcagaatataattttgcattttt

SEQ ID NO: 172589 - DNA, 526 bp, Cannabis sativa
gttgattctttttagtgagtttggctaaggctgatgacgtcttaaaaaatccctcaataaaccaacggtattaaccagccagacccaggaaactcctaacttctataactgtttttggtctcagccaatccctcatggattcaatctttctcggatccactttgattctatccatactgaaaatgtgcccaagaaaagacacacattagatagccaaacctcgtacttcttaaatttggcatacattttatgttctcgtagctcttgcaaaaccatccaaagatgctgctcgtgctcctcttctaattaagagttcacaaggatgtcgttgataaaaacaataactcagatattgagaaaatccttgaataccctattcatcagatccataaaaactgcggcagcgttggttagtccaaaagaaaaaccagaaattcatagtgcccatacctagtgcggaaagcagtctttagaatgtcctcctctcgaattctcaattgaagatagcccgatcagagatcaatct

SEQ ID NO: 172590 - DNA, 561 bp, Cannabis sativa
ggggttgttgggctggattggccagagcttgaacttggattgggctggattggcctaagaagaagaagaagacgaagaagacgaagaaaaaaaaaagaaaaaaatatatttttaattatttatttatttttatttgttaaaattaaaataataatttggaccaataatattttgacacgtggtaaatttaaaagagttaatagctcagttaaaattaagtatagtcgtgtgacatgtgtagtgtacacaataaataattaacctacaaaatatagaacccatatggtcgcataacaaagaggcagacatcacttgattccccttaaagggtaatgacgaacatcatacgtagaactgtaatgatgcctgatttggtcaaacaaagaggataatttgttggttttgtggtactaaatcacggtagcaaaaataatttctgattatcatcgtaccacatccttaaaattctgttggattttttgtcctaaataaaactcatttcaatataatcaaatttactaattaatataagatcataaatcgcttttatgttgcatggtt

SEQ ID NO: 172591 - DNA, 779 bp, Cannabis sativa
tattttttttttactttaatttgaaatctaattccaactcactcatctaattccatttttaaaaatttatatatatattctctttatatgtgtttagtttattaatgacttatatcacttttttgataattattttttacttacgtttgaaagtgggcacgacccacccattccccatttctaagaatttatatatgtattttatttctctctctatctctttttgtaggttggtatctcttatatatatattctccttatatctgtttagtttattaatgacttatatcacttttttaacaattattttttacttgaaagtggtcacaatccactcacgtgatccctattgccaagaatttatatatgcattttatttttctctttatctctttttgtggattggtatctatagaaaatttattgagattggtgtttaagataaagaccatcaaccaaagattttacataaaatccttctcctcactattcactatttcaaaaacttacaaaactcgcttctttcatttatttttttacttaggttttgagagaaaaaagcaagaagaacaatacagaggaagaagaagaacagcagatcaaactttctaagtaaaaaaaatctctttttttctttattcatttcttctagaacgacataaactttactgggtttttgttgtttttgctaattctattttttttttcttttttggtgttgtagtttagctctggttttgtgagtggtggtgttatatcgtttgatgactcttatggct

SEQ ID NO: 172592 - DNA, 758 bp, Cannabis sativa
  modified_base (474)..(477): a, c, t, g, unknown or other
cgattatttgtagaatcatgtataaccaaaaaaaaaaagatataataagttcaaaatataagtacttaaataataaaagttcattacataaacatgccaaataaaaaaaataccttcaagtaaataaataataataataaaaaatataacaaagaaaagtgactaattgtggacattgccatctccattatcgatattaatgttgctatcaatgggatcttcattaaaaaaatctacaacatccaagtgcgtaatatccaaaggctcattgagaaaaccatcatcttgataggaaaaatttgcttctattttcccctttcctctcacagatacttgataaagatcaacaaggtattttgccgtacgataggcacgtgcccaatgtccttttattccacatcagaaaataaattttcataattttcatgattactattttgaggaccttttcccttgttctcagtagttgtgctnnnnattggagtatacaaatttttattttgacgatgccaaacattgcttcgaccgcgaccgcgactttgattatggtcatgaccacatctaatactttaattatgatcacgagcacgactatgattatgattgtcataaattgttacattcacttcaggaaatgggccgcagacccagttgggcgagattcatgatttttcatcaaacgttcattattctgttcaactactagaagacatgaaattaattctgaatatttataaaattttgctctctatattgct

SEQ ID NO: 172593 - DNA, 514 bp, Cannabis sativa
tgtttacctattttacacaattgtgtcatagggcctctgttcagcgtgtaattttccattcaagtcgaccaacacacttgaattcagaaagaaggcaagactagcatagaatatatgtatgtatatgtgtatgtgtattatatgcatgttgattatgtaatttatatgctaccaacgctagtacggtaccgatactgagtgaattggtacagtatatgatgttcaaaggatacgatctagtgtaaccaacactagtactgtaatgttctaatctataggatcgccacgtgtgtgattttataaaactagtttaatactaatatattaattaattattacaaactgtgaggataataaaaatttgactaaaataaaacactaaaaacatacattatagcggtagtaaaaagtatttcgaggatccctgttataaaagatttacccaaaagactatataaaataacaattcaaaatacaacagatacagccagtctaaaacaacttctggcaactc

SEQ ID NO: 172594 - DNA, 506 bp, Cannabis sativa
tacgttgaaattctttgatgtcctttttccttgggattattatatcgtccgactaaatatatttgcacttgctttttgtttctgcaaaaaaattcacaaatttacttaattatatgccaactttatttttatctaatatattatataaatatatatatcatgtgtatgtaaatattcatcctccaaaaaagaaaagaaaactatcatctgtatataaatttatgattctggaagtctatataaatgttggtttatactttatatatactagtctgtattcactgagtagttaaatcaaatttcgcagcttacgataatgagaaaatgtctttcttaaagctgctttggtcataaccatttcagggggtttgcttaagttttttaactttcttcaattaatttagggataactaaggcagattaataatatatgggcccgtttggtacgcaggattggactggattggactgaaaaagattggactggactggacaagattggatta

SEQ ID NO: 172595 - DNA, 647 bp, Cannabis sativa
agggagggggtgaagtaattaaagaggtattttagacataatataaaagttgtcatatataggcaattttatagtatttatgtttagaaaaataattttaaggttaattaagtatagattgtcaaatttccctttaattaagtgatattataaagtacaatacatgtatgttcaatttttttaattaggtaatgtatttttattttttttttatttttgaaataggatttgagattttaatttttgagatattttttttttgttattgcggctacattggtgtgctatttaaatataattatatatacgtattttatatatacaataaaagaatgaatttcattgttatacgtattttatattaatctctctatatataaggattatattagaaaatattttgacaaaatttgagtttgattagagaattaattactttcaaaatatattttatatattatgtcttaatatatattttaaaaatataatgattgtaatagatacattcttaatttgtagttaggagagtgtagttataataaagtgtacaaattattagaagcatatttatatcattaagtatttttaaaataaaaagtttgccgtgaaattaagatttaaatatatatatattatatatagatgtg

SEQ ID NO: 172596 - DNA, 569 bp, Cannabis sativa
tgcatcacatcttttagaatcacaattcttcaaaggtgaagttcaattccacatttctagtaccaaaaactatagtggtgtgggagtcgtccaacaacactttttgatcttcagtagaagctacacatattttaaacatatttctatcatagtagacatggcgtgaagcgccagtatctacccaccacccttcagatccaccaatgagattgatctctgaaatcatagttgtaaatgacagctcttttgtcaggttatcttgtggagcagtactaagcatgttcttacactttcgtgccatatgacctcgcttataacagttgtaacacatgaacaaaccagagtcatttctattagggggtacttgctgcctattattttttgttcctttgatggttccaattttgattgttattattagtccgaggttgactattatagtttggattcactttgcgattatgattcttaaagtttttcccattgggtttcagaacaacagtggatcttttattagtgttgttgttgtttccaacaacaagaatctcttccttttggtcttattttcg

SEQ ID NO: 172597 - DNA, 755 bp, Cannabis sativa
gtgacacataggtggacctaaaggtctcgagggagagctaaaagaatcaacattatattattactccaccctgagatttaaaaatatattaatatacaattgttattttcatacatacatcgtaattaaatgtaacgattggttaaaatactttaaatttatatagaagaccatgttttgaatgttcttgtcccttttttttttacatgtatttacattttatttattaaaaaataaatgaagtataaggttcaaactaagatcaaattatgaccaatagaataggggatgctgttaaaccatcattctacttaaattgagctagttatttattatttttaattatattaaatgtataactaagttcaccataaaattcaatcctgagtcgccaagatagtgaattaattgggaacatgtatatatgtgtgtctatgtcaaacaccaattaatttaggatgagtggcatatatatatgatttaacaaaaggcacatttatatgtggtgaacacaaattattatctctttgaaatgtataggataaagaaaaagaagtagctcttttagccatggaagcttaagcccggcccctacctgatgtgcttccatttttctgtttttgtgttttgtcgtctttatcgatcaactacccactgtgctcaaattaaagctgttatatgttggcccctaaatgcctataaacgacaaaaatataaaatagtttaacgcaacaaaaggggttagatccatccaa

SEQ ID NO: 172598 - DNA, 601 bp, Cannabis sativa
ctggagaattcacttgttctaccaaaatttcatgaaccagttgcctaatcgggtgaaactcatcttcttgacgaagtatgatcgcatttcggtaaacatttgctgtctatcggcaagaggattagcattattcatctccacagtaatcctagaattttacgaaggtgctagtggtttcgatgaattggttggattatcatcctgctcaacagactctctctgtgatctagttgatttaatatggtccattctttcaaacaaccctgaaatcaataatcccaacaagtcatacaccaattccacatttacacactccatgccaaaacccttactaacacatataatttctttctcaaatataacttatttacacctgatcatgcttttcattaaatagcaaatgtttttagatgctcatatgttgcctattacaaaagcaaaaaatatttaatcacataagcaaataaatatttactctcaacaccaccatgagtcgagcttgtctttgacaatgattgtacatgttcaactcgtcttcagaaagtttaaaaacattagcgctatgataccaaattgtaaagtcctactttgaaaaacgcca

SEQ ID NO: 172599 - DNA, 646 bp, Cannabis sativa
tgatttctcttcacttcttttctgcatttctttaaagttcaatgctgatttcacctttgtcatggttgaagattccttcccacacagaatggtgtccacgaagtgctcataactctttggcaatgtgctgagcagcaagattccctgatcttcatcttcaatcttgacacctatattgctgaggtccaagattatcatgttaaactcatcaagatgcttgtttcatccattctcattatacagtttcttttttaggtaaagcttgttggctagtgacttcttcaggtaaattgaagccaatttctcccatagtcctaatgtagttacttcacctgacacctccctcagtacttcatcacctaaactcaacaatatggcactgtgtgccttgttttgaacttctttaatcttcttcttatcttctccaagagcagcaagctcttctcgatcatggcctctgaaattccttgatgtaccaagaaagctttcattttgatcctccatagaccaaagtcattggtgccattgaatttatcaactttaaactgtgtagaagtcactgcagatcagttcttgttcctttcttgatgtcttgattcaattctttgatgatggccctcgactgttgtaacaccctaactaacat

SEQ ID NO: 172600 - DNA, 668 bp, Cannabis sativa
tcttcgagtttgacaaaggagcattcgtggatgaaccgcgaaaacatgatagctttattccaacatcgttgttagaagacgaggttctagtgagaccgaattcacaagcttcatggtctattggcgagatagctcgcatggttaaagaactaagaatcagtagttattgaagtgcggggaagttaatccacttatctgctcatggaagctttatccatcccagggctgctccatatgaggaagtcgaggaaatggagcgagactttgaatttcctgctcgcggggatgaaggtgaagatgatgaggatgttgcaatttttacagaagacacactactagacgatccattttcttgcgatgatctagtctcatgtgtacgaaagtttgaccttacgacattctagaggctaaagttgatcaacgccagttgtacaaaatctgtgtcaatacaatgtccacatcttcctttcaccaacttagcgattacgccgactgatgtcgcggtgatatctattcccattcttcgctttggagttgcagttcctttccatttgttttgtaaaagcaattttaacatattatgacatttctcccttctagcttacccctaataactatagaatcatcattgggttctatgtgatgtatatggagtacacgcaagggga

SEQ ID NO: 172601 - DNA, 1279 bp, Cannabis sativa
ataactaatcaacaatggtcaacaaagagaagccactctaaaaaggttgtgggtatgcatgaaattgatgccataaccaagttgacagcccaggtggaggccttaacaaagctggtgactgcacaagccaaacaagctcaagttttctgcaagctgtgtggaggatctcatactattgacacctaccctatatatgtagacaattttccaatggagcaagcccaagctattggaaactattagaataattatggttttaactaagggggtcgtcggcagagcttccaaaagcagtttcctaatcagcaacaacaagggctttatcttcagaaaaatcaatttcagcaaaatcaacagtatcaaaaacaacaagattctaatgaagggtctaattctcaaatagacacgttaatgcaattcatgactgagattaagtcttctcttaaggtcttggaaaccaaggtgcggcagttggcttctcaaaacactaacaaggctcaaggtaactttcctagcactactgaagtcaatccgaaagagaactgtaaggcaattaccttgagaagtggcaagagctatgctggtccaagtcaagataagccagaggatgaagaagatgatcaaccaacacttacactggaagagaagaagactagtgatggtcttcaacaaaaagaaacttctcctcctattaatattgaccatcacataaagattccctatcctcagaggttacgcaagaataacacggataagaagtttagcaagtttcttgaagtatttaaaaagctacatatcaacattcccattgcagaagcccttgaacaaatgccaagctacgtcaaattcatgaaggagattttttccaagaaaagaaagatggaagaattgagacagtagctctaacagagaagtgtagtaaaattcttcagaagaaactccctcctaaactgaaagatcctgggagttttaccataccttgaactattgggaggcttgaaaatattcatgcattgtgtgatctgggggctagtatcaaccttatgcccttgacagtatttaagagactataacttggagaaaaaaaacctacaattgttacactacagctagctgaccgttctttagcccatccaagaggagtaatcgaagatgtccttgtcaacgtggacaaatttatatttcctgttgattttatagtccttaatatggaagaagataacaatgtccctatcatcttggggagacccttcttggcaacagggaaagcactaattga

SEQ ID NO: 172602 - DNA, 533 bp, Cannabis sativa
tatagtcaactccttccttctgctaaaattctttgactactaatcgagctttatatctcttagaagccatcatgctctttctttaccccgatacacccatttgttgtgaagtgacttcttacgcatgggtaactcaactagttcccatgtttggtcggaaatcaaagactgcatctcgtctttcatggtcagctcacacttgcttgcatcacttgtctaacatgcttcatcatagcattcaggctctccttcatcagtcaacaacaaatagttcatgtatctcctgttaggcacatgaggtcgagaagaccttctcaatacaggagctagggtaggaggtaatgttgcgtcagattgttgcatgctgctttgtccaacaagttcctctttgctgaggacttgtctcaattgactttgtcatagaactattcgagtcataatctccatctataaatattggccctctacattctaagtctttagcgtcaattttatgtttgtccttgtacatcactttttcgttgaaaatcaca

SEQ ID NO: 172603 - DNA, 813 bp, Cannabis sativa
tcacgtacctatcgtacgaaaaaatatatttttgatatttatcaatcatttgtgaaagggaaggagaaaatagaagtgaaatttgcatatgaaagaactcttgcatattacacacttggatattgtagattttttttaacaaagatcccattaatagcaacattgattccataatgaggatggagatatctacaattagagtcatttttctttgtcatgttgtgtttattaattgactttaagataacggatacactcttaagggtgtgggggctatagcaaaaaaaattacattaaaaaaattaaatatatattttttcatttgataattaaagcacacaaaattaaaaaagctcctacaaaattaaataaaataagtaaagaaaacctattttttttaataacagttaagccttcacataatgataattctaggtctgttactatttaagatgttttattttatttgggatgtttatgtaatgaactcttattattagagtatttatattttgaactttttttttttttttttgttggttaatgaagtaatgaatatttatcatcttatatataatttcacaaatgagatatttgcggtataaatatcataagtttttagtattatacacttaaataccacatatttattttcgacggattaaataccttaagttacatttccattacttccgtcactactttactgttaaatcctatcaaacataaagtatttgcgacataaatagttgatgttttaaatttcctacacttatataccacatatttttcttctggcggattttttttttt

SEQ ID NO: 172604 - DNA, 917 bp, Cannabis sativa
agttaagagtaagagtcaagtatgcaattttatcattattttaagagataattgatggaattccattgaccaagtgcagtcttgttatggtatacctatgaagttttgcaattgggtctcccagtgtattacgacaacaaccctcaacatatgtctcaatggggggccggtgggcacaattaaaccctcctatggtcttcggcaacgggatcctctgtccccttaccttttcatctggactgccaaaattttatcaacgctccttcatgatgccctctgtaagaacattattaaaggtattaggctaagtagaggaggcccgattctctctcatatattctttgctgatgacttaattctggtgggcaaagctaatttgagcgaagccagaggttactggtagtgccttgagagtttctgttcttggtctgaccaacaagttaataaacttaagacctcaatcttttttagtaaagatactcccagtggcctgaagcgggagatctgggaggccctgggaattggctccccagaaggaaatgtgaagtatttaggcctcaccctgttcagatcaagacagaaggatgttgatttcaatttcattctggacaacctctcagctaagctgcaggggtggaaagcgaaaaccttgtctaagacgggccgggctactctcatcaaatctgtgggcctgtcgatgccgatgtacgctatgcaaactactaaactatccaaccgtctggctaccaaaatcaacaatatggtgcgtaacttctggtgggggttttgagaaagacaatcacgggatttacctaaaagtgtgggataaaatttgccttccaaaatctcttgggggcctgggttttaaaaaatctagagaaatgaaccaagcttttttggctaagtggggtggaaca

SEQ ID NO: 172605 - DNA, 1011 bp, Cannabis sativa
agtttatgtggatgatatcttgattactgggagtgacagcacccaagtttctcaccttatttctgctcttagcaaccagtttgctttgaaagaccttgggacaatcaatttttttctcagaattcaggtcattcccattgttgctggtatcttactttatcaacaaaagtacattcaagaccttttgtgcaaagctgaaatgcagggagtcaagacacaaagcactcctatgaacagtggccttcgactctccaattatgggagtgaccctgtccttgatccttctgcataccgatctatagttggcgctttgcagtatgcaacaattacaaggcccgacattgctttctcagtcaacaaagtatgtcagtttatgcacaatccactccaatctcatcttgttgctgtcaaacggatattaagataccttgcagggtccttggactatggcttacacttgcagaaagctccacatctcagccttgaagcctactgtgatgcggactgggctgccgatctggatgatcgacgatcaaccactggcttttgtattttttggggtgacaatctcattgggtggcaatcaaagaaacaaacaactatctctcgatcttctactgaagccgagtttcgaagtcttgcttctgttgtgactgaattgagttggctgcaatctctcttttcagaactcaagataagtatttccactcatcctatagtttggtgtgacaatctcagcaccatcatgcttgctgcgaatcccgtgcttcatgcccagaccaaacatatagaaatagatctatactttgtccgagataaggtgatcaataaagatgtcttagttcaacatgttcctgctgacaatcaacttgctgactgcctcaccaaaccgatatccaactctaagtttccttttcttagggacaaactttgtgtggcttcttcaaccacactcagtttgaagggggctgataaggatactatacataatgatgagctggcaattagtta

SEQ ID NO: 172606 - DNA, 840 bp, Cannabis sativa
atttcaaaacattaaattattacaagaactctatatttatgtagtgtatggtggccaacagattgtattatatataagttattttataattataagagaatttattagtagtatcacttttgttgttaatatataacacaattttattcatattacattctatattataattaaaacatgtattttatccgttagtttttttttttttttttaaaaaattataataatatacggtatcaaaaataaaatttaaatatttagttggacgcattaattttttttgtttgcatataattaattattattattatttttttatgcctataattaattataattttgaattctattttcaatagggaaatttgaatttctatgcatgcattaggggataattttttctctaaacttaaaataggggtattggtaaaatgagataacatttacttaattctcacattacccccctcccatttgaaacatgccctctctctctttcgcctctctttctctctttctctttcgctcggtgctgcacccacacacgcagaccacccacccacggcagaccacccatacagccgaccagcctacgtgacccacggcagacgacccacagccgaccgcccccctcaacccacatcactcacgccgactgcccagactacccaaaatatctaagataatttttttttgtttcaattttttcttttaatttttggtatctaaattcatgaaatagaataatatgttgcaattttgtgtgaaatctgttagttaaggttagatttaggaagattaggaagagatttgtcgaaaataggaatttatagatcgggt

SEQ ID NO: 172607 - DNA, 507 bp, Cannabis sativa
  modified_base (127)..(132): a, c, t, g, unknown or other
aacaagatcacctactcttgcaaattttgaaaaatcacaaatagttgaatacaactagtatttaataataatataaatttgtaaatacttagatttaaatttcggttacaaataaatatttaagttnnnnnnttaacggtaataatacttaagttatatttttaaaactttcgtaggtacttgactgttaagtgtaagtcattatttatgagtcattttcttattagtatatttaaattatttttaaaataaaaatttaatgacctagaccaattagtgattgtcacgtgacaatttacttaattacacttaatagtcaaatatatatctacaagtttcaaaaataacttatgtattattactgtcaaaataattaaacttatattattatttgcaactgagagttaaattaacttaggtatatatgtcgcaaattactctaataatattgtaaattataagtaactatatgtgcattatgcatatacataagttatacataaaagg

SEQ ID NO: 172608 - DNA, 536 bp, Cannabis sativa
gtgttttgactagcacttgcattaactgagaatggtatcaaaaagaaccgttcatacttgcatctaaagcaatgttgatatattacattcttgatcttaagaacggtaaagactggctgattttcaataagtacatccgtagaatgtctaggacttcccgaacgatgatggggatacatcctttatacagaaaaataatttagctgaaacttagttagttgttcaacttccataattagatgatgttgactatggccgtcatgatgtggacccaactgaagttgctaacatccatcgtgtgaattctcggcagttagataatttcattgtcaatgaggacgatgagggtccaaatgaccaagacgacaatttcttagatttggagagtgatagtgatgataatgatgtatatgtaactgatgatgatggtgatgatgatgaattgtaatgatatttaaatagcaatgacaatcatatatgttcttatttaatatgttttaaatattgttgtctattttaaatctaaaaatatgttc

SEQ ID NO: 172609 - DNA, 571 bp, Cannabis sativa
gtttgttaaaaagtgttgaataaattatttaaaaacgaacaatcaaacttgtaacaatatctggaaagtaggttaaggtattttatttttaaaataaatatttaaaaaatatcttaacttgaattcaaattaggttgttagaaaatatttcaaaaatatttaaaatctaacaaactcctaattatcttaaatttaaatttaaaattcaaatatacaactaaattgtaaataaatagtttatttaaattaaattaaatatctaataagataatataatatcttaatttaaaaattgagatatttctattattatatttcagatcttataatttaaaaaattaaattttaataaaataaacatttaaaaataagatacttttattgttgggatattatcaattttatttaaaaattaaataaaataaaatattctaaatttaaaaatttaatggttagaaaactctaaaatatctattcaaactaaaattaacaacttttcaaaattttaggttattttgacaaaaatataaattttaattaagataaatatctaataagataaaatgtcaaa

SEQ ID NO: 172610 - DNA, 600 bp, Cannabis sativa
tatcctagggctttctaggtggttttaggctgaattatattaagttttaattaatcaaaatcatttattatttttattattattcattttctaagttaattgaaaatcaaaaaaaaaaaaaaaacaaaggttcctctctttctttgaaccctcatttcggccaagaaagaacagaaggaaacattgcttcttcatcaattttttgtgtgttttctagctttaattggaggaattaatctaaggtaaattcttttactcttctcctttggttttaaagctttattttaggctcatgtatgttttaattgggaatgggttctgttcaaaacctagagtttctgggttattttttgcaactgaattttgatgttttaagttgtttggagcttgcttgagttgaatttgagggctagttgggtggttgagcaagtttgagttcaagaactcaaagctttctcagcaatggcactttgtaattcttggtgtaactgttgtgtttgagctgtggaagatgtttagtttgttatatgacggtgttctagaaagtttggttgtgattggggatgatttgagtaggatttggggactttaagattgaga

SEQ ID NO: 172611 - DNA, 502 bp, Cannabis sativa
ctatccaatcaggttttctttctttctttactttttataattatttatctatgaactcttattattaataataatttttgttaaaatatatatatttacaggtttgaatcgatgtggaaagagttgcagattgaggtggttgaattacctaagacccaacattaagagaggcaacataagtgaggctgaagaggatttgatacttaggctccataaactcttaggaaacaggttccaatttagataatcatcatatatatatatataataatactatatatatatattaatttcacttgtataaagtcatgagtttagcacatttctttttagtattatgttctgaaaatatattttatttagttataattctttgcaaattcacattcttaatgtagcatgtacgtcaaacactccactttatattaaattaaaaggctactataaacaaaattataaatatatatatatgtatatatatatatataattttgcaatagta

SEQ ID NO: 172612 - DNA, 958 bp, Cannabis sativa
atctttcttgaagataagatctcccatcattaatcaattaacaattatatctttgtattaattattatagagttgaggaaaaagagatcaaaactcataaatgtcaagatagaataattattatgatcaacatattcaattgaagtagatgtaacatattactataaatagaatgttaatatttagaaatgatatacaaacatatagtgacatcaatcaagaaaacaaataataatccaatatatacacacacacatatatcgatcatatcaatatggagaagagtggtgtgatgatgatgatgatttgtatagtagttgttggtcttgtgtttgttccatctcctatttttgcaatctcatcatcaaatcaggatcatgtcatgatgaacggtcaagatggaaagatggtgactattatggaccgtgatacccttttcgaggtactattgaaagaaaggttgtcacaaaataatcaatgtttgggcagaggctgtgctccttggagtccttgccaacctggttgtcattgtgttggacccgcaggtgctattggagcatgcatttaaaaatataaatataaatatatatagatatataataataatgtcaatgtaatgaataataataatgcatgttatatgtatgcatgcatgcattataaatggcttttatgtttacgtacgtatagtatataaatacttatatctacatatatgggtataactatatgtactttttatcatttattttctttatctttaatcaaataatgaaataacattatatatgcagtttttttattaatgttatatctacatatgggtacaattattttgtgttgtatagttatatattaaaggataaattgcggcataaatatttaatgtttttgattttatacacttacatacctaatgtttatttttggtggaaaatatacttaatgttacaattct

SEQ ID NO: 172613 - DNA, 523 bp, Cannabis sativa
atcttccaaattttcactaccattatcagtgtttgcttcagtttcatctgtgtcttctggtgttgtttcttgatcaacagcagccttttccaactcgatttgagtactcacattatcatagctttgctgacctgaaaaatcagaaacagtacctttctcatttcttttaaaaggaaaatcattttcattaaaaattacatccctactatttacaatcttatttgtttcaagagagtaaagtctataacccttaacaccatttggatatcccaagaaaatgcatttaatggatcttttcccaagtttgtcttccacagagtgtgcataagcagtacaaccaaaattttttagatgagacattgatgggggtttacctgtccatagttcttcaggtgttttcagctcaattttcctatttggacttctattaattaagtaacaagcagtgtacaaagcttctcccaagaagtgtttcttcaaacctgattctaatagcaaacatctaactttatttaacaaagtt

SEQ ID NO: 172614 - DNA, 858 bp, Cannabis sativa
gaaactacatgctagacagaaaatactgatatagagggtcttaagtggctgccttccactcaaaagcaggctgggttatgtgctggaaagggataaactttgcgatttgtgcggtgaaatgccagaaaatgaagttcatctgtttagagactgccactttgctcgttgtctttggtttagcagtccatggggcgtcattaatagtaacttgggctctttgagttttgaagactggttcctttggttggttgacacggggaatgactccctcatgatgtttggtgcttgtgtaatggaacatatttggcagtgcagaaacaagctcctttttcagggagtcaagccgaatcttacaatgtccattagacagctgcagcagaggttcaacgagtttaaagaaattttactagatgaatgcaagctgactctgtctaccacggtgaacacctgctctggtgtcatctgggatttgcacgtcagagtggatgcctcggtcttggatgggatggctggtatcagtgtagtggaaatgcaggtagaccaagatgaaggaggggtaattctgcagtccgaggtagtggagaatgtgttagctgctgagcttttggcaatctttaaggctctctcttgggctgtggaaaggaaagctagatctgtgttggtggagtctgattctctggttgctgtgaaggccttaatggcaaaggagttgccgtttgcttggggatcttaccctttgttctctgcttgctgtaatttgtttgtttttttcgatcactgtgttgtgtctcatatctctcgagatattaactctttagctgatgcttgtgctcgttatgctagagtttcgtgtgtgaa

SEQ ID NO: 172615 - DNA, 904 bp, Cannabis sativa
  modified_base (524)..(527): a, c, t, g, unknown or other
aaaaaaaaaaaaaaaaaaaaaaaaacaaacaaacagaacataaactgaaatagagcaattatttattttaatcaaataaattttgtttgttgcaaggcatggatcttttttttttttttttttttagaacaaggcatggatcttttcaatacatataaatataagaacgaaaaagaaactatatatacaaagggtattttgtttgaaagatgtgagtagcaccaaattttttatctttccattcttgatttttgtagtcgaaaaaaaaatgtagtctacgtgctatttgtcattaatatttggaattttaggagttaaaacacttgaattttaaatattttagcactaaaccacaaaaatcgattttttggaggcaaaactacctaaactcccattccgttttgctctgtacccctccgtccaaaaattacagttaagtgccacagtggattgtccacgtgtacacacttatacacgtgctaaatttttagtggcccacataatattaattttaaaaaataatnnnnaatatttaaaaaattaaaaaattagaaaaaaaaagaaattttaaaaatattttcgttttgggatattggaggctaaaccatccaaaatttaaattttttaacacttaaccacaaaaatcgattttttggagacaaaactacctaaacttacattccgtttttaacacttttcctttttcttttcttcttcttcttaactaaaaaaaccctagcacccaatcacctaccccacgacccaaccttctctgactcccctttgacacactctctctcacgatacacaacgctggccttctccgaccaccccatgtcagacgggccacagaactgaaccccacgacccaaaaaatcccaaccccgatctgccctcttctctc

SEQ ID NO: 172616 - DNA, 604 bp, Cannabis sativa
tgtaacagaggcggcggcgtgtatgcgtggacagaaggagcctcgcgttcgagtgttatgagtttttatttatgtgaaggaaattgtgtctaatcagatatacatgtaagcctcctagtctcctactcctcttttcttaataaatctatttcacaaccactattatttttgagattttttcgtttttaatcaagatcgataacaatattacaaaaaaaacttttacaacttgaaataaataaatatataacccaaataaaaaaaaatcacacaaatacttcttacacacactttcaacctacgatccatgcttcttgagattaaaaccttcgtgtgaaccttcgatcgaccaactcagcaacccaacacaactaaaacgaagcctaactaaaaaaagaaccaccattaatttcagcaacttcacttgagaagacgaccagaatcaatcataacagaggttgtttcgaattaatgaaaaaaaggtgcaaaaaaaaagctactgcgaaactaaaactcaaccaaaaattcaatttaattcgcataaaactaatatcctaacttcaatttttagatccatgaaatgcaaatctcaaaaagttgaact

SEQ ID NO: 172617 - DNA, 1134 bp, Cannabis sativa
gaaggaaagagagggggacctagcttttgtgtttgattttctttcaccctctcttaatatttttctttctcttcttcttttcttgtttcctgtacttagacattaaaaacattgttgaactttaaaaaatgggcagcagccatgaaagataactttttagcttggattttagtttttgatttgaatatgtgctagacttttgaggcttgaatggctatgaacttctatgttgggtatgataaatctttaagcttactgtaatatttttgcctttgttcattcaagtgactttttcattttatttgattgttatatcttggccatgaataacaattcgctaagctagatcttgttccagaggtgctagatctagtacttcaacttggatggagcaagagaaattttagatttaggtttttctttgtaagtagaataggaatatttcatttaccttgcataacttaagaattgatgtttgaatagtgttctgcttgctggtttgatatagaaatatattgagctaagtggtagaccttaatttgtgagttttggaaaattctcacaagcctagaggaatttatgttatctctgtgcaaaatgctggagtaatgttgaaccgatactgtaacaactggaaaaaaaacctaactagaaggaattagctattcaagccacttttatcattttacatttttttttctcgcaagcaatttttctaacaacagtagtattaattttagcaagtttaattactatcatttttaattctgaatcattgctcaactattttcatgttatttcctcttacttttagttgtaattagttggttttacatcaaactttgtttgcaatccccgtggtgacgatcttacttatcactttattacttgtttgactacgtatacttgcatacataattttcacaacaagtttttggcgccattgtcggggattgaaactaaaaattgtgtattatcaactattttacaatttattttctggtttgaggttctattcccattttagtgtgctgaatttttctttttcaagtgtaatctagtgcatgaacgagcaagaagaagaccttgaacttgctcctattgaccccgaaattgaatgcactttcagacaaa

SEQ ID NO: 172618 - DNA, 563 bp, Cannabis sativa
catgccactagtcctggaccattagcctcggctaaacctttccaaagaaagcttctacagattgtattgactctctgaagaactttctttggaataatcatcaattgggcccagtacgaatggatggacataagcactgagttaactagcactgctcgacctgcatacgatagatttcgagagctctaaactcttattctctgcaccatcttttcaataatgatctcacattctgaagctggaattcgccttgcacataccggaatccccaaatatttgaaaggcaaactactcttgctgaaaccagaaatcgccaccactctattaactttatgttcattcatttggaaataataaattgatgacttagtttcactcgggtataaacctgatgtattagagaacatttttaggccttgaagcattctataaatcgatacataatctccatggcaaaaatgaatcacataccttagcttcccacatctttcatgaaacttgaagtcttcttctgtacccactttcattaatagccttgacaagtattccattcccaagacaaa

SEQ ID NO: 172619 - DNA, 806 bp, Cannabis sativa
taaagtacatttcaaaatttgaatctcaacaacttcactaaatccacactatttaatattttatatttagtaggcaaaataaaataaagacctttaatttatttttttccttctttttgaacttttttgctaaactttaaatgaagaatccgactaaaattgtatttaagcttttcttttaaaatttacacgctcaaaatctatctattaaaaataaaagtaaaagtttgtgtattgttatccataaaatccattattttaacctagtgaaggaaaaaaaatcaattaagaagtatactctatctgtcatgataaaaaaaattaatttaattaagtagtgtactcatattttagttttatatatagatatacatacttttttttttaaaaaaaaatattaaaaaaaagagaaattagtgtagagtgttttatgatgttatgttaccatcttcatcctcaactttattccaatagtatttttatgacttttcatgaatctcaaagatcctatcattaaaaaaaaaaagtaatttatgatataaatattaacaataattagtaatttaaaaaaatatattataatgtatagaaagaaaagaaatactaatagaaaatcgatgcattgatgttttctattgatgtcattgttactattgatgtcattgttactgtttattattcgtcaaggtactctacacaaacaaacaaaaaagatttaaaaaatatataagattagagaaagattgtacactaaaaataaaatataagaaaaaaatagaaaaagaaaagaagaagatagaaaggaa

SEQ ID NO: 172620 - DNA, 842 bp, Cannabis sativa
  modified_base (426)..(426): a, c, t, g, unknown or other
accacacgtcctcggagaactcaaatcgatgttggttcgagtatgcggacacacgctcgaggagaactcagcgtgggaatggtcagaatcccaggacaaggaatgaaaagttcaactgtggaggtgcccaatttgtgggggagagaacttatgaaacggaaagtcgcagcctgagacgccgtctggaagaggcgcaacgtcgaaacgttgagttagaccgagaggcagcttcggccagagcgacgcaggggacgaacactcaaaatcaacctgaacctggagtgaccagaccgtgaggcagacttcatggctcacgaaccaggagacaggaaaaggcccaggaagaacaactcggggaaaatgagacaccctctgagaatcaagatgaacaaccagaaaggagacaaccggaaactgatgaacganaaatccctcatgaaaatgaggaggatcatggaactcagtcgggagaatggagatcactttctaggaatcaccagcgttcttcccaaacccatggagtcagaactcgtacgtaccttgatgggggaaatacaacaagccgctctcgggaggaaagaacagagcgtgaagaggcaagggtgactttgaggcgatccagaactcatagccgatcaactcgaagaggagaaagaactcaacaagctaatgatcgcgagaccatgggataagtaaatatgcgagccagttaaaaacaaggtctataatttagacgcagtcaatgagtaagatgagatctaccagtaattactcacaaccagatctgcgagaacacttgaattggaagaaacctgaccttcgccaacagcttggtccaaagc

SEQ ID NO: 172621 - DNA, 531 bp, Cannabis sativa
gaagaagtggttaattatgagttggtatgatttttttataatgcgtaatatatgtgtttgtatagacgttagattatacatgcatgctgaatatataatgaagcacgagtatgtatattatactgtgatgtgaatacttgcattttcaatgctttcaatctagtagcttttcttgttgagtcattgtgattcacgggtgctttgtggtgctggtaaggaggataggagctgtgttcggccatgagtcagaggtctcccagcattaatgtacatatcagccgtggtgtcttggcttccggaaagtaggatcaaccctttttatgtttggaaatataaccttacttttgtaataacagttttgtaacttgttgtaaaagaactttataaacaggggatccccgtattatggtagcattttgtgcgaaatttttattttaatttaatcaaaaagtttttaattaaatcacacatttcttaaactaatatatttgttaggaataagtttgtaaaagcacacatgtggcatccctg

SEQ ID NO: 172622 - DNA, 730 bp, Cannabis sativa
aaccaattcaccctgccttctgacatttcgctgggtgtccattacttaggacttagcctgcgaacccacaaggcatgcaggttagacagtggtcaaagtatgttcgagaccgcatttagggttttaaaacagcaatttactcatatatgcaatatatcttaaacagtttacaaaaagtaaagcttacaaaaccgtgaattgagctcgacactggccttgattgtacatatcttgacggtctttagtgaacaacctggtgtttctgataccaaactttaacgcccgcatttgaatttgctaaacttaaaagctaatttttaatatataatatttaattaactttaagggtcgggatcccgagttacaaaacacattaaaaactttatctgctattacaaaactccttgaacatttttttacaaacgtcaggcaacaacaaaatacaattcaaagtattgtgagaccgaaaccctccaggttgcactgccgcgatatatacaatcactgccgagctccatctcacatttcctccactttagcttttcctttacctacacaagttagcaaactgatgagtcaacagactcagtaagatatgcatagcatatatataaacaatgtgataccggctttatgcttaagccgtcccgagctctacgactgagcccacaaaatggttaagaacgttgttaagggaagtacgaccactataccaaatgcactaaagtac

SEQ ID NO: 172623 - DNA, 503 bp, Cannabis sativa
aaaagcatataatcaatggataatgtattacagaatatatgaaatacgataataagataaatgcatacgttaattatagaagtataattaataaacatctaaaaatttcttattcaaatggagaaggtataatcttgtaaagatgtacaagagaattaatattatacgatatgaataaaactagtcagtagtgtattaaagtaaaaagaatcattaatatggaactgctaagtacaacttagtatacactatacttctagtgtgtgagattttgatttggatcacatatgtggatatacatatagtaaaggtgttgtgtataatatgattatgttgggattttataccctaaataaaacctatttcaatataatcttatttgctactaatagaagattagaagtcatttaagattacatgtcatttttatttttatggtttaatatagaatttttgataaatccagaacatatagttactcacagttacagtgatgtcatcac

SEQ ID NO: 172624 - DNA, 1196 bp, Cannabis sativa
  modified_base (432)..(432): a, c, t, g, unknown or other
tcaaacccaattgataacaacacactaaaatccatcgatacgtccgcccaaacctgcttgggaatgggtagtggttgaagcattgattttgaatctcagctcaaaaatcatagaatatagaaaacaagtcaggacgtttttcattaaacataactaagttacacgagaataattatccataaagtaacaaaatatctgaatccagattgagacaaaaaaggagaaggaccccaaacaccagaatgaactaacttaaaagggacactagcacgtttattgactcgaggactcaaactaactcgatgatgtttggcaaactacatgactcacaatttaatgaagacagcgtactatattggggacaaagttttttgagcaaaggaagggatgaatgagatgcaacaatttagattacgagtgagttgactaacngaaagcaaattaaaggacaaattaggtaaatgtaagactaatgacaaagtgagcataggtgtaggaacaaaaatgctagatccaagaacagaaaatgttgatccatcagctaaggtaacaatagaagtgggactatgaggctgaaaagtgaaaaagagattggaatttcctgtcatatgatttgtggcaccataatcaatgacccattttgaggatttggaaagaaggcatgcattaaaatttcgaatttgaaggaactagcgagcatcctcatggagccatattttccttgaatcgtcttttccttgggaggattgtcagtcaagtggtcatctttgtcaacactccttagatacagtcgaatcgtcttactctactcaaaataattcgagctaatcaatttatggtttgtgattttagacatcacgggaaccacatcagaaacaatgacaaatttcgaatctgattttatctctgccataatctcaaaagcaaaaacaattgaaagataaaaggaagaaaaagaacgccaaagaatgaacatccaaacacgaagaaggcagaaaataccaaattacaactttagacagatgcaggtgggcttagaagaatcgagtaaagaaccggtaaaagaacgccgtcgaagacgtcatcacacgtgccttcacgagctggcgcatgggaatgtgcacaaaaacttcaggcggcgcgtgagccccacgcgtgaggaattcggcgaccgaactttggggtttggtagatcg

SEQ ID NO: 172625 - DNA, 583 bp, Cannabis sativa
gggtttgggtcttggtctagtcccgggtcttggccttgtttgattctgagtcccggtccaattcttgggtcctagttccgagtctcgggtcacaagtccctgtcccagtctcagtctggatctctttcccaatctcagtttgggtcccagtcccaatcccaatttgggtccaagctcgggtctgagttcgggtttgtgtctgggtctgggtcttggtccgggtttgagtttaggtccaagttctagtacaggtccaggtcctgggtcacaggtcttgggttctaggttttggggcctaggccccaggttagggtcaaagttttggtctaggtctgggtctcgatcctattttgtgtttgggtccgggttcggttcttgttcatagtcaagtccttgtctaggtgaagttctagggtcctggtcccaattctatatccaattttaggtctcgcatctgggtctaggtgcttgtctggaactgggtctgggtttcagtcctagtacaattcctagatccaaacagcttgggttgaagcccaaggtcccgggttctaggtctagatctgaatcccaatcttgggtc

SEQ ID NO: 172626 - DNA, 615 bp, Cannabis sativa
acgtgtagtcaagatggtgaaaaataggctgtaattcaaggggcaagtgtagatgctggtgacaccaatggtggcaacttaatatcacaacctggtattagtgaaacctttgaaggtgatttgagtagtagtgttattaatgtgaatggggaacataagggttgtactcatgagaaggaggctggagatagtctgaggtcgaagatggaagggtggaaatcacctaaaacaaagctgagagggtcaggatcctctaagaaaatagatgacagccaagtgcaaatctatattgttgttgatggatagtaacaacatatgtagctggaatgtgaaggggtttaataaaaaaaagtaggagtctgtggtggatattttaagagttaataaaattggtgtcggagctcttgtggagaccaaaattaaggggaataaattgcaggagaagatgcttaatagttttttttttttttaattgggattattacatcagtaacataatagaggccataattcttattgggtagaagaagaggtttgttcagatggaaatcatggaggagtcaaagcaacatgttcatgttggatatattttagcaggatctagatttactaaca

SEQ ID NO: 172627 - DNA, 599 bp, Cannabis sativa
ccttaatgcatgagggaaggttttgccacattagtgtggtaatagtctaccccccttagattgtattaacatgagaacagagaacaattctctctctaaagttattctttcgatccctttttcagtgaagctaaatcactttttatagggccttaatgcatgagggaaggtttcccttttgcttacaatgtataaactaggaaggaatattaattacataattaaaatacacaaaataggaaatttgaacaggttgccttattcctctgaatcaatcccatgattgcagggattgtcttagtgcttggacatcacgacatcattctgaagtagctaagtcctgataagtagtctggaaagtcaaacttgctcttgcttggataatctaccttccaccctgctcaagtaacaagtagatatataatatgaagtctgttcgggacatccatttccatccagatgcaaagaatgcaggacacgtgtcacttgtgtattctgccacgtcatagtgtaaaaaatgagatacattttccccctaactctccacgagacttatgtggtcgcacatggacttaactcggtctagatccttatctgaa

SEQ ID NO: 172628 - DNA, 619 bp, Cannabis sativa
aagttttgggtctcggtcccggtcaggccctgtttttggtccaagtcccccatctaggtccggatccttggtctaggtcttggtccaggttcgagtttggggcccaagtccccaatctaagtcacggtttgtttctgaggtcccaggtccgagtctcgggtcccaagtgccggtcccggtccaaattcgggttctagtcccagtacaggttcaaggctcaatccaggtcttagtctcaggttcgagtttgagtctcgggttcgtgtctgagttcttgtacgagtttgggtctgggttgtggtcttggtctgggtctagatctgggtttgggttttggtccgggtctgggtccgggtcttggtctgggtctgggtccaagttctggtacggctctgaaatatggtccaggtcccgggtcacgggtgctgggttccaggttttgggtcacaagtgttggcacaagtctgggtccaggtttgggtctgggttcgggtatcgatcccaatcaaggtccgtgttcggttctgcatcaagatctagttctgggtccaggtccaattcctgttccaaggtcctaattccagttcttgttccgatttcaggtccttagtccgagtct

SEQ ID NO: 172629 - DNA, 601 bp, Cannabis sativa
gagcatcccccatacacacatcaaacccctccgtcggcccaacaagcccaatagaaactttcttaccagtccatttacgtttagagtccataaaaactattccctcctcttccaaattcgacttactatcccctaccgcctccgaacctttacttccattattttcgctcaaaacagctggagaaaaaataatcccacaattctctccattattcgtgacaatcgggttgacagcaccacccgatctctgaaaatcctgccctgcactcatcgtcgactgcctgagctcagccaccatcgtgccaccaacattggatgagcgaggtgccccagaccggagccatttagcacccatcgcatactgagttcgtagtgatattgctttcataaatgtgccatatggcttaacgattgttgaggttggttgaataaacaatcgagagcaaaactgatctgacctaatatcatgtaattgcacccatatatcgagatgatacaaaggaacctcccaaggaacatcccctggtttcaaccgttcaaagatgagaggagcaattttaaacatccaaggactcctatccatcaccctttggatatccat

SEQ ID NO: 172630 - DNA, 778 bp, Cannabis sativa
tgttgtctcattttggcacaccacaggttattatcagtgatcaagacacacatttctgcaaccactcttttgagcatttgatgcaaaagtacggtgtacttcataaagttgtattgccttatcatccacaaataaatggccagactcagttagctaatcgtgaaattaagcaaatcctagaaacgacagttaaccctgactgcaaagattggtcttcgagacttctcgatgctctctgggcatatcgactgcttacaaaactcggctaggtatgtctccttatagaatagtctatagcaaggtctgccatctgcctgttgaactggaacataaagcatactgggctgtaaaaatctcaatgcggcaggccttaatcgtaagccttagttgtcagaaattaaggagttaaagaatgatgcttatgacaactttaggatctacaaggctcaattgaaagcgactcatgacaagcagatcctaaggtaggaatttgagccaaatcagcgagtgtatctttatcaccctcacttgcatctccaccttgagaagctgagagatggattgggccatatgttgtgaaaactgtcttccccacggtgttgtggaggtcaaagacccaattgatagaaagaaattcaaagtgaatggccaaatactgaaacactacatagagagggtgccccagcctgttgagtatatcatcgtgattcaagtgtaccaaccctgagtatgtttttctaattttgtatataggtttcttttcttttctttttttttt

SEQ ID NO: 172631 - DNA, 695 bp, Cannabis sativa
  modified_base (654)..(660): a, c, t, g, unknown or other
ctagccatctggagtaggtgatcgatcacgcatgttttgatgaagtttcatccgtgcattgataaaattcttggtcacctcaaaccgagcttgatgtgacgccatcccaaacagttcaatttattgtttcatgatttctgctgccgtgagagtattagcaaaccttgtcttcaaggtatcgaccatgctagatagcataaagtatcgagctttgttgttagcattcagccaacgctcaaacttttccttgactgccttggtctcattctcacctggctgctcatgagcctcttcagttaacacaaacagagaattttcacctatgagagcaatattaatgttctctttccatttggcaaagttagctccacacagcttgttttcagtcaacagtgacaccatggggttgttcgtagtcatattaggtactacaatataaataaatagaaatcaaggttcaatacaaaatcatacacattcagaaattatgaagcacttagcaagtaggaatgtcaagtcaaaatacaaaaacaaacaatcctaaataatttccaaagtttccaacaaactaatacaatgtcccgtttaggcgagagtcaaagatatcattcattagcagtcaactcatctaaaattcgaaatttctgcatttannnnnnncaatttcgaaattgtgggaaaagattaataaaata

SEQ ID NO: 172632 - DNA, 545 bp, Cannabis sativa
gataaacatgtaatagggataattcccaactttttttttgtttatttatttatttaatttttgtgtggcataaaaaaatataacttacaagttaccaaaactttcattatttacctccttccaaataaatttttcattaatattagattttggccgattttgatcttaggctagtataaatttttcctaaatgctagcttttatttgcattaggttttttaacttctcattctttaacaaaagcttttttaaaaggcaccgctaatatttagtattctaggtgtcatatcgttatttgtgcaattaaatatcgaatctcatattattttgatatagtaacttttaaaaaatattgttcattataaataatcgtaagacgttacttttaaatatcgaacattattcatactcaataataatactcataaaatttattggtatttaattttggtgggggacttatatataccactcaccatggtccaaacctaattaaacaactataaatataggagccacaattagctaaaggctagttcttttcc

SEQ ID NO: 172633 - DNA, 804 bp, Cannabis sativa
  modified_base (593)..(599): a, c, t, g, unknown or other
catacaaacgatatgtaatgcagaataaactgtaaacatatcaaaactgtatatgcaacgaaataatccagccattgatgtttgagcttcgatccctgcaatagctttggtatgggaattcggacttcctcgctctctcaactctctttagatagaattttgttgttttgaacagaatgagtgaagagctcgaggaccaagaccttatatttataggtgagatactccattagtttctgcgctacattaattgttagaatattttgacaattaattaaggaaataaaatcgaataatgaatattgaaatttgataatatatagaatattacgcaattaatattgtccagatttaataaatataaatattcatttatctcaatattaattcctttattttattccataaataaaactattttaatattctctcacttggttagtatttagactaaaacattaaaacccagtgttcctcattatataataaacacatgaatcatagcgacatgtcctcattataagtcaagtattatcttcaatatattacaaattatttactatagaataatttactttatgtggcaatgtacnnnnnnnaataaaccctaaaccttatgtttatttaggtcctctaaattttctcaaatgtaaaattaacttgcgcataaatatgacaaaataacaaaataagagttttattaattataactttatttttacaaaattacataagggaaccaagtctcattttctctacatgatccttgaatttatgagattgcaagccttttgtcataggatc

SEQ ID NO: 172634 - DNA, 552 bp, Cannabis sativa
gggtgttcttataggtattgggcctggtttaactgtggactcgggagtcgggagtcttacgcagcatggtcaacaaagtctcattgtgtgttgcatatacattaaaacttttatttaagaatatactcaggctaaactattatattctaattgagagagattataactaaacaaaagtatattagtaaaaaaaataccaaaaaacgttatatgtaccagcaataacaataagaaatctttaatacctattattaaaaaaaaattatatatatattattgtttatggtctgataaatttgcccagtaaatataataacagtttaaatgctcacattaggtcatgttgtttttagtttgaccgctcgcggagatcaagacgatgacgtctttggttataattactcacggacttagtccttgagtaactttcagattggtaactatatagttactcatactttcccgatcattaaaagaacgttgtgatccaccttcgtctctcattttcctatgagcttcggttaatgtaatacccggaattaagaaatggat

SEQ ID NO: 172635 - DNA, 647 bp, Cannabis sativa
aaaataaattccaacaatattttgtattacaattataaatattttaaatacgggatcccagtttatgtaaaaagttatttacttttgatttaagggtaattaagtaaagtttgaattaatcatgattttctacaaacccgttgattagcaacagattgcatacttaatataaaaatcacaataacacgcctaaactagtagggtgttacatgacgagtatccattaagtactttcatctctgaaaatgacttgcaaataatttgttttgcttttttggacaatgtgaaacaagcaggaggcaaatataatcgttcacctttcttttcaggtgtcagagatagtctgatacccatttcaacgagatctaaacgactagctaaaacatccttagttttgttgggaatatcaagtaaggtaccgataatactctcacacattatttttcttcaatatgcgtgacatccaaaaaacgtcaaaccagcaaatgtttccaatatggaagatgaaaataaattactttctttgaaaaaaaccatttgttttctcatatatttgcgtctttccatacttaaaatctactggctctacttcttggagaatttgttcccctaacagtgacaaaggagccatatctccctctttagta

SEQ ID NO: 172636 - DNA, 1058 bp, Cannabis sativa
tagccactcctcttgcttcattaacaccaccagttgtccgatctcctccacctttgacccctcctcatctccccgccactcctccacccataagtgatccacctctgactacaccttcacccactactcctcctttggactggactgttgctatagtcgttcgattttgcaaggcgtctctttatcttgagctccttagtgttgggttgggttaggttggctaggatctgggttctttcaatctggtgcgtccatttctggtgagttcatttgggttgatctgggtctttcatcctgggtggtcgtttggggttccacccctaggtagggatgttcattaaacatccgatctaatttaatctacacgatccaatccaatctaatctgcaaaatacagatatacacacttgtgcggattggattgaattgaaaaatgtaaatccatacttttgcagattggatgtgattgatatgtaaaagtaaccaatctaatctaatctacacatatttatataattttttttattatatatcaattaatactttaattcaaaaaaaaataatttaagaatctaatacatataatataaatataattcaaaacttaataaattaaatttatattctataattatatatggataatttaaaacaaaattaattatttctttctacatacactttttttttcttttgaatttgctattttatttattttaatttgttgttggagacataaaaaaacaattatttgttttgttttgttgttagttatgtaaaaaaattaataaatattaaataacttaatataaaaaataatcgatccaattcgcacttttgcatattagattagattggatttgaattattgtgtggattagattagatctaaaatataaaatccgcacttagtgcggatcagatgcactatgaataaaataatgcggatgggattggatgaacactcctacctctagggatctggtatcttgtggtttgtgtgatggtggttttggtgaggtgacagtggttttgaaaggagagagagagagagagag

SEQ ID NO: 172637 - DNA, 1953 bp, Cannabis sativa
  modified_base (846)..(857): a, c, t, g, unknown or other
  modified_base (939)..(940): a, c, t, g, unknown or other
cgaagtgccttcatacaattgctgttgtgcttgacgttgctcgaacccaaacattcgaatctttgactaagtttccgatttcctttatgtttttctttgtatgtttacactttgaatgcaactatgctgtagaaaaatgcttaggaaacgctagggttaaaaacttcagcgactcttctttatcatgtcttcatgtgggtttacagccatagagcttgtctctgaaccgcattgcatctgtctttcatcttgcttattctaaggttcatgaatgtttttgccctaactcaagaaaacttcttgacttcttgagttcttacttttttttagacatagtcgttctttaatctgttgagtactcctggtcggcatatttgtgtgtttattgtttgatattccgtccaacactcatcttgtgtgttatcttttgtagatgaactcaggtgagtcttggaaactcaggcatcagatcgaccaggatttgcttcaacttctgaacgaggatcatcctcatcttcgttctagtcctccttttagggaaggacattcttctgatcttgtacctagccataggatgatggctggtataaagaaaaccacgcgtctggtcgatgcttctaatcctcaacttgctcgacttgccactatgcccagcgccgaacaagatttggccgtcctgatcgaagagaattgtgagggggacgctgaggtctaggaggttgaggagctggacgatgcacgtccgggcagtccttccgaggttgagggagaggaagaggttgaacccccaaattatggggagtacaacgaggctgggcagccagtcgatgctgacggagacgtccnnnnnnnnnnnntggactacgtcagtgaggagcttgctttggcggttcctcataggaggcagggtgccttgggcgccaggtgggttagtcctcnntccaagattacagaggcgcgccttcaaactctcgaccaggacaggtacctaggcgagctacactgctacattcccgcccacgacaatcgtgccacaaaccctaataaggggatgtgcgcctggtcaggggcccatggccagcaagggcgctgatgcccttgcacaagtacttcagggatgtggcagacttctttggtctctgcttggcccagatccctcttaagggaatcaagtatttatccgccctcttcatcctctacgcttcccaaggatgggatgctccttctccccacgaggttgcttggttctttgatctgaagtctacccccaaacaaggctggtcggggtagttctacttctctcagccaggcttcaagtggttgaccggcacggatgccaaggccatcaaaaaatagggcgttttgctgatgagtacttcatggtgaaggatgcgagcattacccagactaagtttcagcagatttcgacatatcaccatcctcccctcactcttgctcttagggatagagcttagaaacttgcccagttgtcgggggaagacagggatattatccagtaaatctttggtgataatctagtgaagtatgggctttaccccaaggacttttctcctaagtccgtggcggggaagaagaggacgtttgatgctggccaacctgaacgagatcacaaggaggatgagctgattcaacgtaagcgcgaggctaagttgaagggaggtgttagggccaagcagtatgctcaggaacctttgaatcctgaagatgaagtcgaggacgaacaggtgaccccactaaagcggaagaagaaactcccagccacgcccatgcctattgaacatgcagtttgcataagggagcccatttcacctgtttggccatatcccccttttgccagaaaagggaaggctgtcatgtttgagataagatcaatgtcaggtgatgatggacttctgagtctttgggcagtcaccttgcattttactttacttt

SEQ ID NO: 172638 - DNA, 1070 bp, Cannabis sativa
  modified_base (252)..(255): a, c, t, g, unknown or other
  modified_base (972)..(998): a, c, t, g, unknown or other
tacttgttgattttatttaaatcgggattgggtgtgggttagggtcgggttgtggtctgagtttgggtttcaaagtttaggttggggtgggagtccaaaatattttttttttaaaaaaaaactatttaaaaaaattttgaaagtaattttttttttgttttcaaaatttttaaaattttaattctctattaaaaaattgaaaaataaaaacaattttatagaacatgattttaaaaaatatttttatttttnnnnttttaaaaacaaaaaattgattaaaaagtattgtcaaatgcactctaaatttattgacatttaaatagtttatgttagcgcagattttcgttaactaaaattaatgagcctttatgtaataagtatatcacataaataataacaaataattaaatgactccagatatttttacgtaattttgcagttaaatctgcatactccatgagtctatcttattatgatatttttgaatacaggatacaatatttaattgataatctcttttctctcaaattcttcgtccctttttctgtggaatctgccctatttataatgcccctatttataagaatataggttggcagttattaacttgggatcagcttaaaatataactgttcatgaaacgtggacaattcccacgtttcacttaattacatgtaggataatacttgataaatgcttaactatttcttgttcttatccttttcgatagttaatgctgatttggacaattatatctcgcttaacctgagttattctccttgtccatcttgatgtgaaaaaaaatactaagtgttagtagatggttcgcttcgtcaagtctcttcagttagaatcacgaggtgactatctcgctatacgtaatttgaggttgccctgtgtgattgtatttattctacttcaaataaatgagtatcttctttggtctgcgtaatacgtacattttgggaacnnnnnnnnnnnnnnnnnnnnnnnnnnnaatcatagatacggaatctatagcatctatctggatatagaagtgaaactccttcaagcttggctaaataga

SEQ ID NO: 172639 - DNA, 709 bp, Cannabis sativa
aagtttaataagtataatgagagtttagagagtataagatgtagaatcgagggttcaataagatctatgggtaattccacctcaaacaatgagattgagtggatgagcacgctaagctaaacccatggtcgtataactctgattgttattaataaaacagaaatttgcggcaattttttttttatgttttaatttttttactcttatcccttcactttttttttttttttttggaaaaatctcttaaatttactttttaaattcaagatttcagttagatattaccattaaatactaattggattactactgtatcgatcgactttgagactaaactgttacatatacacaagtgtatacagtagtcatccagttgatatttaacactaatatttaactagcgtgttaaatttacaaagaaaaataaacataaggagattttgccacaaaataaataaataaaagagattaagtgtataaaaattaaaatataagatgtttcgccacaaactactctaataaaaaagttgttattttaatatttggccaccaatacttatatattttgtcagatattattattattttgcaagaataaaattaattatgttaaaaacatcaattattaaaaaaaattataataataaaaaaaagaatattggcggctaaactacttgaactttacggtttgtaacagttaaccacaaaa

SEQ ID NO: 172640 - DNA, 1076 bp, Cannabis sativa
agacagcagagaagtaaaagaatcccttcccacagcagctaaactagcaaaccccaggcaagaccaggcaaaatcacaagacaccagaatgtgccattccgtttcagcatagacgccacacataggacaagtgctatcaaccaataccttcttaatacacaagtttcttttagttggaagacaatttgaggctgccctccaaacaagatccttggccttaggaggcactttgagggtctagagattcttcaaaaacacatttatctctgagttggccgaatggtgtttaaggtcttgaagcaaattgtatacacttcgaactgagtataacccgttcttctctgcaaccgaataccacgagtcaactccaccattttgatttatgagaatgccgaaaattatagccgcatcttcaggggaaaaaaagtctttcacaacatcactatcccagcaacgattattaacttggaagaggctattaacagtaaaattctcaagaccatgaaccatgggaacgggtactgagtgatcagtaacaggaagccaagggtctgtagtaatttgcactgtagtaccagggccgattctcttcctcagaccaagctttactgtatctcttgcaacaaagatactactccaaataaagcttgggttcgacccaagctccgccaaaagataatcaccatgagggtagtatctggctttgaaaactttgctagcaagggaatcaaacttaaataagagcctccaaccttgtttatatcaagcatggctagattaaagtccctcaaacttcgaaagcccataccactatcaaacttgtgctttgtcattctatcccaactcatccaagtgatgccgctgccattgctgttagagttattcgatttccaccaaaagcttgccatcatccgctctagttcattgcaagtgccaatcgaaaaaaggaagacgttcatagcatacgaagggagagattggaccacagtcttaatgagaacctctttcccagcccgagataaaaatctaccctcccaactattgatcctcttcctcattctctctttaaggaatcc

SEQ ID NO: 172641 - DNA, 714 bp, Cannabis sativa
ctctcgtgtatttagagaaaaaggacatatgaggatcatatgtgataattgtagaatgatttgatttgagaaacttatgatataggtgagcctaaatgaaattttctatctaccttgtcctaagcctaaacattaaaactcattggtccttttgatttctaatcatatgttgttgacattaatggataaggttaaataatgcaactttattgataatcggtttgtggatatgttggaatgactttgagcatgtgtacgaatttctaatggtttttgacatttgcgagttatatttattcttctacaagtttgagagccaaggttagtattgagagcaattggattaaaaatctagttttataacagttgaatcttgtgagtagcggtggtgtcgtgtaaattgaattaaggcttattttgtgttcgtttattttagattagtgtcaatctttactcgagggcaagtaaatattaagtttgagggagtttgatacagtagttttaggtgcattttataatgtattttagaggtgtgtttcaatcgattatattcttttgtgcaaaattacacttattttctatttgtttcaagttcaaatgataaaatttataatatgaattcaaaataaaaagaaacatgttaaatgagatgaatatggaatttgaacttctaggatagaagtagtgaaaattttaagttttggatgctcaaca

SEQ ID NO: 172642 - DNA, 881 bp, Cannabis sativa
  modified_base (742)..(743): a, c, t, g, unknown or other
ttttttttttttttatatatgtgctatatgttttaacattgttttcaatattacaaattattctaaatttcttaaaaataaataaaatatttatcaaaattacaatatataatatagtttttttttagttttaactaacaaagtaacaatattacaaaaatacttccagctggccaaataaataaatatacaacccaaataaaaaaattacacaaataccacttacacacaccttcaatccaggatccatgctttttggcaaccattgcgcaaccacgcagtaacccaacgcatccgaaatgaaaatttaaccaaaaagagaattaccattaattccgacgacttcacctgaaaagacgattagaatcaatcaaaacatgggctgtttcgaattcataaaaaaaaagtgtagaaaaacttctacgaaactaaaattcaaccggaaatctagtttaatttccataaaattaatgtcatgactttaatttccaaatccatgaaatgcagatctcaaaatgttgaactggagttcccaaacaatccaactcaagtataataaaaaaaattacatcactactataataaattatttatctaggtgtagttttgttgttttctaaatttttaatggttaatttgttcatattaaatcatgaagagacatgtagatagagatacgtacgtgaaaatactgttctaatttttattgtttcacagaagttgcataaatattttgctaacnnttatttcgtctgattgaaacctttgtatgatgcaactttcggctaactacccaacaacattcgtctgattgaaaccttcatctgatgcaacgttcggccaaccacccagcaaccttcgtctaattgaaaacttcgtct

SEQ ID NO: 172643 - DNA, 558 bp, Cannabis sativa
taaagtccaaattatatgaatttttcaaaatgtattaaaactgttctgaacattcaatcttatccgttgatgtaactacattaataaatgtacatggatatacaatggtagctaatttaactcttatactatcaaaaatataaattaattcatgacatctcaaattgtcaatttatataaattcgtcataatagtgtaaataataaacaaattaaaaaaaataattattcatttcgaaaaagaaaaaaaaaataaagaaaaagttagcaaacaaattctgttttgtgacagatgtcaactatcaacaaattttttattcctcttgactgttaccgagagaagttatgacaggcggagaaattatagataattaatttttagcctcagaaaaaaaaaattacttaaaaaaaaaaatcaattatatgcatacattatataattttgggtggttctataatgcacacctttaaaataggtgtactgatgcacccttaatttatttcgacatctagaagaagtttttagtctaatttttttttcatatttatgtacattata

SEQ ID NO: 172644 - DNA, 528 bp, Cannabis sativa
atatatatatatatatgtacagtaaaaaaaaactatatttaaaagcattagaattatacatctaactaattaagtaataaataatatattatcatttaaatttttaaaatctctctaattaagtgtatccaaaatattaagataaaaataaataaaaaaaaaggtcctttcttaataatttcattctatttcatatttgtttgtaatttttttaattctcctaaactcaacttttcaaaaaaatatttctttttttttgtcataaagtattttttttttttaccgacttaaataatgatacaaatagttggaagatagtttggtctcattaaaaatggtggcaatatgtgtttattatgggtcatgttcgtgtcaacacatgtattacaagtatatggtgaacacaacctgtttaaaattgtatcaaaacattaagggtaaattgcggcataaatatctaatgtttctaattttatacacttaaatacctaatgtttatttttggtggcaaaaatacctaatgttaca

SEQ ID NO: 172645 - DNA, 748 bp, Cannabis sativa
attgatagaaaattttatatgactcatgttatgttttttcggatctatggcaggacaagttgcacgttaccagtatgaatacaagagaagggaggccgcttctatcaaaatccagactcattatcgtatgtgtctttctaggaatgcatatcaaaagttgcactcgtcagctgttctaattcaaacatgtatacgagggatggttgcacgtagtgaccttaagttcaggaaacattttattttttatcttttttttatttattatttttttgttatttagcttttgttttttttttatctttttttttattatttattatttagttcgtcataaagaatttaaaaattaaatatctatgtattccttttcctattataatttggacattcttattctaatttatatcaaagctagctgagaataataatatatgtcatcaactcaaaacctatttatatctcatctcttctctcttttttcattccaatatatataacagaatcatataccctctaattttttttgttggccgttacaccacttcttttcttctccagatttttctctctgcttattctcccaagtaatgttaatattcatcactttaatattatatttttttattattttttttggataaagataaatatgaaattttaatgttaatattcatcgcttcttcatttgtttcttttaagaagaatatatcttcatcatgcatctctctcatatttcgttcttatccta

SEQ ID NO: 172646 - DNA, 567 bp, Cannabis sativa
tttttttttttttttttgaaagccttctttctatagttttaaaacaaaagtgtaaagtattaaagaaaaccattcaacaaaaaaaaataaaaaaaacggattaaatgtactttctaaattttattttactagtttctctatataatatttaaaagcattgtctgactgtatcaatcatggtttgcactttatttatgtgataattttcttttccttcctttactaatgtgaggattttctatataagttatgtgacactatgaaaaaagttgtcataacatagtcaatcagtagggatattctttaacagcgtctaatcttcttcatttcctcttgctaagtggtggtgtgctttgtggcttttaaaagtttcaagcaaatttaagatttttgcttagcaaattttccaaaatatccttcttactagttctttctcttatcgattgcatgccccaatttgaagttgttgtttctattgtggttggtattgttataatttgctacatgtcttcttcctttgtcctctatatcaattcaaatttggaaactttttgatttttggaaact

SEQ ID NO: 172647 - DNA, 1053 bp, Cannabis sativa
  modified_base (800)..(801): a, c, t, g, unknown or other
gggcataaaacccaacaaaaaatttacttttttttttctaatactttcaattatttcagtataaaagcaagtacgggtcgaacccacgaggactatgtttattcaattattcaaaaattaatgacaagagttagaaaatgggggtttaaagattgatagtaaaatacagatataaaaaagacaaaaaaaaaacaaatttaaagtgagattatgatatgagaaactagttaaaggttattcgccaccctcaaaaattattcataattcctattaaagaatgtaatttttagtttccaatcaaactattaatcctgcaaataacgctgaagcagtcaattatcccaatctccctattgtatgtaatcaaggcaaagcgctcaataattaactcttttacctaagcagtaaatccacaaagccagcaatttatttaggctaatttggatttttgcccccagaactttgacatgtacaaaattatgcccattgaacttttctggtcgtaaaaaattcccctcaaactattgagattgtttgatttaaggacttttgtctaattttattaaaaaaagtctgacgtagatgaaaatttagggggcacaattctatacatgctaaagtttaggggacatgattttgtaaatatcaaagtttgggggcacgatttagtatatgaacaatctacatattagcgaaattgaatgaaattagaaaaaaaaatcctaaaatccaacaatctcaatagtttagggggagtttttaacgacctcaaaagttcaggggcatgatttgatacatgnnaaagttcagggggtaaaaatccaaattagccatttatttaacttagataaagttttgagatttatggagatagactaatctagacaacaaatcaatgaagcatataatttagttaacctagattctattcatcatcacaattaaaattgcaatttgttacaaacacttagaatcctagactattaggtgaatagtaatcctaagatgacggtagattaaagtaaaacctaatttagcggtcgtctaaacaag

SEQ ID NO: 172648 - DNA, 581 bp, Cannabis sativa
cttcataccttccctctttctctcagtcctctctccctctctctctaatctctccctctctctctaactctcaccaaacccaactgatacccacaagcatagattcagaccaaactagacccagaccaaacccacgaacaccataccaccttcggcgcaactcactgcaaggacaaaacgtaggataaaactgaggaagatatcgcaaaaccgcaaagagaaatcgtgaaacccaaagccccaaaatctatgagctcaaccactccaaaatccctacccatcgttggagttctcaacttgcttattttctgcgtgattttttttttctggtttttgacaatgacacaaaacatcgctaaatactgcaaaacattgcgaaatcattaaatatctctaaatgtttctgattcacaacatccctaaatacatcgctaaatgttgcgaaatcatacccaactttttatgaggattactgatgtttagcgatgtgttgtgcattttttagtctcatatcaaaaataatttgctaatgtcattgctaaatacgcaaaatatcgccaaatatcgcaaatcattgctaa

SEQ ID NO: 172649 - DNA, 816 bp, Cannabis sativa
tttgattctgctaaggttaataaatttatcaatttttaactttttgtaaattatagggtaaatactattttggaccttgtattttacaaaagttatagattggcccatctattttgttaaatgacaaaatagaccctgtattttttaaatgggtaaaaataggaccctgagcttaatttttgatatttttttttaaatataaccaacttgaagacagttcctaacacgaacagatacaaaaaatgtaaataattttgtcataacacttttagatcggattttaattaaattttattttgacaaaaaatcagttcaagtcctatttgtatcattttagaaaatacaaaatctattttgtcatttaataaaacaaagggtccgattggtaacttttgtaaaacacagaatttcaaatgttatttatccttaattatatgtctattctactagtgtggacaaccaactttgctataataatatatctttttatgtacatatttaacttttataatttaaagggaccaacacaaatttttaagaaatttcatataacttagcatgtcgaaattaattaggattcaattaatctgcacgtgtatataaatatcaaaacaagcataagtattataacaagcttttaatttaaatcttgattttaatattctaaattattaaacttttctaaaaatgtataagggtctcctttgtaataatcaggaccggccctgggcataggcgggctaaccctacgtctagggcccactcattttaggagcccaaataaaaaaattgtcttttaaaaatatacatattttt

SEQ ID NO: 172650 - DNA, 536 bp, Cannabis sativa
gtataacaggctgcccagttggtgcaggccctgatggaagaggacacagagatgacccagcagcatctccgccacgagaagtctaggccaccttggacctcactcatcccgtgggctcatctgaaggtcccctagtgaaaactctcagtctggaagacatatctgcaaaaagaaagtagcaaaggcagagagaaatcataaacattcaatgcaagacaagaatatggtgttgttgactgaggttttcggcaaccaatcaaataatataatgagaagagttgtagaaagtttaatgcagaagattttacgtggttgagacattaatgggcctcagtccacgagtttttggtatttaagagagtgtttattacagagaatgttcttggtggatctctctcctcttttctctcttcgattccttaactaaaatcgatcaaccccttttcagtctttttctgggtatttatagtgtttttctggggggatccctaggaagggataacttgtctttttgtgttagcttcttaggggcacat

SEQ ID NO: 172651 - DNA, 798 bp, Cannabis sativa
ctaagcttttggaatatgatgacagatttagcactttcaatatggtacaatcaatataaattaatgtattaatttttatggaagatcactaatagtactttatagtaatgctcattcttattatgtgttttattaacaccatccacttataatagcatattgctattagaatagttaggtaggatatctcaaataatataatttaataactattataaaatatcgttaacaatttataagatattgtatcattgtatattacacacactgattacatgctatcatgtagggatgaacatctaatccaattcaacatttttttgtttatcccatctaatctaattagaccttaaaatccaattcaattactaattaaattggatcaattttttaattggatatccaattatacacttaaattttaatattaacataacaatataaagaaaaatacataaaaattaaatatcactctttatataagtttaatactccataaacatattatcgttacaatataatgcaactaaaagtttcaaataattaaaacaacagcatttctaaataataaaatagaacaaaatatcataaaaataaatacacaaaataatcaagtgttacaaagtcaacacaaaagaaaatccaataaaaatataattaatagatattatattttttaatatttttttatataaataaatataaataacattttaatatatatatatataaatgtaattgaatttgatcattttttttatagaattttgagattgacattcaataaccgatccaatc

SEQ ID NO: 172652 - DNA, 951 bp, Cannabis sativa
  modified_base (349)..(351): a, c, t, g, unknown or other
  modified_base (880)..(903): a, c, t, g, unknown or other
gaaaagatcaaagggtgaaaacatgactaggagtgagacaaactacaagcattactcccatttcaagaaggagggttgaagacgtgtcgtaccctcactgatctttcacgcatgaaaaatgtcgtgcatgcgagagtcatgttgaatttttatgaggcatgctttggcagttcttccattccaggaataagggtgtaaagcgtgtctcacccccagtgatctttcatgcacaaaaaacttcgtgcatgcgagagtcatgttgaatttttctgaggtaatcattgacttctgcgagggaaggctaaagttgcttaaaaattcaagagatgactttgcttgaaaagatcannngggtgaaaacatcactaggagtgagacaaacttcaaccagtccttccatttttgggaggagggatgaagatatgtcgtaccctcaatgatctttaatgcaagaaaaacattgtgcatgcaagagtcgtgtttaatttttatgacgcaaggtttgacttccgtgagagaaggctaaagttgcataaaaattcaagagatgactttgctcaaaacgattaaaggttgaaaacatcactaggagtgagaaagacttcaagcagtccttccattccgggaaggagggttaaagacgtgttgtaccccttgtgatctttaatgcacgaaaaatattgtgcatgcgataatcatgttgaatttttatgaggcaagcttcggcttctgtgaggtaaggctaaacttacataaaaattcaagcgatgactttgtttaaaaagatcaaagggtgaaagcatcagtacgagtgagatagacttcaagaagttcttcctttcttggaaagagggttgaagactgttgggttttatgcccnnnnnnnnnnnnnnnnnnnnnnnnttagttatcaatttagaagtgaagcatgtttacatgtatgttacatgt

SEQ ID NO: 172653 - DNA, 1384 bp, Cannabis sativa
gtattgatgtaaaatttatatatttaaaattgaattttaaattgatagaaaagatagaaaaactcaccaagaacattctctgtatatgaactctcattaataacaaagactcgtggactacggctcattaatatctgaaccacgtaaaagtcacatgcattaattatcccaaagctcgcatcattatctcatttaattggttgtcaaaaatctcggtcaacattttagtgttttcattgagagctgtgggaagcattgttgggagaacaagaatcaaagaatcagagctgcaatggtagaaactcgaaacaacacacgccaaccttgcccccccaggatcctcagaacctagaaggtgaaggggctgcttcaggggtaaacgtggtttctgaggaatgagatgagacgaacgacgaggaatataaagaaaatttccatgggtatgatgcttacgacaaaggtagctacactgagttgctcttcctaaggcaaaaagcagctgatcacgtacgaggccgaactggccacccaaaaagaacagaataagaggatgcatgagttaatgttcgccatgtaaaaggctatggaaacggctggaatacatctctactagaaaattgggttttagtgacatacattgagtaactctaaaagtgtatagtgacacttcaacgcgcgtcactaatgagggtgactagaaagacaattttcagtgacacttcacacgtgtcactgaaaccttttgcattcattttccgcgtgtcactataggtatatagagtcagattttgccagactaaaaagttaacaaccacacacatgaagtgtcactatatctttttttttttctttttattaatatttttggagatatagtgacacacaaaaagtgccactaaattaaatatttttctaaaaaaaataatatttaatttaatttaatacagctctgtattaagaatttaaatgggtataattatcaatttaaattacaaattatataaacacattcagattttatttaagtaatataaatatatatataaataatttaatcaatacaataaactataaactttttttaactgaatcacactcatcaaaaaatacacatcagtgattcaaatattagaaaaaaaaatctcaatctcaatgttattgtaacaccctaactattataggcgtgttagcgttatttttaacgtattgtgcagctcgttgctaatcaacgagattattagaaatcgtgaataattaaaattttgcttatttaattaaaattcgaggatgccgtttgcaaaatacagttacaaaagtttactattaatatacaaaatatttgttgcctagcgactaaacagcaaaagccctgatgtctcgagga

SEQ ID NO: 172654 - DNA, 882 bp, Cannabis sativa
aaattaacatggacctttatatgtgacactgcacatgtgggccatattttaaggtctaaaattaatttttttaattttaccataaataagatttattatttattctgccaataaataataattgattaactctcattaatctattatttaacaaggatcaaaataaatattattttctctaagataatgtatttttctttaatattatttaagaataatattatatttaactaattaaaatagttttatctaaaaaaaaactaaataattaaatattattaattatataattcataattgtcataattaataaaaataataatttcacaaattactattttatccttaaaaatttattttccatagaaattaattctcactcgaaatttactcatcaaataaccatgtacaatattttatagaggtgactcaggaccatggagctatattttaaagctccaataaacacttgattattatcaatctcatcaacagaataagctagtttattaattttgttattactccactataaatataaaattgcactctttgacaatatagaattatattttacagaattcttacttgtagtctattgatataatcaataagcagttctccctccaattattagttcataattagaggttgtcaagttatcgttttatccttctaattatctcttgactcttttgtaccattaattcaatgttaacagttaatctataacttattataaatttagatccaactattaacactcctagagataacactgtgagggaactattaatatttaatccgttagaaaagcttagatttcactattgtataacatgttcccagccagtcatgttattaagctctcaaaatagaagt

SEQ ID NO: 172655 - DNA, 569 bp, Cannabis sativa
  modified_base (526)..(529): a, c, t, g, unknown or other
ggcataaaacccaacactttaaacaatgttttcttgtttttttattaaatgatagttgctcatagtcttgctggagcatcttgttcttttctaattcgagtgttcaacaagagcgatgttcctgttgaggtagaatcttatcttttagctgatttaacaaattaatagaagttatgtatttacttccaagaagataacacgtgcgtgttgttccaactagtaattataaaagaaacaataacaaaaagaagaatgtatattaaaattggttgcatttttaagaatagaaaaagctcatatttaaacaccactctattaattactaaatcattaaatgtatacaaagtataaatatagaactatgcattatattaattaatattataaaaactccatattaaaataccaccctattattaagttgtatataaataatatatacatgtaatataataaagagatatgagtaactttttattataaaccattttccttataaatataatttttctagatacttttacannnnaatttgttgtacatgaaatatttttcatcaaattatagct

SEQ ID NO: 172656 - DNA, 670 bp, Cannabis sativa
aataataataataataaattaagaccccttataaaaaaggaaaatttgttaaaatatacttaaaaatttagactattattttaaaatatactgcctttaaataaatactctaaatattctccaaacactctaaaatcccaaaattacccttacaatttaaaagctctcttctcccactctctctgtctaacttccctcctctctctctgttattcccatccagccccaaatctttcaagccccgactattcacgagctccgaccgaccaagacgaccctcgactgagaagacccatgacaactctcgacgacccacgacgacccacgagaagcacccaagacaacccacgaccaccgcattttttttcctggtttttgacccatctagcgtttattttctgcattttttaatttggtttttcgatgatgtcgcgaagcatcgcgaaatcatgaaacatctctaaaatatgtctccaattcacaacatcgctttttttttgtattgttttttttctggtttttgacgatgtcgcgaaacatcgcgaaatcgtgaaaacatctctcaatgtctccaattcacaacattgcgaaacacatcgcgaataccatcgctaaatatcacaaatcatcactaaacttcattcgtgacctcagatttattctatcattg

SEQ ID NO: 172657 - DNA, 503 bp, Cannabis sativa
ccgttatccacagatggagaaattagcgttcgcattagtaattacgttaagaaagttacgaccttacttccaagcacacaacattgaggttttaacaaactatcccttgcgacaagttttggcaaaaccggaagcctcaggaagattactaaagtggttagtagagttgagccaattcgacatcaggtacaaacccaaatcaacaatcaagggacaagcccttgctaacttcatactcaaatttccaagtgatgaagtagccattatcgcggacgagcaaattgattctgacgtaccaaacggcaaaggatggactttgtatgtggatggggcatccaattatgaaggatcagggggtggcataatcctcataagtcccaatcaattcaaggtacacgctgcccttagatttgaatttcttgcatctaacaatgaggccgaatatgaggctctaatcgtaggattaaaactcgctgttgagatgaaaatcgagtatttacaag

SEQ ID NO: 172658 - DNA, 572 bp, Cannabis sativa
gtagcgacagaagaaatccaccttgtccagccttgtattacacctgaacgagaacgatattcaacagccaaatcattttttgaataacgatagcacaacgggagatcccgatcaggaactatataatcgttcattgaatcttgataaagataaatcccatctgtttccaagatgcgagtgaacaaatcacggcggagaggtggagccatactatgctcgcatggaaatatattgttctttggttgaggaagggattctgaattcgaagaggtcttctttcttttacccatgggtcttaaaaaaaagaaaaatccatgagaaaaatgataaagcaggagataataatatgtgcatatgcaatacatcgttcaggacaactctttaaacaataaaaaaatcatcgacaaaaatcatcaacaaaaatcatacgacagagctatgaaacaaataaaggtacacaccatacgtaaatgcgattactatttcataacttggctaatatgctttatttatacatatatgtttataaataaacagagtctaattatgatttaaataaatacaataaattt

SEQ ID NO: 172659 - DNA, 1124 bp, Cannabis sativa
tctgtgagaacagcacatttattactataaaggcagataaagggaccttggaggagacaagtgagaaaagagacgagtaattttgtgaagaacaacaagatgatgcaaatgagaagagcgttgaggaattagaaaaactttgtcagggtttccaacagccaatgactatctttgtctgattgaatatcaaaatcagtatatccagtaggatttaactctccaccgaaatatacaagcatgagatctctcattctccaaagatacttgagaatctgctttacagctatctagtgtaccaaacttagactagattgataatgactaataatctctacaacgtagcatatgtcaggccttgtacacaacattgcatacattaagttcccaactactgatgcataagggtactttctcatgtcctcttccttttgaggagtttttggacattgatccttacatagagtaatttcatgtctagatggtaattgtcctttcttagaattctccatcgagaatctttctagcaccttatctatataagttgcttgaaaaagggctaatgttatcctctttctatctttatagattttgatccagagaatatagcttgcttcttccaaatccttcatttagaatttatcggctaaccacttcattacatttgataacatttctacattattctcaataagtagaatatcatcaacataaagaactagaaataccattacattacccttaatgtatttgcatacacaagcttcttcttcatttttttcgaagccatactctttaatagttttattaaaggtgatattccatgatctagaggcttgcttcaatccataaatagatttaagaaacttacacaccttttgatcatcccctggtaacacatacccttctagttgttctatatatatggttccatcaagatcgacatttagaaaaatggtcttgacattcattttccatatctcataatcatatgcgacagttatctaaagaagaatacgaatggatttaaacattgccataggagagaaggtatcttcatagtcgatatcttctcactgtgtgtagcctttggccacaagcctagcttcaaaggtctctaccttccc

SEQ ID NO: 172660 - DNA, 593 bp, Cannabis sativa
ttttggtttttgaaataaaaaattagtcaaactaaaaaactgccaaaactgtcaaaaaccgccaaaaaccaccaaaaattgtccaaaaccgccaaattgaaaaattaccaaaaactttacggtcagttttatatggttataatttttaaatgatcgggttataatttttgtaaaaaggaaaccgtaaccgaccggtcggttataaaattgtaaaaaccgaccataactgatcgatttttacccctatggccctactcatattgacataacttaaatagagatctctttaattaacatatttttttaaatatatatcatttataggtacctatatatacttcaagggttcaattatgatcaaatatgttatgtctaatttctctggtgagtctcttctagagtatcattttcatcacgattatcatttttaaattatcaatattttataacattaaggtatctccatgagcacctctagatttaacatccttaagataaatcaaataaacatttattaataatttctacattgttcatttacgcttcaggcgttttcaactcattctatctcaattttaaagaatattaatttg

SEQ ID NO: 172661 - DNA, 768 bp, Cannabis sativa
  modified_base (702)..(734): a, c, t, g, unknown or other
aagatcgcgaatttggatttcaaacttgccaaataaagtgtatttgatttgttctaataaaggcaaaaaaaaaaaaaaaggaaagtgaagtttcccaaagttagacaactttctataagagaattccttctcttacaagaagtttcctaaactaaaagagaccagctgagaataaatcttttcttagaggaaagtaactagaggcacaaaatcaatgtaataaaaaaaatttaaatgctcaatagaaatgtacattaattaaaaaatattttgacaactaaattgccaataaaaggcctaacattttcgttcttagttacgatgtcgttcagaaacctcaccttaaataccttaaattctcacccaatggggaaaaaatctcctgacgtggaaatctctttaccggttccgaccatgatccacaattacgccattactgagaatttcttcgtggtcccaaatcagcaagttgttttcatgggagaattggttagaagtgagtccattgttgtcttcgacagagagaagaaatcccagttcagaattctctccaaagctgtcgaagatgcctcgaatatgatctaggtcgagttgccaaaaacccataacacaaatgcattaaaaattattcgataaaaaaaataaaggggttttttcatttttacacttcaagacagtatttttttgtatttttacgaaatnnnnnnnnnnnnnnnnnnnnnnnnnnnnnnnnncaacctaaattgcaataaaaaaatcgtatagaaa

SEQ ID NO: 172662 - DNA, 964 bp, Cannabis sativa
  modified_base (372)..(374): a, c, t, g, unknown or other
agaaagtagatgcttctttatcgtccctaattgtatttctcgctttcattttttcgtaaaaaaaatcaagtcccatcacacccttgattcacttcttataatttctcatcaatttttttcacttaaacttgaggaattaccatcttacagtcaacttgaatctattgatttctacttatcttaacttgcatcaacttctcttgaactgacacaattttaaaatttccaaacacttacagttaactaccgttataaagttaattgatgtaacctgcacggtagaggaaacattgctcatactaggttctcataactaaactagaaatacccatttcccaaattctcaactaataataattaatcaaagatcannncttgatcctgaagtttcttttctgtgtttggtaaaagtcttgataaacttatcaaacacattcagaaatatacatacctcaagtatattctacgtttcattggcaatcccttggcaataactactatgccaacttatagtgagtcccccattgacaatgctaattcatcaacatcgaagaccctcgtatacttttttttccgtcattaccactaaggtttgtctccctagttcatacgccaccattgctcccttgcaatcatcaccatcttcatacttaattaaccactctacaacttattttacaatcaattatattgtttgttgtttaataaaaaacctaatttgtgatccaacattcaccagtcgctcaaatacgtgtccattaaatttcatctcaattcataagcttttccctattctgggtaagtatgcctttctataattgcttaataaagtaatattttcccataatttcaatggtctccctacataccacattgactattcagccaattataaagtactctccatcattacctaatcaccttaagtaatttaggtaatcttctttaccttagtgataccact

SEQ ID NO: 172663 - DNA, 693 bp, Cannabis sativa
atgtatcgagtgtggcgaaaaaattatctttccttaattttataattgttattatatttttttttttgaaaaaaaaaataaatcatttgaaccaatcacggactgacacccttatttggtacataaaatattgataataagattgagtgtagaattacatttaattagaggtcattcttattattttttattaattaaggttatgggtgtaataattttaaattataagaagttttattacaaatattacaataatttaagtgaaaaaaattaatttctaaatgattcttatttagtaacaaattacaaaaaattaattaatgattattagtaatttaattttaaatataattaattttaattacgattttataaggaaataaagtatcaagttactatcaggttacaagttattaattaatttatttattttaagttctaaattaatcaaaatcattcaatagtgatccaatgactacaaataaatgtaactatgatggtgacagatttgatgtaactattaaaacctcctcctaaataataaatagtataaaaggatatttttttattttacagttatgtcgatttttttataggttgttgtgggttgttggtatatagattttattatacaatatatttctattttgttgtattgtatatttttatttttagatgataattattttttat

SEQ ID NO: 172664 - DNA, 586 bp, Cannabis sativa
tattttataatggcacatattttattatcactgacaattaatatgttgttttaagtcataaagttaaaatttattgttccccatagatattgttacaaatgttaggcatttatttagtgaagcaattataatttgtgtgaaaatctcgaattttgagttatatatatatttactcttcattaatctaatccttatatttataatgattatatttagtagaaatctcacttattctccccttatatttataatgattatatttaataaaaatcttcattcttggtaatacatatttctataattgtgtgctaattttattttacatgtcactgtataattactcttaataggtttatttgatctctctttaattatctcactttttaattttgtattcagtttataaatattgttgaattaattaattaagaaaaatattactataattcatcaactaataaaatatctaaaatatatacatttttaaaaaacctaaaatatctaatgttaaatttaaatctttattaatatatatatatatatatatattaggaataattacataaggcaccatttttttgtaaaa

SEQ ID NO: 172665 - DNA, 731 bp, Cannabis sativa
  modified_base (690)..(691): a, c, t, g, unknown or other
tataatgaatcaatagtcgggctccaaggttagggttgaagttgggttggggtcttggggattttggtccaagtgtttggtcggagtccaagtccacattgaggtccaagtcttggtctaggtccagggtggggccgacatcaaatgtctagagatgagatcgagatcaaaaatatttatgaaagagaatatcaaggataaatactacttagtgttttacaaaaattacagatggaattttttgtttttgttaaatgataatttagatattatatttttcaaaatagtacaaaataacactttgcactcatttttctatcaaaatgaaacttaataatgacttaatttggaggtgttacaaaactaattgcattttttctatttgttcgtactagaaaatgattttaagttggttatgttaaaaaaaataatcaatgaaaattgaactttaaatactattttgtattattttaaaaagtgataattacggtaaaagtcttcaaaaacttgaggttgatgcagaatagtctccaatctcaaaaattgacggtaaaaatacccaaggtcgacaaagttgtgagtccgttcatacccaatctgttagtgtaagtaataagggtgttcaacgaaatttataaacctcccaacctgaataaaccgtccaaaccaaactaaataaaccgacaaaanntacaacccgaaataatacaatgaaaatccaaatcgctcaa

SEQ ID NO: 172666 - DNA, 658 bp, Cannabis sativa
gaagagaagagaagagaagaaatgcaaacttggtcgtcggaaatgctggtcagcagcaagcgattttataccatccacccgtgtaaaatcgctgtacgtcggacatgctagtcagtagcaagcgagaagaggaggaagaagaaagacgagaagcaaaaaaaaatattatgcaacttggtttatttacttctatcagttagggtttcaattgtaaacccttattataatattttcttctatttttttaattattaaagtatgtttacagctggttatttttttttatctttttttctcaaaaaaactttacagcagtgttttttttttaatttaagattatgatatagtgacgcgccatgtgtgtcgggatatatttatccaatcgcgcctagcgcatcactataaaccagtatttttcaaattaataaaattaaaaaaaaaatagattttactctttagtgacactctatatttttagtgacgcgcattaaaggagactaacattgaatatttagagtctaattctgcaagtcactaaaaatcactctaactctttagtgacacacaccttttatgcacgtcactaaatagtatcactaaaagaccaaattgtggtagtgacattataatatgtagatgagtagccacattttttgaa

SEQ ID NO: 172667 - DNA, 573 bp, Cannabis sativa
tttattaatttattttaatttaattggaccccattcctataaaaggagagctccctttgctcattattcacatcttctattctctctacaaggtcatagcttctctctctttacacttagtcattttttcttgagttctcttgcagagcaattagctttttgtgataataaaagctctaagtagacatagcttcattaccatcgcgatatggaaagtgaactattataaattttggtgttccctctttagttcttactttttctatttgctgctatcacttatcagacgatacgaagttgactattttttagcgtcaacaaagtaattatacattaaataaattaaaaaattttatttgcacctcaaaatatatatctttaataattttaataatttttattttacataaaatatatatctttaattaaattaattttttttaatttttttcttccaactcaaattcttaaaaaatatatcgatcaaacaaaaataaattatattttaaatattataacaaaaaattatataaaattttattataaaaaaataaaaaaaaagttatacatgat

SEQ ID NO: 172668 - DNA, 621 bp, Cannabis sativa
accagcagcacccccagtgaatccaccagcaacatctcaactttcaagcaacactcaccctatggtcacacgtgcaaaagcaggtgtacaaaccaaaagtttacatcagttctaaaacaccattgacactgcaagaagccatgaaagacccgaaatggaatggagccatgaatgtggaaatagtggcgctcaagaaaaatggtacctacacagttgttcctctgccacctgggaaaagagctatagggtgcaaatgggtatacaaaataaaagaaaatgctgatggtagtgtttccaaactcaaagcatgcttggtagcaaaaggatttcatcaagagtatggttttgatttttctgaaacatttagccctgtggtaaaatctccaactataagaattatcatcaccattgctctctataatcattgggacatcaaacaactagatgtgaataatgcattcttgaatggcgacttgcttgaagaagtctacatgcaacaaccacctggattcgaagagcaaggtcccaacttggtatgtaaacttcacaaggctatttacgggttaaagcaagctcctcgtggctggtttgacaaattaaaaacatctctcctacactacg

SEQ ID NO: 172669 - DNA, 786 bp, Cannabis sativa
agtgtaggctggctggccacacaatgtctacagactagggtttggctggccatgctcctgctagggtctggtcggtcattttcctaccagagtctggcaagttatgttcctaccagctttggcaagtgttggctagtcttagtataacatttcattgcagaggtcagacttcctttctcaaagaagaacctccttactctaaaagtcacctttggccggccagcttgtgcccaaaccctggtcggccatatttgctcatcttgacaagcctatatactccctttggtcagccaggcatagttgtccagctttttgatggcctgcttaactcctcttgcttgtttcttgatgattctaccatgccttgtaaggagacttcgtcctgctattgacaaggctatattctacgtgtcctcagtcttggcttacgtggacatgccacgttaggtggaaaaaatttgagataacaattgcaattcatgaggaaagtcgagaatgtgtatggttaatatcaatgatacaacatatttgagtaacatgtggattgagatctaataaagaactaccaataatttttaagagaatggtgatatcgatgttcaacaaattcgatcaagtgataatcttgtagacttattcacaaattcattaccaacatcaatagatagttcacaagattagaatgtatcgattaaaaaatctccatgaatgccaaaatgagggggagtaatttcatactgcactcttttttccttgaccgagttttgtcccactaggttttcttgg

SEQ ID NO: 172670 - DNA, 546 bp, Cannabis sativa
tatagtaaggaattcttatatactccaaaggaaaaagaaattgttctcagattaataaacaagttggtctaggaattttgtggtgcatcatacttgctttttgagcctctgtggtgttaccaaggattcaatgtttattgtatcttacacgggttaggtttcttttgtatggcttttcaattctggtctggatgaaagcgtggtctcttttcattttcagatcctaataaaaatttgggatatgtgaactattactgttgaaatatgcaatcttttgctaagtcaggacaaggttatgcttagagtacctaaaatatcaaatatggaagctgtatgcagtcttcatattaaaaaattggtgtagtgttttagatccaaaatggaaaactgtactagtaagtagatttgttttcaatgactgatcaaataaaattaaaacatgtttgaacaaaattggggcattccgagaatcgaactcgggacctctcgcacccaaagcgagaatcataccactagaccaaatgcccgctgatgtttatcttgcat

SEQ ID NO: 172671 - DNA, 761 bp, Cannabis sativa
gcgtattgaatacgctttcatttcggcgattgtaattttttgagaaatctcttaattggcaataagagcagtctttttaccttaccccgtaagttaatcatcattgatcaataattaatattgattaatggttttgctaggctcgctataaacaggcttttttttagtattcttcttcacttcctccatttttaagaaaaaactttactgaggttctaactttctctcccattcacgttgtatgccctctttgtctttcttgtattttttcgagttccaaatattttttcgaaactgagaccacatttgtaaagaacgcttagctttaatttgaaaattagcagataattaggacttaattatgaaaattatttattagtatagaattattaatttatggtgatttatttgaatttagaatgcattttatatgacatatatagaaatttcataattttgtatattcagtgcccgacaacattggaacgtggtgtttggttattagaatcacatccttgtatttttagtatagcggggcaatatagttagatattggaaatgtcgggaatagttgagattttagaacttaccaaaatacccctaagtagtttttataatggtttgtgtgggaatgggcattatggtctttttggccttaagggattttgtcttttagtgaaactttaattgatttttaattaaatcttttatggctgatattagaataccaaaaccaatttacatcatttactaaaattaga

SEQ ID NO: 172672 - DNA, 668 bp, Cannabis sativa
gcctaagccgtctatctttcttctccttcttcttcttcgaattgaggaaagtgaatttgtttccttggagtttcagtcacacccactttctctctttctctctctctctaatttatttgtttattttaataaataataactacttaatattctataatggcataatttgcatatatactccaaaccataacagaataactcataaaagtattttttttttaaaaaaaaattaagaaaatcgttacctaaaacaatggtgtgtaagatagaaaagaatttggatttattatactgaattactgatattgaaaattcataaattaatttaaggttaagtctggttgaattttatatttcgttttgtttgaccaaatacaaatatgtgtttatgtttatgacgtgtattttgtttgtttgatatataagaagaaagaagacttgtcaaagtcagagttgttgctttggagtgtttagaaagtaaacactatacaactttctacattaatatgggcccaggcccattccaatttaatttgggcctaagtcagtataagcacccgaaacggagagtggcaagttgaaaaataccacttttattaatcaattaattaaatttacctctaattttatatttaattaaaatatatatctttttatatgtattgtac

SEQ ID NO: 172673 - DNA, 540 bp, Cannabis sativa
aggttgaggcactgcaagaggaccctagtgccttagtctcaaaatttcttcatcttgctgacaagtacgggcttactgaattgtgagccgagctttctctgatgaagattgtacgtgtcttggagagcttcgatagacaaacctagtggctttgataccaaaattgtaacgccctaatgttaaggcacgctacagtgattttttaattatagagctatctttgctaatcaaagaacattctcgaaaatcgtgtcaaattaaaacttttatactaaatattaaactttataaactttacataatcatttacaagttccaagatcctgcttctaaacctttcgtaaaatatacaaaatacgtaatccaggtcgcacagcaactacaaaataacaaccccaaatgtcccgataacgaacacagcaggtcgcgccgccatgacatgtacaacctcatccctgcacagactcactctttttcacctttcgcctttcctttacctacacatggaagcaggactgtgagttgacacactcagtaaga

SEQ ID NO: 172674 - DNA, 837 bp, Cannabis sativa
cggaaacattctctgtaataaacaaccatttattaataacaaagactcgtggactacgactcattaatgcccgaacctcataaaaactatctccattaattatccctaagctcttattattacgttatatatttggttgccgaaaacctcggtcaacatcaaccaacatcaacaacaacaacaacaataataataataaaagaaccagttgtacgtgatacttaaaataatattttaattgtttttgaccacgtttaaattttttattaaaaaatattaattaattttaaacaaaggtctactttacatttttttttaaatgataactttaatgtcaagtatcacataattataactaaagagcattgttattgggcaccagtggtgcccaacacctttcataggtggtaacctacgattggttaccgatattccctaaatcttatttttttaagttatatgggatctgctacttaattaccaaggaggattgctttttagcatttctcataactaaaatatcacatttgttttttttttctttttttaattaagatatttaaaaaataataatcacttttattaaacatattaattaataataacagaacaaactaataaattttctgcaatgtcttaaaaatattaaaaaaaaggggtaaaatttgggatgaaatctaagattaagatatagatttggaaaatacaattatgtacggaacaaacgatcaagacgaatagacctcgatcgttcaaataagcaacacaaccaaaacgagagaaataccaccattaattctgacgaaatcaactggaaaagaagacatgcaatgatct

SEQ ID NO: 172675 - DNA, 632 bp, Cannabis sativa
aaaattaaaaatatttttcttttcccgataaattgtaacaagtgttttctttactcttacactcgttagtgtttttttaaaatctccccctacacatctcaaaatatcatgaaatttcatagtaacaaagttaagatcgttgtgcatcacttctagagaaaaagtagttttcaaacgataaaaattattttaatcgaaatagtaaaaatctcacaattctgatagtgatatccctttgtgaaatgtggcccgtacccagctcggagtaattataagatttaggactcatttaatacaatgtattaaattatattatattgtactgtattaaatttagttatatataatatttgaatgtaatactatatatattttaatttacactaaaatattacatatttatacatccataaaaattaataccacatataattttacataaaaatattacataaaatacaatttaatataatattatataaaacaatacggtataataatattataatacacagaacaagcctttattgtgtttgctcagctaggtaattacaaaataactatgaattagagataattatattagaatattttatttatggaaattattttctaattaaggaaatgatttt

SEQ ID NO: 172676 - DNA, 701 bp, Cannabis sativa
  modified_base (391)..(392): a, c, t, g, unknown or other
gaccagcttgtagacgccacaactagccatgaaatcttgagttgtatttaggttaaaaccaaattaagatgcatccaccagattaggagcatataaacttcatgatagacttaggcctgtactgctacaaagtcatgccctttgggctaagaaatgtaagggccacatactagagacttattaacaaaatattgaaagaccttattggccatagcatggaggtgtatgtggacgacatgcttgtcaagtccaaaaaggttggggcatgtggaagacctagacaaagattcagggtcctctgcaagtacaatatgaagctcaacccccttaaatgttctttcggagtaggctcgggaaaatttctttgcttcatagtcaatgctaggggaannagaagcaaacccagacaagatccaaacccttttggatatgaagtcgcccaccaccatcaaggaagtataaagcttgacatgacacattgtttcactaagcagatttgtgtccaagtctacagataagtgtgtatgctcctccctattcgtgcgagaaggaagttgacggtttctcagtggcaacccacttgtcctaggttgagtcccaagatttctctcgttaccacgagggattttctactccctagtcctgggttgtcttcagttctcgtttctacgagaagactctggtaaatcattattttcatt

SEQ ID NO: 172677 - DNA, 546 bp, Cannabis sativa
aaaaaaaaaaaaaaaaatactgtacattattacagcttaccaacttacattaattatatagtctttttttttttttttttttgaaaagaacattaattatatagtcaatgaatacaatccttgatttatagatttacattttcaattaatcatacgctaatataatgtatttaattttgagtatggctatagtacacttcttaaagatatttataaggtaaacctttatttatttcggcatttgagagatttttttagtctaattatttttaatgatcgtgtacattataactatttaggacctgcatattttttgaaaattctgagtagtttacaatacccaaaataagattcaaatattttattgttcaagactgttttttaatacgcgtggtaatagttgattctaaggagtacaatctaaaacatagaagagaaagttgagagagaaagagagtgaaacaaagtgtatctttatatattaaaagtgtttatttaacgatattatatacttaaatttaacgattaggtttgatctcccgttaa

SEQ ID NO: 172678 - DNA, 589 bp, Cannabis sativa
  modified_base (120)..(121): a, c, t, g, unknown or other
  modified_base (505)..(506): a, c, t, g, unknown or other
tggtgccaagtagttaggttagcaacgcattgttgtatattctgaagtaattctagaatgggagtagaatcgtcattcatctaattattccgaattatagtcttacattcttcatctgtnnaccaaatattctcaaacctaaaacgtttcctcttcttggaaaacttttgtatttccaaattacccatcaacttaatcaatagtgctctatgatcggaatgataataatcgagatgagccaaaattgtttgtggaaataattcctcccacacctcattgaccattgcccaatctaatctttcctttaaactttcgttactcgcactttttgcctatgtataaagatcaccttcacattgcaatgaatgtagtgcacgtaactctaaagtgtttcgaaacgcctcgatttgtgcttcattttgaactcctcctttatttttatcttgttggcctaaaatctcattaaaatctcatattaccaaccatggtccattatatattatcnntaaatgttccaacatatcccatgttaatcttcttctagaaatattaggttccccataaaaaccacaaaagtgccacgtttgtg

SEQ ID NO: 172679 - DNA, 540 bp, Cannabis sativa
tcttattgttttatgtaggatatgttgaatcctgattttcgaagacgaccaattgcagaagctgttctgaatcatcgatttatgagcgtaaaatttcgttgattgttattagaagtcaaatcatgttcataaaatatcttttatcattaaagtactcccaatatggcttatgtaaaaatagtctcaaaacacaatgaagtaactaatatacacacatgatttataataggttaatattttgtgctatgccctgatattcttttttattttggttaggtttatttttatatattctaattttttttttattttagttaagtatattttaacttgtattttttttttcttttgagaacaatatatttttagttgaataattaatttatttttttggatgttatttcataaataaaattatttttgattaaaaaatgtttagtttaagtatctatatatatataaaggaaaagtatgaggcggtgacgtgacggtctaaaatctctctaaagcgattttttttttccttaattctctcaattt

SEQ ID NO: 172680 - DNA, 513 bp, Cannabis sativa
cttttcaaatttctacaaatatataggttgtttaattatttataacattatttataaatttctgattagtaaaatgatataaaataccatttttctaacttataattcataaataataaaatatttcaataaataaccaatttatgaatttgaaaatattatagttaagatatctataaaaaataggaaaatttacattccagtactttaatttcattctttttacaaaaatatggtgctgtcatttttatatcaaagtgtaccgttttgggtaccgttttcaatttaattcactttaatttttttttttaaaaaaaaaaaactgaatgggacgtgtgtgatgtgtgctgacgttatcacatcacgtccttcacgtcttccattttctgcagacttcaacttttcacgcgactgattttttgcatttgtaattcaaattgcagtcggtttaaaggtttataatcattattttcttttatttttatattatattttaccatttttatggttttt

SEQ ID NO: 172681 - DNA, 807 bp, Cannabis sativa
ttattgtaattacttaaattttaaatctatgtctatataaagaaagagataagattaaaaactctaatgactcattctccttttctctttctttatgcaaatttcaaattgggcttcaccataaattttaaaataactccacacaataattaaaattagtttttaaaccattttaaattatataattatttattgaactattctcaattaaattttaaagcacgaaacataaaataaatatatgtactttgcatatagttttttttttaataaatatatataccaataaataagaaaaaaaaaaattagaaagtaataaattagttgtgtcagatagaagcaactaaaagtaatacagtttcacacttcatcaaaaataaattccttaaggtcatgtgttataaatctagaaaaaagagaaacaacttaacaaataattttgggattaacttacttgtccaatactatcaaataagacacaacaatttgctcttcaatgacctgaaatcaagaacataattttgtaaagatcatatgtgttccaataagaaccaaaagaaaaatgcatggaaaattaaaaaatattaagagctaaaaaagaaaatacatatacgtacacataatatacatagaaaaatgagtacattaattaacatctgccacaacaaaactaaaaaagaatgaaagaaaactacatgtatatacataaagcactaacaaaaacataatttaaaacagagcaaatatatttatatgagagttcatatatatatatatagtagctagtaaacatttgtaagttgaaag

SEQ ID NO: 172682 - DNA, 846 bp, Cannabis sativa
ctataacacacaaaatacgactctccaaaggctcaacgtcgctttccacagcttcggaacacaaacaccaaaattaggaaatttacgcaaatagcatatttaatatatatatatatgcaattaaataattttaccaatatgtaatattataattaataattcaatttcataattaaacgctatttaataatctattttgttattcttaggcggtctttacaattatccccccgttaataagatttcgtcctcgaaatctaacctgaataactctacatattgagtcctcatgtcaaactccaattcccaagtagcttcctccactttactattcctctagagcactttaaccaatgctatggttttgcttcgaaggaccttttccttcctatctagaatttgcattggtcgttcatcataagataggtttagttgtaattctaatgcctcgtaactcaggacatgcattagatcagatatatactttctcagcattgatacatggaatacgtcatgcacggttgataacgatggaggtaaggctaaccggtaagcaacttgtccgaccttctcaagtatttcaaaaggtcctatgaatctaggacttagtttgcctttctttccaaagcgcctgatccctttcattggttaaacacgcaggaagacatgatctcctggctgaaatgtaatgtcccgacgcttgggatcttcataactcttctgcctgctctacaaagcaagcattcgcattttaatcttatctattgcctctcttattttctggaccaactcagggcctaagtatttttgtcctcctgtttcatcccagtgaattggggatcaaca

SEQ ID NO: 172683 - DNA, 661 bp, Cannabis sativa
aactaccaatcttgacagcttagcccgccaagatagggtaaaataagaaaaaaaaaatacaaattatcattaattttatttttcccttccattatatatttattgtaagaatatacattaaaaaattacaatacatcataaacaatatatctaacaccaatccataatattcaactaaaatttgtgaagacatcacaaaacatcacaaaatctgagccaaaaaatagaaaaaaagaattcaaatattttttttttgaattccaatatttaagagttacagaaatatattgttggcctactttatagaacatcaacaagtctcatttgagcctaaaagacaattaaatagacctcactatttctttgactacccttttcaatagctccctgaaaaatgacatataatcaaagttaagaccaatatacatttgtaagcttgaagacactgaaaaaatacattgtataaatcacttcattcacaaataggtgggcacttcacttcaaaatcacatcaactaattcaaaataaatttccataccatctttaattcaaagcaattttagcacgtataattctatacacaaacaattatatacatatatattatatgtaaatagatttatacatatgttcgtaatttttttgacagtttattgaaaa

SEQ ID NO: 172684 - DNA, 548 bp, Cannabis sativa
  modified_base (283)..(308): a, c, t, g, unknown or other
tatatataaaaatttccctaaaatttaacctttctaacccaaaacacagtaacatgtgtggatacaaacttcccacgatattctttcgatccaagtgaacgtacagtaccaaacacaaatgctaaagttcttttctttgacattctgagatgaatcagcttcgagatctcaaaaatcttaagggttagaaacaaacaatgaatcgaaacaataataatttaatagacactacaaaatttttacttttagtcacaacaaaagttgtaactaaaagtaaaaaaannnnnnnnnnnnnnnnnnnnnnnnnnttatgttgtgactaaaagatttgtgacaaaatgcattattaatcacaaaaattacaatttgttgtgattaaatgtgtttttagtcataatattgttgtaactaaaactaaattagtacaacgtaattaaatactatgttttagtcacaagtttttgttgtgactaaaagttacatttaatcataacaaatttatattgtaactaaaaagttgtcactaaacactactacaatgttagcct

SEQ ID NO: 172685 - DNA, 1516 bp, Cannabis sativa
ttaaaaaaaactgatacacttcaccaaattttaaatcccaaactaaaaataattagttgtgacttagatccatatactaaaacttaaaaattggttgtatggcttttgatttaatctaaactcttgagaattatataaataatttgtcgggtgtgcattgttaagaagataacagaggaagggtgcaattcctgtccagtatgcaaagtcgaattgagtgctgtcccacttgacaaactcaagtatatcactcttatatactattcagagattttcacattgtaactaattatttatatatgcaatctcaatctattaccttttgttgtacatgtcaaaaacataggagaagccccacacattagtcccatgttaaaaaaaaacatcacaaaaaaataaagaaggtgccggtggattgacacgaagatctagccttcgacgagatgaagaagcggtggtactggactaagacgaagatctaggcttcaacaaaaaaattagggcttcgatcttcttagccattaggtcctatcgaaaccctaatcctgtcgttgccgattccgtcaaagtcggcaccgtcgatgtcagtcttctcgtctccagccatcggcgaacacccacaccaaactctgatgcccaccctcaacaacaacaactgcagaaagaagaaaatagtgaggaagggagaaaaagacgatgaaacggccaatacctctgttgactcactcatagagaaatgaccattcatggtcttcatacccactagtacagatcgtctcttccattttagggatgagattttgagatattttgagagagagagagaaagaggtagcaggagacagagagagtgaaagagaaagagatgtgattaatttttttttaatcagtaagagatgtgattagttaattttagttttttattaatgtttttgtttttcgaaaacattttattagtttttttaagatatatgatgtggcagtgcttattgttaatagcggtagtgatgtggcatttatattaatgacatggcacgacacctgttacattacaatgcaaaaaacaaagaggtacctacagatgttccaaagtagtgacgaaaggtatttttacgccaaaaataggactttggtatatatctactactccacataaaacttaagtatttatgctgcaaattactcctcaatttattatctaacttatgtttgagagagactcagttgaactcactgatattaatgacatatgaggctaaattagaatttgagcatctcatgtaatataatatttttctcttaattcaattcaatctaattaataattatatttaaaaaaaaaattattatccaatctaattcaatccaattattaattaaattaattatttaattaaataaccaattacatacttcatttttaatattaaattagaaacatgaaacaatcatatttattatgggtaaatggcggcaaaacctccaaaactttcattttggtttcacttaaccccca

SEQ ID NO: 172686 - DNA, 880 bp, Cannabis sativa
ttttatgctcggtaacagtattgcaacgatttgataattaaagtcaaataaatatggttaagtatctcagaattagcaagccaagatagttagacatttagaattttgggatttatttggaattatagttttagaccattttacctctagttaatgaggttacttcttactgaaataaagggtaaaattgtcttttagcttttattttattagtgaaaaattagtggaatttttagataactctctaggttctattggatagatacaagctgaataaaaataaagatttttattaatgataaacatacacctgaatcaatgaattttctccctttctttttccctagctttggcccaaactagaatcaaggaaaacaaaattttccttcaacaatttctaatcaagctaagcttattttgacaccaactcatagcagctatggaggaggcaatctaaggtaagctttaacaacttatcctctttgaattttatgtgtaaagttaagtttgaacatgttattttggggaattgtttatgtatgagttggggatgttttaggatgtttttttaagttattttgagttaatattgggtggttttgtggctaatgtggattttgagctacgtttgagttttaaagctcaaacttagctcaacaatagtgaatttagattcaggaccttgatgatgtttttactagttgaattatgttatttatgtcttgattttgtacgaagtttggggtagttttctaggcagaaaacctagaaaaacaacctgccattttttaggaatttttcctgaagtcttatttttttgtgttttctcgatatttagggtatttttataccatttatctttagaaaaacttttagtttt

SEQ ID NO: 172687 - DNA, 681 bp, Cannabis sativa
  modified_base (636)..(652): a, c, t, g, unknown or other
ggcctgggatctgaacccaggtgtcgcggccccttgtggggagtgtcgcagcccaccctcttgtttttaggcagattcgaatgcaaacttcgaatgctcataactttgtgatacgaactccgttttgggagttctatatatcgttggaaagcttgtttcgagctctatgtgaatatctgtattttaaatgccaagtttatattgtgtgaaagtagatttagggattaaccctatatttgtgaaccttagaattgtgactaagattaccggcacttggtcaggagcacccggggacttagaatctccacacttgcgggacatcaggtaagacatggtagttgcacgtagagttatgcgcgatggcgcttatattagaaatgatatatgtgagtaattagaaaccaggattagggttattaccctaacatgaacggtttaacggccaagggttattaccccagtgatgtatgaagtataaatgctatgccatgctaattatataagtatattgaaatttagggttatgtgttcaaggcataactgggttggactcggtaactagaaccaagatgaaccgtcctaattaactgtcttgctgggcttggctcacatgtgctctactgtgcaggaaagggnnnnnnnnnnnnnnnnnagccatgagtgcgagagctgggcgatgta

SEQ ID NO: 172688 - DNA, 867 bp, Cannabis sativa
atagaaagagaccttattccaattatgtataaacaagctcatactcagcatggaaagagtatgccatctcagtcatttttgtataacatatatgtatatatattatattgtgctatgctaattttcactatgaaaatgagatatcaatcacgctagaacaagataatctttttacaatttgaatgcacttagttataggaagaaataaaagaagagtttttatgagttatttcaccaaacacttggaagacattatattgtcatgcaaagaatgactataaaagcacacataaacttatacacatatacatacacaatacaaaccagaataaatagaggattggacgagggagaaacaaagatttagagagagaaattaaaactgaaagaaaaaagaaagttacgtacatttgaatattgaaggatggtggcggttgcggttgtaattgcaaaagtatagcattgatgtcggtggtggagtaatcggagggacgctggcaatggaggacttgcggtggagcttgcgtacattcggttgctatggaggaataggagtcccttgcaactcaattaatcaaagccagaacttataatataagggtatattgggcagatcaattataaaataagttatatttggaaacttgaattttggttaacttttaccaaaatactgtcactcacacgaattttttttcaaaatactgtgtttttataaaacaacagtagaacacaaaataaaacaactaaaaacaacagtagaacaactaaaaaaacaacaatagaacaacgctaaaaacttaacacagtacacagtataatactaaaaaaattccgccccatagtataaaagtaaaaaaattgaaa

SEQ ID NO: 172689 - DNA, 634 bp, Cannabis sativa
catccacttcaatgtgcttagtcctagagtgaaaaactcggttggatgcaagtttctgggcaccttgattatcacattggatgactggggtgacaggaagagtgattccaagctcttgtaacacagaggaaatccaaaccacttcagtggaagataatgatctatattcagattcagtgcttgaatgggcaactcccgtttgtttctttgagccccaagtgatcagatttgagccaagcattacacagtagccagttgtggactttcgatcatcaatattgtaggcccaatctgcatcagagtatccctccaaagtgagaatgctggctgatttgaagactaaatcgaggttgattgtgcctttgatataccgcagaacacgctttcaagcaagacaatatgcattggttggttttttcataaactgactcaatttatttatggcatagctgagatcgggcctcgtcaaagtgaggtactgtagtgagacgattgtacttctataaagagtaggatcatgaaatggctcactgtccattgtagacaacttctgacctggtgtcatgggagtagtgcatgtcttggcatcttccatgttggtttttctcaaaatttccttggcatactgagcttg

SEQ ID NO: 172690 - DNA, 552 bp, Cannabis sativa
agtggatgtaggaactagaattctcattggtccctaggaaaccccatagaactggtcttccggttggggaacagatctgttggttggggcagtttagggaaccctagttttccccctttttgcaatatttagggtattgccatattatccatcgatatagaaacttttagtttcaattttaagtccccaaaaagtaatttagtgtgacactcatctattttacgaatattgtgatttaggggcctgtaaatcgtcgagcagcagttttactcaagttgactggcacacctgaattcaaaaatacgataagattagtataatgatatgaatatgtgtttacatgtttagtgtacatgtttgttgagcctggtagattacattggtagtaatatcagtatacatagagttgtactagataccgatggatgtatgtttggctcaagtacgagatcgaagctatcacatcggtatgactaaagtatgactagagtaccgagtatagactgatattatggtcgatagtaatgtcgtatgtgttggaaattattttac

SEQ ID NO: 172691 - DNA, 1714 bp, Cannabis sativa
cacgttaacacacctaaactagtaaggttttacaatttggtatcagagtcgccaggttgtcttccaaagatcgtcacgacatgtacaatcatcattagcgttcagctcatctcacggttcagtaagcctttattgcttcagtagtttattttataatatgttttaagaaaagtctgataagaaacatgttggtagcctgatagttgaataggcacatgttttaaatttccaatataagcggtaattagtaagttattcttgatcgcgatctgaccagactagctcttggttacgcaggttgttctagtagtatggacgccagacgaaacaccaggagtcagggtaactcgattggatccagtggcagtcagggagttcagattcccccgaatgttcgtggtcaaggcagaggccctagaggcagggcacgcggtcaaggtgatgttaactcgccgtaggctgcccaagaatgggaaaataggttttcaaaaatgcaagccagaattaatgaggaagatgaagaaatcagacgcttgagacaacagggtgctcctccgatccctgctccagaaatgcaggtagctcctacccctactgtgcaggtaggactagttgctgcagtgaaccgaatggaaccactgtatgaaaggttttgcaagtaggcacctccagtctttctaggaggtcctgatgtaatgaaagccaagcagtggctgactgttattacaagaattttgaatttcatggcgtcaccggcaatgacacagtggcttgtgccacattctagtttcaagaagatgctctagtttggtaggacatggtgtccttgacttgtgatgttactgctatgacctgggaaaagttccaggagttgtttaacgtgaagtcctacaatgaagtagttagaagtgcaaaaagaaaagaatttacccagctgacccaaaaggagaatatgagtgtcactgaatacacaactcagtttgatcgattggtaagattggcctcagaaattgtgccaaccaatttcaataagaaagaaaagtacttggatggattaaattcgtagataagacatgatcttaagattactactgatgataacaccacctatgttgatatggtgggcaaggcactgccagctgagggtacagtggagtgcactcaggagtctcgagggactcaggtcgttggtggggctcctaatcttcctacctttggtttagtaggggtggtagtggctcgaccattgatcataaaagaaaggaaccaactgcatctagtggctcaagtcagaacaagaagttctgagggaaccagggtcgaggcaacaattgggatggttccgaaacccgatacacttacccagaatgccccagttgtaaaaagcattatctgggtgattgtatagggcaagggtgcttccagtgtggagtgtcagggcattagaaaagagactgcccatagcttaagaaagaagagcagaagactgctgaaaaacccgctctagcaagggtgtttgctttaactcaggcagatccagaggccagtccctcagttgtaacaggttagctctcggtcaacaagtgttacctctctatattgtttgactctaaggccactcactcttatgtggcagccagaatttttagtaaattggatagaccgtatgatagttatgataaagggtttggaaatggtggagaattagtcatct

SEQ ID NO: 172692 - DNA, 579 bp, Cannabis sativa
gcttctccaattttttcttccttttgtgcgataactgttgttgcttcagattggtgcttgttcgtgtttttggattgttagagcaatttttgtgggtcgaactaaggtgtttgaacattttcttgtaagtttttgcggtaatttttttagtttagagcttagagtgttttattttgatttttgtttatatctttgattgtttttgatgttttcgggatgattggtggtgatttttgcttgtttttagtgttttagttatgtgttctgtatcatttttttttctaatttgttggctgatcactgtattatttcgtttatttttgtcttaaatttgtgtttgtgttcattgtttgagttttgcagatattcattgtttataacttctcataaattttttagggttttttttatttttttttttatttttttattttttgtttttgatgaatctgttaagtttatgcttatttttgtttggtcttattattgggttttaagccctaaataaaacctatttcaatataatcagattgactaattaataaaagatcagaaattttttttatgttgcatggttca

SEQ ID NO: 172693 - DNA, 532 bp, Cannabis sativa
  modified_base (402)..(406): a, c, t, g, unknown or other
  modified_base (476)..(481): a, c, t, g, unknown or other
agagagagagtttggaaagaaaagcttcttcttctttctttttgttttttttttaaaatttgattttccattaaatgagtaaataaacatttggttttatctactatattcagcctaaaaattagaataacaatccaaataaagtccactaaaggacaaaactagaccattttgcccccacttaagccaaaaagtcataaaatcacctaagggtattttgggaaattctaaaatctcaaacattctcgacattcccaatgtttaactataccaccccgctaaactaaaatactatgatgtgattcaactaagccatacactgcgttccaatgttgctgggcactgaacatgcaaaattatgaaatttctatatatgtcatataaaatgcattctgaattcannnnnatcatcataaattaataatttagaatcaataattttcctatttaaactctaattatctgctaatttccannnnnnagctaagcggtctttacaactatccccccttaaaaggattttgtcctcgaa

SEQ ID NO: 172694 - DNA, 708 bp, Cannabis sativa
  modified_base (73)..(80): a, c, t, g, unknown or other
attcatatatgtatgtatgacacaaacttgcgtgtcacaccgtcatgtccatttatgtctacgtggcgtagannnnnnnnttgcgctcacacatctatttaaatctacatgacgtagacccacgtgttgttctcacacgtctaaatacattaaggccttaaaatttgttcatctcgattatggttaccgagtccaacccgattatgccttgagcgcataattcctaaatctcatttcaaataacatggcatggcatttatacacatatattactagggtaataaccctaggctattaaaccgttcttattagggtaataaccctaatcccgattactaaacattcatgcatattatttttaagataagtgcaagtgcgcatactctacgtgctaatcactgtctaacctattgtccagcaatagatagagattccaaattcccaggtgctccagatcaggtgtcggtaatcctagtcacacaaatccgggatttctcacacatagggttaacccctcgttccatatttataaaattcaatcatggcatttaaattttagataatcatacagagctcggaacgagctttccaacaatatacagaactgccaaatcggagttagaaatcaaaagttatgcattttcaaaaattcaacacaaactgcccaaaaatcacgagggcgggccgcggcatgcccaaaccatgccg

SEQ ID NO: 172695 - DNA, 692 bp, Cannabis sativa
  modified_base (664)..(666): a, c, t, g, unknown or other
caaccttattaccctgacttcttgtatttcgttgggcgtccatttaataggacttagcctgtgaacccataagccaggaaatttagacagcgatcatgaaaacttaatactacccttatggattttaaggcaatgcattaaaataaacaaccataatctaatatgtttcctaaaatgtttaataatcacatataatactaaacaagtacgggcttactgaaccgtgagtcgagctttctcttatgaatatcgtacatgtcttggcaagctttggtagacaaacttggtggctcttataccaaaattgtaacttctgaatgctaaggcactctacagtgatttttcaattacagtgctatctttgctaatcaaagaactttctcaaaaattgtgttaaattaaaactttatattaaatattaaactttacaaactttactacaagttttgggatcccgtttctaaactttttcaaaatatactatgtacataaactagatcgcacagtgactacaaaataacaacccaagatgtcttgcgacaggacaccccaggttacgctgccatgacatgtacaagctaatccctgctcaggctcactcctactcagctttcacctttcctttacctacgcatgaaagtagaactgtgagtcgacaaactcnnnaagaaaagcatataacatatcataca

SEQ ID NO: 172696 - DNA, 742 bp, Cannabis sativa
ggattgcttattgctttgctttgggcaggccagcaaggcatcctgctcgaactattccctctgagcagatacgctaagtggattccacgtgtcaccattatgtgacgccacatcagagtgcaaaaattaggataacatttgcaccccaagtctgtacgggacttccaaagtcacatgtagacttcatccgagctgtttctgcctttggacggggacacgtgttaagcgcgactgtctgagactcaatgtgaggctcactgggcgttccctcggttttcggctaacaaatgctttgacaattaatattttgaaatccaattttctctcaccacggcagacggctacacttgattattttttatttcccatatttgcttttaaggagggaaactgaggcgtctgaggtttcttaagaatgattacctcttttggtgactcgcctataaatatccaccagcattggcacataaacttcttttcaacatccttcttgctaagtgagttcacagcgaaaagagaggttcttggcttcaagtttgctgaagtgccttcatcaaaactgcttcttggattgacgttgcgtgaacccacatatctgactcttgagtaagttttcgatttcctttatgcttatgtttacatttgaaatgtatcttcgactttgctgtagaaaatattcaggaaaccctaggtccaaaaacatctgcgattcttctttgtcgtggcttcatgcgattttaca

SEQ ID NO: 172697 - DNA, 1041 bp, Cannabis sativa
ttcatttcgtgctttggttcttgcaatttcaagtcattatgagcctcaattttatcatcaagccaagggaattccagtgtgggataatgctatgcatcatgaaatcacagcccttgaatccaatgggacttggataattgttactcttcctgctggccatcatgccattgggtgtaagtgggtttatcgaataaaatacaatgctgatgggtccatcgaaaggttcaaagcaaggctagttgcaaagggttttagtcaacaagaaggggttgattacaatgagacttttgctccagttgcgaagctagtttctgtcaaactaatccttgctcttgctgccattaaaggctggtttttacagcaattggacgtaaataatgcatttcttcacggagatttgcatgaggaagtttatatgactatccctcaagggtatagtcctaagagggagttaccacctaatgctgtatgtaaacttcaaaaatcaatctatggcctaaaacaagcttctaggcaatggtttgaaaagttttctacaacattacttgctgaaggttttcaacattcagcaactgatcattcattattcatacaacaacaaggatcaagcatcatcatccttcttgtttatgttgatgatgtgatcattgcaagcaacaacatggctgcggtgcaaagcttaaaaatcagattgaatgaccaattcaagttgaaagaccttggtgaactcaagtattttttgggtcttgaaattgctagaaatgacaaaggtatatttttgtctcaaagacattattccttacaactcttagaagatcttggacaactaggatgcaaggctgccaatacacctatggaagtaaatctaaaactaagccatgatagtgaggatgctctagctgatccgaagctttatagaccaattataggaaagctatagtaccttactatcaccagacccgacttagcttacacagtcaacaagttgagccaattccttgtcactcctagagccacacacatgaatgctgctcaaagggc

SEQ ID NO: 172698 - DNA, 654 bp, Cannabis sativa
gtaacaaatcaatgaagcatataagtcttttaacttaagttttatttttcatcccaattaataatacctttgacattactattgattgtaaattatcactgtacttagagtcctaaactattaggtgagaagtaattctaagatgatagtataataatgaaaaacttcaattagctgtacacctaataagaattcataatattcatagtattcaaatagaaaaatagaaacaatttaatatgagagaaatcaagaataacattcattatcacaaatcaagaattcatgtcttcagttttaaaataacccttaactaaaaagaaactacttcaaactaattattatgatgaaaattgtaataaaaagtaaagaattaaggagaagaaaagaactataatgatgaataattaatgtcgcaatcttcttcttcttcttctctcactttttctttgagtttctctctcaataacgtagtctagaagtcccaaaaaatgaaccctaatagtcctaaaaagaaaaaattttgaaaaatgtggaatcgtgctctcactgtggcgaagggaagtgctcatttacggccatgacttgctagtattttggtcatagattttttaatacaactcgaaattggacgattcaagatattttagaaag

SEQ ID NO: 172699 - DNA, 602 bp, Cannabis sativa
  modified_base (541)..(542): a, c, t, g, unknown or other
attgaaaacaccattagagcacaaagttggagttctcaaactccaactttgctcaaacaacacaatcctcctaactcatcttaaaataacataattaatcaccacctaacttaagaatactaaattgaacaaccccaacacaaacaaccatccaaaacttaaacttcaacactaaaaccttgcttcaacttaagaaaatacaaaaaggaagagagtagaggggtgataccttgaattaagctcttaatttcctctagaaatctcttatttagaccaagtaacaccaaccctagcttgcttctacacaattggagagagaaagagacaggtagagaagagatggtagatgctaggcttttctaacctttttccctaaaaagatacttaattaaaattaataaatccaacataatattcagaataatattgtcacaaaagacaaaataaagttctcattaaaatgactactatgcccttctataaaataccaaataacaaaaaacccacaagcactactacaaaaaccccctttagaggtggnntttaagccctttcagcgtcggtttttgcgaaattccctaccgacgctgattagggcgacg

SEQ ID NO: 172700 - DNA, 513 bp, Cannabis sativa
gactactaaccgttttattttttttatgtaattttctataacatgttgccaacgagctattttaaaaaatatatatatatattttagtaacgatggcactcgtttgacaaggtgtgtgggaatcacaatactttgtctcaaaaggcatttgttggtgtgatggtgatggttgtaatatcgcgattatgagaaaatcttggttgcctaatgtggaaaatccttttgtggtgtcttctcattcgagtttgctccatgctaaggttaatactttaatgagaattgatggtaatgcttgggacttttatctgattaatgatttattttccaattgccttgtctgccgttgttattagatctttttctgcccggatttgaactgctagggtactggggtttaggacggacgttccagctgaaggagcttgcggttggcccggtctaggctcgacatctgcccgttaaatggcttcttcaagcttgatgaaaccatctgctcgatcaaggaaatcactc

SEQ ID NO: 172701 - DNA, 731 bp, Cannabis sativa
  modified_base (212)..(215): a, c, t, g, unknown or other
  modified_base (298)..(299): a, c, t, g, unknown or other
gggcataaaacccaacaagtttgtctttaatattacttggctatggtactggctcgggatcactttctggtatgctttcttttttgcctgtgcattctaccacaaagtcgaccaaggcttggcccttaaaatatttttggggtaggaagttgatttcatactgacccaattccaccgcccacttgagtaaccgtccagaggcatctggcttnnnnagtatttgtcgtagtggttggtcagtagacacccgaataggttgagcttgaaagtaatacctcaacttccttgttgctagaannaggcagtaggcgagcttttctatcaacggatatcggcctttggccttgacaagtcttttactgatgtaatagactgggtgttgtacgctgttctcgtctctgatcagcacagcgctcacggcatgctccgtaaccgctaggttatatccccagctccttgtcgtcctgaggtttagaaaggacgcgaggttttgcgagctgtgcctttaaatcttgaaaagctctttcacattcttctgtccactcgaactttttatttcctcgcaggatgttgaagaatggaacacatttatttgttgattttgacacgaatctgctgagtgcggcgattcgaacaattaggctttgcacctcttttgtttttattggcgagtttatatccaggagggcttggattttattctggattggcttcaattcctcgggcattga

SEQ ID NO: 172702 - DNA, 581 bp, Cannabis sativa
tatctaaattcaattcaactaccagaatagctactacaaaagcaactaaattgtcatctacatgccctccacgtcactacattgattattttttttagaaaatttaaaaaaaatactcttcttttatatttttatttataattttattacctaaaatttttaattataaaaatacgtttataaatttataaaaatatatttttctcagcaaaaagtaaaaaaaataaaaattaattttacgacaactataaataaactataaaacaataaaaaataactaaaaaaaataatataatgataataatataatgataaataaactatatacaacaaaaagtttattctttttatatactaggtatttttataaattataaagttcaaaaagtaaaaatgattttttttttgttgacgtatttttgtaattattttttaaatttttttgtctattatttattttttaaccatacgtccttaataactattgtagttttagtcatttttcaagtatctttatcatataaaatgtagctatttaacggtttttatttgtttaacagaatattctattaaatttaacg

SEQ ID NO: 172703 - DNA, 697 bp, Cannabis sativa
cagctcttcaattggttttagctgattattctcatcttcgattctagggtctagatcctcttttttcttcttgccttcttctgttatgaccaccattaattgatggttggctcttctattttgaagttctacatgataatattcgcaagccaacaactagtcgcctcgtaccacacctactcctgctggcgtttggaattttagggataggtgtttgattaaactaactgtccctagtcaaatcaatgcagggcgacccgtcaatatgttataaactgatggtagatcaacaactaagaactcctgcataagtgttgtagataacggtggctctcccacagttaatgggagtctaatgatgccttggctggcgacactatcaccagtgaatccacataagctcaccatgcaaggttttaactttgcatcttgtagtcccattttcttcaatgtatccctgtaaaggatacttaccgagcttctattatccaccaacactctttttattctcttgttggcgagctgaactgtgatgacgagagaatcgacatgtggaaacctcacgtgttttgtatcttcctccgagaatataattggaggttcttctgtttttacttttttagtggttctggagcaaataccgattgctcgttctttatttcattaacatatcttttctgggcattactactctctc

SEQ ID NO: 172704 - DNA, 698 bp, Cannabis sativa
  modified_base (525)..(527): a, c, t, g, unknown or other
cacacttgcactcacatggtttttcgtcgatatataagttaacagttcgtacgtttctgtctcgcagaagactattcagccagtcaagttgtaaacctactctacaaattgtgtttctaatgagttgttccatgccaaatgtacttacgattgcgtgtttgagtttttcgttcttcccagctcgacatgtgtcttcctctgatgtgctcaccgaattttgggtataacaattgccccttaaaaagatcttttttttaataaaaagagcttttaaatgattacaaagggtatttccgtcatgttcctctttttgaaaagacgcatgtcctctgattttggcggttgtgcagtttcagggtacatcagaattaaattaccatcttttctacttccactttgaatcatgtccgtaggatcaactctttctttgatctaacaaagcctctatcatgggtataaagtaagaaaaaaggaaccacctttgcattattctctccattttagaaagtctgaaaaaactcttannnttcttcgtcaaggatcaccattaagttttcccgaggacttgcatgtcatctctgtccttgacctttttcctacgagtttcctccgacttcttcctctcaaagcgatccttgcttcgttcgaagatttgtagatggagtaaccagtcattgccccaagtcctaacttcaaac

SEQ ID NO: 172705 - DNA, 1214 bp, Cannabis sativa
  modified_base (738)..(740): a, c, t, g, unknown or other
gggcaaagaatgaggcctagcactcaaagaagaggtagaaaagttgcacaacaataatttcataattgaagctttctacccagcctggtttgctaatcccgtactggtacccaagccaattaaaaaatggtgagtatgtattgacttcaccgaccttaacaaggcattcctaaaagactgcttcccacttccacgaataaatcaacttgtggatgcaacagcaggacacgagatattaagcttcaaggatgcctattcggggtacaatcaaatcaagatgcatccaccagaccaagaacatacaagtttccgaacagatatggatctgtactattataaggtcatgcaatttggtctcaaaaatgccagagctacataccaaagattggtaaataaaatgttcaaagactagattggacaaaatatggaaatgtacgtggatgacatgctcataaaatccaggaaggctagcgggcatatggatgacgtcgacgaatgcttcaaagtcctgaggaaatataacatgaatctcaatcccctaaagtgctcctttggagtcagctcgggtaagtttctaggctttatcgtcaatgcccgaggaattgaagccaatccagagaaaattcaagccctcctggatatgaaatcgccaacaaaaaccaaggaagttcaaagcttgactcagcagatttgttttaaaatcaatagacaagtgtgtcccattcttcaacatcatgnnnggaaataagcaatttgaatggacaaaataatgcaaaaaagcctttcaagagctaaaaacgcaactcgcaaagcctcctatgctctcaaaatctttggacggagaggaattaggaatataacttgctgtcacgaaacatgatgtaagtgtcatactgatcagagaagagaacaatatctagcacccggtctactacatcaacaaaaggcttattgaagttgaaggccggtacccattgatagaaaagctcacttattgcctaatcttagcaacgagaaagataaggccctactttcaggctcatcctgtttgggtatacattgaccaaccattacgccaagtattgcaaaaaccagacgcctctagacggttgctcaaatgggtagtggagttgggccagtacgaaattatctttcaacccaaacagcaattaaaggtcaggtcagattttgtagttgaatgtacgggtaaagaa

SEQ ID NO: 172706 - DNA, 646 bp, Cannabis sativa
tagtttatttttctctaaatgtttaatttcgattttactgtatatagtaaatcaaataaactttatttgacaggttttgaagatcaactcatgatcttggtctttttttaaaagttttctaatttggagcaacagaatctgaatttaatgctgcaaatcaaggatttttttttaagaaagtcttgtacaaatttaaaaatgtgtttatgattgtctctaaggtttttatgttctataaatagaacatagaaagcagtcaaatggtcttgtacaactttaaaaatgtgtttgtggttgtctctaaggtttttatgttctataaataggacttaaaaagcagtcaaatgttcctcatatcttctagtctcatattttcatatctatctttgtgagaatagtgtttcatatgtaaaaacctagagtgttcaactaggtttggttttcttgttatgatatggtattattcatagaatacgttgaaaagaagctttgatcaagcgtgagtcttcaggagaaaacttttccaagtctcatttcgggaagaattgaacatatatcttcgggagaaaatttctttaagtcttacttcgagagaaagtaagcacacatcaatagctgaagggagttcactacttggtgtggttca

SEQ ID NO: 172707 - DNA, 513 bp, Cannabis sativa
  modified_base (364)..(365): a, c, t, g, unknown or other
ttaatatattaaaaatgatatatgcagtacatattttttaattaattttaattatttaactttctaaaacattattaatttaagaattttttttgttattgataaacttaattttgaattattaatatttaattttaagttgtcttctaatcgatctatttatctatatatttttatatctacatataaatctaaaagaaaagtaagtgtggtgacttcatctccttttaattttctactttacctaatttgcagtttttttataattttttttatttaaaaatattaagaaaaaagtatataacatcccgattaaatatatactcaaatcttactatatcttcatttatacaattaactaaannaatatcacccttacatattgcacttccactgaaatcaatgagaaatttattgactactatttatatttctttgtccattaaattcctagagttttttctttttttcaattatttattttctaataaatacttttcaacttttaatcat

SEQ ID NO: 172708 - DNA, 506 bp, Cannabis sativa
tcaatctttagctagtttcctctagttgtcttcatgcttggtatttgattcttatttcagttagtgatcaattcatgcttagtcctttctccttgaaatgttctgttatttggattgtttcccaaaataagcctcttactatagtacttttctattccttattttattgtatcatatatagatgtttactaacatatttatctatatatatttaactttttcaaaattttagttgttgactttgacaatagaaatacaaacatggttgtcgacttgtggtgcttagagatcgtctttcaatgtgactccaataagcagttcaagcaatactggcatcacagatcatgcctacaaattcttatagaatgttttaagagtttgagggaaggtgcctttacattttttttttgtttgcttattgtattgctagtttctttgttgttcatttaatttggtttgtattgggtaatttattttatttctcttgttcgtaactctgattcatt

SEQ ID NO: 172709 - DNA, 1361 bp, Cannabis sativa
agagagagagagagatgggattgaaaaattacattgagcaacattattgattatgttgactcgggttagtgagttaatgagtgttgagagattacaccatggatgacttattgtgattattttcttgtagctcctgagattgatatctcttattctcactatcaataatgattggtggcaatgctttcaaactggagtatgaccaagttcacattaaacttaggatcggaactagtataattctcatgtgttgttgtgtttgacaaacgtctagattcatctgttgttatctttctggtttaatgtgtttgctggttttttgttcttaatttgtttgttttgatttgacttttgtttgtttaagtgtgatcttgaagttgaaattacaaaggttaattcatatcagagctaaatttcctacaaatcagagcttggttctttgatcattaagggggattcaaagatcacttcgttccgcaccaagaattcatcaataattcatcaagaaattctacaaaaacacagattgaaggaggatgtcgatggttaggttcgaactagagaagttcgatcgatcaactgatttcacactatggcgagagaatttgaagggaatacttgtgcaccaaaaggtggcaaaggtactcagagatgaaaagttgctggctgagaagaagccagaggaaattgcaaatatggaggagatgacatactacaccatcatcatatacatgtctaatggagttaaaagaaagctaatccaagaaaagaccgcaaaaggattgtggaacaaactagagcagttgtacatggcatcatcaatatcgagcaagattattcttcttgaaagattatagggtttaaaatgaactcttcattttccttagatgataatattgataagtttaatgaaatattattggtttagctaacattgatcataagtagatgaagaaagtcaagcaatcatattgctcagagatcattgcaaatggcatatcaagaagttaaagcaacaatcaagtatggcagggatgtgatctcgttggagggtgttcatgtggtattaaagtcaaaagactttgaattgcaactcaagaaggagactaggaaagaagaagcctatcttacaagaggaagaaatccaaagagaggatcatcaaggaacaaccagccacaatcaagatcgaagtcgaagatcaaagacaatcgacaatgctatcaatgtggaaagatcagccacattaaaagattctacagtcaattgaagacgcaaactggtttcaaatcaaactatgatgacaagagatgcaacagaaaccagaatcagtactcaaaatctaatgatcatggaaatcaaa

SEQ ID NO: 172710 - DNA, 610 bp, Cannabis sativa
gtagttaaattatttattttcattatacaaaaaagtctaaatagtcacttaataataactacatcatcagtcataccaatttatcaaactcaaaaactgttaatttattttattataaaaacacatgtaatttctttgttaattttacagtctttaatatatatatcataaaatcaccatctttctatatattttaaaaataataaattatgtttctaatttcaatggtccgtcggacatcatctatctctacattggtatgatattgtccgttttgggtctaagccctcacgaatttatttttgggcacctttccaaaagacctcattctaataaagatagtgtccattcttatatacccaagatccttcctatttctagccaatgtgggactttggttgtacaccgaacaatcatctccttaaacaaaggactaccttgcctccctttagaaaattaaaatctaaacttgaatccctcgattccaacactcaagatcaccttgagtaagctagatgaatcccttcaccaattagattcaaaatctattcgaatgcttgaatccatcgattctaacactcaagatccctttgagtaagctagatgaatc

SEQ ID NO: 172711 - DNA, 657 bp, Cannabis sativa
atatgtatttatggagttagggagtggacattgccatataactttagttggactgggcatgctcatcaaaggcttcagttaaccaataaaagtcacatttctacttcaccaagattttacacatacagatgctaaatcactaataatatgagctaacacaataaaaaattatccaatcaactcaaattttaataaaatcaataaaaattaatgtaagcccaaataaaataaaagtttaacattggaaactttcccctcaatcatagtttcttctcgatctgaatctaaaagttattccatagttgcggctcataacaactcatccatggtttttgttttctttatgagatcagaagacgacggtccttatttcttcttagccgaagttttgttcatacatttcgcttaacttgatttttttctgccatagccacagccttacagaggtttttacttgatcccctcgctatttggaaatatttaactaactagaatgagcgggaaaaacaatagtgtgtcaatacaactatttttctttggtaatcttttgctggtgacatcccgaatagttcctttcccttctgtaacaagatcacttcatatattttatatatctattctatataaagtgtgcctgtataactaaaattcttggtt

SEQ ID NO: 172712 - DNA, 516 bp, Cannabis sativa
  modified_base (356)..(363): a, c, t, g, unknown or other
gagagagagagagagagatataaatacgggtattgaaatatactcaaataaataaaaataggagaattactccatatattattttttagccattttttttcacatttatgatttgagttactttggtggttgctctaataatttctatgtagattgttatgtgaattttggttacaatttaagttgctcttttaattgttatatagtttcttatgtgaattttcgtaaaaatatataaaaaattactttaaaatgtaaaaattaaaaaaaaatccataaaaatattattaaaacttaagcaagtcattttttacaattttgaacattttccgtacaaattatatatatatatatannnnnnnnactattcaatggttatatttttattataaccatatgactacatttttctacctgtaatagcaggttactaataggtagacattcctttttagaattaattaattataattaattgttttcttaaaataattaattaaatatttaacaagactt

SEQ ID NO: 172713 - DNA, 1108 bp, Cannabis sativa
gtattctaaatgagtttatcttatagaaacagttatgataaatttctaaaagaatttgtaaagaaatcaaatagtatcttaatcaatattagaattgttaatattaaaaaaattgactctgctaattttgatgttaagtatactttatcataactctgtaattttatcatacatgtttaaggtagcgaaagttactaaaagaatgtgaagctatcttaaataacaatacatggttacttttattatatgaaaataataataataaaatataataatttgtgaagttagttggttaattttacttatattaacagtttatttagtcttttgttaaaaaaaatggtagtgatgtctaaccactacgtacgagatgtctgttatatattgcaattaaagattttaatgtaataatttttgtaaaatatcactaatcattaacaaaaaagttaccttacggcagtattggtactactgatgcataatgtcaatgctaaaatatatagatataaataaaaataattatactttttatttggatcattttttttgtgatagtaaatatttatgtttttacatatcaaaatgattgcattaaaaagtaagttgcgatagtatttttttaaactaaaataaaataattagtatttttttatttagtgtaactagtattttttttttttttggaaagatgaatagaaaagagaatatatatataataaataaaaaaagacaaaaaactagacaagaaaaagatttcagcaaaaaaaaaaaacttgaaactaaaagggaaatttacactcattacggtttgttccttttttttttcgtttgtactgtgacacggaggattttacttttatactgtttttcttttttattttttttttggcagtatactgcctttgcaaactttaatatacaatggtttttgatttacacttgtcacgatagggttttgccacgttttttttttttaaaaagaaatcattttttattttttgatttgacggttttctacagttatcaaaatggtggtgtacttttatatatttcttttattttttttttatttttttcgaatatcaaattttttactataacccactct

SEQ ID NO: 172714 - DNA, 729 bp, Cannabis sativa
tctctctctctctctttcgaacctatagaaccagttagagttctggatttcttcctcaaattcaagtaatttcagcaaggtttaagtgatctccagctctaggtaagctcccaacactttgccttttagtttcttgagtttcaagttagagattttgcatgattttggaagtttgggttctatagaaattgtggttgtttgaatttgttttttgaggttaaattatgtttaaatatgttgtttttggctggtttgagtagatgtaggattgtttgagcaagctttgagttttcgaactcaagcttggctctttaatggtgaaaattaattctgagcttctgtagttgtttcattgcttgaaatatgtctattggggtataatatgcaggtctggaaggtttagtaaggattggaattgattttgttaggtttttgaatttttggagttttctggtataaactggttaaccggttttacaggacctgtaaaaccggttaaccagattttgctgctgggttccccaaaaaattcgtgttagtttcagagctttggttggttaattccctactagtttagggtattttcatgttaagttacagtagataggtttttggtttaaaacctgagtccccggttgtaatttagcgtgtcacttatccatgttgtgatcgatgtgatttaggggcctgtaattcgccgagaagttgttctactcaggttggccggca

SEQ ID NO: 172715 - DNA, 713 bp, Cannabis sativa
tgattccataattacggtaatttatcggaaattttttataggttgtttgttttagaagagacgggttaaattttaggagacacggtaactaaaaatattaattattctattaatttttaataaaaaatggtagtattcggtagtggtcaaatatgtggataaaaattaggataggcactgttttttttaattaatgtattttgaaaaagttaataatttaattatttttattttgttaaataataatttgaaatttttgttattttattttattttattatacaaaataatactttatattgattattcgtcaaaataaaacttaataataatcttacttagaggtattattactattagcagacttgttacatttttcgcatctcttttgatgctgaaattaaactggcttcagattatttgttgtattaaaaaaatgacaaaaattaagtttaatgtattattttgtactaatttaaaaaatacagagtctaatttactatttaacttaaaatgtaaacttttgcaaaataagaaatttaaaataatatttatcctaaaaattaatagggtaaatatcattttggatcctgtgttttgtaaagttattgattagaccatctaaatgacaaaatagaccttgtattttctaaaatggtaaaaatagaactctgagattaatttttgataactttttttaatataaccaactt

SEQ ID NO: 172716 - DNA, 1018 bp, Cannabis sativa
acacttaattaaatagaaaattaggtttaaggtttagggtttcgggtttaagggtacgatttaaggttcgggtgtgggtctgggtctgagtcctggcctgggtctaggtctgtgtttaggttcaggtccgagtcttggtcccaaatccaaataccaaccacatgtcgagtctagtttgagttctggttttggtccgggtctgggtctgggttaaggtccaattcccagatttagacaccgactatgggtcgggtccaagcctcgagccttgggtcctgtccagagtccaaatctagatcctagtctagttctagctcatgtcttgggtcctggtttgggtctcaggtccagttttgggtcttgggtcctaagtcatgggtttggatccccaattcagatcagggtgctaggtctaagtttgggttagcgtcccacctgagtgcaggtcccgatccttgttcggtaccggtccttctctcgagtcatggcctagtttgggtctaggtcatggtttggttcttaggtcccaagtccaagtatcgggtcctggtctcgttccagttcccaatcgcgatcccagtctgggttctagtcctagtccaagttcaggtctcagtttttgtccaggtttgggtcccagtcctaatcttcgttcgagtctgagtcccagtttcaagtcagagttttggtatgagtccgggtctgggtccaggtttcagttagtgtttgggttcgagtcttggtttgagtctgggtcttggtttgggtttgggttcttatacgggtctggcaactggtctaggtcccgagttagagtcctgggtcacaggtcctggcacaagtcttggtccgggttcgcgtctagagctagtttaaggtccaggtccaattcctgttctaaggtccttattccacttcttgttccgattttgagtctcgggtccgagtttgggtttgggtcctagtctagaaatggttctaggttagggtccttgtacgattccaagatctagacacc

SEQ ID NO: 172717 - DNA, 729 bp, Cannabis sativa
agaaccggatttctggttcagtgaagaaactacaaaaaaccacctacgtacttcaatttgaccccaaatctcaccaaaacttccagaattcctaattacatcacaatgaagacaatgcatgcaacaaaaagctagaaacaacccttactgctcaaatcaccattaaagaccaaactttgagttctaaaactcaaaccttgtccaacaacaaaaccaagccacaaaataactctaattcaacccaaacaaccataatataacattagaacacaaaattaaacaactcctaaaaccatataaccctaattaacataatcatgcaagagaagctatcttgaaacttaagaaaccacaaaaggatgagctaggaagcttacctaggattgaaacctaaacaatgatgttaataaagcgctaaattgctgaagaaaccctagcttcttaatgacttctacggagcttgagagaaagagagagaaggaagaggaaatattgacttttttggtatttttcttaattgaataaaatgggatacaaggtattatctaactaaattattaaaaatataatcagattataatttacacaaaattccactagaagataaaagtaaattagggcaaaaagaccattttgcccttgcacaaaccaacaagcactcttgccacttaggggtattttggtcaattctaaaatcttaactaatctcgacattccaaatgtctaact

SEQ ID NO: 172718 - DNA, 633 bp, Cannabis sativa
cccggagatgaagtcaagcaagacttctccggattggggcctagctcccggagtagttattgaactatctcaaggggatcgacctatgtaatgacttttccttaactatctctgaatctgagagcctgacctgccacgtgtcccatagtgaaattgccacgtgtatggggagaaaaccaggacaaaattaactaaataagacattttccaagcattacacttaaaatctcaatgccatatcaatgttctgcaagaacaattattgactaaaataattttaacatgtaagtactgagtacacataaggtctttcatttttgttttggggaaagaaaaaaaaactctgaagaacaaacttatcagaattgggaacaaacatttttacctcataatcattcactagaacacatggcgagcaaaacaacaaatacaatacagtccaaacaaacttagaagataccttgaaattccctgatgaactttccaagtaatttttcactttgaccattcaattttccagtcccataagaatcatcaatatcaaagaggttaattccattctccacagcaagattaaaagtcctctgaagttcatcatccatggcttcctgataaccccaaagaagctggttt

SEQ ID NO: 172719 - DNA, 597 bp, Cannabis sativa
tattatttctgctatggtattatattctaaactttaaatttgttaacatttaatatttacaaaaattaaaattttgacggcaaaatttacggaacccctatttcgttttgctctttacatttcagtctaaaaatttcagttaagtgccacagtacgtgtacacttagcaaatttttaatagtgcacttaatattaattattaaaatataattttaaatatttaaaaaataaataaataaataaaaaatagaaaataattatataattttttttttctttttcttttcttttttctttcttcttctaatgaagagaaccaaaaaaaaaactctacatcttccttatccatcccaactgtctcccctatctctttttccttttttttttttcttctgagttattcatctcattatcatcatcaccaccacacaaccactattaccaccatcaccacacaaccaccatgccactattttctaaattaaagaaaaataaaaattaaattaaggcaatcattaatgactggggcagataaagagagagaagtgacgtgaggcttcgactccggcgaccaccacaaagagagagagagagaga

SEQ ID NO: 172720 - DNA, 684 bp, Cannabis sativa
tttccacatcgagtcatctagactgaagtaatagaaaataataactaaatattttggttattacagggggatagttgtaaagaccgcttagctttaatttggaaattagcaaataattagagtttaattgtgagaatcatttattagtattgaattaattatttatgatgaattatttgaatttagaatgcattttatgtcgcatatagaaatttcataattttgcatatttttgtgccagacaacattggaacgcggtgtatggctattagaatcacattttagtatttttagtatagcgggacaatatagttagacattggcaatgtcgagaatagtcaggattttaaaatttcccaaaataccccttagtgtccttttttgccttttagtgtggtggggcaaaatggtcattttgccccattagtcttttgtcttttgtgagtttcttttaagttaataaatcagatttttattaactttaaagctgattttaattatagtaaaaccattctattttcttcattttacaaagattagaaaaaacatcaaaatttacaattctctctcaacctctctctttctctccctccaaaaccctctagaccagctagggttgggtattttctttgtgtttcaagtgattctcagcaagttttagtaatctccaagccaaggtaaggt

SEQ ID NO: 172721 - DNA, 620 bp, Cannabis sativa
tacatcaagaccaagtttgtgacagaaaatgtcaaaacgagaactggatataggcttagtaaatccatctgcaacttgatccgtggcaggaacatgttgaactcgaaccaactattgtgagattttctcttgaacaaaatacaaatccaactcaatgtgcttagtcctagcatggagaacaagattagtagttagaaggactatacttaggttgtcacaccatagtgtaggaggtctaggcagtcgtatatgtaactctgaaaacagagaatgtaaccatgtaagttcagacatagcttgagccacacttcggtattcagcttcagtactagaccgagagaccgtttgctgcttcttacattgtcaggcaatcaagttcgaaccaaaaaatattgaatagcctgaagtggaccgtcgatcgtctgggtcactggcccaatcagcatcactaaatgttgttatttcaagtgcagtgaggggtctgaaggtcaagccgagagacatagtaccacttacgtaccttaaaattcgctttactgcattccaatgtgtattgagaggatgtgccataaattggcacactttgttgacaatgtaggatatttcagggcgtgtgatgg

SEQ ID NO: 172722 - DNA, 595 bp, Cannabis sativa
ttgtgactagaagtatgatttttgatcgtgaatggacatgtctatgatatgaaaattggttttgtccttatggtggtgacattttcttacaccttgattattgatctaaaggtgataaaatcaagaaaacataataataatagtggaacttagcctatagtaatatctttacacatgttttgtctttacattattttatttattaaaataattaaattcaacaatttttgttaaaagaaacttaataattattttttcacttttttattttccaattgagaatatttttttttttcaaaaaaaaaaaaaaactaaatttaacaagtttttttaagcaaactgaataattactttttcacttttttattttttttagttgagagcattttttcaaaataaaaaaccattttctaaaggctatttttatatttgtattttttgtataaaatccaataaatacaataattcatattaaaaaataaatttatatagactttagggtatatcaaataatagaataaatttgttgaaatgtggagattaagaactttcattagtagccttctttgaaagaaaaaaaaaaaaaaactcctaa

SEQ ID NO: 172723 - DNA, 660 bp, Cannabis sativa
taactagaaataatcacctattatatatctgtaatataataaaaattaatgcagcaaaaagaaaaagacaatttatgctatatattactgtaaaattttttatttttagtcacaataaaattttgtgattaaaaatataaaaaaatcgtaattaattataaattagtattttttattttgattaaaagatctgtaactaaaagtattagtcaaaaattacaatatattatggctaaatgtacttttagacacaatacttgttgtgactaaaagtaaattaatgataacttgtatctaaaaattatgtttttgtaacaaaaaacttatgttgtgactaaaaatttatcattaaagtaactatttttttatagtgtatacacaacacataaacctaatatatatatactagagtattgttatgtaattccaagtatacttatatttttaatttttatttatgtgtattttaaaattttataaattaaagaaaattactttttaatttttttttaaaaaaataatatttaaagtttataaaaattttataaaaataaatattaaatttaagaataataaaattaagcatactcttaatattaaaaatatcaataaaaataataataatgttacaaatagtatagtaatatttatatatattta

SEQ ID NO: 172724 - DNA, 547 bp, Cannabis sativa
cttgcctcaatgttttggtagatcaaggagttcttctttcaactcccttaaagatcgcatctggtcatacttgtcaaaatggcaaggcaaacttctctctaagggaggaaaggaagttcttcttaaggcagtggtccaagctattccaagttatgctatgtcggttttcaaacttcctgactctttttgcaactttgtggaaaaagaaatggcaaacttttgttggggagctgctgacggtaaacacaaacttcactggaagaattggaaatctttgtgtaattccaaaagagttgggggattaggctttagatctcttaagccttttaatcaagcgatgcttgccaagcaggcttggagaattcaaacaaaccagtcacctcttctcactcagctctttcaagccaagtacttccccagaacatccttcttagactcatccctggggcactctccctcttatgtctggcacagtatccattatggtaaatctcttctcaaaactggcctatgcaaaagaatagggaatggggctaacaccagtatc

SEQ ID NO: 172725 - DNA, 773 bp, Cannabis sativa
gagagagagagaaagtattaaaaaacgagatataaaaatatatactcattacgtatatttatatatatatataaatataaatatatggttacactcttaatgggtattacccatgaatgggtagtatgaaattattcaatcggcgaaagaaaaattaagaaaaaagttttttagcaaaaaaaataaataaagaaaatgttgatatgacttaagtattttgtatataaatatatttttgatataatgtaaaaagagatatttttaatttttttttaattaagtagctaaattaagcatagaaattaaaatttttcttttattattcgttattcgatcaaaatctaatgtataatatttttaaaattaatttttatagttaaatttatttagtttctatcaataggtaatacccattaagaagtgttccatatatatatacaaagattaaaaaaaagttagtttgagtagaaaaaaaaaggagaaatagagaagaaaaaaaaatcaacaattgattcaagaaaaaaaaaagacaactaaaaatgataaaagaaaagggatttttttttaaagctttaataataaaaaacaataaaaataataaaaaaaaagatataaaaattttaaatgtaaaaattttcttattaaatataaactttgagaaaaaaaaaatatctttatatattaaaagtgtctatctaacggtatttcttggtttaacagaatatacttaaatttttaaaagaatattctgttaaatttaacgattaggtttg

SEQ ID NO: 172726 - DNA, 682 bp, Cannabis sativa
atctatgtttcagcttacttaaccgactccaaaccatataattccagcgaattcgttctcttgagacagaaaacaacttgtatccatgttgtatgttatacgttatagctttattgtttaaatttatgggggcatgtttatctcaatgttgctcacttattttagcaattcatagtttggtaaagcatgcccaattcagttagacgatgagttatatcttgattcaagatggttcttacactatttacaaatatctgcattgtaaattcataaataattctaatcactacttaaaaatatatatatatatagggtatttctagcgtagggcatagtatattgtacttatgctataaggtagtttttttaacgaatctgaaattagaaaagaaaagatgtatataacttttgttgaaaaagtgtagaggattatttatttaaaactttatttatttcttttttttgctaaaatcaatttttatatattgttttattgattgagtcacttagcactcagtaagcacacgccttagacattggtgcaggggctgtccaagttggggttgatatttggattttggtcttctcttaataagtatataacacactattttttattaaaaaatttatatttttacgtttattttttttttttatatatttttacaattttctatagaaa

SEQ ID NO: 172727 - DNA, 511 bp, Cannabis sativa
gtttcaaggcaaggtatttctctagtggctcttttcttgcagcttcattgggaagtaatccaagctatatttggagaagcgtttatgaagccaaggagctggttcgggctggggtgcgccgacttctcggcgatggatctaacattggtattctgtcggaaccctggctacctgatgggctacattcgtacattgaatcaagccacccaaatctattagggaatactgtgaatgcattgatgaaggatggcatggttgagtgggatgaagaagttatcaaagatgttttgagtgacagggatcaaaagttggtctggaaattgccgctaagtaatcattcaagaagggattcctggtattggatgcaagatgactctgggctctttacagttaagagtgtattctttgctacaagccgctaaaacaagcagtaatgtaccgaataattcaaggttctggcgccagttgtggcaattgaaacttccccccaaggtggtaaatttcttatgga

SEQ ID NO: 172728 - DNA, 953 bp, Cannabis sativa
tcaccgaatttggcggtcggatttggtttcagtttttttgaatttttgaaataaaaaaatggctaaaccaaaaaaccgtcaaaaccgcaataaactgcgtaaaatcacaaaaaactgccaaaaaccgtccaaaaccaccaaaccgaaaaatcgccaaaaaccgtacggtcggttttatacggttataatttctaaacggttggttacagttttcgtaaataaaaaccataaccgaccgattagttataaaattataaaaaccgaccataaccgactgattttcacccctagttgtattttatttttctacctttcatatatatatgtaatatatatagtgtatatatattatatattatgtgttgtaatatttctttaatctctttattgatccttgtattatattgtaatagagttataatatcttaattttcttccattgaaaatggtctaataacagaagacaaaggtcacccgtatgttttcagctattacaatatatttgtttttgcttcaatagttttgattccgaatttttaaaaatttgaagacattttctaacatacaaaaaagataaagtattttttctaaatataaataatcttattagctttggtaggatataaaatatatgcatataggctcgtttgataggctatatcaagatcgtattatattaaataataaataatattatctttgcataaattaatatattgtattaattattacgacaaatttttttaatacaatgtaagttatattatttaatatataacaaatgatacgtattagcctgtattataatatttataaagggtctagactcaacctcaatctccgacccggatcgcgagacctgaacttgaactcggccccgacctcagattgagacccaaatccggactgagactcgtgactggaccagagacccaaactcagacttggaccta

SEQ ID NO: 172729 - DNA, 791 bp, Cannabis sativa
caatcagatgatagttgcagggtgattgttgcacggttgcgcggtagttgcataagacgaaagtttcaatcagacgatggttgcagggtggttgctaggtggttggctgaaggttgcatcagatgaaggtttcaatcagacaaaagtttttaggtagttggccgaaggttacatcagacgaaggtttcaatcagacgaaataactattagcaaaatgtttatgcaattgtaatgcaactattgtgaaacattaaaaatcagaatagtgtttccacgtacataactctatctacatgtctttttatgatttaatatgaacaaattcgtcattagtaatttggaaaacaacaaaaatacatcaagataaatattttactatagtattgacatgctttttttttttggaatatacttgagttggagtgtttgggaactccagttcaactttttgagacctgcctttcatggatctgaaaattgaagtcaggacattagttttatgtaaattaaactggatttccggttgaattttagtttcgtagtagtttttctacactttttttcatgaattcgaaacagcctgcgttttgattgattctggttgtcttctcaggtgaagtcgccgaaattaatggtggttctctttctgattgaatttttgtttcgatttcgcgtagttgcgcgataattgcccaagaaacatggatttttggttgaaggtgtatgtaagtggtgtatgtataattttttttatttaggctgtatatttatttatttggccagctgaaagt

SEQ ID NO: 172730 - DNA, 605 bp, Cannabis sativa
atcataaagatgtaaaagagacatatcaagtatagaggatgatcaaatttttccaaatttcaaaattaaaaagaaacaaaaaaaataaatcaagcaggtaaaattgatctcaatgttttattttaattttggagataaacaataagaaaaaaaacaaaggaaaaacctttcgttgaaagagtagtggatgattccgatatcaacgatgacatggccatcttcttggcgcgctgatcatcgcgcaagtcagtggaggagatagtccaatcctggacggcattggcggaaacaacggcgccgtcactggctggagcagcggagacagcgacaacggaggaggcggtggagtcacggtgaatggaagcagaatcggaggatgtgaagcaacaggaagaggaaccacccgtcgtctttttcgaagctggggccattgtaatgggttcgctagctcaccaattccaccgaaataagtctcaatacaatccactgacatacagcaaaagtctctctcaccttctaacgctgcgtggttccgcaagcgaaaggaaaaaaaaaacttcgagaagaagcgaaaaccagagagaaaatctcaaaaaaaaaaaaaa

SEQ ID NO: 172731 - DNA, 556 bp, Cannabis sativa
ttatgtcaaattctattgaaatctagctaattaagactatatatttgatttatattaacagacctttactaaaaagaaaaaaagaaagaattttagtaatttttttatttatacttcaataacttcattaaaagtcacaatattttgaacttttgatgttgaatatacccttctagaaaatgtacatatatacactcaaaaaaacttaacaacgtaaataatttagaaagaaaaaaaaaaattattattttttataatattaaaaaaatactattataaacaatagtaaaaaataaaagaatataccacatcataagtttactaataatattttaatttttgctttcaaataaatatatttaaatatttcacataataatatattgtattacataaaaaatcaaaaataaaagttaacaaactaataaactaagtttaatgaagagttttgtttattctacataaaaatataaatacatacattatatttttaaaataaaaaatgatttatttaggttttaaattttataaaagatcttatcatataatcactaaa

SEQ ID NO: 172732 - DNA, 700 bp, Cannabis sativa
ttatacaacaacattccattatttaagactgaaaagtttttaggccaaccagccatcacctcatctcgaacgttgactagcttagaatcttctagttgtgcttttttgattctctctaacagattagattgaagtgtcaagttgtgcaactttccaattacaaactcaatcccttcactaaccatctcaaaagctagttgaggggctatcatagcagtagtggaaatctgcccgggacctcttttactcaaagcatcaaccacaacattagctttctcggggtgataaagaatctcacaatcgtactctttaaccagttccagccaccttctctgcctcatatttaaatctttctgggtgaaaaagtacttgagactcttacgatcagtataaatctcgcatttttcaccataaagatagtgccaccatatctttagagcaaaaaccacagcagcaagctctaggtcatgagttgggtagcgctgctcataatccttcagttgacaggaggcataggctgctcataatccttcagttgacgggaggcataggctatgactttatcagcttccatcagaatccatcccagaccctgtttggatgcatcacaataaacaacgaatttctcttgatccgatggcaaagctaacaccgaagctgttatcaaacgttgctacaactcctgaaaacttgcttcaca

SEQ ID NO: 172733 - DNA, 622 bp, Cannabis sativa
  modified_base (54)..(79): a, c, t, g, unknown or other
tttatcaatagcagaagtaattttttgaggaggtaattattattattattattnnnnnnnnnnnnnnnnnnnnnnnnnntattattattaattttaaataccataccaaccctaatatttttcataatcgtttgtctttcattctcaatcgcttaagtctctctattctaaggctacccaagccatggtcgccactcctattcctggttcgctgtaacaccctactaatttaggcatgttaacgtaatttttaacttaattgtgcagctcgttgctaatcaatgagtttataaaacatcgtgaataattaaaactttatttaacaaatttataaaaacaaaaataatttacttgtattaaactgggatcccgttacaaaatatttacaaaagttttacagtgcataatacaaaagtttgttgcccaacgaatatacaaaatatgcccagctgtcccaaagactgtacgctctaggtctaactgccccaacatgtacaatcttcatttggtcgctctcacggcttctcaaccttagcgttgcccttgcaaacaatatctatgagtcaatagactcagtaagaaaagcataatcaataacatagctgttgggattttatgccct

SEQ ID NO: 172734 - DNA, 899 bp, Cannabis sativa
ttacaaaattacagaccacgaacaacaaaatattttcacaatcaacagcgatgaactccattgtcgacgatgaaccactatgaacccaatagctcagtcgatttcgaacagccacgaatctcgaagttctgaagcttcgtcatccacgaacagccctggttctcgaagcttcgtcgtgcatgaacttccttgaaactcaaagctccgtcgacgcgaaccctcattgacctgagaaaatagagaaagagagagagagatccacacaggcataaagaacaccaaaaaagtgagacggaggcggatatgagatttatccgacaaaatgcaaaagtgagtggcagatctagaggtttttgggggcaaggatttcggttatgttgttcgttttcgatagccagtcaccggagttgggttggctatgggcagacgaaaaaaaagaggaatgaggcccagtggaatagagagagaagaaagaaagagagagcgaggctaataacttaaaaccctaattccattctctttttctttccttttactatttttttttattttttttaaaggtccttatttttcagcgtgtaaattaatgcaaacatgctatactagctgctagggtcatttatgtattaaaatagtgtaattttttagaaaaaaaaaaggaaagagcattaataaggcatgcatgcgtgtctgtctcattattttctccatccaaaaaaataatacatttataaataaaaaaatatattaattacagctgttttttttttttttttttgagtttatggttatgatatagtgacgcgccaggtgtgttgggatatatttacctaatcgcgcctagcgcgtcactataggtcaatattttttttaaaaaaaaatataataaaaattatgag

SEQ ID NO: 172735 - DNA, 519 bp, Cannabis sativa
caattttgataaaataaataatattattttaggtaaataggataagtacccaaagttttatatttgtaagcgacataaatctaatgtttatttttctttaattttgtcagtacaaactttgatattgtcttaaacatgacacatataaggcttaattttttgctcatcgagtctaaataaaaatatattgtatcaattactttcaaatgtttttttaataaatttaaaacagagtctgtactgacaaaactagaagaaaattacagttttaaaaatattagatacttatgccgctaaaaataaacattgaatttattccactatttaccctattattttttatattttatatttattagatatttcatatttttttgtcaacaaatcacatgtcttttgtagggaaatttgcaacataaatcttttagaaatttttacatgaaaaatcctttttgcacaatttattacaataatactcctacacgcctatataaatttttttacttacaatgttggttt

SEQ ID NO: 172736 - DNA, 910 bp, Cannabis sativa
taatgagctagctagactagatttgtatattatgaaacgttttatttccagggtaatttgaaaaataccacttttattaatcaattgattaaatttacctctaattttatatttaattgaaacataccttttttttatatgtattgtacccaaaatattctgacataagagagtcacatagagagtatcttaaagtgacaagggcgaatttgatacaatgtttaaaaaaagaggtaaaaatggtagactttaaaaaagagggtaaaaataaaagagagcaatataaaaaaggtatagagtgtaatttcctctttattcccttcctcctaagtatagttgttcaaacatacaaggaaatgggccggagcccacttttcaatgggctgggtcatgggcctcgagatgttccaaccatttagaccattttagcttcgaaacaccgttttttttattttttgtttcgaaaattatacaaaatttcttaaaaaattgtggtaggttttatatatatttttgaataaataagaaatctagggtagtaactatttttagttgtttccgtactttcacaaaagaaatttataaattttggcattatctccaagcaaacaaaaaaaaatatagatattatcgtaaatttcctatcaattgttaaatttatcagttaagtaattagttatcgaaaaaataattatcgtcaagttaacatttcaacatcttatagcactaacgatgagttaataataattattggttactttcataacaaggaagacagaccatgaactatgatgactacttagatatttatatggatttactccatccgcagacagattgagacgaatatgtcttggtttagatttgaattcaagatttatgtaatttactttttttcaagcttgagaat

SEQ ID NO: 172737 - DNA, 591 bp, Cannabis sativa
cagagattttctaagatgcatcgagctcctcccaacgagttaatttagatgcaaagtccgtgttttgcaatttggggaattgacctgatcgggcaattacctagaggcaagggaggagtgcagtacgcagtggttgcggttgattacttcattaagtggacggaagccaaaccactgatacccattacatccaaaaaagttcaagactttgttgtgaagaacataatccaccggttcggattgccgtaaaaattgtttcggacgatggcaaaaactttgacaaccagtccttcactgatttttgtgcgaacaatggtatcatcaaaagtttctccgtagtggcgcatccacaagaaaatggtcaagttgaagcagtcaacaagacactgaaggatacattaaagaaaagactcgaggatgctaaaggaaacttgccggaggaacttcctgaaattcttatgtcgtaccaaacaactgagaaatgggtaaacgagcagactccatttgccatggcatatggatatgaagctatgctgcccgtagtgctcgagccaccatcccacagatgagtgacgtacaaccaagaaacaa

SEQ ID NO: 172738 - DNA, 1036 bp, Cannabis sativa
aaaactatgagtcattatgttagccgaacgataaagaaacaaaaaaaaaaggtaaataccattttggactagggttgagcataaaatctagaaaaccgaaaaaatcgttcaaaccgacctaccgaacaccattagaactaaaaccgacagaatcaaaaactgaaaaaactactaacggttaaaaccgccattgaacggtcatttttttttttggtaataaatcgaccgttatatatatattaatttattaagttttttttttttttgctttatatattgtagttactaataatatataataatatattattatttcattaatattaaaattaaaaaaataagataattagtttttgaacaattaatttatatgtttgtagttataaaatgtataataatgtgtttatagaataaattggatcatatttttttaaaaaaaaaaaaaattggtttgggcagtttaaaccgaccaaaccgtggttcaaaacggtcggttttaagataggttctggattggtcggtcgatttttggattgcaccaatccagaccgaaaactgaattcttgatttttatatagaaaaaaaaaaaaacaccgatcaaatcgaccgatgcttagccctattttggatcctgtattttgtaaaagttactaattgtacattctgttttattaaatgataaaatgaaccctgtactttctaaaatggtaaaaataagaccctaaacttaactttcgacaacttttttttttaatataatcaacttgaagataatttctaatacataaaatataaacaattttgtcataataactttagattagattattattaaattttattttaataaaaacattaaatatgatccaataaacaactcattaaagtgaccttagagagagaatcctcacccaaaggggtcccatcgagaaatgctaaagggcaccaatggtgcctagcaccctcctacgtgtcaatatcgctattggggcaattaagtatcgggtcccatatagtttaatataataatttttat

SEQ ID NO: 172739 - DNA, 1056 bp, Cannabis sativa
agttcccacggccaccgatccaaaaatattttattttaaaaatagtgtctacaatactcccataattcgataaaatcttcttaattaataaaatatgctttatttatttatttactcaaaatccactaattaacttgtaattggtttaagtaagattatactcttactctaatatttatataattatatatttaataaaatatgtctaaataaatattaatatatttttcgaaatattacaagtcatgtgagaatgcaactaaggcaatcaaggaaagttcgagcattggcagaatgctaacaacaatgctcgatactctcacggttgcaaatatcatgaactcgttgactgaactgttcaggatggcgtcagatcaagcttgatttgaggcgaccaagaattttatcaatgcacggatgaatcctcatcagaacgtgcgtgatcacctgctctagatggctagttacttccaagaagctaagaatcatagagctaatataaattaggaaactcaagtgagtttgatcctaaatagtttgactgcagcttttctgcccttcacctcaaaatatgtcatgaacaagttaacttttgacttccatgagttaatcaataactttcagacatttgaaaatttgattagaggtccatagaaaggagaaaacaaagctcctagttctggcactgctaatggtacggccaaggtgaggcaaacattgcctctacttcgaaacctaagaagaagaagaagtggaaaaatagaaagaagcctcttaaagctattaacacagctaataagaataaaaaggctactgattcaaaggtaaagcaaaagggaaaatgcttctattgcaacgaaaagggccactggaaaccctagtgtcctaagtttttggcaaagaaacaaggtatttttatcttttctataaactcatgtgttttaaaataattattatccccttgggttattaactctagatctactaaccatgattattttcttcttatttcagctccagctgcttaaacttggattattatcctagcgagttgag

SEQ ID NO: 172740 - DNA, 613 bp, Cannabis sativa
  modified_base (393)..(399): a, c, t, g, unknown or other
tttttttgaaaaattttgtctatccgtacgaaatgtcgttttcgaaaaacgacatgtcgttcgctggaagtgcagcgcagccctttacatgaaacgacacgtcgttttgtctgaaggagagcctaaaaacgacacgtcgttttgaggtcatcccttaccttcagctgggcacgcgggtcaaatccgggtcgtgcgatccgacagcgaacccgattttccgaccgactggaaacaccacctccggtgctccgtttccgacgccgtttgaggggaaattcaccatttttcatattctctctttttcccaaactcatttaacttgaaaacactctaaacccgtaaatcacatacccatattcggccattaacaaacttttttaaaaaagcttgggnnnnnnncattttcaacaaaaaaggaaacgggaaatatggtttaaaatatagattaactcaataatcatcttccaatcaaattttctctacgaataacttgaaaaatccatatatataattttttttttaaataataagccctaaaatcaaatgcccaagctcatgataccaattattaaaattactacacaatgagtatactattatcaataataataaa

SEQ ID NO: 172741 - DNA, 779 bp, Cannabis sativa
ctttaaaatccatctcgaggtccacatctgcaaaggaaaaaggcccaagtaagacaaaatttgataagcaaaacgaggatataattatgaagataaactcccacctaaactacacttaggaaacttatatgaggaagaaaccactaattttctaaagatctaaggtgttaagtggagatagatcccaagttgcagccgtagggatgtttgagctatactggtcaacgatgtcataataatatgagctactacttattaattaattagacatggaatttggggtactaactgtcaaatctatgagcgataagatcaacacaattccaaacataaaagttattttggttatccttaaacttgacgagacaagttggttctgcactaaggacggtaggtgactatccgtaaaaatgattgactttaacttggggagtcccttcggggattttagcggcttcccagattattgtattgtgaatatatatagctcgagcaacatagtcgtgctcctcttcctcgggggaatgggcaccgaatcccagattacgtacttcctcaactcatccatagtagattggtctttctcgagcagaccacaatttctcgagtgtacagctcgatcgtgcaaaaggaatagggtaaatttaccaattgctgatggatatttatgttttgagcattgattttgggcccaacaccttctataggtggcgtctcatgattggtcagcaatattccctaaaagctattttcttaacgagcattgctattgggcacca

SEQ ID NO: 172742 - DNA, 689 bp, Cannabis sativa
  modified_base (482)..(483): a, c, t, g, unknown or other
tcacttgatgcttgtttgagtgtcagggtctccgtttgttcaggtgctgacttgacctttctattggtgagttgtactgccaagtgacattaattttctccatgtgagcatgccacgtcatgataacaaaaattaggataacaatttgcaatttggcttagatgcatataagaagcccatttattttagatatttaaatagactaggttgctaaaataaaataatcactttaatagttttatttagggccaattagtattgagcttattcaattaataacaattatttatttaaggttaaatttctctcttttaggccttgtgtgagagttagggggccaatagtagtgggcacgacatacttaatccaaccctttctcacatgaaccaccccaacattgaaggcccatttaccttatttaaataattttattaggctaattatattagtttcacctaattaaaaattgattagcaacatanntaattttaaaataaatgaaaattaattttttattggattattttaaaattaatttagaaaaatacacttagtttaatgaaataaattctaaataagctaagttggatttaagtttaaaattaagagaaaaatatatttaagtttaaaattaagagaaaaatatatttaagtttaaaattaagttcagatcaacttaaattagaata

SEQ ID NO: 172743 - DNA, 611 bp, Cannabis sativa
ttgatattttactattattttaatcatctttttttatataaataacataattctacaaattaatattttattattattttaataattttataagttatatgagacttgctacttaattacaccaatagttgtatgataccaaggagggttgccttttagcatttctcataactaaaatatcatatttattttttatattttttttattttttttaattaagatatttaaaaaataataatcattttttttaatacttattgattaataataacataacaaactaataaattttctcaaatattttaaatatttaaaattcgagataaaatttaagattaagatatagatttgaaaaatacaatagtaacgactacaagtgaactacgacaatgacaagggatggatgagatacatacagacagtgataacaaacaacgggtgagatacagtgataaaaataagtgagatataatgacaacaagtgaaatacaataataacaatagttttgaatgatagagatataaaaataatgtattatggaaaataacgtaatttttttctacaccaccctatttatttatttttataaaaataattttttttaacaaa

SEQ ID NO: 172744 - DNA, 740 bp, Cannabis sativa
  modified_base (409)..(412): a, c, t, g, unknown or other
  modified_base (700)..(710): a, c, t, g, unknown or other
ttagaaaatgactaaacccaactataaatataataagatcactttgaacatataattatgctactgtatacagggtccactttacatttttattttttaaaatatatttaatgtgtaactagtgaggatttggaactgaaattcatatagtttggtatgtttatttgatttaatgggaataagtttaatattttttggagagtgatgaagggaataataaacttaagaaagtaacattatcgtgtgttgacattggaatataatgtgataattttttttttacaataataattatttttttataaaatattaataatttaatattttttttctttctaagcgtgcaaaataatttttaattatcatatttatataattttatacaaaaaattaacaataataaataatnnnnaagagtaaatttatatacaaattgataatatattctatcgaataaaatatataaaaaattaaggaaaatatttcatattttaaatatttttatatactttagtattcatatatatatataaaaaaaataattttaaaatgcaaaagtttgtgtttgccaatagcattggaaagtgaaaattacattttcattggttttccttgctagctaaactaaaacctactattttcacttagctaatattaaaatattaaaaacctaaccaaacataagaaactttcagattcnnnnnnnnnnntctcccattaccgcataccaaacaacccct

SEQ ID NO: 172745 - DNA, 707 bp, Cannabis sativa
gataatatttttatatttgtttttatgagttattttttgttgtacaattattttttaagtgtttttttaaggtgcttttacatataaatttaactctatcaattcctttttcataaaaggcctaacgatttacaaccgagtcttcgtcacgttgaaaacagtccccgaaatgcttctgattcaataattcctaaaacaacatttatccttaaaaaaataaggcatgaatgtgtaagatccctaccatgagattttgttgaaaagcatggcgtaggttgccaactcgttccacttatcctgaagaaaatgaaaagctttccttaatatctatatcttcggtatcgaattttttgtgtattttcagaatattttttagttattttttatttatgtgcatttatcatggtgtatatttttagtttatttctcataatttattttttattatgtatgtgctattttgtagatttagatacatataatgggtttgagatttaaaaattgtgttttctaaaagagtgttttggaaacaaaaatttgaattttgtatgtgaaaaattatttttaaaaatgtgattggttgtagtgtaattttgtgtttttgagttttaaaagttggacttgtgattggttaggaatcttaaaataattaaattttttttcttgttacattggaatggtcattcatttctttttaaaatggaata

SEQ ID NO: 172746 - DNA, 547 bp, Cannabis sativa
ttaactcatttcgcttgttgcttgacagtttccatgccttgtaaggagactttgtcttgctattgacaaggttgtattccacatgttctcagtcttggcttacgtggacatgccacgttgggtggactaaatttgagatatcagggatcacaatatgagggatcaaaatatcgagcatctcaatattcgggacatggcgtttaagatgaaggccaacgatctcaagatcaaggtgaaagagctagaaatgactcacaagtttatagtccatattatgactatctcggtggatcaagaaatagtcttccacattattgtattgttgtatcacattttatccttgaaggttcatatctatgttgttacttttctgtttaatgtgtttggtttgtttaattttaatttttaaatgtatgttttagtttgtaatacttttattatgtattattgattgtgcttaaattttataatgttctattgtataacataaaatatgtgtgctcttgattaataagaatataatgtctagtgtgtctaattttaattt

SEQ ID NO: 172747 - DNA, 717 bp, Cannabis sativa
agtaactagaactgagatgaaccgctctaaagccttattgtatttacacgtgtgagcgtaatacgtgggtctacgccacatagacataaagaggcgtgtgagcgtaacacgcaggtctataacaattagacaatatatattataatatatgtgaaatttataattgtgattaattatatttattctattttgatgggcttggctcacgtgtgctctactatacaggaaaggataaatctatcacttatcaaccatgagtgcgagggcttggctattcttgtacatgttctgaccatactagaccaagcgagttggggtttaccagtgacgtattttgtaatcctaattttctcgcttaggtcgacacgtaaaatagacttgtaatattttgtgaaaatatttatgggatcccgaagcatgtatcttttgattgtttataaagttagaaattattacaagttaaattttcatcatgttgtaaataaagtttaaattttttccgcgcttacttttctagtaatcccagtttagaggattagggtttcgtaatcaattatcgtgacgtgtctaattgttaaggcgttacagctcagtatcagagcgccaaggtttttaaacttcatgtagacttggcgaacatgtacaatcatcgttagagacaagctcgactcgtggtgcagtaagtgttgagagtaaacagaagtatttttcattcat

SEQ ID NO: 172748 - DNA, 563 bp, Cannabis sativa
ggcataaaacccaacatgatctagttctctttttccgacgattctcccttcgtcttctcttctccttccaagatctttcgttcttctcccctgtatctgcgatgtctaacaatgatcaagaagcagggactgaaacaggagttcctactcctataattactagaaacccacagcaaatcattgatcaaagtggccagaatattcagttgcaaggatcgagaaatccacttgaagacccctcggatccatactacctccatcatggtgataatcctggaaacattcttgtttctcagccacttacgggaaaagacaattatatttcatggagccgtgcgatgcaactagcctttttagtcaagaacaagctaggattcttagacggttccattcctaaacctcctcctactgaattcaatctttataatgcttaaattaggaataataacattgttatatcttggatccttaactttttgtctaaagaaatttcctctagtttgttgtatgattaatctgcaaccgcaatctggactgaccttaagatttgtttccatcaaaga

SEQ ID NO: 172749 - DNA, 884 bp, Cannabis sativa
ggtggtggccttggtttggcgggtatcattactgagctttgcggggcgtatgatgtgccacaacttgaatatgacaatactgtggtaccgctaagaaaaatggacatcactatggtcaacaggctaaaaaggcctcatccttatggacaacccccggctgatgcgcaacaacaaggccgaaggcggcaaagagagcctagtgtcgaagaagaggaggacgagcccccacaactccttgggtctattgatccggcgatgcagtatactcatgcacagctgagttgcataattcagcagaataatcacatgaaaaactatatggtgcaaaggagtattcatgatgaaggacaagttaaccaaatcaactctctgatcaacataatgaacattgggattgacgacccgaattacttggcgccacctcctcggctttatctgtatgatcagccgctgccaccaaaccctttttgaaagggcctcaggtaagtctctcacctttgcgttttattgtacacattggggacaatgtaatatttagtttggggggagagatttaaaaatttttaatttctgctttaattttttatgtttttagttaggaatgggcaataagctaaaagataattgtgtgctgttgtttattgtaatgtgctctgaaattgcaaaataactgtatgcttaattctgttaactctttggattactttggatcttgtaaaacctgtgtatgaatgcaatttgatgatctgtgaaatatgtaataattgttttactatggtttgtggtaagattgataggatagcttagaacttgcatgtcttattgttttaaggtgaaatacttgacaacattcaataggaatatgatttaggcatttgttggat

SEQ ID NO: 172750 - DNA, 809 bp, Cannabis sativa
ataattaagatgaagatttaaaatggaagatgataagatgataattaatatatatgacttactgggtaaatcccaaggttcgcacttgtttaaatcggcatctgcgattgcagaagcgatgaaattagagttcaaaactttctcggtgagatagtaagtaatgatttcttcatctgttggatgaaaccgaaaaccaggtggtagatcgatgaggtgattatgattatggatctgtgatgatgatgatgatactttttcttcatagctatacaagttgtttcttccatatatagatgattgagactatgagtactgaatctgaaaagatttagaaagagagagagagagaatctgatttgaatttttttttttgatgggtaaaaaagaggagagaagtgttaaaagaaagtggagaaaagggaagagaagaagtttatagaaagaggagagaagagagagagttgttcagttgagacagctaattaagttgtgatgatatattcttctatgatgtaagatccgtggtctgcaaggcatcttactcatcaaatatttatatatatatattatagggtaactctaatgcattttctaaaggtgtttaggtagattttcaatctgttgtgaagtacatgaaattttttgttttttcttacgcgtgataagtatttgtttaaaatttattttcgacaaatgatcttaaatctctacgtagacgatcatgaaaaaaaattgactgaaatagataaagagtctaattgaacgatcctttaagggggtttacaacagaaatttcctataatataaca

SEQ ID NO: 172751 - DNA, 733 bp, Cannabis sativa
aaaataaagcaaagcatgtacgtgcatggttgatctttctttggagcggtcttttgatactgatttcaccgaggctcgacgaccagcagagatttgatgatgaaggtaactatctttttttttttggtttaatgattgtcgtaattgttgtgtttttttcctaattaatcattaaatgacatcaaatttatacattaagtttctactattttcaattgcagccagttcgttagaagtgtaagacttttttttttttctcttttgatataattttcaaattttaagctatttttgtatcaacctctctaccatgcaactgtaagtatatctcaatttttttttttttaaaaaaaagattaatttcaattcaaacatggtttcttttgctctttcggttttctccgggcttgtgtgaaggctcaatagagctggccgtaacttgaaaacagctgagctgattatgtatttgtgatttaattgattgaatttctcttgttgaaagagttgcatctgttaccgtgatttttatgtttgagtaatttattgattgtttaacttgtttacagtggtggccttgtatgaataaactttgattttccctgcgaaaaaaattctgatccaataagaaaaaaaaaagttagcaataaacatgttaacacttctaggttgtttttcatgtttgattcattaatggggattagtaggtccaacttaagttgtgagtttgggaaca

SEQ ID NO: 172752 - DNA, 544 bp, Cannabis sativa
ggtgggcccaagggaggaaaagaggtgtgttggcacgaccaccacgttgaatcgtactgacagtacgaggggaatggaattgccaaggaaatttcagtagaaagggactataacgccgtaatgctaaggcacgctacaatgctttttcaattacggtgcaatctttgctaatcaaagaattttcttgaaaaacatgtcaaattaaaacttttgtattaattaataagctttataatataataaaatatttacaagtgtcgggatcccgtttcctaactttttaaacttattatcccaaaatacataatttacaggtcgctcagtgactacaaaatataactcccagacgtcccgagaccgaacactccaggtcgcgccacttcgacatgtacaatctcaccctagctcaggttcactcctgttcagccttcgcccttccttttccaacacatggaagtagaactatgagtcaacagactaagtaagaaaagcatataacatatcacataattttcgactggtacttaggcgcccatacacctat

SEQ ID NO: 172753 - DNA, 773 bp, Cannabis sativa
aaaaatgcatttgaagtaatccaagcttagctgaagtgatacttactatactaatgtcctattcgactttttagtatatatagaagtcatatcttagcaatggacctcttatcttagagacaacttcgtcgtaacccgtttgtttaagaggcaatcgattcacttgtacaaggtagagtaaatctcactgtgtagtagtgagttgtgttgaggacaactacttttattggtagtatcatccactactaggaaaaccccctaagtccatcaacattagactagataaatttttcgagtctcttttgtattggacatgataacctgagacataaaaagggtatttgactagaaaaacatttctagtccaacattattggaccataaaagcattcccacaacatgaaacttaatttttggactagaataacatttatagtccaacaatgctggacttgaaaagtgatcccacgctgggaacacctttctagttcaactaagttggacttgaaactagattttttttctaaattaaatgctgtaaaattaatttcattttttatttttatattaaattacaaataattatttgtattatataatgtatttttttttctaacaaattatttataattaacttaactcaattaatacacataaaaaagataagaatttcataatgatgcaatggttgtatacttcctgtacaccattactagattcatggatgtcctgatcatgaacttaagaaaagctagaactattaactaaggttt

SEQ ID NO: 172754 - DNA, 566 bp, Cannabis sativa
caccgatccaatcaaagtcgttctttctgcctgagacaagcatttagctttccatccctccaaacggcaaacaattttttccttgaggaaaaggaaatcctcacgtttccaagctgtgaaaaagaaaggattcccaaggtatttttctttggaattgagagtgttcattcctagcgttgcttttaaatcttccatgcgccttgtatgcgaatttggagagaaaatcattccactttacttttattgacttgttgtctcgaccacttctcatatttttacaaacattcgaggaaagccacaacattgtgttgagtggcatgacaaaagaaaataacataatcagcgtaaaacaaatgagtaataggagacgcagtacgagagacttttaccccagtcaactcacccatggattctacatgtaatattagtttggacaacacttcactacaaagaataaatagaaacgccgactgcgggttgttagaactattttactaggatctagattcactaccaagtatgttgtttaacatcctaatatgaatttctaaaataatttaaataaa

SEQ ID NO: 172755 - DNA, 537 bp, Cannabis sativa
tctaagctctgtcaatttaaaaattgcaccactcgagtttttcgtcttctcccctccttccccttcatcttctttttcttcttcttcatggctaccggagttgggaggagctcaaatctcagatctggctgtgtttgggtaggtgtgatgggagcataggatttcagaatttttccttagtttaaactaatttttggatctcacaattgtagatctgagctaaggctttgtgggcatcattgccaatcggatatggaatttgtatctatccatctttggcattaaaattacaaatctaggaaaacagtaggaaagtctccatcttgggttagtttcaagctcagaacatactgtgaaatcaggatctaatattggggcttgcatcggatgttggagcttacgaaaatgcaactgaagatgggaaaggatccagatgccggagcttgggaagaaggtcggagctagggaagatgggtggagtggacaatcgaaggagaactgggaaagaagaagaaaaacaaattaattagttttaat

SEQ ID NO: 172756 - DNA, 616 bp, Cannabis sativa
  modified_base (189)..(193): a, c, t, g, unknown or other
aaatctctaacttaattaaactctaagatatatagaatatataaagagatatatcaatatatagatagatatctttatatattaaaagtgcctattgaacgacatttcttagtttaacagaatatattttaaaaataaaagaatattctgttaaatttaacgtattaggtttgatcctcccgttaactnnnnnaaatatataaataattaaacccaataattaaaccaaaaaataaaataatctttttttaaacgtttaaacccaataattaaacccaaaaattaacaatctttttttaaattaaaaaaaaaatcaccacatatctctctaacataacaaaccgtatattcccaatttttgatttttttgttagttaaacgttaacaaataaataaaaaattaacaaatattaatattgttacacgattagcttaacaattttttttttaaaccaaaaaattaaacaattttttttaaacgtttaaactaaaaaaaccgtttataacataaaatatttaaataacaacgtgtatattataggtttatatatacaattatgacattcttaacaattagttttataaaacatatcgtttataacataatttacaatta

SEQ ID NO: 172757 - DNA, 608 bp, Cannabis sativa
  modified_base (409)..(417): a, c, t, g, unknown or other
agttaattataattgtagttcaaccgtaatacttttaattttttttagaaatatcatatacatttttttaaaaatatttttttagtaaatgaaatagataacaacgtaataatattaattttttaagaaacataaataatttttaaattttttattttaaaaaaaatattgatagaaaatatattttttagaaacgtggaatgggtaaaaaaataatagaatatatttgtttagatatctaccatgattttaaatttgaattgcaatgtttaaaaaatattttatgttatttatctacatttaatataagaaaagataaaagaaatatatgtagtgaatttaaaatatgagttgtaatattttaaaaagaaagggctttttttaattttatacttcaaaacagtttttnnnnnnnnnttttttatatatatatttttatagaattttatatagaaactcttattgcaactagcggagcaacctaaatcgcaaccagaaattgtatagtaactcacataaaaactaccggagaaagtactttagaaacttaaaccgtaaagttaaaaaaaataatatatatggaataattcccctaaaaaaaataatat

SEQ ID NO: 172758 - DNA, 677 bp, Cannabis sativa
tggcgttgaagtatttagccacctccgtacttgagactcatctcggagctcgtacatttgattcaacgcttcttgtaataaggctttgttcgttgccagatcatatgttgcccttctatgagatgggaacaaggtttccacgggtaccacagcttcacctccgtacaccatagacagtggggagtgtctggtcgtggttcctggagtagtccggtaggcccataatactcgtggcagttcttcaagatagttgtttttataggccaacaactttttctttagggtaacttttagtattttaatgacggcctctgccggtccatttgtttgcggccttgcaaccgcggagaagcttttgacgactctgtgttggttacggaagtttgtgaattcttcgcagtcaaactactttccattgtctgagactattttctgaggcaagtcgtatcaacacacgatgtttttaataataaagtctaacgatttttagcggttatggtcttcataggctccgcctctgtccattttgtgaagtaatctactgccactatagcatactttacacctcactttcccgttggtaaggatccaaggagatctatcccccacaccgcaaagggctaggggctagtcttcaaggtaatttcgttgggcggggctctcagtatgtttaccaa

SEQ ID NO: 172759 - DNA, 522 bp, Cannabis sativa
  modified_base (494)..(496): a, c, t, g, unknown or other
tctctctctctctcctctcttcatctatctcatgcacctctaaggcaatctcactatctcattagagatctgcctactgattcatattttttatcttatagagagttatatcagatcccacctataatgatctgaatagtattatctctaggtatcaatacaacgaactgggaagtaggtcattacccgctatcacaaaggggtcgaacctctataaaaaatctatgtgtttactaattttcattcatgtttgtgtaacacgtggcaagcaccagatatatatgacatccctgtcagttgatcactttttgaggtcaacagtttggtgctttcattgagagcaagaatatcgtatctgatcaaatgtcatggttaacacaagaagaactcatgtcacaccatttgcatctttgggtctccttcaagaccgatagattgcagatctagatactcaagttccaatcacaactggaatctgttgggttttatgcccnnnataaaactctttacaatctgattagt

SEQ ID NO: 172760 - DNA, 514 bp, Cannabis sativa
  modified_base (329)..(330): a, c, t, g, unknown or other
gttgctctggtccatcatcaatggaagacgtgctaccgaagcagagcaatataatcgagaagatgagcaaagcaaagtagtgtgaggaggtaatcccctaacagtggtgtgaagatgagtaaatttggtaaatttatgttaattgtgacctgaaattaatcgattaagggtatggcaccagggagttatggtggaatggccattgatagagaagtaggcgtactgcaagtgtccacaaacaatatttgaaatttgtaacaaaaatcaatgaatgaaaaagaagactacgaagaagaagaaagacttacggagtgcaaagccatagctgnntttggttgatcgtaaaccaaagcgtgagaattgaatttgataatttggggatatacggtttgttagagagatatgtgactattttttaatttaaaaaaaaattatttgattttttggatttaattattgggtttaattataggatttatttgttaacgggcgatcaaacctattaacatcgtta

SEQ ID NO: 172761 - DNA, 1102 bp, Cannabis sativa
  modified_base (1021)..(1034): a, c, t, g, unknown or other
catcatatatatatatatatagaaggcttctgagccatttaaaaaggaactaatctgtacatcttatgaagagggttcatttccattaggctgtagtgtattatagtagattgatattaattttgtacagtggatcccactcactaaattagtattttttttatttttttttttttgaaaatgcactaaattggtatttttttttttgaaaatacactaattttgtaagaacatgcctacttctgcttcgtaggctaacctgacaaaagagctcccatttacagctataatttcagagatcaatcttattggtggatctgaagggtgtgggtagatactggcgcttctcgccatgtctgctatgattaaaatatatttaaaacatatgttgtttctacggaggatcagaaagtgttgttgggcgactcccacaccagtatagttgatggtactggaaatgtggaattgaacttcatctctagaagaactgtgattctaaaagatttgatgtacactccagggatgaggaagaatttggtctcgggctaccttctcaacaaggcggggttcacacagactataggagcttatttgtttactttaactaaaaatgggatatttttagggaaggggtatgcaactgagagaatgtttaaattgaatgttcaagtcaataaaggtattgaaattttcttacaatttatgctactccttactagattaggcatgttactgtatttttttgtttaattactgtgctaactttttttaatcaaagggttaattagtaaagatcatacgtattaggatacaacggtcagtttgttaggagattttttttttttttgtttgttttgctctgataccatgaaagactctgtgaaaaacagagttaaagaaagagcagtagagagaagatggacaagtgagaacatggaaagctcaatcaatgtgattggttttgatggtctattatttatatatgtacagaagagatgtgatatgtaacaccctaactaannnnnnnnnnnnnngtgatttttaaacatgctgtgcagatcgttgctaatcaacgaggtttatggaaaacgtgattaattaa

SEQ ID NO: 172762 - DNA, 558 bp, Cannabis sativa
aaaaaaaaaaaaaaaaaaaaaaaaaaaaaatatataaagaaattttgcttttttttttttttttttttgtaattcctttcaattaaaaaaaaaacccatatttacatattttttttgagtttttccatctttacaacttaaagtagtttttttttggtatttttatagaaattcatataacaattcttataacaactaaccaaataatttaaatattaatcaaaatccacatatcaattcacatagaattcactagaacaacccaaacattaaatttacccaaaaaaaaaaagaatagatatttatataatagagtaattatcctattttttttacattgttttaagtaggggtgtgcagaaagtcacccgatctaattacaaccgaccgaataaaatcggatatttaatcataattggatcggatcagatgtaaattttaaaaatttaattggatcggatcgaatattagataagacatccgatctaatagataaccgaaccgattcaatctaatgtcatccaatatccatacaatcatatttaatatttataattt

SEQ ID NO: 172763 - DNA, 869 bp, Cannabis sativa
ttatgtgtgtcataaagtcgaggagcacaaccttcagcttataagctccccaaaaataactcatccaagataaaaaaaaaataaaaaaaaactctttccccactcttcaactcacatatccatttctcttcttgttaaagaagaatataaattggcatgcatacaatactaagcggtgtcaacacttcatgaagtatatagctctgtgaaaaaattccacaaattcacaatgcatatgagaagctatgtttcctaattgaagaaaattcacataggaaaggattccttttctctaatatataggttactactttaattcctctattttcttttcattcaaggacatgaaaaactgaaagtaaaatgaaccttttttttttcttcctttttgatacctaattcatatatgatattatgtatattcaactctaatacttgaattcacttaacacctgccaaatttggttcaaatattattattggactccaaattgacttgcatgtaatatcacagtaaatgagaaatgagtattgaaagtttatccataatatcaaagaaacatccaaatattgctttatatttcattacttaaatcctattgaaactaagacaacaatattatttattggacctggtaatgtatgtaggtaaaggaagcttgaagttcatcttaccattagctttaagcttcatcagggaagctaaaatatgtaattgtgagctaaggtggaatcatattgacaaggattataaaataacaacaagaactgcattagacactacgatttaacatactaaagcatgcatcaacaattctatagtttatatgcaattgagttggactatgcccatatcatacctcaatcac

SEQ ID NO: 172764 - DNA, 644 bp, Cannabis sativa
gcacgtcccaccctgcaactccttcgcgcgcgcgcgtccgagcctatttgcagcctcctgggctgcacgtgcagctcctgggcagccacctcacaaaaatttgattttcatgtgattttttcccaatttcagattttttaatttttaaaccctaatatctaattaaaatattatttttatcatttaaacctaaatgtaataatatttattttttaatagattattattattttttgatattttgatgtttaaatttaaaaatgggctttttttaattttaaccaaaaaaagtaacaatattacgaaaatactttcagctggccaaataaacaaatatacagtccaaagaaaaaaaaatacacaaataccacttacacacaccttcaactcaggatccatgcttcttgggaaactatcgtgcaaccattgtgtaactacgcagcaacccaacacaaccgaaacgaaaattctatgagaaagagaaccaccattaattctggcaacttcacctgagaagacggtcagaatcaatcacaacaggggctgctttgaattcatataaaaggtgtagaaaaactactaagaaactaaaaatcaattggaaatccaatttaatttgcataaaactaatgtcatgactttaa

SEQ ID NO: 172765 - DNA, 515 bp, Cannabis sativa
  modified_base (360)..(363): a, c, t, g, unknown or other
gaatacaaattgtcacatttttttaataagatccgactatcttctaattattcacatcattatttaagtcggcaaaaaagaaaatagtttatgacaaaaagataaatatttttttgaaaaattgagtttaagagaataaaaaaaattacaaataaatatgaaatagtatgaacttattaggggtagactttttttatttatttttatattaattttatggattgacttaattagagagatttttaaaatttaaattataatatatttactacttaattagttagatgtatttttctaatgcttccaaatacagtttttttactatacacatatacattattttttaataataataataannnnaataataataataattttttaattgctacttatcggttcttttattagtttagaaaatttatttataatttttattagatacgttttttattgttaataataatatttttttagttaattaatcaattaatatttataaaaagaattaaaaa

SEQ ID NO: 172766 - DNA, 1073 bp, Cannabis sativa
ggagaagaaaacatgttataaataaagtatattagctatgattaatattaaatgatacaagaaaattaattatttaccatatcatcgattaatcgagcatatcctttgcggctacaagtatggggaattcgtttatttcttatctctttgaacttgtcacttttggcctaaacattaaaacaattatgattttatctcaatcttaaacaattataataacccatatattgattaagctactagtaacctgaaattccaatctggttttctctttgatgaatgccctccactcaattacagttttgatgttgtcaagctttaatttcagcctttcgtgttcatttggcgcttttttgactttagcaaccaaccttgatttagaagctctccaaagatcaccgatggactgaaatatatagtttttcttccattctttctcaactatatatcgtgcctaagaaattgaaacatgttaaaaatatattaaaataagtaaataatatttaaatcaattaagcacaagcaacatacctgaattgatctccgcaaaacctccttcattccaagagtaatctttctccaatcaggtatagttattggtacgacttctctcacaagtggtccgaaaaatgaggataagctaattgattcttttctaattggttggcccaacgcgttgaatttgaccggtaatcgaccttcactacttgtagcaaatgatttcattttagtttaacctctttttttcttttccataggctcttctaaagggggagcaacatcatcaagaacaggtgaccagcctatggacctccttcttaaagagcccctagtgtttagtgcaggggagtctatggtaggcattgtgatagaaatttgaggtgttttggacctagtatttactgttggagaatttgagatgggagtaagagatattggaatgggtgttttggaccgagaggctttcttcctaagagatctctttctcttagtggaacatatctctttctcttgtccgggtgtttcctcatcttcagaagagtctctcactatcatttttcgacgtgtcttcc

SEQ ID NO: 172767 - DNA, 613 bp, Cannabis sativa
atatttttgtttaactaattagttactttcaaaaccataattttatttttaatttatattatattattgatcaagatacatttgtgttacttttgcatgtatatatattatatagctattttatgttacctccaaacatatttaaaattaataaattacattaaagtataataaattattagcaaaattagtataacttatttttattatatatattttttaaaatataaatttaagatactatctagtctctttataagtaattttaataaatatcaaaattactctataaaataagtatatgaaactataatttagttaattttaattatcatctaaaaaacaatattttaagtaatttatagaattggttagtatatttaattttgtttaaatgtaatgtttgattttttttatttttttttaaatataacttatatgatgttcaagatactatatggtgtatttacaagttattttataattctatcaaaataagtttatttataatttaatcttgtaatatctaaagataaaataagaaaaatattctttagtaacctatgaagttgttgatacattaaattttattttgtttaagtttaaagattaa

SEQ ID NO: 172768 - DNA, 870 bp, Cannabis sativa
gtagtgggtgtaaatttccctaatctttttatattgtttgataagaagcgtggagtgattaaaggatagataattattaaattataaaattactattttattcttataattattttttaataatatttattgagggtatttatgtaatttacaataattgaagaaagaaagtttcaatcctttcattattagagggatgataaattagagattttagtggatttgctatcctcttacctctcctttctctccttcaatccctcttgccaaacaaagggatttgttatctcctcccatctctctccctcctctcatctcaatccatccacttctccctcctaccaaacatagtgtatttataatgtccaaggtagacaattaaatttaaggaaaattcttataatttattctcatttttttattttttctaacttcttattattaatatataatacgtaatatatatacatttatatattatataatttattcaatacaataacttaattagtatatatgttatgacgttgaaagtttgataaaataaattttttcttgtttaattgttgaaactttattaaactaatcttttcatttttttaatgtctaataatgatgataatgtaaactgcctaaactacactgcaccgcatttttcagtgttgtttttgcagttttaaggttgttgactcaaaatttggtcaactgacagcaaaactttatttatgagtggcaatcaccacgtgtaaattataaatgcaaaaaataaaagcgacacgacaatttatataggtttgaccttcttgtttagcgggaaatgatctactctcattttaattgtattgattctagagataataccatgtagat

SEQ ID NO: 172769 - DNA, 779 bp, Cannabis sativa
tcatgcctaaccatcttgatatgtacaatcatcctcaagctctgaactcacaaatgctcatgcttcacattttctgtacctatacatacaaatatatctgtgagttgatagactcgataagaaaagtataaaatacataaacataatattgacttgcatctaggctcccatacacctatctacaacgcttaacagatgaatccataacgttcttaacaaaagtatgacatctacactacatgcacatagtacttgtcatgtactagtgttggtagagctaaatcccacctcaagtacaacttagtattgtactgcatgcactccgtactcgtcctatactagtgttggtaatactgtgtcatgccgcttagcattatatattgtaccaatgtacttcataccacaaccgtactactgttgatcgtatacaaatcacataatttagcatgcatattacatacatacacatatacatatacatatcttatactaaccttacctcattttccaaattcaagtgtgtcggtcaaccttaatagaaattttgcttgctgaatggaggtcttatgtcacaattacgcaaaataggtatacaccttgctataaccttttcagggacttaaactcaaaactaaaagtttctctattgataaatagcatgaaaataccctaaatattgaggaaacaccaaaatagggacttcgaaaaacttgcctaaaaaatgaaaggtgacatgtcatttttctaggttattgccagcaaaaacagtagaccatttt

SEQ ID NO: 172770 - DNA, 557 bp, Cannabis sativa
tgattaaaaaagaataagaagaaaaagaagaggcaggtacctaaagtcgttggttgtcaaaaacaaatgcatgctttgttgaagtcgttggtcgctgacaacaaaccctcacctaggtcgatcgctccgccatacctgttcaatgcagagttagaagaacaaccaaaaatcaatttatatacacatatatttatataacactcaagaaaataacaacataagaccccaaattagcctcttattcaaatttcaatctctgcatatacaaaaagaacaagttcggctactaataatatataagattcggaagccaaaattaaaaataccaacaatatttcaacaaaaatccaaaaataaaagtaaaataattaaacaaagaacaaatagactgagagaacaagaataaaaatcgagcatagaaaaataatgagctcgtcactatatcatactaacagtgaacgagctccaacaactcagtccataaacattgaagataaaatgaaaatataataaatagagaatggccattagtgaaaataataccaggacgcttcaag

SEQ ID NO: 172771 - DNA, 737 bp, Cannabis sativa
tcctatgcaatgcaccacaaccaaacttgaattggtctctaattaagaacataagagatttcaagaatctccaacaacaataattcatataataccaataaagcattcactatgatcagaaccagggaatcaaattcaaagtagctaacaaatgacaatacagcaacacctatagataaaacttaataaagctaatacaaagtatatactagaaggaaatacataaagaataagcttcaaatgccagctctaaatggtattgtgtagctttgaatcattacaggcgcagaggaactgtagtgctaccaacataaaatgcactagtttaagccttataaatatatgttatgagatggaatgcaagtcaatatggtgtccacaacactattttatgtactcaactgtatcttcataatcactgtgtactcatttgtatatgttttctgtagttgtgcgaaatttaagaatgaacagatgaattggtaaggaatttggaatgctcaaaaactgcgtgaggtgtcaaaccaagcattaatcgctgatgaaaaatcattattccaagaagtcagtactccgacttaggggatgtatcgccaaagacactaaggaaaaatgctctagaaaaatcatgcgaagcacaaagttagaaatcttgtgttaaatatcagtcaaggcgtacaccttgagggtgaaaaatgaaaatacatatccgaggctatgcctcatctgctatcatt

SEQ ID NO: 172772 - DNA, 1082 bp, Cannabis sativa
gtgtgcaatgtaggtagtaataacatagtatatatatagggtaaatattctgcgaggcttagtgtctttacctcgtaatattgggaaataaattaattcaatcaaagttaaaagaaatagactgtatagaacttttactttttgcatgtgtagaagattattatattaattatactatataaaaatattattgtattattaagttttattttctgtaaaagttataaatatattaacagttggattttaggctttggtttcaacattaatatactgcatatatttaattttaattttttttaataaaaaaatataagataatagtactttacgcaggaaaaaaacaatgaattagtttttttttttttttttatataaaattactttttaaaaactatttaacttccttaatttaattttagtcataattatcaatttttttatcacataaaacaaagttttcataaactcaaaattaattcttggggccacatgaccccactcaactttttaaaatttatttttttgtatatatttgtttttacccatataaatttaatttttattttagttttaccatcacatattataattttgcccatataaatttgtattttttatttttatttttatcttcacatattttcatatttattctcataatctactttaatctctgtaaaatttatgtttttttataataaaaataatattttttataaatattttgtcgccctaatatttgtggcgggctccgccactgacagtatgacttgtagtttttccctcatgctataggaaaacaaattcaaccaattataattaaaagaaaagaagtgtacatagtaggagtgttcataaaatatacaatctaatatgcacgatctaatctaatccaatctacaaagtgcggacatccgtacttgtgcggattagattggattgaaaaattcaaaatctgccatcgtgcatattagatgttaaaaattcaattcaaacaatttattgtaagtgtacttgctattataccttcgtaaaataaaccgtttgaactatgttctcagtattataaattattcaca

SEQ ID NO: 172773 - DNA, 683 bp, Cannabis sativa
  modified_base (486)..(490): a, c, t, g, unknown or other
tgataacataagaatgatgagtcaaattttttttactttttaataagttttattgtgattaaatttattgtatgtctaaatttatgaagattaatattagaacagaacactaataacagagtgtttgtaaagaaatgtttattgaagagaatgaattgaattgtttacagagaaggattacaattatatataggcaaaagccaacagtagttataactgaaactaactaactactaactaactaacttataactaactaacagaaatgtcctaactctaagaggccccttcaagttggagtgtagaaatttcgaacacccaacttggataagatctccttgaactgagcagggaagagcggcttggtcagtatgtctgctaggttggcttttgatgggacatggctcatgcggaggatgccttggctgaatttttcccgaactgtgtgatagcctatttccacatgtttggtcctttcgtggtatnnnnnattctcagatatgtgaattgcagcattgttgtcgcagtatagagtagagggtaatgtagtgtggacattgaagtctttgaggatgtaggtaagccaagtgagttcacaagtcgcgtgatccatggctcgatactctgcttcagtagaagatcgagaaatggtttgttgctttttggatttccatgaaatgaga

SEQ ID NO: 172774 - DNA, 798 bp, Cannabis sativa
tctctctctctctctcttctcaccagcctagactaagggagattgttgctgattcttagtgttttcagcaaggaaattcaaggaggatcaagctaaggtaaccttagacactctttagctaagttttctcaaggttttaattggtttcatgttgtgatttatatgaatgagggctgttagggttagtggtgttgaaaatggttttttaagctaattttgggttgattctaagttctagatattggttttgttgagttgtgatggaattgcttaaatttgagcttaggaacctaagatttgatctttaatggcatgttttgatttagtgagtttttctgtgaattactagttggatattgttgtgtatgcactatctaggtactctggaaagtttggtggcatttggatgagttttgagcaagaaatggattgttgggagaaacctggtgcaaaccgactagctggtttgccaagcctgtaaaacgggctagcaagttttggcaggatccccgaacaagccattttctcaactctcgtccatttcagtgtcgtagttgggtgtttccctatttcctgagttagtgtaatccctagagagtataacagaaactagagttgtgggttcgggtttaccggattagagttttgatcatgtgatttacccggtttcattatgtaattagggcatccatttagcgcaagactttccgttcaggtcggtcagcacccttgaatttggaaagaaagtaagaactgtatatagtgtgtgatatgaatatctgaatgtacgtatatgtt

SEQ ID NO: 172775 - DNA, 570 bp, Cannabis sativa
caaaaatgccaagttaaggccttgcatggtcaatctttgcggcttcattggtgacagtattgccagacagggcataatcgagctcgcattaaccttgggagaggcactcctatctgccacagttatacaagactttctagttgtcagcctgccatcagcttacaatatattattgggtcgtcctgcattgatcaagcacctatccctcaagttcaaacaccaaagggtgtgggagtggtgcgaggcgattaaatgctagctcacgattgctattgcatagagctacaacatagaaaagccagccaccagttaatggcattcttggctgaggaaagtgaaaagaaagacgaggatcttgaccctcaggttcaagatgaaagaaacttattaataccaattgaagaattggaagaagttgttctcgacccaggaaatcccgcaaagtgtgtttacattgggaagaacctggacgagcagttaaaataacagctaataagtttcttatgggcgaaccaggatcaattcgcctggagccatggagatataatagggatcgaccctaatattatc

SEQ ID NO: 172776 - DNA, 883 bp, Cannabis sativa
gatatctgaaaatcagagtgcttttctcccaaaccgtctgatcactgataacgttcttgttgcttttgaattggttcatcatctcaaacataagactcaaggtaacaaaggtttttcggcgctcaagcttgatatgagcaaagatttcgatagagttgaatgggattatctgtctgcagtcatggaaaaaatggggtttgctcaccaatggatctctctcattatgcgaggtttatcgtccaatagcttctcatttcagttgaatggagaaattgtgggcaatgtttggccgacaagaggacttcggcaaggtgacccactatcactttacctctttttaatttgttcggaagggctctcaaggctgctacaccatgaagagcaggtggggaatttattgggattaaaactcacaaggcaagctccgtcattatctcacttgttatctgctgatgatagtcttctattctgccatgcaaatcatagttcagctttagcaatcaaaaagatattggaggtttaccatcgagcttcaggacagttccttaataccaacaagtcaatcatgtctttctcacccaacacttcaaatgatgcaaataattttttcagccaaactttgggaatgccgatctgtgaatgtcatgaaacttatctaggtcttcctgcatactcaagtcataacaaggagttatttagtaatgtcaaggacaaaatctggaaactcctacatgcttggaatgacaaattgttctctattggggggaaagaagtactattgaaagttgtggtgcaatcaattcctacatacgcaatgagctgttttcgcttgccattgggtttctgcaatcaaattgaatctatgatggaaaatttttggtgg

SEQ ID NO: 172777 - DNA, 666 bp, Cannabis sativa
accaaaaatttattggccaacatccagtttctctacgagtttaaaaattctattagagttatggattgaatccatactgccaccttactttaactctcacattagtatgatattagccgttgtgggcctaagctctcacgtttttatttttgggcaccttctcaaaatatctcatactactaatggagttggtgaaacacttattatattcaaaacaactcttatttattctttcgatatatatgggacttgggttgacacccccaacacataaaccttcataggaagaccaaagtatgaactaaagctttgtttgagattcctttcactttggagttcttgaactgccaactcaactaatactgctagactcaaaactttcactcacttttcgtataaatctctcaaaagtatttttcaaattcaatctctaacgacttggcattccaaaaagtttactagaacgccatagggtttttaagggacgacaaatattgtactttgttgaagtttcttcttaacatgataaagaagatgaaagaaaagaacagagaaagagagagaagaaacaaagaaagagagaattaaaaagaattgattcattacagaactgagctcaaggagctcaattacatacaaggcaatcaagagagagagagagagaga

SEQ ID NO: 172778 - DNA, 538 bp, Cannabis sativa
aaacctgttttttatttaaactacaagaaaaaaaaaactagttttatcaacatcatcctaataaaaaaaaaacaatataaaaaattataatttaaaaataattcaaactttaaaaatcaatttcattaacattgaaagaaactaataatttcataaaagaagagtaatttgtggcgaaacccccttatgttttaatttttatacacttaactccctcatctttttttggtggcaaaacccccttatgttttagttttaatacacttaattctcttatcttttttttttggtagcaaaacccccttatgttttagttttaatacacttaacccccttatcttttattttggtggcaaaacccccttaagtttacttttctttgcaaatttaaagttttaattagatattaccgttaaatactaactgaattactacttcatcgacttcgaggttttaccgttacatatacaaagtgtatacagtggtcatccagttgatatttaacggtaatatttaactagcgtgtcaaatttgcaaa

SEQ ID NO: 172779 - DNA, 636 bp, Cannabis sativa
tgaattggaggttctggaaaaccttagactctctaaaccctatatttaccaagatatagttcagccctacaaattactaaaaccaaattagatgacaacgatacgtataaaaaaggtagcaattaaacccagaaatacagataataaacatgggagatattaaggagaaaagccacttactgtttcaagtcgggatttgagatgatgagtggctctacaatctgcgaatccctgcatgttgtgaatatctcttcgagtgcttgaagtcaaaaattaaatcagatgaaactcgcagaaaaaatgtcagtgacagagagggcatacaaattttcgaacaactctggtgatgcttttttgacggagaagctcaaatttttttcagagtttcaaaaatggcaaggatagtgcaaatgaggttccttttttcattatataccctcaggttaatctccgttagatcaaaaagatgattaatcctacgggtaaaatttgaaagaggagaagaaaagatggttattaattgctaatgtccctcgaaacaacaatatcaaaggacatgcatttttttaaaagggattatgacaaatataccctctataatcattaaaaagcacttttttattaaaaagaactttt

SEQ ID NO: 172780 - DNA, 545 bp, Cannabis sativa
atatatatatactagaaaaaaaaactgcgtgcttatacttagttttatattaggtgctatataatttaattataagtaatataaaaaaataattatatataatttaatttattattatggtctaattgaattttttttaatataaagtgattaagacaataaaaagtaatataattattttgtgaagttatttttatgtatattcaatacatgtaaataattaattctttgataaagaatattctatcattctttataaaaatatatcttctaatgcatataatatgttgtttgccaagtaataatttttttactctagtgtagtaatgtcttaaatgttctgtttagaaagaaacacacagtatttcatcatttgtgcatatacatatatacatatatataaatatatctttctttcaaaaagaaatatatatgtattttttaataaaatgtatggtaaaagatacctaggttgatgttacgtgcaatgcacgtataattagtttttttttttttttttatttaggctctagacttaatagaat

SEQ ID NO: 172781 - DNA, 646 bp, Cannabis sativa
  modified_base (606)..(613): a, c, t, g, unknown or other
ttcaatctaatccaattcgcaaaaatgaagattagatcggttattttgaattgattactttgtaatataaaattattaatatctattaaaaaatatttttttacataactaacaacaaaataaaataaattattatagttttatgtctccaacaacaaataaaatgaataaaaaaaatttaaaatttaaaagaaaaaaaaaattatatataaaaaaatgtttaattttattttaaattatactttcctcatatacaagaatgaaatatgtatttgagttatgaagttttgaaatatatttgtatcatatttattagatatttaaattattatttttgtacattaaactaataattatagacatatcttttaaaataatatataaatatgtgtggattaaatttaatcaatttttttttttagaaacaatttaatcagttattttaacatatcaattaacatcaaatctatacaaatacaaattttaaatttttcaatctaattcgcataaatatatattaaattaatgaacacccctaccttaggtggcgtttggttagaggtaatgaaatggaatggaaatgaaacaattttcattctattcctnnnnnnnnttgcattttaaagtattgaaatggcattccaat

SEQ ID NO: 172782 - DNA, 708 bp, Cannabis sativa
tttttttttttggttaaaaaaacttgattgtctatcctaaaaacatgcttagctaatctatgagcttcaacattaaaatagcaagttgagaatgacatgagagagatgccttaagaaagctagacaataaaattttagtatcaaaaaagataacacctaatttatccttatacataaccctacaaagctaagaatctaaaaagacccatttaatgggtagtctcatgtcttaagcccaacacaaacttaccaacagtgcaagtgcttgtgcttggagaacttaaaaagatactgatagcattttttaattgtaaaaaatagtataaaattaacatcccatgaaggtgaaacgaattttattgttaatgacactactaaaaaacctaaaattcccaacagttttacaccgtcgggtaaagaattactgatgatctataaaactgtcgcctataaaatcatcgcataatcagtcatattacgggctacctaacttcaaaaattctgtgaaaaatctttcatatattcttcaagcataaatctttgaaaggagaattatgatccatgtatattgccggagtccacaataccggctccgttcgagtactcccttcccgtcagaaaatatagaacatacatgaaaagaaaaaaaaaatcaactgattgttatatatttattatttaacaaatatataatgaagattaaaatgt

SEQ ID NO: 172783 - DNA, 1784 bp, Cannabis sativa
  modified_base (326)..(335): a, c, t, g, unknown or other
tgggtcttagtcctagttctgatgcttgtgtcctaagtccaagtccccaatccaggttcgagtcctaggtcccggtctgagtccaggacccaatcggggttcaagtcctggtccgagtctgggtcagagttctgatcttggcttgggtccagatctcggtttgagtctagctctaggtatgggtccgagtcctgagttccgatctaggtcagggttccaaggcccaagtctaggtctgagtcctaagtctcggtctcggtccatgttcgggtttgggtccttgtcctagtttcgatttcgattagtgtctgggttcgggtttgggnnnnnnnnnnggtcggggtctgagtcctggtctgagtttagatttaggtccagatcccagtttgggtcttggtttgggtccagctccgagttcgggtcccaggtgcgggtccaagtctaggtctgtgtcatggtctcagtttggatctaggtcccgagtttcgatctcagtcggggtttgggtctgtgttcgagtacagcttcgtatccagatccctatttaggtccgagtcggggtctggcatcgggtcctaggtctaggtctaggtccgggtctcggtcccagtctgggtccttgtctcttatcctggcctagtttgggtgtgggttgtagtacaggttcgtatccagatccctatctaggtccgagtctgagtctgggtctgggatcgggcccttggcctagtttgggtccggatgtcggtcccggtctgggtccaagtctgagtgcaggtctcagtgcgtgttcggtactggtcgttgtctcgcgtcttggcctagtttgggtcagggtcacggttaagttcttaggtcctatgtctcagtatcgggtcccgggtcccggtcccagtcccagtctgagttcaagtcctagtccaggttcaggcctcggtcctagtctaggtctgggtcccggtcctgatctaggtccgagtccgagttcgagtatgagtctgggtctgggtctgggtttgggtttgggtctggttctgggtttcagtccgtgtctaggtccgagtcttggtctgtgtctcggtctaggtttaggtccgggttctggtacgagtttaggttctcgtcaaggttccgggtcatgggtcctgggtcgcaggtactggcacaagtctgggtccaggttcgggcctgggttcgagtttcgatcacggtcttggtttgggtctgtgtgtggtttcgcgtctagatccagttttggttccaggtccaattcctattccaaggtcctgatttcggttcttgttccaatttctttctagggtccgagtttttgtttgggtcctggtctagaaatggttccaggttcgagtcttggtactattccaagatctacacaccgactgcgggtggggttgaagccccgaggcgtgggtcaagatcctaatgccaatctattgtcccagtctcgtttcgatccgaatcctgcatcctgttccctgtctgtgtctgggttcgggtttgggatcgagatcaaggtcaggtcttgggtcctagtcccagtccttggtcccgattctggctcttccccaatctaggtctggttcctaattctaggtctgagtctcctatcccggtctgggtccttggtccgggtttgggtcaaagtctgtgttggggtttaggttcgtgtcctgagtccgatccgagttttgattcggttctgcgtcccagtccgggcctgggtctaggtcctagtcagattccagttcctggactcaaatcca

SEQ ID NO: 172784 - DNA, 784 bp, Cannabis sativa
gacagtatttttgtaagaaaataggaaaagtttagtataccatgtaaatttctcttatttaaattagcccaggcctactttagaaagaacaaaagaacaggcttcccaagcccaagcccaagcccaagcccaagcccgaaccagataaatcttcctcatccttcttcatcctaggacgaatttctgtgaaaaaacggaaacaccataaaccctagacgtacctgaaacccaaggcacagtaattcgatgtcggacgatgaagcttatggctccgatgctccggaggaacttacagcggaacaggtaccttcaatcttcacttatttctttatccgatttttgtaattcagttgagagtgtaaggtttttcatcgtctttgttgttctgggtataggggatacttcaagaccaggagctaataaaggttcaaaaggagaataaagccaggtacgatactatttaattcttaaataaagttgactagtttttatctgcttagttcaatggagaatcgaagcctaaagttttggctttttgctagtaaggaataaggattatgattatttttgtagcttttgattctttataatagaatttaaattgacaagtttaggggttttgggtttctctggattaagctataatagcgatttaacaagtggtcatttatataactaaagtgaagagttagaacttagaagttagaacttagaagtttcttcgtacttgtaaattaataagctcagaaggaaattttaatgaattagtggagattttgacaag

SEQ ID NO: 172785 - DNA, 681 bp, Cannabis sativa
tgatcattggagaaaagctcaagacactacttctctatcatctatatttctcaacaacatgggtgatagaaatgagctttgggtcaaaccggcgttggaaacaatcaagattaatgttgatgccgcttcttttgagcaggaaaattcctatggtttcgggttggtggttcgtgatcaccttggttcccctcttcacattcaagcagaataccatggagggtactttccctcggaagtgacagaagctatgggaatcaaggaagcccttagttggatcaaggcaaatcatcggagcagagttttgattgagagtgacagcatgcttgccgtccaggccattcattctacccagttaatgacgtccgtgcttggtttagttgttaatgattgtagaaatattttatcctctctttctgatgtttctttacgttttgttagacgatcagcgaattgtgcggcccactttgttgctaggcatgcacgatcgtcaattggtcgtagcattttgggatctattatacctcctgatctacatactattttgtactcagaatactaattaaataaagttgcaatttcatgtcaaaaaaaaaaaaataaaaaaaagataacactagtacccaatagcaatattatttttttcccaaaaaaaaaaaaaaatactactaataaattactcat

SEQ ID NO: 172786 - DNA, 534 bp, Cannabis sativa
atctattttttttttaagtttttaaaacacaaaacgcatttggttgatgtttcctaaaattaatttttagattttatttatttatttatttatttttaaaaaaaaaatacttcaatactttgagagctcgataggaactagaactcgacctgaacccaaccagtgactttaacttggccacgacctcgagcctgaccctgacccctacccctacccggaacccaaccctaactctagactcgaaccctaaaactggccccagaccttagacctcaaccaagattaaggtttagattcagacccggaccccgacccagactctagacctagacacaaaactggacttgaacatggactccaaacccagacataaatccaaacctgaccccagatcctggaccccgaccttgacctgaaaaaatgatataaaagattattggagaacattcactactacaatgtaagcctttagcttcccttttttcaacccaatttataaaaagggaagctaaagggggtgaaaatatctgcatt

SEQ ID NO: 172787 - DNA, 552 bp, Cannabis sativa
aattttgaaaaattgtgtttattatagattaaggaaattttgtttaaattcaaggatgtataagtttttgattgagtttaacttcaattttgaattaaagtaattagtattaaattagattatatttctctaatctaacttaaataataatcgatctaatttagcaaaaaatatatataataaaaataaacatttaattaaaaaaagattgcaagtgtattatatatattttggagataagcattattttgagaagggtttaagatacccaataaatcaaacaacagcaacaatcttagtagctagttttccaatttgaattaaattatgtcttattatgaacctaacttatagacactttctttcattatattttatatggtggtaaatgatattatagaattcgggtattcctatagggcacttgtggtgttaggtgtcacattgcaattggttaacaatattccttaaaaattagggaaaaaaacagaaaaatacaaaaaagaaaaaaaaattacaaaaatactttgggtcggcccattaaacatttat

SEQ ID NO: 172788 - DNA, 530 bp, Cannabis sativa
actagtaaatgggttttaaatcctagtgcattttggtagtgcaaggatgcaatgaataaggggtggtgtgagcttcctcgagaatctcacttctaagttctacactgtttggaacacaaactctggttttatacaatagcatcccattacctaacactgtaaaatccttagcttgactagctaaaacctcttctcgaatttttaccaattctggatcagttaactaagcagctttaattctatctaacagatcagattgcaatgtcaaattattaagtttgcccacaacaaattcaatacataatctgaccatgtcttctgctaggtggaggtgaaatcataatatgagtggttacttgccagggaccctttctgcttagggcatctgccaccacattagctttcccgagatggtaaaatatttcacattcgtaatccttgaccaactctaaccactgcctttgtctcatattcaaatttttttgggtaaagaaatatttgaggctcttatgatcggtgtaaatctcaca

SEQ ID NO: 172789 - DNA, 782 bp, Cannabis sativa
aatacgttgtacccccgacatcatccttactccagttcccgccgatgaggagaggcagtagctttgagttgccaaacataactacgccatggatgaatacagcaggaggaatgccgaggtggaagccttgaagaaggtcttacgggaggctcaacaaaattccttgcgcgatgaggccttcaagaacgcctgggacctgaacatggaccctctgacggactaattcaaccgcttcatcggccctgcccttgctccgttcgcctccgaactgaccagccaattcgtctcccacctaacccaactcccggccaaaagatatgcagcttgcgcttccacaaacgccatttatcaagttcaggatatcagcgctgccatgaccgcggtaagtctttgttattggtttttccttttcgtttgtgctctaccatgtggcacttaatctctcatacttaactcgttttcttttccagatcgctgcagagactggtcacctctcaaagactttgatagatcatgggtaagttatgtccgagttcgagggcatggacgaggccatgaagagtctgagagacctggcggctgagaggaaggtgttccgggaggaggcccagtagaggaaggcacaggcggagaggaggcatcaaaaggcattgcaagccaaggcggaggagctgaagacccgggacgaggccgtggccaaagcaaggtgtgagctgagggatgccacggaggcggttgaggagctgactgccaggctaaagtctatggaggagctgcatcag

SEQ ID NO: 172790 - DNA, 707 bp, Cannabis sativa
ggtgacacctagcaaattaaattcagcgaaggattaattagaatccttttcatttgagggaaattaagaaaaataaagaaaagttaaaaattgaggaaactcattcctttttcctctctctttgcttggccaacctagaccagaaggaaaccaagctcatcaccattatttttctgaaaattaactaggaattcaagtgttcttggagctaaggtaaccctagaacctatagttttgtgttttaaaacttttactttggtttcatgttgtgattttgtgatataggcgctgttagggtttgattcttattcagttcgaattctagggttaatttggattgattttagttattgatagctggtttggttgagttgtgatgattttatgcatgtttgagcttagaaactcaaagcttaggtctttaatggcatgttttttttttttgagtttttctgtgaaatactggatggaatatgttgtatatgcattgcataggtctgtgagttttttttgagtttttttgagttattgatagccagttttaccagtacccgtaaaaccagctagccagttttggcagggtccccaaacgcttcattttctagattcttgtccatttcagtgccgtagttgggtgtttccctatttccagagttagagtaacccttaaagagtataacagaacctagggttgtgggtttgggttt

SEQ ID NO: 172791 - DNA, 565 bp, Cannabis sativa
atgatgaactttcgagtcttgctttggacaaatgcttctcataaagcgcaggatactccgtcttgtttttaaacttcttgactatcgtgctttttatacttctgatgccttttttttaaccatgttgcttttatcccgtgcatacatgtctcagaagatgctcgatgttttgaagaagagagttgggggaacctcaagctcatctcctccggccaagaaatctaagggctgtgaagtggccccatccaaggaaaagcaaccggctgaggaggttattgatatttctgaggagctaactatcgtggacccttctgctccgaaagctgctaagtccaagcattctcgagaaggacgctcggacaggcctgaacagtcgaaggccagatccgagctggccaagagcggatctgagcagatgcgggctcctacctctcctttgccattgcattcagaagccaagagaggcaatgagatgctcactcactacatgaaccggttggttcctaagctgagtgagtagctggctagcgctaatgacgaatcttccctggagctgctgatggga

SEQ ID NO: 172792 - DNA, 502 bp, Cannabis sativa
cgatcttaccctaaagattgtgtcagacaatggccaatagtttggcagtgacatgttcattatttcttcaccaaacatggcatcatcaagaggttctctgctgtggcccatccttaagcaaatggaaaaatagaagttgtcaaaaaaacactcaaggacaccctaaagaagcaccttttggaagcaaaatgcaactggcctgaactactcctagaggtcctacgctgtacaggactattgagaagatgaccacttggccaactccattttctctagcttatggctacgaggcaatgttgcttgtagagttagtgccaccgtctcacaggagtacaacctatggccaacaaacaaacaacaccttgctggcatagtctcttaaaaaagtagaaaaaagaagaaacaacccaacctaaagatgtaggcgtaccagtaaaaagtagaaagacacttcaacaaacacgtcaagagtagaaaattcttcatatgagacatggtgctc

SEQ ID NO: 172793 - DNA, 613 bp, Cannabis sativa
atcaccgacttagcaatttactcagagaaatttgcaccctatactgattttttctattttaatttttttttactgttacacggaaatgattacatttttactgtgtaattgttttttttttttttaattttgtgtaagcctaattaatttaacttaataatatatatgtgcttatatataaaaaagaagtttgtaaaagttgattgatgacttttacatcactttcatttcaatttttttattttattttttttacttaaatttaaaatttaagtccaactcactcacatgatttcatttttaaaaatttatatatttttatatatatatatatatgacactttatatgtgtttagttgattgatgggacaacttttttttttttacttaaatttgaaattgaacacaacccacccacatgatccccattcccaagtttatatatgtattttgtttctctctccatctctttttgtgggttgatgtctatagaaaaattcttgagattggtctcaagataaagactatcaaccaaaaactttacacaaaacccttctctctattcttcactgtttcaaaaacttacaaagctcattcctttcattcatttttt

SEQ ID NO: 172794 - DNA, 537 bp, Cannabis sativa
cgcgtattcagacactgctaggtagattgatagaacttttctaggcatcgacttggaaagtatcgggggttaccccaggtgcgtttttaatgcctgaactgcttctttgtatttgtcagtccattgaaactttttgttaccctttaatatctgaaaaaaaaaaatctttacatttatcaaaagagtgagatacaaaactgtttaaagctctgactttacctatcaggctttggacctctttaggcttggtgggggattgcatctccaccaaggcttttattttagctgggttcgcctcaatccctcgttggttcaccataaaactaagaaatttctctgatctcactctaaaaatgcactttaatggattaagttgcattttgtagtggcgtaggattctaaacatagaatctaagtgagtgacgtggtctttcccatgttgagattctatgagcatatcctcaacatacgagcatattctcaacatacacttccattgtcttccctagcaaatctacaaacatcatgttaaccaat

SEQ ID NO: 172795 - DNA, 500 bp, Cannabis sativa
ataaaatattatatttttaaataacataaaatatgtaacacctttaaaaaatagtactattgaagatgctctaataagctaatagctatactctactttttttaccccaatcaaatatttaggctttttttttgttctaaaaaaaggttataagctgtaggaattttaccaatttaacctacactaacaaaactatataatatcagtatcaaaggtcaaaatcgaccttcacttgtctaatttaacccttagaccaaaacggcaccgtataaccaacacgacaccaaaacttgtgtcgtttggatcccatagtttaaagactctgatacaagagtctaaaaaccctagcactcaaacacaacacttagcctcccaaaacacgaaaccctagcagagcgagttctcttctctaaccttgaaaaacctagaatcacacccacacacacacacagaattagttttaacaaaatgaaaaacaaagtaagggagagaaaacacca

SEQ ID NO: 172796 - DNA, 1163 bp, Cannabis sativa
  modified_base (1106)..(1117): a, c, t, g, unknown or other
gtcaatatctactactgcacattggctcaattaaaaaaaacaaaaaaaaaatatcattgtatttaagaaaaatgtgtccaaaaaaactaaatataacatacaaaaaaaaaaaaattatcaagaataaactaaaaatacacacatgtataaaaaaaaaatattcaagaaaaaaaatctaaaacccacttaaaaacaactaaaacacaacatcaaactaacaaaacaaatacacatatacacaacaaaaaaaattatctgaagtaaactaaaaatatattcataaaaaatacacataaactaaacaaacactgtgcaaaaaatacataaaaacaactatagaatacctaaacaacaatatagaaataactataaaataacaaaaagatagttatataaatcaacaaaaaaaataacaagacattatcttgttgaaatatgtaaatcattcataaatcaactccgaataaactacaaaatattcaaaaaaaaaatattacttttattaatcatgtcaaagagagaaagatataggaggactgtactcttaattttttgtaggagagagaaagagtgttaaaaaaatatatgagagaaagtgtgtaagtaaaagaatcatattttagtaaaagttaaaagaaactaattaagattttttttataaatgtgattaattaaagaaaaataatatgaaatagtttgtgtgtcaatagtaaaaaaaatataaaaaagagaaaaaataaatattataagtgtttgtatttttattaaaaaaataataaaataaaattttataagagaatgaaaagtattaaaaaaaagatacaaaaatgtaatatacattaattaaatatctataaagataaaaaaagttatagagagagaattggaaaaaaaatgaaaaagagaaacaaagagagaaaagagaaagaaaagaaaaaaatcacgttagtcagccaagccaaacgctaacttatataagattaaaaaagaaggtcaaccaacctgaatggaaaaataaagaagagaagtcacttaaaaaaaaaataaagagatataagaaagaaaagaaagtaattaaatttaataaattaaggtggcgtttggtnnnnnnnnnnnnatcagttttctgtttttaaaagtggaaaagtgaaaatatttttcaa

SEQ ID NO: 172797 - DNA, 676 bp, Cannabis sativa
gaacttttgctaaaaagataaaattttacataaaagatcaaaaatttgaaaaaaaaaaattataaaaatacatcaagacagaaaaaattttatttataatcttggaacttttttatttatgaaaatacatattcagtaaaaataataaacaattttttttggttgttttatagattatttatagttgtcttgcagttaaatttttttgatttgtttttgtttttttttatagttgatttacactttttgtcagatcgatttctcattttttttttttttgtttttttttactttttgcttagcaaagtattcttttgcaattattagctatatatatttgttataaaataatatagaataatataaaatagatatgaagaaaaaagaagaagatgaagagagaaagataatttttcagttgtttattccaataggctgagcccctatttatacaaaaatttgactagaagaatgagaaactaaatcaatgtaataaaggaaaatacaacaaagcaataatggtgataattaatttggtaatttggacatctataaataatatttcataatactcccccttaaatgtccataataattgcctccatataaaccttgctgaaaaacttagtcaaaagaataagagtatagtgtaaactaactccccctcatttaggca

SEQ ID NO: 172798 - DNA, 1183 bp, Cannabis sativa
tggctttcacacctcagtatgtgttgctctatcccagtaaggggcctaacaagaaactgaaataagaaacgctcaactctgtagaacattatgaatccttaatcacacataaaaagtaacatgaatcttttaactcaacctcaaaagtatgataagtaaaacaatataattcaaaagcataatcatgatttgtcaaataagtataaaacaatattagatgcaagcaaagaacaactcaacaatattgtacaaaaacaagaacaagagagattagacaatggaagctcccgatgattttttgagggagtcaaagttacttgagtctagggccttgctgaaattatcagctaattgcttctcaataacatattccaactgcaaagatttattttcaacaagttcccgaataaagtgatgccttatatcaatgtattttgttcgagaatgttgaacaagattttcagaaatatatatggcactagtgttatcacaaaaaattgttaaaacacccagttcaaatccatagtcaatcaacatttgtttcaacaataacaattgagtacaacaactaccagcagcaatgtattcagcctcgacagtggacaaggaaatagaattctatttcttactatgccaagaaaccaaattgtttccaagaaagaaacaacctcgacttgtactctttcgatcatcagctttgcctacccaatctgcatcactaaaacaagccaagttagaattagtatctttagaataccagattcaaaagtcgagagtactattaacataccaaataatcgttaccgcaaatacatgagattccataggattactttgatatctagcacaaactaccacactataactaatatcaggttgactatcagttaaacacaatagactaccaatcatactactattaagagtagtgtcaaccttcactccattctcatcttttgtgaatttcaaagtggtgctcataggagtacttacatgtttagccgactcaagacaaaactttttgacaaggttcttggcatacttactttgtgatacaaatgtacctccttccatcggtgtgacttgaagacccaaaaagaaagtaagctcaccaaccatgctcatttcaaactcatttttcatttgatcaacaaacacatgcatttcatggttagatgtagat

SEQ ID NO: 172799 - DNA, 506 bp, Cannabis sativa
  modified_base (449)..(452): a, c, t, g, unknown or other
tttagtcaattaaaaaaaaaaaattaagttccttgttttaatataatagttttttatctctaaaaaaaaaaaaaaactccaatagtagtttataacgcctgtcaaatttagaacatgttaaaagtttttattttatttttttgaatgaaattcatctttattaaacttgaacttcagctactaatctaggtagcaaaacagttgagacatcctccaaactaaaaacacaatcaggataagaattgaaagctcttgcaaaaacatgagctactgagtttgctgaccgtttaacaaaataaacagaaatatttctcatagtagcaagcaaattcttacaatctttaatgaccaaactaataaaagaaatcatatctattgagctaagtaaagcttgaactactgtagtatcctagaaaataatatggtatttaattggacatattttattnnnnatgtaattattttggtaatgaagtgagatcatgatcttacttaagttaattagt

SEQ ID NO: 172800 - DNA, 664 bp, Cannabis sativa
acctgagaagatcctctacaaattgtcaatcaactgtgtcgtaagccttacttaggtcaattttcatgattcaccttgctgaaatattcattcttgtataccctttaaagaggtcttaaaatatcatgatattatgagcaagcaatctacttttaataaacgcaccttgattattttgaacaatattggggagcacttttgaaagtatgaaacatatcatcttcgagatgcacttgtaaattgtgttgcaacaagctatcggcctatagtctttagtagtagtcgggttagcaattttagtgattaagaaaataacagtttcgttcaagtttttaggcaagctaccgcttgtaaagaaccccaaagctgcacttgaaacatcatctccaattttgttccacatgtctgttgggaatgttttaccaggatctagatttacaaacaagtatgtctattaacatcctaaatatgaattctgtaaaataatgaaataaacacataagagtttaagaaaacattacattgattgcagcggaataatatgactccttctgttcaagatctctagcccttaattccttctgtcaaagagcattatcaagatctgaacctagatctctttctctccttcgggtttggttaccaccgtcttactcactatgat

SEQ ID NO: 172801 - DNA, 701 bp, Cannabis sativa
ttaccaagcatgtggatgtgaattagagaaatagtttggaacaggccaactatacaaaagcaggaggtgattatatggcttatattgctgtagaaacttaaaacaaaagagcaaatacaaaagtttaatccaatagtggataaaacttgtttattatgcagcaatggattcgaaaccttagaaaatatcttttttaattgtcactacagcagcatgtgtatacaaggaattaaagaatggttggaacgaaaaacaaaggcaagcaacctgttgcaacttgctaaatggacttatgaatcgaagttgtctacaactcgaacgagcatacttcatgttgcacttgcagccctggcatatcacttttggagggttcgaaatgatactctttggaatcaaaagctgttgtgtattcggcatactgtacagaaaattaaggaagatttataatatagaatttaccatgtaatgccttaaaaggctaaagatatagatagataatggtttatggaaagatctacaaaatagaagtagcatgaggaatatgtaagaaatcaattgtataagttgtaattggtgtatgcaattggtgattgagcaattcaatgatccttattcataaaaaaaattgatgtcttgatttaagaaaagaagtaacttagtatgtctattatgatttataaagtaacctggtatacaataca

SEQ ID NO: 172802 - DNA, 890 bp, Cannabis sativa
ttaaatagggtaaacatgtctgctcagtataggtgttttattgacgaggttattagggaaataactgtattttgcgagagcagcttagctcgagttgcccttgcttattaagtatcccttagccaaacctttatttttaccctctgttaatgttgttttttcacatagggttttaaacttctagattatggctcattcaaaacaacgtaattctaggataccccgaaattcatcaatcaaatttgaggttgatttttttcaatctaaagttacttctattgccccttatgttggtgagttccttagattatgcactataaattatggcaataactttgtatgttggtcaaaacccaatgagaggatttattatcctcctaatttttttaatgaggatgaagagtgtagcacgaatggttcttctaaaactagggcttggagtttagagtatatacgagtcgaggctatctttccactgaaggattatttcaaaaactactgtgattatgtatgtgttgccccattttaagtgatcctaaatgggtacaagatttttgcttctataaggtccatgtaccacatgatgggatgaaaaggacccgatcaatacaaaattacgagcttgtacaccaagaaagcgacttcaccaagggaaaactgctgtgggggatcctttaatcttggcactttttttgatgagcataagattattgttaatcttcccaacaaaaaataattcaatgatcaattcctctggatcactaggctttacctgtgtaatgaccgcatactcataatatggactagtagggcaattagcattaattatttatattttatgattttatatgattatatatgttgtgggccctaatttaaagaaatatgca

SEQ ID NO: 172803 - DNA, 558 bp, Cannabis sativa
gggtccaggtttgggtctgggtcccgatctgggtctcggtccaagtcttaggtcccaagtcccagatccaaatctcgatcttgagccctgggtcctgttctgggtctgggtccaagagtcttgggtctgggtctcggtcccaagtcccgggtcctaggtccaggttaggttcccgggtctaggtttaggtctgggtccaggtccgggttccgtgtttgggcccaggtccgggtccaagtctgggtcttcggtcctgtccgaatctcaagtccaggttcgggtctgggttcggcacttgggtcccagattcaaattctagtctcggctctctgtttgggtcttggtccgggtccgggtctcaggtcgagtccctagtctgggtctagtcctaggtttgggtccggtgttatgtctgggtccaggtctggtcgggtcgtggcccgaacccggacccagtcgggtcgggtctggtaactaggtttgggttcgggtttagatcctgagcgggttcgatccgagttcggatttgaggttcgagtcttgaattaagtttttttt

SEQ ID NO: 172804 - DNA, 543 bp, Cannabis sativa
  modified_base (344)..(346): a, c, t, g, unknown or other
ttttcaccctcaatgaatatgaataattaccgtaaagtctttggttattaccaattataaagtgggcgcacgttagtattaattagttgatctagatttttgagctgttagaaaaactcctaacattcaaaaacacatacaattgatatgctcaaaagaaaaatagtaattggttatgagttaccagttttttcagctttggtcaattcttctctaaagtgttccaaatcactcccaatcaattttgaactatttatacactttgtaaatgaataaatcaattctacaacagctgcattatcaatagctatcattttttcactcataaacaactaataatatcnnntactaatttaagagtgataatgtaaatagaaaaattagacaattttatgatcatttttcgagaaattgcaaattcttttttatgattgtactaaaatattataacatcatattgtatgttactattagacaaacagattattttgtcacacttaattatttttcccttaattataaatattatattatataaataat

SEQ ID NO: 172805 - DNA, 634 bp, Cannabis sativa
gtaattacttagggggtggagcagttgtaacgccctgatccttagggacgcaacgtgtgtgtgcttttacaaatttatctctaactaatctattagtttatgaaaattgagttttaaagaaaaactttttgatcaaataggaataaaacttctttataaagtaccactgaagtatggggatccctatttataaaaatatatatatatatatatcaaatcacaaaactgttattataaaagcaaagttacatttccaacataaacgaaaagaaatcgattctgcttcccagaagccatgacaccacggttaatatgtactttgttgggagacctctgattcatggctgaatgtagctttaactttcttacctgtattatgaagcacccgtgagtcacaataactcagcaagaaaagttattaaatcagaagcattgtaaacgcatatattcacatcacactataacatatatattggtgattcacgcaagtccataatatacatctatatggttgtaacatttatacaattacctatttgttacgcaataagaaaaccacaacatcttagtcaacatcttcatcattatactaaatgaatatttaatcaatacataaccatatattctcagtgct

SEQ ID NO: 172806 - DNA, 1046 bp, Cannabis sativa
ttaatattttttagtattttaattgtttttagtgtaataccatttagttataatatttcaattaaaatacattctcaactgtattttgagacattcattcttatcctaatatagctagatattgaatggttattcttaattatgtgtgttctacttgcatgaaacataaccagactactcttcatgcctctttcctataaattttataacaaaatttttaatattttagtttaccgtgataaaaaaaacgtaataaattttttaaaattttacaaaaataatattgtaagtgtaataaatagtgcactcccagttgcagcgtcactttggaacaagctttggaatagcaaaattttgaagcgccacaaggtcctttggtggtgtattctgtctaacgcactcccagttaggtatgagattgggagacgattttagattgaggacacaagttgtcctttgtgtgggttgagggatgaatcaattgaacatttatttcttacttgtgaggtggtgcttcattgttggcgatcttcaccttggagaatctactatgtgtgtgataatggtattcgtatttgggactgggtaaagttcatttgggatcttaaaaaaacggggatccgagttgaagacgtctttctttatgcttcaattattgtcgacactatatggaggatgcgaaatgaaaaggttcacaataataccaatcctgatgtattgaaatgtattgacaatatttatgcttcttttgtaaagttacatgattctctcttgcccattccttccccgatcgtgagggagtcctggtctccacctccccaggattggataaaaataaactgtgatgttagaatgggtttagagagtatgtgcacagttgttgtagcaaggaatcatatgagaagggtgatttgggttcatacggctcggttggatttctctgatgtgttatgcggagaagctgcgacttgctatttggccgtctcgctggctatggagtttgggaataagtttgttattgtggagagtgactcgagactagctat

SEQ ID NO: 172807 - DNA, 698 bp, Cannabis sativa
acaagattctcaaaaattcaaaataatctaaaaaaatttcatagataatcataagaaattatttacattgatgagaatctccttcaatctacctccattgatgaagacattgtaagttcttgaggtagaaggtgatgaatagtggatttttaaaattgagtgaaaattagggatttgagtgtggtttttaaaggaaaagatggattgatgagagaaatagggttttgaagtgattagggctgaatgattaagaaaataattgaagaaaagtggtttttgtgatatgagattgaagatttatggcaatggggatggagaaatcggaatggaaatgttagggttgtagaatgggtgttttgggattgaaaattcaaaatgctctatttatgcacatatgggcattctcgccgcggccaaaaatggcctcgatgcggcgagatagtgtgtgcaaaatcctttctctgccaagagtatttcgccttggccataaataaatctgtcgcggtgaatactctgccttgctgtggccactgggcagtgcccagaattttttttttctttccttttttttttctcgaaaggaatgaaaaataataaactaaaaattcagtttacaaattcaatgaactaaaactaacaaaaaaaaaaaaaagaaaaacaattaggaatgttcgactaaaaacaccattaaaacttgg

SEQ ID NO: 172808 - DNA, 1164 bp, Cannabis sativa
  modified_base (420)..(425): a, c, t, g, unknown or other
accggaaaaattaacatatatatataaacctatatttatagagttcgcgatctgtagttaccaaaaacgaaaattaaataatcaagacatgtatatagtatagaaaaatttaccatgcatcgccttaaaatgtatatattgatgcaccctcatctgttttagcacctgaaataattttttagtcaaattttttctcatggtcttgtacgttatagttatgtaagacatcctacaaaattttaagaaattaatttggaaaagtttaacacgtcgaaaattacgttcaaacagtgtattgcactcatgactattttattttatatgcgtgtaaaataaaatgtttgaacattgttttctatattataaattattcggaatttctcaaaatttagtaggttatcttaaatagctataacgtannnnnntatgaaaaaaaaaattagattaaattttttttttctagatgccgaagtaagtcaaagttatatcagtacatctatttttagggtgtatattgtagaatcaccctataatttataaggattggtcattcggtattatgctaattaacttaaaataatactagcatgaagtgttagaaatatatgagagattaaaatatgatgaacaaaagacaaaaataattacaactccaaaccaaatattataagaattaaattaaataaagagttacaatcctaaagtataaaatacaaataataaaaaaaaaattataactcaaaattcaaaaatataaataaatgtaaaataatataaaagtttatatataataataactagtctgtatatatacatatataatatgaaatatatattatataaatgatatataatagaaattgttggaatttttgtgaaattatttaaaaattaaaaagtgaagtgtgtgaatgattggagtcccacatgggataggaacacttcattagaagtgtataaatagtgcatgtttgagaattgggtatgggcctcaatgggtacccagttttgcgcgcatgagtgaggactcacacacgcgccaccgccatccgtcgggccggtgaggtgtcattttattttttaaagaaaaattatttaattaaatattttttacttatttattaattaattttaacgttatagtaaaatgcgatcagtcaatga

SEQ ID NO: 172809 - DNA, 689 bp, Cannabis sativa
gggccgaattgcttattgggctttaaagttagatttatgccactttattttatttaaatgaaacaatgtgtcttttcctattttaccacttatctattctaattatttcaatactaattttattttaataattattaaatatatgattaattaaaccccacaaagtgtcttaatcaacaaataaatctctattttttttccttatcaaatatgccctttcttagtaaacttcataaataagatatattcattgtttagaatcctaattgatttaattaaataaatgatttgaaactacaaaataatattatcacagttagtgcaaggaccattggtctatgtaaccaagctcccaataagtagtcttagaatttattgagtaaattctctatcttattaattcctcctaactctactatagattcagaattacactcttgattacatagaacactctattcgccaagaaaagatatgttataaattatctattgttttaatctaaacaattaatgatcctctatagatggtttacattgagtagggacaaaaattaactattttacccttcaatgttatttatcctcaaaacacttagcttattataaatgatattttagtaaactagtataattactgaaataagagctcttccatttatgtctattagccaagctctaagaaaatca

SEQ ID NO: 172810 - DNA, 738 bp, Cannabis sativa
aacatcataccttcagaggatcaactggcttctctcctcattcatagacataccctccttatctaattgaactgacttttagttttgtggtactaaatcaggtacgctccagaataaaagtatcttattatcactgtactacatcatcaggatcatcatatgtatatattatattaatataaaaaagaataaatgaaaaatataatttacctctcgaagcctttgagtatcctcaagtctttctgtatgttgtatccttagttgatctcaaagtactcacatcgtagtctttcgaatattccaccacacacaaagactagtgtgggctagtagaataaagtgtatacaaagttctggttgaattctcaacacatgagcaataactattctatagtgatggatagaaaagataaattgaattaattatttttaggcttaccaaaaataatgtgtataattttttgtttatacggtatatttaaattaaacaaataaaggttttatttaaattcaatttatttatttaactcatatttaattattttaataaataatataactggattctgttatagatatttatttcttataactgattgagagaatctctcaattaccttgagagaatatctcaacaaagagtaatatatttaactacttttcaaattcaaatttaaatgaatatttatcttttgaattaattatctaattaattaacccaaaaacaaatctagtggg

SEQ ID NO: 172811 - DNA, 1658 bp, Cannabis sativa
agtatatcatgtactgaacaacatcaaaacaacaaatataacaactaaaaaaataaaataattgtaaaacttaatacatatgcaactaaaacaacttcaaaaattaaaattcaaatacaattgataaatgtaagacctaacctaataatttttttaaaaaaaaaaattaagaaccctagaataagaaccatgtaataactaaatgaaaactaaaaaacaactaattagaaacataaaaagtgagagacgtaaaacatttaaggttgaacaattcttctaactgaatacattagaaaaaaaataagaataagaaccgtataataactaaattaaaactaaaaaacaactaattagaaacataaaaagtgagagacgtaaaccatttaaggttgaacaattcttctaactgaatacattagaaaaaaaaatataacaaagtaagtctttgaacccaaacaaagataaccaaaactaatgcactataattttttaatttgcaacctcgtcatcattttctcgctattcgccctgaaagcctcttcaatgaatgatttggtgaaacaacaacaacaaaataaattaaaagatgaaacaacgataaaacaacttatacacaatgttaaatcaatatagttatttaaagtctttagataaaatttctaattcataaaattataaaagttagaaaaataactttgccaactgttgagataatggacatcaataatagcattaaattttgaagtttagatcatttgaaaaaaagttaaaatcaaatccaaaggagattattgaataataaaactctaaatttgagttttatacctaacatttagatttgagcttcgccaataaaaataaattaactgaaatgcagcaacaacaacaacaacaataacaatagcaacaatataaataaaaagatcaaagcaactacaaaacaacttataaacaacaataaatcaacatatttatttaagatctgaagataaaattactaattcattaaaattcagttttacaaacaataataatatcatgaagaagcttaacttaaagataaaaaaaatagcacaattgaagatgccctctttctttaggctaataaagaatattaactatgttaggcattttgtcaaacacgtggaaggtatggccttatattcatataaataaaaaaactcaacttacagaagaagaaaaaatttcacaaaatttatgggcaaatgggtggaatcaacaataaagaatcacagtacaataatcttataaaactttcaaatctaaatttttatattgatgtaatttgaaaagaaaagaagaagaagaagaagaagaaaaagaaaagaacaacttacaaatcaaagcttgaaactatatcaatagcagcataaagaagtttgaaagagatagagatgatttgaccaagagatgaataaactcacagagtgtctctttctccctagactgcggcgtaggaaggttaagaagaggttcaacatggcaagaagggctggagacgagagggatggagacatgaaggggatggatgtgagatggaagggtggagatggccaccacttcaaatagatatatgtgaatagaagaggaagaaagaaaaataacacttttcttataattgtaattagtaaacttta

SEQ ID NO: 172812 - DNA, 877 bp, Cannabis sativa
  modified_base (800)..(826): a, c, t, g, unknown or other
tttgtaagtgaccaagagactgtaggtctgtgtgctcactttggggtaccaacattgtacaatgcatcgaactagcacgaagaagttatgaagagaaattttaacgcttagaataagctactacacctacctctaagtcaagtacagacatacttcagcgttgcataatgaaaagtaaatccagatacttacatgtcaaggcaataagaatatatcaaggacagtcatatgtccataataaaaggctttaaggctaaaaaatagtaatgttcaaaaatagagtgcctataggctgaaagttacaacatgaaagcctcaaggccgaatatgaataaagtcaaatgcataataccaaggccctgccaaaaccgtatagccagagatgaattggacagagttcttataggaaccacgtaccgggctaaggcaaggtagagttcttggtaggttccaagccatagacaaaacactgggcaaccgtactcaagggtacttgccagataatgtcattgtataaggttgggtatcagtaaactacattctcaagtgtaacaacttgggcaaatgttgagtcttaaattgagcattcaattataatagactcaccattgaattttgtaaagagtttctatggaaaccacgtatgagactaaggttgtatatgcctacaaggtcataataagattcttgttgaggttaaaggggtacaaaaaactggccaccctcttggaaccaaggcctaggttggccagttttcccaggcttcgagatggtaggcttgttgggttttatgccctaannnnnnnnnnnnnnnnnnnnnnnnnnnttactaattaataaaagatcagaaattgcttttatgtttcatagttcacat

SEQ ID NO: 172813 - DNA, 749 bp, Cannabis sativa
aaaaaaaaaaagtaaataccatttaggattctgtatttttgcaaaaattactaattggaccctctattttattaaataataaaataaactatgtattttttaaaatagtataaataagaccctgaactaattttttgttaaaataaaatttaataataatccgatctaaatgtgttatgacaaaactatttacattttcagtatctgttcgagttaagaatcatcgatcaagttgatttatattaaaaaaaattgtcaaaaattaagttcagggtcttatttttaccattttaaaaaatataggatccattttatcatttaacaaaattaaaatcaaattaataatttttacaaaacacaaaatttaaaataatatttaccaaacaaaaatgatagatctaatattaaaatacacgtaaccatatgtgacgatggtacttccttaagatagttttgttaaccgttaaaaaaatgataagtttgttaacacgtgtactttttctttttcttctatttgctttttcttctattaatgatatttttggggtgggcgtttggttcttgggataaggagccaacatagttagttggaggttagaactttattcttttgccatttattaacattcattctttctctttaattcaatataaaagggtaaatgggtatatataatagaaaccagagatatttacgataaaaaaaatacttcgagtataatttcaggttgctcttaaataaatgttaa

SEQ ID NO: 172814 - DNA, 571 bp, Cannabis sativa
  modified_base (498)..(508): a, c, t, g, unknown or other
aacgatacatataaccgaagatcttcagtatgacgcttctaactcagcttcatccaaatctaaatttgcaaccacctgatccccaattttagttggttcagtaaaagtaagttgggagcaagggatttcacttgattcaagttcaatttactccaagtaaactgtgcagatgcctgaaagtccatcgcctccgcatcgtccgcccaattagtcaaattaggagtcgattttaccacttctgcaactacttccttctccggttccagttcatcatacgggtctaagaaaacctccgtagcttcatcttggattgagggcagctcagggctcgctcttgcgacattgatgttggcagcactaggcttcgaggcacctttcctctattcaagatacttaattatttgtttctatatcataaaatttaattaattagaaaatatatttaagttgaaaattaattttagaccaaatttaattggaatattttcttaaatattnnnnnnnnnnnaataattaagttgattttattcaagatacttaattatttctattttaatgaatttaattaaat

SEQ ID NO: 172815 - DNA, 597 bp, Cannabis sativa
tcaattcataatttgtaagacctatatgtcttatctcttgcactatcttcgtctcctgcaggaaaatatttggaatgttgctaagaaagcctttgatccaatatctatcctccttagctcgttagttgctaagggtttgatatctgcatcaaagacagaattgcctgctgtgatttcacctgaagtttctcctcaaactcaaaagaagagtcagaccgttactagcacaggctttgtcccattgtcctcagtttcagcttcccctgttttttcaactcatctctctcaaaacctgattccagtgttgccaatcaaccaacttggagattaagaattgcctctgtatcactaaaacaaccactttatacttatatttcatttttggcttggtttaattacattacatttagtcgagcttcttcagtaatggctttctttctgcaaggtttttgggatgttgagatatatatgattggaacagttatgaaatatatttttttagtagaattgatattccctttatctcttgcatatttattaatttgtttatttgtctttttacataccattcctttagtatacaagatgtgttttaat

SEQ ID NO: 172816 - DNA, 590 bp, Cannabis sativa
  modified_base (448)..(452): a, c, t, g, unknown or other
gagagcttaagatcgtcttttggagaaagtttaaaaacttgggagaagtagagactcaacttgattattgaacttgatttttatatgtgttgaataacattagacatattctaatttttatgatttacaatttaaaaaattaaaaacttaatctgcacattttttggactgttctggggcactgagtgccaaatatatttttgtactaatatttatgcaggttataattttttgagtctattcaaaatacaactttatgctgccaaattttttagaaaattaaaaaaaaaaagaatactttcatttattattcttattactttgtctgcttttggttatattgataagagccatgttgatcatgatttgtgcatattgttgtttcacgacctagtctctgtatcatcacaggtagaacaggtatgcactcacctgtaggtgaaagacnnnnnatctgtacagggagtgaattgaatttgagtcccgatattatagtggttatcaggtgcgactacccagttttggatgtcattttctatgattggtattgagagctagggatctagtgggcggtgtgatatgcatttgat

SEQ ID NO: 172817 - DNA, 505 bp, Cannabis sativa
tatatacattatcaaattttattaaacttatttacaaaaagttgtagatttctctaactatattgagaaacaatattctcatctttatgtaaatactttatatatatggtaataaatttatatatatactaatttaatttagtactagccttgttattaattagttaatcttggtataatacgattttattatattattaatgaattaatcttagtcatcattgttaaatattaattcttgtcttcagctgaaacttcaacctccgggagatcctttagatacctagaacctgcaatggtgtgtcacatttggtggctcaacggacaaatcgaaacaacaagtttggttttatcgatttggccagttttgacaatttcttgcaattgtgttctgcatatggtcgtgtattttcttagtttgttctctctgagtctgttttcgtttagtttttttttagctagttgttagttttttctctatgttttgtttagtttctattactgg

SEQ ID NO: 172818 - DNA, 614 bp, Cannabis sativa
agcaactatataaattatattttaatttttgtattaatttaatttacagtttaaaatactattaattggagcagttgggagaaatggaagcataataataggaatgagaatgagaattgaaataggaatggaatgaaataaaatttaaaatgcataaaaaattaatataaaaaatcattaaattttttctcatattacattggaattattttttcttccattcaaaatagaatagtcactctaccaaaatggtggaaagtgtattccattagaatgacattaatactttaacatgcaaccaaacaaaagaatcaatatgaaaattgttttttttctatttcattttattttattacctccaaccaaacaccacctaatattgtagtagatatagtattattcttttattaatgaccttattttaatctcaggtaaatatagtaggaaaatctggattctcaaatgagaacaatgaaatataattaataaaaattaatctcaccataagtattaataaaaattaggggcatttttattttttacacttcaaaataattttttttgtatttttacgaaattctacatagaaatccctattgcaactaacactgcaa

SEQ ID NO: 172819 - DNA, 618 bp, Cannabis sativa
ttttgttattcttattattttcttactttggttatactgattagagtcatgttgatcatgtttggtacatattgttatttcacaacctagtctctgtgtcatcataggtagatcaggtgtgcactcacctttaggtgaaagacttagaatatgtacaaggagtgaagtaaatctgagccctagtattatggtggttatcaggtgcgactacctgatttaagaagtcattttctatgattgttattgagagctaggggtctagtggacagtgtgatatgcatttgatggttgattttgttattatttgtggtctctctactttgtttatatattttgataatggtgatgagatattttattttaaaagctaaccttgcaagaatttttattaagccaaggatcctttgatattagttgttttcctactggactttataagctcaccccctattttctcccattccaggaactcagtttgacgatagttgataaggatggtaccgttgaggaagaaagtcattatttctttagttttattttactttttaaacttccaatgaaactaattttttatttaagctggaatggatggtctggatgacttaaattagctaagtg

SEQ ID NO: 172820 - DNA, 672 bp, Cannabis sativa
ataaaaaagaaatatatataatacaaattaaattaaaatttaaaaatacatttacataaaatttttaaattaatttaattttatttttattaatatttattgcctttattatgttgaactgttgatatcatatcttgtgaaaaagtatatattttaaaaaaaataaaaactaataaaatagaacttaactttacaatttttaagtgaaaataaatttgggaatattttaaaagcgtgtgtacacatttagatttcttgtggcactaaaaatattgatgatatgtaatagacatacaaatgatatgatcacactaaacatagtgtcgaaaacactatttggacacaattttttagtaagtgaaatgaagaatgcaattattaataaattaaaaattatacaatatttatgcaaatttggaattataacagtattacaacaatatatgtaagtatttttttttcattaaatgagttacattcatacatgtattacatttttttttttgaagcatgtataaaggtttcacaaataaatagcgttagatatactaacctttgttgaattggaagaaccttgaagaatcaagtagtatttttcatggagattattaaagccgggaggcgtttacgctcttgatcacttgtacgaaattctactaattaaaatatagt

SEQ ID NO: 172821 - DNA, 526 bp, Cannabis sativa
tagaaacatgataaagagcaggtttaagggtagaacaatcagaaacagtagatgttttattgattgaggagaaagtacaattggttccaggattattatacttggaacatgtttgattacagacacattcagagtcaacaaactgactagatacaagattgcattgcaaagcagttgaagaggatgaagaggaagcatctcccaactggtatagcccatccttaagtttccctcggagcagtacctgtccagtgtctttgtccttgacaaagcaccagtttttatggaattcaagaaacacattgttgtcctcagttagtttagaaacactgattaaattctttttaatggagggtatttgcaagacagaatttagctttaatggacaattaatggaggaaggtaaagaggtatatccaatgtgtgagatacgaattttcttaccatcagcaacagccagagcttctgatccagcataggcatttgatgattcaagagtctctaggttgttggtgatatgatttgt

SEQ ID NO: 172822 - DNA, 519 bp, Cannabis sativa
ttgcctcaaatctcattctcaaagctttggtagttaaccttgtcgacctcttcaacccaagaatgagaacccaactgcttctgatttttacttgaaagcacgacaatatccatcctcaaaaataaaatgagaattaagaaaatcctcacattgactaacattgtcgatcgatacctagttccaaaggagctcaggagcttcataaatctcataaacattcaactcagcaggcttcagaatctcattcttcttccgactaggggtgttcatcaaaccgctcaaactgctcaaaccgtctgcacctgttagctttactcagagttagttagacagtctgttaatacagtttattttactgttgtaacaaactctttgccacttgtttcttggctgtttctagttcttttttcttactctgtaacaactccttctctatataaataacatctcttctctagacttgctcaacttttgcaagtcttgtgatttctatcattgattgagtcctgttagattgca

SEQ ID NO: 172823 - DNA, 930 bp, Cannabis sativa
tataaactgacaaactattaaatggaagggatatttgcttattttctcttttttctttttttctttttttaaatggaaagttcattttctttttttttttctttgataagtaaacttatttattggaagcttaaaccaaactagtgaccacaaagggggccacttcccttaaacaaccatatgacttgattctagcatctcgagcccaatgggcaagacaatcagccacggtattacaagaacaagaaagaaaagtaacttccacatacaaaaacttcttgtaaaaaagaagacattccacaaaaaccggataagctccccaaccaaatggtagagagcccaaatggagacacttaacagccgttgcagagtctaattcgatgattacaccttgcaacctcagcttcttagccaattgtagagcgaggaggatagcctgcaactccgcttccagtacagagtgtaccatatcaaatccaaccacagcttgtgcttcctcccagctgtgagacagtttttcaatggcagccatgcccgcttccccatcgaccactcatgcgtccacttggaaggaaccaatagactctcccacacgatccaggcaaccccagacaggcttataagagggattcaggtcactatataaagccataggaacttcgaaagtgtgaaccgagttgaattcgacaaaccgcttcgttacgtcattgtgaatctgaaccgcatcccattgtatctgattgtggagaatgttattcctccagagccaaatggtatcaatagtgcagactacatatagcttcaactccttatcatggagattcaaccaccaattgttagacatttatatgtataaactgaaatatacgtatatgtatataaaatacagaataaatgaacatatatactatatgaatataggatcgaaat

SEQ ID NO: 172824 - DNA, 540 bp, Cannabis sativa
atattgagtgaatgtgaagaaaaaaaattatcggcaaaaaacttgaaaaaaaaggaaaaaaaattatactataaagtgtcaaaattgaaagaaaaaaaaatagttgttgtaaggttatcaaggaaatgagttctctcatgtaattagaaaaagggacatcgggatcatttgtgaaaattatagggttatttgattaaagaaacttatggtataggcgagcctaaatgactattccatccacttgcctgagcctatcgctacaagcctagaaatgtcttttgattcttgattatacatctatttatattagtagagaataatgagtattgcaagcatatgaaatatatttggttagtggattaaaggtggtatttggcatgcataaattgtttcacttgtaagttaagtgctaattattgttttatgaactgaatgaaaaaaaattgaggtgagtcaagggtgtgattgagctgaaattcttgattaaaacacataggtagaatttttgtacaaaagcatgttatttggcttacttgaaag

SEQ ID NO: 172825 - DNA, 1273 bp, Cannabis sativa
gttattatcgccgaaaaagttaccgtcgctgaaaaagttatcgaaaaagtcgtcgaaaaagttactgtcaccggaaaaatcactgaaaaagtcatctgaagtagatgtctcagatataaataaaaatagaatcgattctataacataatgaataaaaacaaataacacgaaataactcaaaccggttataattgaaatataacttgttctgtaacataatgaacaaaaataaataacacaaaataactcaaactaattataattaaagcagaatcgattttataacagtattacaatgaataaaaacaaataacacgaaataactcataccagttataactaaaataaaatcgattatatatgatgattccacatttgtacactcattcttagtcaattattagatgaattagtatttatttttgtatagatttgatgtgttttctccaagtgtgtaggtttgtgctgaaaagacattttgtgatggactgagatttttgagcccatttttgacaatgatttcatcattttctcgaagagtttatgaaacccaaaatgatagagctcgttcccaactttccaaaacatgttaactcatcttatttagagtccagacgcaaaagttatgcatgatttactgagcaatatcgaagcagaaaaaattagtgttgtgcgctatagtgcagggggtctgcgctatagcgcccggctggaaaaaaatgattttttacggaaaaaaaaagataatttcaacacgggttcagaaatttttctcttaggcgctatagcgcagcacgtatcattttttttttttaaaaattccttattctaagaggattgatctatctttgttgacctatataaagaaggatgcaattcagattaaaggagacgactagagagatagaaacaagcaactatgcgattagaaaacacattgaagagcaagagagaagagtcttcaagcaatcatcatcaactaatatcatcattagagttcttttcttcttcttcttcttctttattcttttgcttagttatttaattatgaacatgattattgtggttattatgtttgtgattatgaactaaacactcattctagagtgttgatggaactattttagattatgaatttaagttttttgattattcccatatttgttcttgtaatctgtttatgcaattttgtcctaattattattttcttaatgcttgatcaccattaattagtatagatattttagggtttacacttgagagaggtaatcta

SEQ ID NO: 172826 - DNA, 625 bp, Cannabis sativa
  modified_base (76)..(76): a, c, t, g, unknown or other
agtaggcacactagagttaacataagtattatagaagtgtataatgtaagccaaatcaatatatatatatatatanatatataaaggagagttttagtggagttgatgtggcatcttatatgtcatttttttttcaatctctcttctctcaattttctagatttactcatatatttaaagatttaattatatatttagtctattattattatcaatggtgacttttcattctttttaattaataattatttattatcaatagtgacttttcattttttataactcctattattattattataacatatttacttaataactaattaatctcatacctattatatatacctatatatatgcttctataaaattagagagattctattgttatgcaatatttgataatatattcatttatatagctttgggtataaaaggtaaggatcatatttttatattatttttctttaaatttttattgtaaattatgtttttcactcaatagaaaattatagatcatatacactagaacatacattatgtaatatgcacatatatatattagttggatacaattacactactacaatgttagcctttagaggcagttttttcaaccccattt

SEQ ID NO: 172827 - DNA, 657 bp, Cannabis sativa
catttcaatcaaacagttcagtttccctcaaccaagaatccactcgaggatcctggaagcccttattttctccaccatggagataacccagggagtgccttggtgtcacaaccactcacaggtcaagaaaactacgtctcctggtgtagagctatgcagctcgcaatttcagtcaagaacaagattggatttctagacggttctatctctaaacctcctatttcagatcaaaatctatataatgcttggtatagaaataataatattgttatctcttggattttaaactctgtgtcaaaggatatttcttcaagtatactatatgatgaatgtgcttctaacatttggaatgacttgaaggttcgttttcatcagaaaaatggccctcatatttacaatttgaggaaggattttatgaaccttaggcaagaaaatcaaaccattagtatgtactttactaaactcaagaccatatgggaagaactcactaattacaggccctcatgcacctgcaatggctgtacttgcggtggagtcaaaaagctccaagatcactaccatatggagtatattatgtcattcttaatggggctttcagactcttactctcaagtccgaggaagtatcttgatgatggatcctttgcccgaagttaat

SEQ ID NO: 172828 - DNA, 533 bp, Cannabis sativa
ttgtacttcttcttcatgattttttatgcttgatttttaatatgtttttgtaattttttactttgtgagaaatttcatgacattaacaagaaagttactatactctttttatgcatttgaattaaggtagtgtttgctttaatataatgtaatgtaatgggaatggtaattgtaatatgaatgataatgtaatggaataaaaatcgtaataggaattgtattataatgtttggtttaactctctaatgaacattgtaattaaataaataagttgtatattgaacaaaaatacccttagttttattatttttaatatttaaaattaaaaaaaaaagtaataaaaagaacaaaagagatattttctaacaatgtaatcatcattacattgtttttacgatgtaatagagattacaatacataatgtaatgatcattacaatgtaaagtcattaaaaaggttttaaaatgaaaacaaacaatgtaatagtaattatgattccattacaattcccattacactaaaccaaacatgcc

SEQ ID NO: 172829 - DNA, 703 bp, Cannabis sativa
atcgaatacatcaaaatattacaatggattgttaaataacataaaaactaaaaagatttgttatataaatgttacagatatataaaaaatgtgaaaaaaaaaaaagattacaccatataattatacaatatatataatatataaaaagaaaaaagtgaataatcacgcaaatttttatttataggtaaatcgaacaatgtccattacatcaaaataacacttgagcaaaatcatctgccgtttaaataaaaatgaaaaaaattctaacaactttaattaaaggtctaataagccaccaacgagcatccaatgagtatgaagtaaactaaatttccaaaccaaatgaaaatctgatgaacaatacccatccatggctattagccaaatatctcccaacaaaagttgggcaataacaaacccgttattcaatcccaaataaataataattgacatacgaccaaccgcacacaatacgatccacaccagagagtggaatatcataaggtacggaaccaataaaattttgacaacctttcggatctgacaccccagaagagagtctatggctacctcgcaaaagcaacttgagtaagttgatgaaacatatcgaaaacttaataagattcacaaacaacttccctgagaataatagctaacttcattaattgttaggttatttttagtattaattttagattaagtt

SEQ ID NO: 172830 - DNA, 529 bp, Cannabis sativa
agggcataaaacccaacagggatagcaagccactgcatgccacgacaccaccaccgcaccacccctaccaccgcaaacttgagaaaaatgcaatataatataaaaaaaacaacaaatatgatacttttattaattccaacccaaacaaagaaaaacaccttaaagaaaaagaaaatttaaaaacccaaactttgtatgattttttcatcatttaacttaattcagctactacaaatttccaaagcatgttcaataaaaatggaattgtaaaagccaaagtaaagttagtataaaaaagaaaattaaaagaaaactcactggtagctggagaaggcaattctatggtaaagttggggttgtttaggcgacaaaaggaagaaagtggagctccactgaaggagctcaagtggcaaggtgagctccagtgctactgttatgcaagacttcttggttgtcgaccttccttcgacttacaacatactattgggtcgtccaacactgatcggactaggggtcgtcagttcgatca

SEQ ID NO: 172831 - DNA, 1110 bp, Cannabis sativa
aaagtgggtcgccttgacgtaaactacgagatggaagcacttgtcctacttcttcaccatttagagaaaaagagaaggagctgctagttatacacctcataatcaatgatgtccatgcaatatcaaagcccatcttaagcataatagcctcaaggtattccattcaactcaaacgccttactcatgtccaacttgagtgcagaaaccccaactcttccttgagtcttgtgacgaatatgatgtatgagttcaaaagcaatcaacaagatgttatccataataattaatctattggaaagaaaagctgattgtgtttcagagataacaaatgggagcaccttcttgaatctgataacgattgtcttggaaataattttgtagataacattgcacaaacttatcggtctataatccatcattgagcttgagcttgggttaggcacttttggaatcagtgtaataatagacttgttgagctccctcatgtgaagaccattgttaagaactccaagcaccagattagttacagaagtgcctactatattccaatagttttggtagaacatggcagacattccatcacaaccggggctcttatcaggactcatagatttaagagcatcatacacttcttggctcgtaaagggctgaattaaagattggttcatgtcattactgatggtagttgggacagcagcaagaacttgttgcaaagaagcatgatctacaccatctgaagcaaacaaattatcataataagcacatatggtgttggtcatatcagtcttggaggtaacagtgaagccttgggaattgataagagatctgattgtatttttggacttcctggaggtggcgtgagcgtgaaaaaacttagtattctggtcaccactttgaagccaatcgactcttgatctttggtgccaatatttctcctcttgtgcgagtaaatcatccagtatagactctgaattttgtagttcaatcatatcagccaaagtggctgctgcattatttagcagcgaaaccttcttttgcacctctgaaatttgttttttgaaattaccaaacttggatacatgccaccgttgaagtgcttctgtgcaagaa

SEQ ID NO: 172832 - DNA, 587 bp, Cannabis sativa
gtcttgtctttgctttatttcgacgagatcctctaatcttaaaggtatttgtcatgaggtagagaactgaatatagaagtctcgggagaattcttcccatgaattaaatgttcttggggccatcttgaaatacctttgttggcctatttcaactagggtttctagaaagatttgacattgcacatctctagatacttgttagagatctgtttggatatctaaatattttaggtgtactagggaatcttctttcctcgtgtacatcttccaagttggcatcttaaacttgggtaagggcaaggcattaatgtatgccgagaaaggtgagccccttgacctatccagctcaaggtctaatggtttcaggttagccaagcccttgatcatgtctcgtatttgatctaactatgcttgcacagaaagatctattactgtaggggtctggttgattgacctttcttagttgggttgtagccctggactggctagagcctggccagccataccttgggagagggtatgttaaaaagtggccagccctaagcctggcagctggctttggcaggccagccctatgctgggtaggg

SEQ ID NO: 172833 - DNA, 617 bp, Cannabis sativa
atgcattatttgaagagaaaaagaaatggtaaggaggggtacatggccatcaaacttgatatgagcaaggcttacgatcgcgtagaatgggcttttattgaaaaaatgttgcttcggttggggttcaatgttcattgggtccaactcatcatgttttgtgtatcaacggttacttataatgtcactcatggtggttatacaatgggtcctatcactcctggtagaggtttgcgtcaaggcgatccactctccccgttcttgttcttgatttgtgccgagggtctttcttcattattgaaacattatgagaggcatcagctcttatctgggtgtcgggtagctaggggggctcctatggtgtctcatatgcttttcgccgacgatagttatgtgtattgcaaagctaatgatagagaggcacagaatgttattcgtcttctacactcttatgaacttgcctcgggccaacaagttaactttgcaaagtcttcagtgtttttcagcaagaatacttcggtggatgtgcgtagtaggatgtgtgggcatatgggattgagagaggcggctgatgatagcttctatttgggacttccttgtattatgggaagaaacaagaa

SEQ ID NO: 172834 - DNA, 775 bp, Cannabis sativa
gtataatgacttttgtcattttttagcagtatttttttactatttattagtgtatttttataagtttcatactgcagcatactgtgtttattttttagttttttttatttgttttagtattgttttacgattgttttccataatttatttttttaacgtcgatttcactgttctttctctatcttgttagaattaatgattgttttctatgtgttcttgtggtaccatggtggttctatccgtgaatgtagaagatgaaggctataaaatacatttcttcttccttctctatggttattttatagttatttttttattttggttctcccaaaaatacatttgacgagctcactagaaaaaaagttttgaggtgtgtggttcttttatgtttttctaaatagttatatctgcttattgttttacatttatttttgtattgttttactagtttttttgttagattttttaagattgagcttgcaaatataattgttattgcattgggtactgagattgggcagaacattttttagttttttttaatcatgttttcctttcttttgtttgatttattttagtgttgttttacagttgttttgccatgattatttatttgacattgatttcacttttttttttctcaatctcactggaattaatggttgttttccgattgttctagtgttcctgtgatggttttgtccgtggttgtagaagatggaggcctcattctttttttttttttttggtgtttaaagtataaaagaaaaaaaaa

SEQ ID NO: 172835 - DNA, 662 bp, Cannabis sativa
acatgcttaaatcactacaatttcaacaacaatttaaaggataaaagatataaaaactacctcaagatctcaaatcactctagctccaatgattatcacaattcaatcttgaaactaagcaatttctgacaaaattcaagaactagaaagaagagttttaagagagggaggtggtcggtttaatgggctgagaacaaatgcataaattgcttttcatttttgcaactaattctcttttgttacaaataattcactttgtcaatttaccaaagtgaccctagggccatataacactcataaaagcatttaagggtaaaatagtcattttcatcataaatatactcaaattaattttagtttatttacacataaataaaatgccaataattcatcccaaaattatatttcggccccgaacccaattctgtctgaaatacccagttgtgactataccgcgctaacttgtcagaacacacctgaaaaaggacaaaacaagcatactatataataatatagttcataagcacatcataacataaatttctcagttttacccttcttaggtaaaattactaaaatacccctagctcaccaaaggggtcttgacatggcatatatcatattaattcacatataaaaaattatatactaatataatttca

SEQ ID NO: 172836 - DNA, 1059 bp, Cannabis sativa
attcgatacggtgcttttgatatcagttttgctcttagaattaactcaattacaaattcaatttcccaggtaggtggtaatcctggtaaatcttctagaaagacgtcaaggaatttgcataccaatcttgtttctcagatccagatgtcacaagttggctagtatccactgcagtgactatgaatcccaaaaaacctcttctcatcagatctttagctttcagaagtgttattcttggtatacgtgtcccctgaactttacccacaaacactactgggttagcactatcgggctcaaacaccaccatcttccgcttacagtcgattgttgccccatacttagacagaaaatccattcccaagattatatcaaaattagacagttgcagctctattagattggcggttaattcacaaccgtcaatccaaaaagacaaagaccgaatccacctagtggatactataaggtctcccaaaggtaacagggtaccaaacctcgaagcataaatatcacatggtttatggaaactttcaattactctactggacacataggaatgagtagctcccaagttaaacaatacaatataggaacaaccatttatagataactgacctgtcaccactgacggactagcatcagcgtcagcttgagtcatggtaaagagtcgtcctgagttctgagtagtattctttttcagctcctctttcttggcctgaggataatctctgataaagtggcccaccatgccacactggaaacaactcttggcttgacattcaccctgatggtgtttcttgcatttcagacactcaggataagatcgaaatgaagatctgcggccttgacggccacctctgttttctcgaaactttctattaccctctaatgttccagaagcatcagccttccgtttgtgatcagggttaccaccgtcgatccccttactgatattaccactagcaagagggttcaatgttgtggtggcatcctttgctgtctgctcttttgttacatgttgctcagcctcctgagcaattaaggctagctctaccattt

SEQ ID NO: 172837 - DNA, 793 bp, Cannabis sativa
cacacacacacacacacataggctcaatctctctttttggagatttgccacatcaattctcatattgtaatcttaagagagctactacaaattctaaaatacttgtgatttgagtagtattatctctggtatcgatacaactaaaagaggagtaggtcattttcggctaactaatgcggttgaacctctataaaagtctcgtgtctatttacttttctattctaattgtgtaacatgtgtcaagcatcagtaataaatatgactccgctgtcggttggccaaatctgaggttaatagtttggtgctttcattgagagcgagttgttaatttatcggatcaaatgtcatggttaacacaaggagaactccgactacaacatctgcctcttcgggtcttcctcaagatcctattgcgtcagatcctgatgttcgtgttccagccacaactggaatctccatgaacacgatagatgtggccacccctgccatctcggcatgcaccacgaacctggccaccacaactggccaggtcgacataaccattcctgtgggtctgaataattgacctatgccacctagcgaggaccctttgctgttgcctccttgtgaaggaataatccacgtggagcaacccccaggcaccacaactggatatggtccccagtattatgctggagacacaaggctaggaattggtgagccagccattggtgatgttgggctttgtgccctaaataaaactctatttcaatgtaatcttttctattcaactatcaataaagaaacagattta

SEQ ID NO: 172838 - DNA, 1205 bp, Cannabis sativa
aagctaatgatcgttcttgttgtgctattaaaagagcattgaatatctatcatcgggcttctggacaacttctcaatgaggacaaatcggtattgtccttttcaccaaatactcctgatgccattaagagatctttcagccaaatcttgggtatgccagagagtgaatgtcatgaaaggtatttaggtcttcctgcctattctgaacaagataagaaacatctgtttgctgatattaaggagaggatttggaaactcttacatgcttggaatgacaaattattctcaattggaggcaaggagattcttttgaaagctgtggttcaatcaatcccaacttatgccatgagttgttttaaactttcaaagagtttctgtactcagttagacacaatgatggcacaattttggtggggttcaacagatgataagaaaaagactcattggaagaaatggaaattcctttgtaagacaaagatggaaggaggattaggatttcgttcctatatccattttaatcaagcgttgcttgctaaacaggcttggaggatctttaataatccaacttctttgctgtcacagattctaaaagcaagatactttccaaccagtgattttctgactgccaataagcctaactattcttcacttacttggcaaggcatttgtttgggggcgtgagttgctggctaaagggatgaggatgaaagtgggtactggtaggcacattttatgttgttctgatccttggatcccaggaaaatctaagttcacaccagttttttattgtggattgcctcataataaagtctcatattatattacttcaaattatgaatggcatttacaatcacttcaaagggatttttcagtagtagatattgacaacattctcacaattcctttgtcaagttctgctactgaggactactgggtgtggaattacaataatactagagattacacagtccaatcgggctatcactttgcttgctctttggaggaccaagatatatctacttcgaattcttcctggtggagtgagttctggaatctcaatcttccttccaaggtaaagatatttggctggagagttcttcagaatacattaccttgtgctgctgccttatttcagcgcaaagttattacttcagcagcatgtagcttatgttccaatgcttgggaatcggtggggcatgctttgtt

SEQ ID NO: 172839 - DNA, 664 bp, Cannabis sativa
attaaaatataaagaaataggcatatgttttgcaccttttaattaaaaaaaaacaatgagctctgtgctccgcaatttggggaaatttgattcacttaaaatcaaaatataccataaaaaaattaagttagtaaaaatattttaatcacaacataaattttttaatctaaatgcaagttttagttataataaaacataatatttaaatgcaagttactaatttaatttttataataaattataatttttgtgactcatatttttaactacgtatcttattataattatttataacttttttatctttaattataagttttgtttaaaaaataaattgtagtcacaattactttaaaaaaaatacaccacaatacaatttatggctatgctaaaataaataatcaaaattaataaaattttagaaccaattttcgaaagaattattttagacaacataaacacattaatttgttaacttcaagaaattaatgtaacttcaacttggttaagagagatttactctcctttgttgatggttattggtttagctactgaaactagaacaaactctactggtttgagaactgtgattggggagggatcttcgatatcctaatcttttttagttttctacgaaccagtttcttgcaaaaaaaaaaaaaaa

SEQ ID NO: 172840 - DNA, 640 bp, Cannabis sativa
  modified_base (573)..(604): a, c, t, g, unknown or other
agccacccgacacccatggatccactttctttcttcataaagccggataagagccgaaaatccttcagcacaaatgatgaagagataaggggaaattgtatcccccggtcgaattactctcgtaggaataattggcccaagaaccttccctccatgaataatattgtaagaaatagtccacagacattccattatcatcataacccaatcaagagaaaagcccatgcgaagcataattgattgtagaaaaggccactccattatatcatacaccttactcatatccaatttgagagccatgcaaccatttcttccttgttgtttacgctttaggtaatgaagaatttcaaaagaaacaagcacattatcagtgataagcctccccgaaatgaatgcactttgaaactcagaaataaccttagacaataaaccttttagacggttagccagaacttttgaaatgaccttataaagtacattacacagagctatgggtctcaaattgttgggttttgtgccctaaataaaatccattacattctgattaattatcaatacaagaaatttgaagtnnnnnnnnnnnnnnnnnnnnnnnnnnnnnnnnggtttaatatgttttaatatatatgcacaaaatctg

SEQ ID NO: 172841 - DNA, 624 bp, Cannabis sativa
  modified_base (245)..(245): a, c, t, g, unknown or other
  modified_base (273)..(277): a, c, t, g, unknown or other
ttttttttttaattttatttaacttatctttcctttcacaaatatcatattttaattctaactttataaatgtcatctatttaataattatcaaataaaattatcatttaatttatttattaataagaccttataaagtctcttaattaataaataaactctaaatcctcttttttttctcaaataagcccttgcttagtgaaaaattcacaaacaagacacagtcttatttagaattctaattnattaattaaaaccaattaattgagactnnnnnataatattatcccaattagtgtggtgaccatgaccctattaatcaagcttctaataaatagattcgaaatttaccaagtaaatttcctagcttattaattcctccaaactccattatagattcagaattatactcctaattacatagaacgctcaatataacaaaatagatgtaattcgaattatctattatttcaatccaaataattaaagatcctccatagatgatctacaccgagtagaaacaaatttatcattctaccttttaatgtattttatccttaaaatactttagctacttgtaaataatatttcagtatactaatataattactgaaatgagtgctc

SEQ ID NO: 172842 - DNA, 921 bp, Cannabis sativa
aacagggattacgatgaatatgccttttttaatttttaaaaagttctttttactaaaaaataactttttaagggcaattgttatacccaaaatttggcttccatttaaatggaggaaacgtgttaatataaaggaaatatggatcgatgaaattcctttttatggaataactcattaattgcgtaagtatcagagtatatttgtaacctactgactgtaaggtcttatgcgaggaattaatatacaaaccgttgcttagtatattagcgaaaaaccatatgtcgttaagtgcgaatagcgaggcatcaagtacactatatctaggaagacaaaagtgacacatatcaactgcggaagcacttagtgtataatgaataaactaagtgcaacagtggggttggctcgagacctagtaagcgaggtgcctatctcgctatgggaaggcttcctgtaatttcacccttgtaacttcaaaaattttctcggtgaggcttacagtcctgacgagtcagaagctaacattcaaatgagcctcgaagaactctttgtaaataagaatcgcgatcgtcacaagacgtgtatcgttaacctcggaagaaaaaatggccccagctcgctattgtgataattggaaccaagcttccgttaggacatccacagatacaacaattaaagacgtgtttaaatacacgatagttttgacctagtaaaagcggaaaaatcacagctatataattttcagataataaccgcatttacactacttgatatgtaatcaaaccccatgattttaggggatgattgttgtaaagagattacactcaacttagtaattaacttcccactatgattaacttgttaacagatcctatgatctgattttaatcatagtccaattgatgatagatcttataaataatt

SEQ ID NO: 172843 - DNA, 747 bp, Cannabis sativa
ttttgaaggagtttccatttgttttaaagatgactttttttttaaaaaaaggttaaggtgactagcaaaaataaataataataaattttcaactacgcgtgacattctcctcctagaaaaaaaaaaaacatgtgtgacatacatgacaaatattgatgtattaattaagaggtaaattgaaaactactattttttattatatatttatcaaatatagttgtaaaataattttaattaataaatattttttaaaaaaatccaaatattatatataacctcacaatcacataagagacataataggaatgtgacctataaaactgaatataaagtaataaaaggtaaaaattaaaataaaaaatggaaaaaaaaatatatagtgtaatttactcatttattaattaaaaacatatgcgtccttacagtgggatggatgggccaagactcaaggtttcaaggcctaagacccaaggtcctgtaattttattttttttattatataaacacttaaataaaaaaaaaaatctcataattttttaaatttgtatatataaaataataattaaaaggagaatatttatttatatttaattaacatgtatgtaactctcacacaattggtgaaagttactcataaaccttctagggttaaggatttgattcacactaaatttaaatttcacttttttgtttttttaaagtaacttaaatttaattattttgttacaattagatgaactaagtatg

SEQ ID NO: 172844 - DNA, 537 bp, Cannabis sativa
aaaaagattcaatatggatattattaatcccactaaaatagcatttactcaacgaaattaaaacaattatcaaaggcagtggtataatttaaatttaaccaaattattaattaattgcgctttattaatttatgagtactcttattttataggggtaatttcataaatataggaaaaataaagctagtttaaataaatatggtaaggaaatttaataaaaaaaaacatagtatttaaaataaaaacttaacatatatgagattgaattaccataatagatattaaactctcttcatagttttgtttttaaaaaaataaaacaaatgaaactacagtgatcgccgaagttgttaccggtacctaaaaagatcccggagtttgctgtcggtgccaaaaatgttgtcggagttgctgccagtgccaggaaagtcgttggagttactgtcggcgctgtaaaagtcatcggaattggcattatcgtcaaaaaaatcaccgaatttttttttcagcgtcgatagcaactccgacgacttttcc

SEQ ID NO: 172845 - DNA, 651 bp, Cannabis sativa
  modified_base (432)..(433): a, c, t, g, unknown or other
ttgttattcttaatggaactattagttatatcctttgtatatatatatattgtatataaaggaagtacccttttggttttgggttggttaggtagacgaagatgatcagtggaaagtagtcccacattggttacaaacaaaactaaggagagctcttaaacacagctatgaaatgagagttgctttgagcctttgttagaacaatagtcccacattgattaggaacatatttttactttctaaactttaaacaatacaaaattttgttcttttttttttaaaaaaataattttaaaaattaaaatattctattaatttttaaaaaattaataaaaataaggggaattactctatatattattttttttaaatttacgatttgaatttctaaaataagggttttcatatgattttttattgcaatttaggttnnagcgctagttgcaataggggttttcatatagaattttgtaaaagtgcaaaaaaaaatatttagaagtgtaaaaataaaaaaaaaaccttaaaaattattaaagaacttaataaaaatattatattaattaaaaaaaattaaatatacttaaaaaaattaaattattctaaaaaaaaatattttcaaattttattttatttataaatatgtatcttaaa

SEQ ID NO: 172846 - DNA, 536 bp, Cannabis sativa
tttgctgagggttccattaataggcctgcggtgctggcctggagttcacgtgtccaataccaaaaacgcgataacaattacaatttagttcgcacatcatcaaggccaaaatttgggataacgattctattgtgcaattgttatattttattgtatacaaaaattataaaatttttaaaaacaaagtgtataagagtttccataataataagtttaattaatatactatcataaaaaaattaaaataatttatttctctgtacaatcttaatgtatcgacgaggtataattttatgatgacctgtcttgctacatgttacaattttgattgcatgtcatacaatctattgggataacaattatattgtgcaattgttgatcttaaaatataaaagtagcaattcgataattctgcacatctgtaaaatctcatagttattcaaagttatcatatactatctaatttgaatgagatcaacggtaatcgagatcatttagatttttttttagtacaaaactttttatctatttattat

SEQ ID NO: 172847 - DNA, 648 bp, Cannabis sativa
  modified_base (383)..(388): a, c, t, g, unknown or other
ctactattagccccctaactctcaatcaaggcccaaaaaagaagaatttaacctttaattaaataattattattaattgaataagcccaatactaattaggcctaaataaactatcattgtgatattttattttagcaacctcatccatttaatatccatatataattaaataggcttcttatatgcatataagcctaaaaagcaaacatataggctcaaatatatacaaactaatttggatgaccctatcatgttactaggtttatcacaaatgaaagaaattacaaaatttacctcttacaaattatttatttgatctattaacaattgaactatatttaaaattagatcattagatctatcaacaagttaatcatagcannnnnnatcaaataaataataggtttattaaaaaaaaatgaatagacaatttagataaacaaacaatattacatgtcacaaatatgaatttagatctttattaattatatagttaaattatcatttaaataactaattaattttaaaaatttagggttgttgaaaaaacctaagatatcttttcaaaatttcaattttaaactaattttaatatatttatgttctatttgaattattttatccaattaaattaaatatctaataag

SEQ ID NO: 172848 - DNA, 603 bp, Cannabis sativa
cattcatttaatacataatcacattttctcaatgattcataaagcatcctgatcacacatccctatactcacataattgcagtgcttcataaagcacccataccactcgctatctacgagctatgtatgtcactatcgttgccagttaaagcaaacgataagtaagaaacctatccgcgatttcaacaagtaattactcataatggtcatgaccgtgtcttttcctcgatcataattgagtccactactaaaaaaatggtttttctcgacatttttaaaaagtcatttaaagtattcccgtcggtttctataactgtcgcctatatgacagtcgtaaaaataggcaaaataggcaacggttaaaaactgttggtattgtggacttcccgacagtttaaaaccgtggcctataacagggtataggcaacaattttaaaccataaagattgtaaaaaaaatagaaaaaaatacaaattttttagccattaatggcagaaaaatctgtattttcctccatttttttcctacattagttttataattttacctaaattaaaataaaacaactaattaattttactacaataacaactaactttaaaa

SEQ ID NO: 172849 - DNA, 559 bp, Cannabis sativa
ataattcagatattggaagatatgatgagggcttgtgtgatggatttcaaatgttcatggagtaagtatctgccccttgtagagttttcatataataacaactatcagagtacgatagtgatggctcccaataagttattgtatggtaggaagtgttatcctccaattcactaggatgagagcagagaaaggaaatatttagatccgaaatcagttcagtgaaccactgaggctatagagaaaatcaacgctaggatgcttgctttacaaagtaggcaaaaaagttatgcaaatccaaaatgcaaaaaacatagaatttcacgtaaggtatcatgtcttcctacaggtatctcaaatgaaaggaataaaacggtttggaaagaatggcaagttatgccctaggcttccgcgtagtaagctttcctgaaggttagctttcgtgtagtaagcttccgtgaaggttagcttccgcgtagtaagctttacagtgccttttgaaattcttgagaaagttaggttagtggtttaccgtctagccttgcccctagccttgtcaata

SEQ ID NO: 172850 - DNA, 517 bp, Cannabis sativa
gaagccaggaaacaagaagattatattgttcccattcttcaaattctggattgacaatgttcgatctttgatcggcttctgttaagaattttgctggtgcacgcgtatcatcaagaaacttttggagtttacttcctttgattgaggctagaacttggtgttttcagggaagaaaattatgctcatcgagctttattgacatagaatggttgaatgagataggatatgatctaggaagaggaacttgttgattgttgtgtgtttgagcattgttcaatctttatgctccacctgttgctaaaatcggattctccattgatgaacgattggctaataccatgtcagtgtttaatcttaagagagaaagagaagaataacagagttatattattattattcaagagtgtggaaaaacagagtttatatacaagatcctgaaccaaccaaaagcaacagaaccaacaactcctaacagaaagaatacaacagactaactgaaaaatagttaggacagtta

SEQ ID NO: 172851 - DNA, 807 bp, Cannabis sativa
ttaattatttagccactagcaaccgtgtactcaccattttctgtgtagtgctaaagcaagttgtcctccccatactctctactgccttgaatccccaagatccaagggatgtcgtcttcatgaaacctttcctcaatagactcgctatcccattccccgttgtctttcataagtgtttttacaagagtatttggaggcactgtggctggaattcgaagatggaaaggagcacctctaggcagccatttgtcctcgtttattcgcactttgctaccatccgacacactccatctaatcccttttgataagagttcactaccccataggatgcctctccaaatgtttgagcaccaagtacccgcaccaatttgtagaaaatcagtatgtggataataaagagccttcaatgtctgagcaagtaagctatcggggtgagtaactagtttccaaccttgcttcgcaagaaaggcttggttgaaatcttccaaatcttccaattatcatcatgatattgttacttttttttttttttttgtaactaatcatgtgctaactcgttacttatattttggagaatcaactgctatcttggataaccatatgcttatattttgagtaactaacgggcaaccatgtattatcttcggcagctagttacttatatcttttatttagtttgggtaaccaagtactatctcgggtaaaaagttacttagagcttgtttagttgtgttttcagttttcagtttttaaaattgtgtttttaaaagtaagaatagaaaacaattttttgtcattttaaaaatt

SEQ ID NO: 172852 - DNA, 611 bp, Cannabis sativa
acaaaggcttaaaatggtatttaaagatcttttgatctccagaaatattatcgttttattcactaatcccaaaagcccctttacaatgaattcaagggtcctttttatagtgagcctttagtactttacaacttcactagatccccaatctatcgaatatgaagtcactttcacacctgataacgttgtatcctaggtggtttgatgtacttgacatcctaatttacactaaaaatacaattttcattttgtacctcacgcgaaatgaacttttttcctattaacactcattgtgccattgttatctcgtcggacacttccttgcttagactgtttgtgtcaggagggaaaagaataatagcaggagtgttggaggttgggcacacagacgcaaacaggtgcgggcgcggacgggcatgcaggcgcagacggtgggcagacaacgagcgcgcgggtagttggtaggcccgtgagcatacgacgggcggtgcacgggcacacatgcagatagtggacggtgggtgtaaagaccgcttagctttaattttgaaaattagtaaaaaattagggtttaattatgaaaattatttattaattctaaattattaatt

SEQ ID NO: 172853 - DNA, 618 bp, Cannabis sativa
accactgaatccaggagataaaccaccattgaatcctagtgataagccactgccaaaagataaaccaccattaaatccaggtgataagccaccaccaaaagataaaccaccactaaatcctggtgataagccaccaccagaggataaaccaccattaaatccaggtgataaaccaccaccggaggataacccgcctttgaatccaggtgacgaaccgctaccaccaaaaaataatccaccagaaaaaggaccatcaagaaagactgagattgtgagagacaacctatcaaggaaggtgatgaagaacttgcaaccctaatatccttgtaataataatacttaatggcttgtatttgctaagttataaaaaccatctatctacgtacgtagaatacatatgagagccaaaataagtactatttttatagtacatacatataatgtttggttaatattacttagcaaactattgtataaatttatatattgtggtttgtattgccctaatttttcatcatacatgtatagtttggtatatatgcaattaattaagggaaatttgatttctatacttaaaaaacttaaaaaaaaaaaattaaaccaatacattttacacta

SEQ ID NO: 172854 - DNA, 681 bp, Cannabis sativa
gtctcatcaatagatgtccatcaaaagcactcaaattaaaaactcctcaagagtttttgataggtgaagtgccaaggtatgatcatcttaaagtttttggctgcacagtctttgctcacattagacgagataagttggagtctagagctaccaaatgactgtttttgggatactctgatggtgtcaagggataaactgtggtgtttagaagatggatactaaaatgtatcatcagtaggaattcggtgtttaaggagcatgaaatggaaatgaaaactacaaatacagataccaatcatgggaaacaaagtgttgagattcaaacagacaaggaggatgtagaaattgcagatcaggtggatacatctgcaacacacagtgagcataattcagatgaggaacaaggacaagaacaaatgcctacagggctacaggattaccaacttgtcagagacagagttaggagagatgtgagaccacctgaaaggctaggatatgctgactgcattgcctttgcatttgcagcagaaattgaaaatggtgaacctaccacttatgcagaagtttttgctgggaagaacagaaagaaatcttagtggcatggagaatcctcttctatacatgactccttctacgatgatgtaccgtgcagcctttctcctcatctttcgagcttcattt

SEQ ID NO: 172855 - DNA, 1248 bp, Cannabis sativa
ttctaagtccccttattattaaggcagacgacgaaacctagtctatttaattaagtatttatttttattttgattctaagaacaatatatgcctatgatttttgtttcttaaaataatttctttcatctttaatatcatgtattttttatatttagaaattattaatgcttggttcttcattttattaaaaataatattctttgattttttgtatttacattaaattgtttcacatttaatgcttagaagttataattttaaagcgaatgaaaatctattttgactagaaaataattgatttgattactgattagactatgagaatcaatataaacataaatatttttatatacacaaagtgaatttcgaacccttaataatatccccaaatatcactaaaaataaatgttattgtcatttcaccgtttaaaacactttattttattttattaccaaaaacctcactatttttggaactaggttagagttgtaatagcttagattaaataagtattttcttcgatctcacgcaattttcatgggttcgacctcgttctttacaatctccatactacaataaaaattcgtgcgcttgcgagttgataaatgtaaaacataccgcttttcgtacacaacaagtttttggcattgttgtcgagaaactgcaagaagaagaaactactttaatccagattggcataattcttctactagttatatcttttatatatatctattacatattattaactattataataattagtatatatacatttacatataaaaaagtgttacttttaagaaaataaaaaaaaaaagagaaaatttttataaataattattattatataagttaattattattatattatattatacatattacattacctaataataaagtaacttttatatatatatatataaattagtatatcatcattattattactatcacaccaatataaaattacttttgtaattttaatatattataattataaataattattattattattattatattatacatattactagtcataaagtaacctttatatatatataaattagtatatcatcattattattattattatcacaaaagttatttttgtaactttaattatttatacatactattataattattatacatatattattatattattatatatataaattatataattattattatatataataaaatttatatattgttaattgtaattaat

SEQ ID NO: 172856 - DNA, 857 bp, Cannabis sativa
ggctgtacaattcctgcacttgtcttagttcattctctgtaacaaataaataattgacaatgtaagcctcattaccagccttttccatttctatgaaaaacaagaacttaaatatataaaatagaagtctctatatcagcagtgtgcgtagtcagtagttcaactattgacagataatactattgtatactaaacaacaatacgacatggattggctatattttgtttttgttgtaaaggatgcttatcatgctatcatgcaacattacttgaaattatacttatattaaagctatttgaaaaggaaaaaaaaaaaactctttacttctaatagaatggagaagacaaaaagacatcttttgatatatttacctatctcaagccaatcacatagctgtaccgtttgcctacgttaagtctataatgtatctaaaaataagtgttaagatgatactggagagaagtatgaaaaagttatcagaatggaaaagagaaatagacctgcagcttctagttgcctctggagttcttgacccacggcatcattttcagcctacatgatttttttttttttacacattcaacaaagtaagggactaaagataaatagtgatataagtattcaaagtttcaaatttgcaagtggtataaacttaatatttgtttttaactgcataagtactaattttgtaaaactgtaatttttttctaattttataatattgactgctattgtcttaaatagagcacatataaaacccatattctagatcattagatttaaatataaacatgtagtataaattatttctaaatgttcttttaataaatttaaaatggagtctgtattgacaaaa

SEQ ID NO: 172857 - DNA, 686 bp, Cannabis sativa
ttttaataaaattattaaattttgggtttgtgaataggaacacaatacccaaaattaatgtaaatatatcttacagttttttttttaaaatatatagcatataagttttacattttttactggaaattaatgtttagagtatgagtaaaaaataataccattaattaagaattttcttatatttcatattctaattaacatataatgatatatgtagttgttttaatgtcatcatcacttatatgaacaattaattttattttgttagctagaatgtaaacaatcaattaattagtaattaaaataataaaatgaggtggtgtttggtttgttagaaaggaatggtaagtgtaatggtaatagtatgtagtggaataaaaattgtaataggaaatgattgttatgtttggttgttgaaattaatattgaaatatatagtaaattgacaaaattatatagaattgttgggcacggtcatacctattgccctttaatttattattattaatatttatttatttatttatttatttttaatctttttttagtagattgttttattcttatcatattttatgaagtatgtcttcttcaatcaaagtattattgtaatatttaagtatcagtagtcatactagggtgattctacaatgcacccctttaaaatagatgtattgatgcaccct

SEQ ID NO: 172858 - DNA, 680 bp, Cannabis sativa
tttttaattcattttatgaaaaataaaaatttacacaaaaattacatttcctctcaaactctctcttatttttcgaactccctagaccagctagggtttgctcccatttcctctcaattccagcaagtttctgcaagatttatgagtgcttaagccctaggtaagcttttgactttgtcctcttgagtttcttgaattttaagaaaattgatttatgcaagctttgtggtttttgttgctgtagctgctgttagtgtttagtgttgttttctgaagcttaattatgtttagatatgtggattcaagcaggttttaatgattgttagttagatttaacaaagtttttagttttgaacttaaacttggagctttaatggtggtttgtgtttctgagcatattagttagttttgttgcatgggatatgttctttgtggtctatatattaggtctagaagttattgtggtgtttggggtttatttggaagagttaaagaatttttggtctttcctgcactgaactggaattcttgtttagaggggcctgtaggaaccggaattccggttggggaaccggtctaccgattggggcaattttgggtaccctagtttttccaattcttgagatatttagggtatttccatgttatttatcgatagggaaacttttagtttccagttt

SEQ ID NO: 172859 - DNA, 603 bp, Cannabis sativa
  modified_base (546)..(577): a, c, t, g, unknown or other
gagagagagagagagagaaaatggcatccattaatttcttgcttttagggcataaatcccaacacaaagaccctcttatttaaaagataacccttcactagtacctaggaggcacaaaacccatcgagaccctcgtagggtctgttttgatctctcgcaagggaatgtatttcctcgaagaaagcacaaacccaaggatagtaaggagcgtcaatgcatatccctacaccaaggttgtgaaagcaaaagagacccaccagtggacttgagagaaaaataagcaatgcaaaaaaaggagaccttagacctcgtatgaactcttgaaggaatgactcagcaaatgctaaggaaattttgaatgagggcatcatggcagagttgaccattcttaagagagatatctacaaagtgtcttgacgatagaaaggagatgattttgaatttgattgtgaggatcgggactcatgtgctagaaatgtcctaacgactgaactccctacaaaatttaaaatgccagaaatgacacaattgttgggttttatgccnnnnnnnnnnnnnnnnnnnnnnnnnnnnnnnntcaatttagaagtgaagtatgtttac

SEQ ID NO: 172860 - DNA, 775 bp, Cannabis sativa
aacacatgatttgagacaataagaaaagcagcttaattatcacaccataattttgttagaactaaagttttatacccaaattcagttaaaagttgattaatccataatatctcacacacaaattgtaccatttgtaactaaagcactcatctcttctatcattacaggaagccaataaggatgagacatggcttcacgaatagttttaagaatagtaatagaagtaagagaagcaataaaagagcaagaagaagaggacaaatgattataaaaacaaaagaagaaatagaataggtacatttgtgtttacctttacaaagtgcaatggaaagatcatcgtcgggatctagatacaatgacgaagaagaatgtgcaagacatgaaataggaggcaaaggaggcagaggggcggattcttagagcacactacaataggaggtgaaggaggtggaggtggaggaggcagaggtgtaggcatgttaggagttgtgaccaagtcatgtggaggaataagagactcgtccgaacatgtgtcaggcccagaagatgtgataaaaatataccaacaaatcatcaacattcccctgacgagtaggagtaggtgaagacgaaaaaataaggtttattttctacaaaaataacatctatagaaataatatttttgttaagatcgaaacaataagacctataaccttttttaagacgagaataaccaaagaatacacacttcgatgacttgtgatctaatttagttacatgtggacaaacatcacaa

SEQ ID NO: 172861 - DNA, 681 bp, Cannabis sativa
caatgttgctgcccacctacccatattaatggtccgcgaagttattgagccaggaatggcaaaagaagatgagttgatccccgtgtgggatctgaaaaaatcgtagaacctatggaggacgtcgaggaagtatcggtatgtgacctcgaccccaccaaggtcctccggctaggaaaaagtctagagccggaggaaaaggaaaaaaataattgaaacgctaagggtagccacagatgtttttgcgtggtgccaaggggacatgaccgacataagcccccacgtcataacccatgtccttaatgttaacccggacatgccaccggttcagcagaagcgacgccctctcgactcagtaaaggcagaagccctagaggaaaaggtggacaaattacttaccagcggcatgatccgagatgtgtgttatccagaatggctggccaatccggtactggtgccgaaaccaaacgggacatgcgggtatgtatagattttaccgatctaaacaaagcctgcccaaaagactgttttcccctaccatgaatcgaacaaatggtggacgccgcctccgaattcaagctgttatccttcatggacgcctatgctggctacaaccagatcaagatgcacattgcagatcaagaatgcactagcttcagcaccaataagggggtatactgctac

SEQ ID NO: 172862 - DNA, 520 bp, Cannabis sativa
gggtttctctatcccacatgtttccaagtttttaactgttggaccgaagtaaccacgcgtatcccacatcccagacttttcgttcactatgctactccactcttctccaacagaaatgggatgcataaatggtcccattatctaccactttggtcagcgttttgggccattttcccactatagactacacaaaatgtgccaattgaagccaaattggttctttaaatagagtcaattttagagagcaaagcatcagattttactagtagttattacagagtgttccagattggaagaccgcaggtgttttctttaagatactgaagttggttaagtcttttgagtattgtaattttgcttttgctaaccgtgattttatctcgggagtcaatgatctagcttcccaaactagacttggcaacatcatggactatgtttgtgtaggggaaggattgccccctgtcaatcctattttgcttggttaatttcgaatgaactgatgttctctttcaaaaaaaaa

SEQ ID NO: 172863 - DNA, 557 bp, Cannabis sativa
tatatatagtcaattataatttgttagtgttcataaattaaaaaaaattaaaaaaaaaaaattatttgttagtgatcatggtgcgtaaacaaaggaaaagttaaaacttattctgtggtctaccgttttagctttattactatacttttgcatataattgaaaaggtattgaaattatttatgccaacaaactagagtgcttcccaagctaggcatataattcatctaggacactaaaaggggtaaaataatttttctaaaaaaaaaataatgataaaagaaataatggctagtacagtttaaaaatataaatagaactgaagtccatctataaatcgggtatttcatttataaaaattaataaacgtaaatgattaattttaatcctataatgttccagtgtaacatgatttaatttatgtggttccataattagaaaggtgtctaagtaacaagtcttcatcacttcactaaaaagtcttgtgtatatattgataatttttttttttttcggaaaggaagaatatatatggatgaattgatgatgataaaaaaaa

SEQ ID NO: 172864 - DNA, 614 bp, Cannabis sativa
caacattttgctacttcaattccaactcctcctgccactggaatgcagcctcctcttcctcctacgggcatgtacaccttatactctgatgcagctatttcaacatctcgctcaactatgggcttcggtgctgtgattcaagactccactggacagaccattgcagccatcagttctcctcatactggtgctctctccccaatcttggcagaggcacacgctcttcttcaagcaattcagtggtgtttcatagttcacttgcctctccattcaatttactctgactgtttggatttagtgaacaagatccacaagcgatctaaagatagatctcccatttcagatgcagtttggaaaatcattgcttctttatcaacttttcctggtgccaatatctcttatgtctctcgcaatcacaatgtaactgcacacactttagctcataaggcactggaaacggataaagatcttatttggaattgtcatagtttcaattcctccatcacctgattttgtaacttcactctcttatattttctattgttacaaatcagtttctcaaaaaaaaaaaaaaaaaaaaaacttaattctagccacaaacaattacaatatga

SEQ ID NO: 172865 - DNA, 647 bp, Cannabis sativa
ttgttcctagcatgggggacaaatttgaccgctccatctcttcgaagagtctcaaaccaccaccaaagcagcctgttttacaatagacatcaatcttaatattataggtgacaatattttgcttaaaacctcttgaaatcatctcatgataaaacaattcgacagcagtagtatctcttgattctttaaaacccaatagcaacatattcactctttttgtcaggggcatctttaggaacactgaccgtgcctccttcatctgcctttgtgtgcaaaatgctcgaagaagtgcattgaactcctctgtaccgaatttcctcctaacaaaaattttgttctccatgttttcaaatgcagcaaacgtgtcttcataggactggaacttggcaatctttgagagcatgatgctaactgacattagagtaagcaatagggctgtttatataaactgaaaaaccgcgatttaaattcggaccactacaatctgaatcattgtaaaccgtaaccggagaaactgtttttggtggtttggtcaatccagactatttaaggcataatggttcggttgcaattcgaaataaataataaacggttaaaccggaccgaaccatttataataaataattaatttatatctattctatata

SEQ ID NO: 172866 - DNA, 1653 bp, Cannabis sativa
tagcaccatattgcagaagaaacttccccccaaactcagagatcctgggagtttcaccattccttgcaccatcgggagaatagaaggaataaatgcattgtgtgacttaggagccagcattaacttaatgcctctgtcggttttcagaagattgaagttggctgaggcaaagccaactacagtaaccttgcaactggctgatcgatcactagctcatccaaggggagtcattgaggatgtattagtaaaagttgataagttcatcttcccagctgactttattgttctggacatggaagaagatagcaatgtcccaattattcttgggagaccattcttagcaactggtcaagcattgatcgatatttagaatggtgagttgaagctgcgcgtgcaaggggaagaagtggtcttcaatgtactaaaggcgatgacttttccaaaggcaagtgataactgtttctttgtgtatcttattgatactattgtggggaagaaaaagttgatagaagatccctgagaattgagcttaaccgaagatgagttaattgagcaagaaggaatggaggcaatggagtatgccaaatggctcgactcttatgggccattgaataggaagtactatgaagagttgggggttgtcccaaaggagcttgtgccatctatagtgaaacaaccagagttagaactaaaggtacttcccaatcatttacggtatgaattcttaggagaaaacaagaagcttccagtgatagtgtcagctacactttctgatgtggagactgacaggttgcttagagtactttgggcacacaataaggccattgcatggacattgggtgactttaagggaatcagtccctcaacatttatgcatccaattttaatggaagaggccgctaaaccaactattgatgcacaacgaagacttaatccaccaatgaaagaggttgtcagaaagaaggtggtcaagtggttagatgttggagtggcttacccaatttcagatagcaagtgggtcaacctggtgcaagtagtaccaaagaaaggggggatgacagtgataaagaatgagaagaatgaattgatccccacaagaacggttactggttggagaatctgcatcgactacaggaagctcaacaaggcaaccaggaaggaccattttcctttgccctttattgatcaaatgttagacagtttggctgggcaagagtattactgtttcttagatggctattctgggtaccatcaaatagccatagcacccgaagatcaagagaagacaacatttacttgtccatatggcacttttgctttccggagaatgcccgttggactatgtaatgctccagcaacatttcagaggtgtatgatggctatcttttcagacttgattgaaacatgtatagagatttttatggatgatttctcagtttttggttcttcctctgatcattgtttggagaacttggagaaagtcctaatcagaagtgaggagtgaaacatagttcttaattgggaaaagtgccacttcatgataaaagaagggatagttctggggcataagatctcaaaggcaggcattgaggtggataaagccaaggtgtcaacaatagagaatttaccccctcctgtttctgtaaaaggagt

SEQ ID NO: 172867 - DNA, 787 bp, Cannabis sativa
  modified_base (595)..(604): a, c, t, g, unknown or other
  modified_base (736)..(746): a, c, t, g, unknown or other
ataaaacattttgagataagttgttatactcttgaaaaataaggttaaaaaaaaaacctcaaaagacatattaaagaaaaaatatattagaccttttattttttgggcccctgtacaatagcccagcttgaatagccatatagccagccatgactatcactaaatttgatgtcaaaaattatttctactctaaccacaacaccaaaaggggaattttcataaatatgagaattgagggtatagtttactttttttatggcataaataaataacactataggtttatgggttttttattttttattttttacagttatatgagtttttttatgccatatttttgtaagaaaaaagtagaaatctcatattaaacaacaataagttttgccacaaaagtcaccgacaccgaaaaagttagtattgccgaaaaagtcaccaaaaaaagtcgtcgaaaaaatcatcgtcgccgaaaagtcaccgaaaatgtcactgttgccggaaaagtcactggaaaagttaccacaagcaaatatctcagatataactaaaaatataaccggttttatgaagaaaaactaataactcaaaccggttnnnnnnnnnntataaccggttctgtaacataataaataaaaataaataacataaaataacgaacccattctataactgtgttataataaataaaaatcaataacacgaaataactcaaaaaccgattataactaaaatagannnnnnnnnnnaacataatgaatacaaacaagtaatacacaataattcaaac

SEQ ID NO: 172868 - DNA, 764 bp, Cannabis sativa
gattgttgtttttgaatcccgtgagggtatgcattgtgtggtttccataactattggattaagattgagttgatctaatggttggaagccgaagtatatcttattatagtacataacggaatgtatatatatgtgagaaatgtgtcattgactgttgtgtttgaatcttttctatgtcacctgcagagactgaaatggggatctttagacagatattgcaaggaaaacttgattttgaatctgagccatggcctggtatttcggaaagtgccaaggatctaataagaaaaatgcttgaaagaaacccaaagaaaagactgactgctcatgaggttctttgtaagttttgactttgagtttagggaatcctaaaacaatagatgagggaggcttcttgaaatattccactgtgtggttaatcatattgctgtctaatcaaactagatcttttactttcaggccatccttggattgtagatgacaggattgcaccagataaacctcttgattctgctgtgctttcgcgcctcaagcaattctctgctatgaataaactcaaaaaaatggctttgcgagtaagcgattaacatgattgtaatgctcatttagttaagcagagcctgaatattgcactactgaggttttttgtagcttggaattatatcgaagcttacatggttcttcatttattgggtgaataaatattttcgcgctttaacagaaaatgctcatgtttcttatgcacaaattgttgggtattacat

SEQ ID NO: 172869 - DNA, 520 bp, Cannabis sativa
atgtacaatcactgtcaagctccaactcactgctcctccagctcgaaggtttgagaatcttaatcttgctcaaagcttttagaacgacgatgatggacgaagcttggacaaaggctgagaagaatgggtggggagggttcttacagtagttttggtatcaataatagaaggttgagagtagctggtggttcaatccatgaaagggaaccttaaaattgctactatggtatcccgtggattgtaagaacatcaaacacagaggcaaacccaggtcgtcgcttcaagaggtgtagatttttaagtgtaaggattacatttttcctcctggattaagtttttttttttaatttctgtccattataagaaaacacgtcaattatttttcaaaagttatccagactggtggaggatgtaagttttttgaatggatggatgttgaatcttgtggaaggtgcagagaaataattccaggacttttgagaaagataaccaaacttgaagatcaattgatgttgtatga

SEQ ID NO: 172870 - DNA, 681 bp, Cannabis sativa
aggataatgatagccttgaaatattgtgagtcataaaaaaaattatacttttatttcaaaaaaagtattttttttttaaataagtaaaaaaaaaaaactacatttggaacaatttaaaaaagaaaaaaaaaattgggcctctaaactagttggcctttatgtacaggcttagtctgtctatatttaagaccagacatgataacacaagtcaaggtacaacatattggtgtctatatatatttttcaaacaagaaaaaagtgtacataaaaataatatttttttaatgataattaattatatagcattacaaattaatataacaagtccataatttttttaatacatgttttttttcttaaattatttcttcatctattataatgattctctttataaaaagaataagaatgaaagtctaatctttcattaattgatttctaccttaaataaaaaattaaaaaaaaaaagttacaatatttcttttttaactataaaaataattactggagtccaacattggctggtagtatacgctcgattcacttaataagctgaggacaatcctttcctaataagtcaattttgttaggttcaatgaactttctaatattgtgacagtcagttgtcccgtgatccgtaaggagaaacaccgggtaagctgtacaatcccacaccgcctg

SEQ ID NO: 172871 - DNA, 514 bp, Cannabis sativa
cgtgacttaaactaaattaattaaaatgtgtaaatattatacttttaatatataattaacaagtaactagtattttgttttgactataataaagtaacattttagtcacaaaaatatataagataatggccaccaacatatgtgttatttaatatatatttctcaatctttatataagcataaatatgtttcgcagggcacatctagaattgtaacttgtataaaattgtgctgggtcccgttatttcattttgtcgggctgctatttcatttaactcccatattaatatgatattgtctacttttggcctaaactctcacggttttatttttaggcaccttcccaaaaggtgtcatactaatagagttgatagaatacttacatctaagataactcttgcctattcttccaatgtgggatttgggttgataccccaatagtcctcccctcaaaccaaggaccacatactcgtggtctcccctccaacgaaaccaccttatgccgccgctatca

SEQ ID NO: 172872 - DNA, 722 bp, Cannabis sativa
ttgtattgtagttgttttttgtttgttgtacaattattttttgatttatgtacatatgttatagtgtatatttttagtttattcttgacaattttttttgttgcaagtgtatttaatttatgtgcatttgtttttgtttttttttttgttttttgtttttatgtttagttgtagttgtttttacgtagtttttaggattttttttgttacaattatttttttaatttatttgcatttgttatggtgtatatttttagtttattcctgataatatttttgtatatgtgtgttgctttctatatgtaaatacatatatttaatttattttttgacacatatttttttaaatacaatgataagttttttttgtttcttttaattacgcactaataaatattgacatattaaaattatattgttgtctaattgattttttttttaactttttaattaaatattagtcattatattttattcgcaattttaaaattttattatttgtattattaatgcaattatttatttaatttgtaaaaataaattatcatttcaactgccattaactacaaaaaaaaagaagagaaataataaaatagttgaaataataaaataattgaaatgtataaacttgtaacaaaaaaaattcacgagaaggaaaataacataatagtacgaaaataataataataaagttttcaaaattaataaaagaaataagttaa

SEQ ID NO: 172873 - DNA, 984 bp, Cannabis sativa
gatcctggtaaaatattcccaacggtatacccccttcgctgttgcttgtcctcagttcgggtactaccctttgaggatctcttactccaggtgccatgctggtggctggtgcggattgggacggagtttggatactcaaccccatgggtgccccaaagtgtgataatgtgggagctaaagcgagactttgattgtatcctagggtggtggagaattgtatcccgctcatttggggagtggcaggagatggagctctttgaagttgagctctaggcacatatcccgataccccggtcgggtagtatcctttgtaagccactatttgagcttcttccaagttaatgtatttttcgaccctcttctgaaagtcctggaggttagctgctccctcttgctgcagctcattctagaaaggggtcctcgtacagatcccagcctgaagaagggcaagctattgtccgtcatccaccttcttgttctttgaagcctcctctttgaatctttttatgaagttttttagggttttcgaagggagtttttttatattagtcagggcgctgacctcgagattgatcttccttgccgtgacaaactgtctctgaaaactgacttgtaacttattccaacagtccactaatcctggttccaactttcgaaaccattcctccacagagccgcccaacgttagtagaaaacatagacattttgcgtcattactgaccctcatgacggtcatcaccctgttaaatcgggacagatggtcactagggtccgaatctcctgtgtaagttgccatttcgggcatcgtaaaatttttggggagctctgcttccaatatgtgttgggcgcatggcccccggtcctcgtaatcagagtcggagtcatcccctttctgtctccgggagactctagcgatgtctttgcggagtattgctaattcagccaagattccttcgttcaagactctagcgatgtctttgcgga

SEQ ID NO: 172874 - DNA, 928 bp, Cannabis sativa
aaatttttgcttgaaattggtaaccggcaaatattagtgtatcatcatgtattaaataatttttaaaattaaaaaagtaagtagtagtacttctaaatgaaaatagtactaatactttgattaaattacaatgacttatttttttaagtgacacatgctattgctaaatcccattttgtattttttttttctttttcctattttggactagaaatatggataatttatttatttatttatttatttgtatatgtagtgtagttgatgctgaactcataagatatatggaatagcattttattatagatacataaaacaaaaagattttcgctaaagacattctataatactaaaaattcaattattctcataatttcattccataataaaaggttattttgcaaacaataattaagaatattccaaatttcaattagtttatgatgttctaaaaaatcaaatttttctaataagtttttgtaaaaaacaaataaaaagttagcaataaagtatcgggtaagtttattgtgcacttaaatttgatagattccttatttattttagtataaaagagagctttttagtcgattttactttttataatcgcatacattacaattatttaggaccacatataaattttcaaaaaattacgagtaatttacaatactaaaaataagatttacttattttattgcatgtatgccaattgttaacctgaaaactttttctagtgacatggacatcaatgtttgacacgtgacatgaagaatgatgtcacggagttgagtaaatcctggacctaggtatttcttctcctctgttacatcccaatggatgagagatctacactttcggccatataatagttcatagggagccatccctatcgtactttcataactgttattgtacgagaactctatca

SEQ ID NO: 172875 - DNA, 735 bp, Cannabis sativa
ccaaaataatttgttaataaattatattatcttatacgataactaattagttttcaaaataacaaaaagacataaaaaataatcggtatataaaaataataacttattatattacatgacaactcattaattttaaaagtactttttaaagttacctaaatatattttaaattataatataccatgatataacttaaaaatagctaactagttactaaaatatatacaaataagtttttagataataaccaaaatatatctcaaattatatgatatgcaaataaagtttttttttttttaaataaaagtaactaattggtttcttatcaacactattagtaactaaaaatttaattatgaaaataatagaaaacgtcataaaacatcagaaaatgctacatttaactgacgtggcagatcaataaaaatagtaatgtcattattgtaaattagattaaaataatgtatattattgtaaacatccctaaaaataattacataaaatgaacccaaacaaaataatctttctagatcacgaggattaaaatccaaacaaatactcatataattaatataaaaaaaaatatattagaaaaaaacctcataaaataggtaaataaatgagaaatttacataaattactattttcggttaaaaatttactgttttacatttaaagattttttaatatttttatattatttataaaaataattgaaaaataacatccaaaca

SEQ ID NO: 172876 - DNA, 562 bp, Cannabis sativa
  modified_base (371)..(374): a, c, t, g, unknown or other
gaccaagtctaatcgcattcatataattcgcagtatgtgggaccaaggaatgaccttagcctgcatatatcaagatatatgtgtgtattcccatgatcctcctacgaacacatagagatcgattctctatgttgcgagctggtcctgatgacccaacagcctcgataaaccgatatagactcgcatgtcttggttctatcatctcgttatatgatgtccataaaagcgacttcacaaggacgcagatatcctagactcaactagtcccaaatgcatctcaagcctgcgagcttatgcaagaatatgaatagccaactcgcactaaagaagttgcatacgttgctgtatttagtgaattaaactggaaactnnnnttcatttattatgtttacgtttttagcttaattattataaatcaatgtatactcggattgataatgaatgcaatccttgtgtaaatgataggacacttgctttgtatataaaggagtgatccgccgtgaaataaaggggacataatctttgccccagtggactaagcagaccgagatctgactgaacc

SEQ ID NO: 172877 - DNA, 925 bp, Cannabis sativa
ttattaaactttcatttttctgaaaattaaattaatattaacaaatatattattatagtattgatttttaaaatataaataaaaattgacttaaaattttaaaaaaatatatattaggtgataaatttaaaaaatatttcaaaattgttatcgttttttaaatttaaaataattataaaatatttatgttttgatagaaaattatgaaatatctttccatatggatattgctaattgttacattgaattgcatttataataaaattaaaaaaatttaataaatatatatgtatattttaaaattatactttttatatataaaaatttcacaacaaattaattaaaatattgattatactttacattttataagattgaaataaaatttcacaacaaagaaatattttcaaatatatgtcatagtgaagaaattaaaaactgaacaatccttatcaaaataaaataaataataaatatataaaaaatttatcatataattttaaatttttttaataaatatttacgtatattttaaatttataccttatatatatataaaaaattaataacaaattaattaaaatattgattacacttcatattttataaaactaaaataaaaccgcacaacaaaaaaatattttcaaatatatgttatagtaaaagaaattaaaaattgaacaatccttacacaaaataaaataaataataaatatataaaaaattcatcatataattttaaaattttttaataaatatatatattttaaaattataccttatatatatataaaaattaacaacaaattaattaaaatattgattatacttcatattttataaaattgaaataaaaattagttaaggatattattatcttttaatagattttataaataattatgtttaatatatatatatatat

SEQ ID NO: 172878 - DNA, 639 bp, Cannabis sativa
attattattattattatcatcttcaaatctttcctaacaataatattaaaagatatgaacaaactcacattaagtgttgcacaataatactttttttttcatttgcaaagtaaaacttcattgaaaaaaaatactaaacaaaagctaccataaaggaggcagctccccgaaatcaaaacaagcaaaggtatttgaacaatgagaccatttggcgatagagtcaggaagaccattaactgatcttaaaataaaagtaaaattacactgaataaacaattgtttcaacttcaaaatttgatgaaaaactggaatacatctcgcatctaacctgtagaagagctattcaaaatatccaaaagaggtttgcagtccaaaaatagaaaaactttacaccactccttgtctagagcagaagagagagccaagaggatggcattggtttcaaaaaataggggagagatagcaagagatagggcggcccaagcattggacagcttgggccattgcacaaggcctctattttttaaggccaaatttttattttattttttttttaaagaaaatggttattttttttctttttttttcctattatatatacataaataaaaaattggcttattaggatttttaccccct

SEQ ID NO: 172879 - DNA, 553 bp, Cannabis sativa
ttttggcagttttgggcagtttttcgtagttttaggcggtttgttgtggtttttggcagttttggcagttttttagtttaactattttttttatttcaaaaaccgaaaccgaccgccatgtcaaaaaaatcgaaataaaaaaccaaccgccaaattcggtgatgacatgaaaccgaaaattcagttacggtctggtcggtttgattgtcggttgaacacccctaactgagtctgctactgaaggtgacatgaaatatatgaacattactaaatataacgcaggaaaaagatacatactagaaaaactaccaatactccctactagactacattatatatatatataacttgtataatttagtcacatgcggtagttaaagagaaaagtaaagatctctcaatattaaatacttagcatgatcgccttggtcattctggttcaataatgatacgaagaattattgaaagctcacatggtcattcattaaaggatcaaaagatacctcaaacaaataaatttacatgtgaagcatgttcccttggaaaattaatc

SEQ ID NO: 172880 - DNA, 713 bp, Cannabis sativa
  modified_base (657)..(677): a, c, t, g, unknown or other
ttacactttcttttccttgatgtattattatacagatacaatttcggggatgtacatttaggacagagctgtaggttaaagaattcttcagctaaaatgctcttggattacttgtagattagatggtaatctttcttttccccttttcatctctcttacacttaattttgaactagaacataatacattacttgtttttctttactatattcccttagggtcaccgcctattcggtttcttaacatggttcttcaacatgtcttcttggaatacattaatcccggtcaaatggtagtctggtaaacaaaacaagtctcattagtctttgaaatgaatctttagaccgatattcgaaatttttaacacttcttttgtctttcccttcctatagaagccgtgtcacaactaccgagcaatgttgttgcttctaccataatcctctgaagcaccggccatcgttctattttagtttcgacataaatacactcagaagatgaaaagtgggacaataatttttacaccttgagaagagaggcctagagtgaagtacaacatcatcaattgaacttcttcgactatgacattttaaaatgtaacatttgtgattagtgatatcaagcctttgtctctgtaaacacttaggaggcgtttggttnnnnnnnnnnnnnnnnnnnnnataggaatgggaatggaaataggaataggaatggaa

SEQ ID NO: 172881 - DNA, 507 bp, Cannabis sativa
ttattagcaaacaaagtattcatgctgttggttgttttagcaagtttaaagctactaacctgtataacgatcttctgcaattgccaatagcctcaggtgaatcaggtgaagtataagcaagttgtgtggtgtagattgagtatcctgaaacatagatttctgattgcggtaggtaattaactcacacctactcactcaagatcttcttactcaattctactttcccattgattctttcatttgtccaatttgtgatatgtaatgagaatcatagtgtaatgctcgtactaaatcttactaaatttcaaagataattttaatatattataactttataagcatatgggtcgggatcccgattatcaaattatgatttgaaagtatcttactagcatatacctatttatatttttttcaaattcgtgaacaggcaactcaaaacacggactcaaaatagtaaaagaccggaaccctccaggttgcactgccgcgatatgtacaatctct

SEQ ID NO: 172882 - DNA, 520 bp, Cannabis sativa
tatccattagtggatgtaatgtaggatggaccccaaagatctgtgataacaagttgtaagggttcattatacacagtattagaagaattaggaaatggaaacttgtgtatttttcctaaacaacaagcattacaaggagagaatgaatctttattgctaataggtatattacaagagctgagtacagatttcacaacttttttactagaatgtcctagtctattatgccacagttaaaactgggattggacagagtgactttctttattttctgaggtagagacataggcttgagcatgaaaagattggtttctggctgcagtttcaaggttagaattgaggcttgatgacagcttggtgggttgaagatagacctgtgattcatcaaaataatacagaccattcttgtgaacaccagtcaggagtgtattgtgtgtcacttggtgcttgacaaggaaaaaatcagggtaaaacacaaagtatacattgttatctttgccaaacttagagacactaagca

SEQ ID NO: 172883 - DNA, 776 bp, Cannabis sativa
aaagtgcatatacttttgattggtatataagacatatatatctttgatctgatattttgggtgtaattaataaaaaatttacaaaactgtatgaataagaaaaacagtagctatagtgtactctttagatctcagtaaataaaatatttatacatattgatgaattttggagtgtgataattaatgggtggtttttgtttagccaccattatatacaagaatactaaaaccccacaataagagcttggttctctttttttttttttttttgaaacagaagcttggttctctttgattacacacttgtatatgctcttttatctctattcattcatttatttatgtggatcttaaaatctttaataaaaataaatatattcttggttttggtgagttgatgaagataagagagaaaactcttctccttggacccaaagtctttaattactgtcaatttatcaattggtatttcactatcagtaatgacctgaataaatcaatatttgcatgctacagtgatttataatacattgtaattctttttattgttattttatttattgtcatatatatatatatatatatataattttaaaaaaatttataatgcactcatttaaaagaaatgtatctatacatcattatccgttttagtaaccgaaataattttttagtcaaattgttttttcatggtcatgtaaattatagttattatagttatttaagacatcctgcaaaattttaagaattctgaaaagtttaacaccccaaaaatt

SEQ ID NO: 172884 - DNA, 526 bp, Cannabis sativa
atatatattaacataaatttaaataataattgttgttattaatttactttatcctggacaaattttattaattatatgggagatgacttttcattttccaaaaaaagtacatgtgtttactaattatttaaattaaaattttttactattaccctttgatgtacacattatttaatttaattaaatatctttactcatcatccttaccacctctctcacatttcttttcacattcactattcatccatccatatcataaatcatatttattcacaatttactattacaggtacatgactcttcatattcactctccatcgtaaattatatttacatattacactaacataagtaatatatatatagggacatgattttgtctcgtgattgtacttttacggaatgtattttgtgatgtacggtatccattagatgagagagttatttgatctgagggctgagattgatctaagggtaattagggttaaaaaaaatagtaacataccctgacactcatctaatgtac

SEQ ID NO: 172885 - DNA, 766 bp, Cannabis sativa
ataagtcagtgaatttaagatattcaataatactcaaagaaaattacagatacagttaagctacttatagtagctgatgttgattacagctgtcataaccaacactcaatcctacaactaactaataactaaccaaaactaattctaacaaacttaacactccccctcaagatggacaatatatattcttcaatcccatcttgcctttaatgtaattgaattgattagggaacaaaggtttggttagtatatcagctagctgctctttggaagccacaagaactgtcttgataactccagcttggaccttatctcttaccaagtgacaatcgatctctatatgctttgttctctcgtggaaaacagggtttgctgcaatatgttgagctgatttattatcacaaaacaacaatgctggtccttcatggtcaacattgagctcctttaagattgacagcaaccaaaccacctcacatgtggtattcgccattgctctgtactcagcttctgctgaggatctcgaaaccgtatgctgctttttgcttctccatgaaataacaaagtctcctaagaatatgcagaaaccagttggcgatctcctcgtgtcaggacaagcagcccagtccgaatccgtataagccttcaactgaacttcgatttcagcaggaaaataaattccctgacctggtgtggctttcacatactgtaggactctaaaggcagcattcatgtgactgagttttggcacagcaagaaattgactcag

SEQ ID NO: 172886 - DNA, 582 bp, Cannabis sativa
actttaaccattctggattcaatggtcgcataatttaacattttagtaatttaaggcagcgtcccaagtcgattgtcaacatggccaataggccaacaccaagtcaacctgggcattgggccctatttctaagggcttgggattgtagttttcttctcgagattgcttgaatctttattatttctaatgacgaagaaattcctggaagactttttgcttaacttgatcgaaaacagcccaggttgacaatatgtcaacctaggcgctgggtcccccttttggccctttggaaattctgtttagtccctggaaatagtttaaatctcaatatttttttaaaaaggagaagctgctagaaagaattcttgaaaaactccatttaaaatggcccaagttgaaaaatgtcaacctgggcgcagggccatccccaagtgtcaatctgggcgttgggtcctattttttatgcccaggaattgttgtttttcctttgaaaggacccatttccccatttttgatgaagacaaagaagataaaaaagttgaatcgccgatctaatacttggaaggtgccctgattgacata

SEQ ID NO: 172887 - DNA, 649 bp, Cannabis sativa
accatacaccgcttaccattgctcagtctaaccgggctttaatccaacctgctgtgtcacgactcttctcccaagtaaaaggatgcccacacaagtctaaatcaatcaatccacattgctgaagcgcctcttgaaatccctctataagccacacagggtaaggtaaaccccaaagtttcttcccttggctaagaacgttattaaaatcccccattaaacaccaaggagaagaggaccgtccatgaagcgtccttaagagatcccatgtattcttccttagacttctattaggctccccgaaaattccagtaaaccgaaattcccaatgcccaccaatcgaaacaacactatcaatatgattcatagaaaatgaatccactttgacatcatcctgatacctccaaagtaaagctaaccccccactcctaccttgggcctccataacaaaacatccctcaaaacccaaagccctacacacccaatccattttacctttattacttaaagtctcacactaaaacaccacattcggccttttttgaaccacaatttcctttaggaactgaacattccgtggtggcccaagcccacggcagttccaagacagtattttcataatgattggcgagccccattgccaaggcccgcc

SEQ ID NO: 172888 - DNA, 1029 bp, Cannabis sativa
gcaaaatataataatagccaatggtcttgaaggctacaccgacggccccgtggtctgcccgcctcagtttcccaacgacacatcgagccaagtcgacccctctttcacggcgtggcacaggtacaaccggttgttaatgagttggctatatgcctctctctccgactccatgctcggccagctcgtggggttcaccactgcagctgaaatatgggtttctcttgaacgtacgtactccgccgcctcttttgctcgaagctccgactttcgcacggcgttgcaaaacttgaagaaagacggactcagtgcatcggcttacctccaaaagctaaaaactctctgcaacactcttgcttccgttggagaacccatctcctctcaagaacatttgacttacctcttaaatggccttggaccggagtacaacgcctttgtcactccgatcttagcccgaccagtcaaacccaccattaaagaggtacacgcccttcttctaagctatgaagctcgtttataatgccaaacagctgctgcctcattgagctcccttcaagccaactttgccaacctttcatttcccaaacagagacctaaaaacccttctctgccagccacttctcaaccccgattctcatcacaccctcagccaaatcgcccacccaatatacctaccgttcatcaacctcgccacaactatccaacacctcctcgatctccaacaccatggcttccctctggttctacccgtcccccttcaagaccaccacgatgccaaatctgtttcaaaacagggcatacggcattcatgtgttaccacagaaccaatctcagcttccaacctccaccacaacgcccatttaatgcctatttcactcaacaacaaccacaaaccccttccccacctctgcctacctcaccagccaccactcaaccattacttcccactccctcatccacgagtacactcaccgatcctgcttggtatatggactccggagcttctcaccacttcactcccgatttgaatct

SEQ ID NO: 172889 - DNA, 622 bp, Cannabis sativa
attgtgtgtgtgttttttttttcgacgaaatgtttagaatcactcatgaatttaagacacagacatttgccaccggcgctggaacctcctcgaactaggataagtcatcgtctaatcggagagcatgctttgccaaccatgagctgctaaaatcttagagcgaatcccatgaaacaaaactgcccccaaaaatttagacaataaaactatgtaacatcttcaatggaataataatagaagatgtttcaatagttacatagattggatcgtactcagccttagtgttacctatatagtaattaatgctctaataatttacatagattttttaatttctttaattagaagaagaagaattattatttttgctccttatactttttagattactaagttgtgttcattgtatacaattaataacattttttgaaatataatttttatagtaatatggttccatttcaattttattgtgaaatgagttaccgtgttaaacagtaattgataaatatgttagataaattaactacataaagaacaagaaaaatataacgactcccactgatcttcatataaatacactgatcaaacttgttctctacgaaaccaaacgatgtcacaa

SEQ ID NO: 172890 - DNA, 737 bp, Cannabis sativa
atcaaatagaagattttagatttcagagaagcaacactttcgacagggtctgggtggacgctgtaagaggtggtatgcttattttcattcaataattactagtaattattatggtgataattaatcactttattacactatgcattttttttgaatgaacactatgcattaaaatatatagtaattatatataaattcttaatattttgtttggtaaaaaaattaatatttaaaatagaaaatttttagtaattatactaaacaaagagagacataacaatttatagtagttcattctctgtatcgcgaaagtaatggagctacatctacttcaaatttttatttctcacaatatggtaattacagaaaaatgctaagtatttaagctctctagtttctagagatagaagctctaatcttgtgggtagttttctgaatgtgaaaaatgagctagatgagctctccttttagaggtgaaggatgtccttgaaaataggaataaaataataaaaaaatattaaaaaaaaaatacaagttggttattttttaccgtagatgatgatttttttttaaaataacatcttgttcattaattaagaaagatagatgagaatcacagggggacctccctcccattgctacaaagctcgttgactagcaactctagcatatttagctacactattcgcaaacaagttaactacgactaataaaaaagaacttataaataataaact

SEQ ID NO: 172891 - DNA, 617 bp, Cannabis sativa
tattagggttctgtgttgtgggttggtgtttgtgtgtgttttttgaagttgaattaaggtttaatatgttcaattgaagtggatttgaaggatgttgtgatgtttgagcaagctttgagtttaagaactcaagcttttctctttaatggtagattttgattctgagttgatagagttgttttattgcttagaatatgatcattgtggtctaaataacaagtcatgaaggtttgggtttgatttgagagtatagtgaatttttgaagttttcctgcactaaaccggtcaaccgtttaaggggggcttgtgggaaccagaattcttattggtcctcagaaaaccccacagaacctgaattttgattggggaaccggtctacggggtaattttcggaacccaagtttttcccctttttgtgatatttagggtattgccatgttattcatcaataagaaaacttttagtttcaagtttaatccccaaaaagttatttagcacgtcactcattagttttgcaaataatgtgatttaggggcctataattggtcgagaagctgttcccctcaggttggtcgacacacctgaattcaaaaacaagataagattagtgtaatggt

SEQ ID NO: 172892 - DNA, 894 bp, Cannabis sativa
gagacgagagcttcaagatgctaaggagacagtgcaaacactgcccgccaagctgaagtctctagaagagctacatcaagctgacctgcaaacgatagccaacttgactgtagaagtaaaagggctttgtgaattcaaggagcaggcttagaaggaggcagctaaggcgaagagaaatggcctcctggccccaatcacctgccaacactataagaagaattttgacgatacagtcttcatggcctggcagaccaattgccagaatcttaacctctgtttttaccccaagcctgaagaggtccttattttattctgggagaagaagaaaaggctacatgcagtgttggagtagcgcaggggccctcgtcttccacctcgggctgattgaaccactcgttccaacactattatcattatcttccctttttttagctacatattccatctttccccctgtttctaagacaattcatattttttttttcttaagggagacattttatggcccgtccccaggcctttttcttttttaaagtgtttctttggaatctaaacgacttacattatgtttgaatatatatagcttttaacctccttaaatttggtctgtttacatttgtccatgtgatatgccttactacccctttagtgacatgaaaatcaatttttaagtcactcagtcttataaaattaaattagaggttgcatatatttgtccagcacaaatgtactttaccgaacataaactttatttttcaactattggtaatactttcggaggtgatcggcattccaggccctaggcaccaaggttctgtccattctttttagcttgtaggtcccagagccaatttcgtcctaaatttcatatggtccttcccaatttggcctaag

SEQ ID NO: 172893 - DNA, 658 bp, Cannabis sativa
ccacatcgacctgcaattctttttccattctcaaaaccttgcaatatctcagtaaaactcgggactaacacaatattaatgtactagagtgagagggctataaggcaaataagaccttagtctatgcagactagactctactgggagccattttttactctgttgcagctttagttatttgtgaaaaacaaaaacaaaaaattgtctatctataacgagttttactacccaaatttattttatttggtggaggatattacagaaaatatgaaatgtttgttgtgttatacaaaaatgtggccctttttttcattataaaattttaatggtatcctttaattttcaacatttttataggatttttttctcatatatttgaaatgtttaatttccataccatatgtaaaaaaaaatttctagcaaagtttctaaatatttgtttacccgaaaagtgatcttggtaacatagacatcaatgtttgacacttggcaagaaagaaaatattttggagttgagtagtttcgagtcatgacagtctatacttgggaggggtccctagtcctgtgcctaggttgacttcgagaactcaagaatagttgtttggatcctacttagttattttcaactcactatctttcaatattttacaccatgaag

SEQ ID NO: 172894 - DNA, 739 bp, Cannabis sativa
gaaaacatagtaatcttttaatagtaaatttataaaaattaaacatagtagtaattagttcttcacatttttcattccttctagatcgtcatttggaatttctattttttgaagtttaccagtgacattgtggacaaacttgccatgttcctacaaaaataaatatagatgagaattttctacctagtttctaagttagctatacatgtcacaagttgttgatttcttttatagagattttgtatgttattgcttgatcattttgtgctagttgagtgcctcccaattatgtattgcaaatagctatagggggtggatattacattgcctatggagtaatggaagttaagttcatatgtttaccaaacaaaggaggaataaaagagagaaaattaaagctataatctttgcataagtcacttaaatagcaaattgaaaaaaaatacttaaacataaggtattacaaattaactttcaattttttcttggcgtgatcatttttcttgcttggtaattttggctttgtaggactattggtagtaaactttggctttgtaggacagtttcttttatcatgattagtcccactacagatggcacaatgtctatcgtcgcttttatgtttattcttgtccttcccttgaggggatgatcgagatgagcttgctatagttggcctgcctcttgtttttaaaatcttagagtccaatatattattagggaattctccttcattttt

SEQ ID NO: 172895 - DNA, 577 bp, Cannabis sativa
ttaatttattgataaggtgtgatatgaaaatatatttataagtaaatatttaaaaatatatacatatactttagtcattataaaaaatagaaatatgaaaaaataaagtaggaatttaagtcagaatatgaaaataggctgacttgtttaaaaaatactagttggcacaaataaaacaccacatgaatctgagcacgacatgaaaatattaggcttacgagtcttattgggcttaccatttaaaaatattagcacgacacggtacgactcatatttttatatttttatgatattagataatttattttttaaaaaaaaatcaatatatatatatatatatttatataattcaacccaacactacacaccttaccaccaacttccaacactacttgacttatagaatagaatattgaagcatttgtacatgaccgttggtggtcccatttttttttaataaaaacgtgagatatcattcattaagaagaatattaattatccaaattattatgcgttgaattgtcttgattaattcattccagattggagatgggcttgactatacatataaaaatat

SEQ ID NO: 172896 - DNA, 531 bp, Cannabis sativa
  modified_base (161)..(166): a, c, t, g, unknown or other
agagagagagagagtgagagagtgctatacatgtaaagactgcttaactttaattaagaaattagcagataaatagggtttaattatttatgaattatcattttgcggagatttatttgaattcgaaatgtattttatatgtcataaatggaatttcatannnnnncatgttttgtgcccgacaacattataacgcggcgtttggctattagaatcacatcttaatatttttagtatagcggggcaatatagttagatattgggaatgtagggattagttgagattttagaattgaccaaaatacccctaagtgattttatgacttttactatgggcaaggtcattatggtctttttgcctaatgggattttgtcatttagtgagagtttaattgattaataaacttgatcttaatggctagttttatttagataaaactaattttatccatttattttacaaagaaataagaaattaagaaaatcacacaaaacacttttcctctctcttcaactctctctctctctctc

SEQ ID NO: 172897 - DNA, 589 bp, Cannabis sativa
tgaaaataattacactcatagctaattcatttatgtcaatagtgtactattctagttagtcacacaaatattatatataattatataaacgcacatgatttttatgtatgcatgcttagaaaggttttcagatttgagctagttagttagagttggttcaagtgatcaatgaatcaataattaaatgtcctctagctagttatgatgcactaactatatgttagtgttgatttattatagtaatgtatatatgttgggattaaattcatctatatgctcatcagatgaatctaaagaaaattattattaattataataattagttttaatactaacttaaaaaagatcccaccaacaactataaatatgtgttcttctattctcaaagagatttctaagttatgagttctgatctttaatcttttagactcatactttagttttagattcaagtttagagagaatccaatatcatatagttagtgtgcttggatggatgtaatgggagtatcactcttgaagtgatttttctcaatgtgagatatttctttgtaattattccctgtgttgagttttattcttgggcata

SEQ ID NO: 172898 - DNA, 522 bp, Cannabis sativa
atatacaataaaataggttaaaattcaaactactataacaataaacggctaaaaccacatccattacaaaaaaaaaaaaaaaattataaaaaacactaacatatctacgattcattatcaaacaaaaaaaattaaaagaaaaataaacacattcattatttcaaacaaaaaaataatctcattaataaaaaaactactaaacaataaattgacaaaaaaataaaaaaacaaaaaaaaaccctaaaagagataccattcattatcagagaaaaataaataaaaaataaaaagaaacccaaacactgatttgattaacaaaaaacaaaaaatactaatgaataaattcacatataaaatgaaacaaacaaacatactaacttttattttcttaggcaacacaataagagcttcatcacactcggaatcgaaatcatcttcatcttctacaacactcttcatcttcttagagcacagatcatcagaagaaggctttgacaatccactcctcttcgaaatgcaagc

SEQ ID NO: 172899 - DNA, 616 bp, Cannabis sativa
  modified_base (580)..(580): a, c, t, g, unknown or other
acaaaattcaattattccaaaagttgaaggatgagagaaaataacaaaataaaatatattaaatatcttaaatacccttcatacaaaaaaaatgacagggaaatttttaaaaatattcttcttttatgttatatttataattttacgatctaaaatttttaattacgaaaatatacttgtaaagttataaaattataaaaatatattttgttcagcaaaaaataaaagaacaactaaataatagccagaaatcaacctcacaacaactataaataaattataaaacaacaaaaaataaccgaaaaaataatctcataacaattataaataaactataaaacaaccaaaaaaataatttatatttttattgaaaatatatttttgtaaataaaagaattcaaaaaataaaaatatttttttttcaaattaatgtatttttgtaattttttttttaaaattttttagtatatttaaagaggacaatatagtaattttactagataactatctttctattattctaagggaaattttatttacaccccaaaattttctaaaggcaccccattttaataatttntattttatataaaatttatatcttcaattgtactaa

SEQ ID NO: 172900 - DNA, 604 bp, Cannabis sativa
gccaaaatccaaaattatcagagctagaaggctaaggtttgttcttctacagtagagtgtaggcgattttgacagaaaagagcccagttcggtctcctaaccaagaccaaaagtcaaaatcagcatttgaggataaggggagaccgagaattaaactagcatcccggttgttgaacaagtccttgacgacatcagaatcccagctacaagtctccatagaaaagagagaactcacattattatgcagaagagctggatgagttgaagttacaagcctgttttcagtatcaagcagccacggggttgaaaggattctggtcgtttcaccattggcaataatacgcacggcccctaaacgaaccacattttgggcagcccaaacactacgccagacgaagctgagattatttcccaattcggcagagaggtagtcactaataggaaagtatttagctctgaaaattcgtcccaccaaagagtccggtttacataaaagtctccatccttgtttagcaagcattggaatattaaaatcatgaaggtgtcggaatcccataccaccttcaagctttggagttgccattcttgttggaatttattttac

SEQ ID NO: 172901 - DNA, 563 bp, Cannabis sativa
gtgggatcctaacaatacacccccatttggagccaacgtccacgggcctactttacaatcactactctgagcttaatccacaaatcacttttttcgcgagctcagtcatacttgagggtgcatgactctaataccactttgatataaccgcactagttctacatgttttaattactaagagaaaataataataacaaaatatcatagaattaggattatagagatcttatacttctttcaaataaagacacattttacttatgaaaattactctacaactccctttgcttttattgaatgatcatatatacagattatataaaacaatacccctgcctttgtaggccacgtaccaaccaaaatgaaacaactaatcctatactaattccaactattcactgaatacttaaaataaaataatttgatgacacatgattcacacgaggactagtactaccagttaggggtgtgcagaaagtcatctaatccaattccaaccgaccgatccaatcccaaccgatccaatagaatcgaatattcaatcataattagatcggatcgga

SEQ ID NO: 172902 - DNA, 750 bp, Cannabis sativa
  modified_base (133)..(141): a, c, t, g, unknown or other
tcataatacctaagttatatttataaaatttccgtatcgacttgatcgttaagtgtcaagtcaatggccacgtgacaatctttgattggtctaggtcattaattttttaatttaaaaattaatttaaatatannnnnnnnnaaatgacacgtggataatgacttgacacttaacagccagatacctataaacgttcgagaaatataacttaggtattattaccataaaaaattaataaacttaggtatttatctgcaaccgagagtacttacacttaggtatttacgctgcaaattactcttcttttttttttaaattataacttactatttctcttaagaaatttgtgatgtcacttgtttcttgttgatcaaggtacataattgccatttcctttacaaaattatctagggcatcaaatattttcttactaacaccactcaatccttcaccatcccacctgctcaaattaattaggaattattagatttatttattattaaaaatcaatatatatatatatatataattaaataaattaataaataatattcataaattaataaataaatattaataatatacctttgaattgccttagtaaagttttctaactcggtgattaaggagtctttcatatcaaaaaaatcatctgtcaccgttattattatagcaccttttgcaaccgccaatcgaattggagattcataaggcaaagaacaacaagctgaagctactgcaacataacag

SEQ ID NO: 172903 - DNA, 560 bp, Cannabis sativa
ttttttttttttttgagagctttaagttttcactaaaaaaattcttatcatttttcactaatttataaaaaagtctcacatgtctaaatatattttaggttttgcccataaattttttaaataaaacttttaattttttttcctttttgatgtgacccaatattaattatatttatttttagttatgcatgtgattagttaatgtcttataaaaatttaagttcatctaaaatatattatttatatatttgggtttgtttatttaaactggaagaggttttaatggctatattttaatatgggttaattgtgccaaaacctttaatactttcatttactcgcatttaacctctaaaactcaatttaaatttaacaatggatttttaacggccaaaaaagttcaaggggcataatttggtacatgtcaaaggtcggaaaaaaaaaaattataattagccaattaactatacatgatttagatatatatttatgggtgactattcaatggttacatttttattgtaatcatcatggttacatttttctttgatctgtaatag

SEQ ID NO: 172904 - DNA, 544 bp, Cannabis sativa
aaaaaaaaaaggaaaatttacaactttatatacttcatagtacttaattacaatatatttatttacaatttattaactatgagaaacatatttcaaaaatgtcacaatttcatgtgtttgggccacaattttgccattttttatttcttttctttctttcacaattgttgttttttcaatcaaacacaaacaaaatattttcaacataaaatatattacaataattttaatgaaaatatttatttaaaatctaattaatttgtaattcttttaataaaatcaatgtattttcttaactttttatttttttctccattatgacataaatactaattattatttaaaaataaagataaaattaaacttaaataaaatattttaacataataatatattgtattaattttatgaaaatattatttaaaatttaattaactttatattttaacactattatctatgtagggacacgattttgtcccgtgatgtactttcatggaatgtatttcgtagtacattagatgggtctcggggtacattaaat

SEQ ID NO: 172905 - DNA, 549 bp, Cannabis sativa
  modified_base (507)..(517): a, c, t, g, unknown or other
agatgatcgctgacgatgattgtacatgtcgtgactatatttgaaagacaaccttgcgactctgatacaaaattgtaacaccctactagtttaggcatgtgaaagtgacttttaacttaactgtgtagctcgttgctaatcaaagaggttattgaaaataatgagaaattaaaatttttattaactatttacaaataccaaaataacttacatttataaaactgtgatcccgtttataaaagatttacgaaacttttaaagtatataagttgtcgcctagcgactatacaaaatacgctcaactgtcccaaaaaccgtacgctctaggtctaacctccccgacatgtacaatcttcattctctcgctctcaaggctgctgaagcttagccttgcgcttacctacacatgcaaactatatttgtgagtcaacagactaggtaagaaaaacataatcataaacataaacatagatccagaccgcaactaggcgcccatacacctaatcnnnnnnnnnnnactgagtcaggaacgttctcgacaaagtatga

SEQ ID NO: 172906 - DNA, 801 bp, Cannabis sativa
  modified_base (764)..(769): a, c, t, g, unknown or other
attactatataacatgtaacagaagaaacaaaagtttataaattaaggtggctaagaagatatttcttagtcatatttatattgtaatataaattttttggtttgtacaattgttgagctaagtaggggtatttgcgggacaagtgatgcaggttgtaattttttttttttttaaacaaattgcatatgcagtttttgtaattttaaattgcaatcgcaaaaattatttagccaaaatgtagtgtagtgcggtgcgatttgagtgatttacactattattattatcgaacattataatacaaaaatctacaaaatcaatctacaaaatcttaattatacaaaaagtatcttcttggagttttaacattataacttattacatactcactaattatcaagtcattatattgaattgtctctaaaaattacatatatttatttttatatgaaaaaaataaaaattatattgtgaaaattagtaataatatataatgcggtacattttgaattgcaattattattaaactcacatcaccaaaattcaactttatttattttagctcatatttttatattacaccacatatcaatttttctataattttccttacagcattatagtattttactttaaatacattttattaattaaaataagaaaaaaaaaagtaagaaagagaaaataataaaaaaaataaggagagttatatttgcaccccataaaattataaatacaccccattattaaaaaaaatataaacttnnnnnntttttaaaaattactcttaatacttttttaaa

SEQ ID NO: 172907 - DNA, 686 bp, Cannabis sativa
agttgaaagcaactttctgaaagaattgtgttacaagggcctatttggtacgtaggactggatttgattaaacaaactcatttgtctagttcagtgtttgggcatgttgaaagtctagataactaatccaactaatctcatctgtttaggattatttatctcatccagtagggtgggataaataatcccatccaggtgagatttttttatcatttttttaattttgattttgttaatatattttaaatttaataaaaatttaaatgaaataatgattacacatttatttataattttttatcaaaaacttattcattaaaattagtgaattaatgtataattttgaatcatcatgcataagctttcaaaatttaaaataatattaattaaacaatagttacttaaattgattctaagagaaataatatgacaaaaaaatatatattatttttaaattactagaaaatttatatcaatattttaaaaaattaatatttgtactaaattagtaattaaattagtgtttagcttaaataatttatattattcaagtatttttattttattattttaactattattaaataaaattatgataaactattttattatatatttatgacatatacttaattatatatgatatattatttattttataatttaattatttttattttttgctg

SEQ ID NO: 172908 - DNA, 930 bp, Cannabis sativa
  modified_base (442)..(442): a, c, t, g, unknown or other
catcatgggcgaggaagaggttgcattgcagcatggtgggccgagctagctcggtgtccgagaaacatcagtcaagaggttgtctgaacctcagtcatgaccgaggtgcttctctcgtccgcttgagcacatagtgcctcaggtttagatatttatatttgaacttcaaaaaatcataactaatccaataaaaattcaaattaagttctttaaaagcctagattgattactttttcatatgctttccaaaaataataattctagtacgaaactaaaaatattttttgtcaaaaattcgtaattcacaaatatttatcaattaagcacataaactaatatgaacacattcaaatcatcaaatttatcattttaaatccatatttcatgaaagtaaaacattatcatggctctaaggtaagttgttagaaattattttactagnatctagatttactaacatgtatattgattataatctataatctaacagcctaaatatgaattcctaaaacaataaaaaaaaaacacatataaagttaaaaaaaaaaaccttatattggcggtagcggaataatatgtctcattccactcaaatctctaatttttgttcctttctatcggagagtaataataagatctgagcctggatcttcttcaggtgttggatccttcacaatcttctacactatgattgagtacttgacttgatatgagtgggcatgtactctatcactaaagggtccaaagtttatgaagataaagagaaaggagaattcaaaatctatagaaggaggctctcaatttctagttgtctaacagagttagaaaactaggttatgatagattgaatgggaggatttctcctagggttagatttcaattatatagaattaaaaaaaaaaaaaaagaaaataaaattgaaaaaaaaaa

SEQ ID NO: 172909 - DNA, 894 bp, Cannabis sativa
tcaaaaattaattgtaatagtctgcagttgcaagatgtaattccattactgcaaaacacagttttacagaaataaaccaaaactagaataataaattcagcagaaataaaaataatagcaaaaaataaaatcacttgacataagagatttatttatggtatcagtgttctttcgaacactcctagtccacggggccacgcctagagaaagaaatcaatcagtaaagtttcaaaaattacaaagacaattgacttatacaagtttagactctctctaaatctttgccgcaatcctttgtaacacacttcaagaatctgatttctaaatcaccatcaagcagcgaactcccttcatctttgaggtgtgagttcttacttgctcccgatgtaaggcttgaacaagtcttctcccgaagacctttctcttgttcaatcaagttgttcaaactaaccctaagaccagtataagaacaaatttacaaaaattaaaacctagatgaacaactaggttttcacaaaagaactctctctttagaactgaaaatatgacaaaaaaaaagctagaagagttgaaccgattagctactctataggttatatttatataacataggaacctttgttatatttatagaataataccgattagctactctataggttatatttatagaaaatcctgttttgcagcatcagaatcaggttttgtagcaacaaactagaccagaaaaggaaacttgccaaaaaggtgtctgatcattaacttggacttgatacctgctaaaaacaatgtgcttgatctaattttttaaagacacaatcgagcacattaaagagaaatagcaatggtcaaagttttcatacaaaacaaactttccataagagaatttcttct

SEQ ID NO: 172910 - DNA, 628 bp, Cannabis sativa
aataatagaaaatctccaacttttgactaaattaattttaataatggtggagcttttccagtagtaagagccgagaattaggggttaggtcgagaaagagagaggagatcagggaatttggctagaatggggggagagattgggggtgatcgagctgttcatttggagggtcaaaggaataataatgttaaggatttggggaaagatatcattactccacaaaatgataatcttgttatttatgataataaaaaaagaaagatgacaaaagagaataatgaagagaacgctgatgtggaaaaggttatgagtaacttttcaaaaaactcatctttggcgggccttggtattggggctcgccaatcattatgaaaatctggtgttggaactgccgtgggcttgggccgtcacggaatgttcagttccttaaggagttggttactaataaacggcccaatattgtggttttgtgtgaaactttgtgtaaaaagatgaaggtggatcatttgagtagagttttgggctttgaggggtgctttgtggtagaagaccaaggaagaagtggagggttggctatgctatggaagaatcaagaagaggtttcggtggacactttttctgagaacca

SEQ ID NO: 172911 - DNA, 543 bp, Cannabis sativa
gtgcccaaaataccaatttcaaaacacactataattttatatttttttgcatttatttggctcattttactatttctctattgcacattgtatattttactattctactcttctcatatctcacctacctcatttatcccagatatttctagaaaaaaatattaaaataattaatttattaattattttaattcactcactttgcctataaatagaggagagatgggtagtccaaaaaagcaatttttagtgtgtaatttttagagtaaagaaactatagcaaaatttatcttcatttttcttctcatacttctttatgagaataattagcataatggtctaatcttccttggaaggttagggatgattccatatgtaaagtgaagttattttgtatctttgattcacttgtaatatttatttgagcaatgcaagttcttatttcattcttattttcttgttcttcatccatctatactattatatatgctattatatactaaatatatatacagacttagtcatgctctttctatatatttt

SEQ ID NO: 172912 - DNA, 560 bp, Cannabis sativa
acttcatttattttacgatatattaaattatatataataaaagaacttgtaaaaaattatatttcgagagtaatcttattgacaagtggtatactataaaaattattctatataaatttagagaaaaataaataaaatttattataaaagagttgaaagtgaaatatgagggagatttcacgtggcaaaacttttcccaaaaatgtttttatttttttatttttattattatttttttctctttgtcaaaccaaataagcttcaattaatatagctaagaactctttaatgggatgtttcgacgaaagtaaaaataaaattaaatattaaaattaatttattaatttttggccaagcaccgacaagacatttaaggttaagattattaataattaaaccttatagtttaaaataattcactatatatagtactatgataaattttattttaaatattgtattttgtaaaaattatggataaagattcttggttttgtaaaataataaatttgattttatattttttaaaatgatataaaatagtactatgaactaatttt

SEQ ID NO: 172913 - DNA, 828 bp, Cannabis sativa
  modified_base (94)..(94): a, c, t, g, unknown or other
  modified_base (684)..(684): a, c, t, g, unknown or other
actcatcggggcctagtacttgcctcacgttaccactcatatctataaactagtaaatatcccgcgcttcgcgacggatatataaaatattttnaattatatataaaaaataaattatgtattttaattaataataattagttagtaaaattatattgaaattttaactttacaattaaaaaatttgtggcataaatacttaaaatattaatttttttgctaataaatactggaatttgaaaaatattagcataaatttcatttatagtttaatttttattctgatgtgtgtgtaaagttttgtgttcgaattttactgtgtgtgtttttaatgtttgagttttagtgttttacttctaatgtttgagtttgtatttatgagatctgttttttttttttaatttatttttatagattttgagaacttgaaatttgatgttgtttctattgattattgagattgagagtttgatttttcatacgggaattaaagtttgcattttcgtttcatggattgaaaaatattagtagaaagtttatagaataagaattttgaatatataaaaatagaattgaaaaataacatttgaatcgagaatcaaagtttattgttaatctccttacgaaaaaaagtttattattaatctgtaaagataatatgactggaagaagatggaaaaattnatttttatttcatttaatatgtatgtaatgttttttctttttggaataatattaatttattttaattaatttttgttttttaaaattattttttctaaaagaattattagtttggccaaaactatatttacatgtggcacttta

SEQ ID NO: 172914 - DNA, 1116 bp, Cannabis sativa
tattttattttttttacatttatagtttaatttgtaaatattttcatatttatactcttcttctttgtatttttttttttttttttttttatatcatacctttttggtaaattaatttttattatgtctgaacttttacttttatcctttttttccccgctgaacatatttcctggatggatctgtccctatttttgtgtcatatatagttatatcatatcactattgtgtccaacaccacattaacattaaatttgatactaaataacaatatgttataagtagggcatcaaaactcgaatatatatataaaaaatatagtatatttaattttgagtaatttggggcataaatatttaagtttaactctcggttgtaaataaaaaaacttaagtttaatttttagcgataataatacttaagttatatttctgaaattctgtagatatctaaccgttaaatgttaagtcattattcatgtgtcatttttttattggtatatttaatctatttttttttcaaaaaataaaaatctaatgacttggattaattaagaattgtcacatgacaatttacttaacacataacagtcaggtttctacagaaattccataattataacttaggtattattgttggtaagaattaaacttaagtttttatttataattgggagttaaacttaaatatttataccgcaaattactctttaattttttatattatgtgaagtaagaaactaataaaaaaacaaaattacataaagaaaaaaaccactaagaacttctttccttatcattatatctatatctataaaatagtatacactaaaatttttgaatgttataagtaaaatttgtgtatatatattagattgattttccgtaattagttttatttttaattaaagttaattaggtgatcttaagtataatacgtatatatatatatatattttttttataattaggtcatattttttttttaaattttgaaatggaatttgaaattttgagttttagaattgtttttagctattgcgttatattagtgtgtcctttgaatgagatatcgtccgattgagcaaaattgtcttttattttaatttaaagttaa

SEQ ID NO: 172915 - DNA, 508 bp, Cannabis sativa
gtaccaggcatcgctcggacagcatgccccttcagacacgagctgaccgagaattctcgggcacatcactgtctgaagggctgctcacgccgagcatcctcggccactgaggctgcatatagccctctgtctcagtcagcctcctccatccgcgcgcgtaggggtatgcatacccctatgcaccaaaattgtttttgtcatatttttttatttaaaaatcattttcattgaaacaaaattcaaaatttggtataattttgtgtagaatctaaatttctaattaaaaatctaattatcagaataaaattaatttttttaattttttaattaattaaaattacttttagatattagtaggctttgaatttgaaaaattattttttcacaaaagtagccttatggttaatttttggaaattttgattattttatttattttaattataagatcagatattatctattttattattaaaatttgaataatcttattttgatattaaaatatt

SEQ ID NO: 172916 - DNA, 598 bp, Cannabis sativa
aaggtgaaactcggcccttcatatataccccaagtcgtctaacatacagtcatcaagaactttttgaattcactcatcgccataacattgtgttccatcccgccctttttttcatacatagataaaatctcatcataatccccccacaaatccatggtagattagagagttattttaaacgctgaagaagtaaccaagactctttgcgaaggtgagcttttgggttgccataaaatcccgtgaatcgccacaactcactctctagacattgtacaagagcatcaatatgtccaatagagtaacttttaatagtatcatcctaatcatcattccacatcaataaaagtccaccactgctccccacacaatccacttgaaagttaatagtaaaattaacatgtcttcgaatactttctacccagtttccacgaaacttagtctcggacaagaagaccaagcttgggaaatgcttgcgcacaaaagttcgcaatgcacttactacaccagggttctccagttcccgtgcattccagcataagatactcattgggcctggcgagtctgctccgcagactgtgccaaatcatcatcaaccacc

SEQ ID NO: 172917 - DNA, 808 bp, Cannabis sativa
aagcttgattgtttttcctttaggacatcgctttacataatgacccctttttccacatacatagcatcgatcatatttttttttttttccaaaagtcacacttccttcacaaaaaatttattttgtgccctttgtactttgagaacttgaacatcttgaacttgtttatgttctttgagtttttgcaagaacacgaagattcagaagagtatttgatgagtaaatcttgtctactacaaactttgcctattttttaaaaattgtttcataaatttatggagaaatttcttctgggagcacattttttcaaggcccttaccagctggaaaatttctccaattgtagcatccgttagacttttccacaattcaaagagtagtctgaaagtttcttcgccaagtggctctagaatagaggaaaggaatgcttgctttagatttggatcatcaatgccacctatttggtagaattgttgagtcattctcttataatggttttcaagtcttttttatccattgaacaacacttgagcttgaaaaactctacttggagtctttcagttacttgtgcgtcttggccacaaaacttgacatagagatagcttagggcatttgcaacatataggagttgcaagaaagtcatttgtctatattttcctaagcttgtctatcaatcttgaaaaagtttcggtgaatcttgagattaaattcaaaaggatcatccttgtttatgcctgatgtttccaagctaagccacgcttggaattcttggagtttttctcgccacttagatgggagaatgtcatcaa

SEQ ID NO: 172918 - DNA, 629 bp, Cannabis sativa
  modified_base (573)..(589): a, c, t, g, unknown or other
tatatgtttacttctctaagggtattggattcttttctatttttcaactatatctgtgtatcaagaagtaacactagtagtaaattcattacttgaataacgcaaaaaactgtatagaacttacatacgctgaataattatctaatagctttctaggccactttcatattcaatctcattggtagaattagggactccggattgatttttacacttctccgaaaatcaatactcaacctccagaataatcaccatcctaaatttatactttctagcattaatgcaaatttagagatctgagtcagtgtagcctaaagggttttgaaaacatcacccttatggactaacatataggccctctttgatcttaagatttacttgattgtcttccaatgccctatctgaattaaactgagacctactcataactcccactcaacagcaggtgtttggtctaatgcatgtcagagcatacatgagacctcttactgttgatgtttaatgaattctttcctcggcctttagagttagccattagaaaaatgatacagtatcttactaaagtaagttgcnnnnnnnnnnnnnnnnnaattaccaggtataccacaagctataggtttagataaact

SEQ ID NO: 172919 - DNA, 533 bp, Cannabis sativa
ctccaaattcttatattatatatacactagtagctaagcctactcagtcatggcccacacaagatataacttatatctgtttttctcatgcaaaaatatattagaaaaatcaatattatactttattgaaataggtattttagtagatttatttatttaattattttagtatttaaaaaaaatttaagttaatttttttttataactatatacgttgtagttattttagattacttataatttaattttttttaaaataatttatagtgtcgaaaataaaatttcaaccgttatttactagattgcttactgtacatacagtttagtctttaataatatatatacccaaaaacaaatatatgtataggtgaagctttagtgttaaaataaatatatatataaaaaaatttaaactctcctaaataccaaaataattaaaaatagcttccaaaccagcagggacagaccccctattggaaatacgatcaggacatgaatcagaagaacgagctaaccagttagccgcttggttc

SEQ ID NO: 172920 - DNA, 579 bp, Cannabis sativa
tgtcttcccgtcaatgaagatgtacgatagaacaacagaacctaatgatcacatagtgagttacaagcaaagaatgtccatagtcgccatccctcgtgaattgcaagaggcttgtatgtgtaaggggtttggttctagtctggtagggctagccctccaatcgtacacaaatctacccaataattatatttcttcatttgctcaattaactgacatatttgtggagcaatttgctagtagcatgaagttggagaaattatccgacgatctttacaggatcaaacaaaggatgggtgaatcgctacgagattatgttgctaggttcaacacagagaaagtatccataacctcatgcaacgtggacaaagcgatcgcggccttccaaaaaggcctaatgttacatcttgacctttataaggaattaacaaaatatccttgcagaactatgtaagacgtactagccaaagcttgggcccaaatcaaatgggatgaggacgagtccaacatgcatacttttgttgttggaatatgttttaccaggatctagatttactgacaagtatgtttcattaacatcct

SEQ ID NO: 172921 - DNA, 773 bp, Cannabis sativa
ccttggggtgcacaagttttgttcatgaaatagaaggacaaaaccttatggatgtgtatttattactgggatctgaataaatcgacagtaaagaacaagtatcctttgccaatgatagatgatctgtttgatcaattacaaggaaagactgtcttttccaagatcgatcttcgatctgattatcaccaattgaggatttgggaggaggatattcctaagatagattttcgtacctgttatggacattatgaatttctggtgatgtccttcggattaaaaaatacttcggcgacattcatggatttaatgaacaaagtgttaaaggactttttagatgactttgtaattgtctttacaattacattctgatttctctgattcagaggaggtacatgaaagacatcttcagatggtgttgcaacgtctttgagagcataatctttatgctaaatataagaaatgtgagttttggctccccaaagtaaccttcttagggcatgtgatgaacaaggatggtatcttggtggatccagtgaagattgaagcggtttgggattagcctcgacccaaatctgcaacggaggttaagagtttcatgggattagcaagataccataaaagattcataaaaggtttttctaagatttctacttaacataattgactcaaaagaactttaattttgttttgtctgacaagtgtgagactagcttcaaggaattgaagcagaggttaattaccgcaccagtgttaaccttgccagttagtaatga

SEQ ID NO: 172922 - DNA, 614 bp, Cannabis sativa
gttgggcagtttggggcgcccgaaatgacctggtttggaaaggtaaattggttcagcctgagaacgttgttaggtttgcaaaaaagtatcttgatcaatggaaaaatgctcgtcagtcagatttcgatacgtctttgtatgcttttcaagcaggggacaaaagtgagcattggtgtcctccacatggtgatagcatcaagattaatgtagacgcagcgttgttcgaagggggtcaatcctatcgctttggttgcgtgggtagggactcaaacggattgctaattgaggggcgtacatttctggtttatggtgtggttgaaccggtcttagcggaggtgctagaaattaaggaggcccttagttggatcaaagaagcgaagtggcaaaacgttatgctatagtctgcttgtctttgtgcggttcatgccattcgaagctctttagatataaattctactattggtttgattgtaaaggagtgtaaaagtttgcttgcttctcttacaaatatttctatttcttttgttaaacgatctgctaatttagtggcccataactctgctaaggctgctgttgaccgagattttcggcaactaataaaatattataaaatt

SEQ ID NO: 172923 - DNA, 504 bp, Cannabis sativa
tcttgctgatccaatctaattacacgaggaatagatttaatttgttgagaattgattgatattgggattaaaatatgattattattgttatataatgaaaagatttcctgattaaataatgacaatgtgatgatacataaatgtgatattcaaactcaccttattaggtgatgcgatataccaggcagtgtacctattaggtacaggcggtagtgacatgtggtaccaggttatggtgcgggctcatcttattagacaatgcaatatattggtgccaagttttagtacgggctcaccttattaggtgatgtgatatacttggcggcgtaccttattaggtacgtgcggtagtgatatgtgctactaggctatggtacgagctcgtcttattaaaccatgtgatatattagtgtcaaattttggaataggatcaccttattaggtgatgcaattacgtgatatatgggtgacaggctatggcacgggcttgcttgattaggcaat

SEQ ID NO: 172924 - DNA, 522 bp, Cannabis sativa
tgtattaattcaaagggttttgaggccctagatgcagagttgggaaagcttaatctatgagatttgcctaattgacatgaagtacaaaatgataggcaatcttttcttggaaatgaaaaattacaagttgatgaaacacgagaaataacatccgaagcggggtgacccaaccgtgtatgccacagatcaagtgaagtcttggaagagtaaagaaggtgaggagaggcagcgagagtggaagttggagtgacttgataaatcccttgatcaagaagacctttgagtagaatttgatggttgtcctgatttttgacaaagaaaaaggttgggtgaaattcaacataagcattgttgtcaagacaaagttgagaaacacttagtaaatttttagatagacttggggaatgataaacttttcatagtttaagaaaaggaaaagaagaggaaggtaaagatgcagaacccacatgagaaataggaacaaacttaccattgctcatagtaatgtgatcattaccatgg

SEQ ID NO: 172925 - DNA, 780 bp, Cannabis sativa
tacaatgggcaaaatctgttgtcgttcaccattggaaatttcaaccgtgtcctcatcctccatccttattgactcaaaccctcaccttgctctcaatttccatttccttttctactcaccctcaacctcaagaatctcggtccacccttgggtgagcctcttgtccgttcatggtccaaaaacggacctcagattagtggtataattttttaccattatttttttatgattttttcgagtctcgttgtatgacatgtgtaagagacaattaatggatcaagatctcctgttaaaaattggtgtctcatactataaatcaaagtttgacacatcagcaagttttatttataaaaatataaaaaaaattaaacttctaataattgagtcaacaaagcagttaacacatttattataaattagattagttgatgtgtcaaactttgattgatttaacacagtatggaacactaatttttaacaagggatcttgattccaattaatgagtcgtaaatgaaaagagccctctaatcgtgtaacacaagagataatttgtatttagatttttattttacaaatctcaaatctaattatcagaataaaattaattaattttattttaattaattttagatattagtagattttgaacttgaaaatggataaaatctaattttttttcttaattttaaaaatttgattattttatattatttttaaatataaggttagatattttatattttacataatttaattaattttataaaatgactttattt

SEQ ID NO: 172926 - DNA, 547 bp, Cannabis sativa
gaaaaagcccctatattttatttagatattttattttaaaaataaaaacatcaaaaaatagttccacaaattttaaaattaatttattatgaaaattagaaattgtacccacaataaaattacttttcctttttcatcactgtagcaaataaaaaaaaatagaaaagtaaaatagttattataatggaaaattgtaacaaatggccttaaatttcacattgatgaaagttaatgtccctttttttaaaaaatgaagtaaatgaccttttataaattttaatacctaaaatgcccttggctgtatagatgaagctcaactccattttttttaatttgttctactgtttgcgcggtaaaaaaattaatataccaccagcatagtgaaaaaaaattaaacaaaaaacttaatttaatattccacaagcttttttttgttctttccttcacgaaataccaatgaacataaaatcaatatacctcaatcaaatatagctatacctcatacttaaactaatatttcatgtttttccctctttcgttcattata

SEQ ID NO: 172927 - DNA, 551 bp, Cannabis sativa
  modified_base (465)..(470): a, c, t, g, unknown or other
tagaatgttttatttaaaaaagaataataacactaactttttttcattttttattttattttaataataagaatattcagagtacaaaaaagtaagaagctccattggagtacaaaatttttcgacctttttatacagtcgtttaaagtattcacatcggtttctataaccgtcgcctatacgactgtcgtaaaatggcaaaatatgcgacggttttttgtcgctaatgtggacttcccgacagtttaaaatcgtcgcctataacagggtatatgcgacagttttaaatcatgccctatactataggcgacggtttatagtataggacacggcttaaaaccgtcgcctataccttgttataggcgacagttttaaactgtcgagaatgtaaaaataaaaagaaaaaaaaaacagatttttctgccattaaatttgcctctatttttttttcctgcattagttttnnnnnnttacctaaattaaaataaaacactaattaattttattacaataacaactaactttacaacacattaaatttatacaataac

SEQ ID NO: 172928 - DNA, 552 bp, Cannabis sativa
ttgccttaaaccctaactcatctaacatccatttaaacaaatggcatttaaagcatggcatcacataacacataaacactctagatgcttgcatactacctaaaatggaaagcggtaaatcaatgatcacacaaacagtacagtatttactctcaatacttactgcaccatgactcgaacttgtctctaacgatgaatgtacatgttcagccgatctacaggaagtttaaaaaccttggcgttctgatacgaaattgtaacgccctaaataattaggcacgctacccaagatacttacgaaatcctaatcccctaattgggattactaataagattagcgtggaaattaaactttaattataaacagaattaaaataaaacttgtaataatttaaactttacactataaaagttacagaagttgggatcccaaaaacattcacaaaatattagtacaagtccttttctttcagtcgccctaagtggtaaaacagagtctcaaaaatacaatactggtagaccccaacccgcttggtctaatatggcttttaa

SEQ ID NO: 172929 - DNA, 745 bp, Cannabis sativa
  modified_base (683)..(696): a, c, t, g, unknown or other
tcagccatctctctcgacccccctctctctctcagccatcctttctttcgcgatcctctctctctctctctcaaccatcatctctttctctccccaggaccatcgaggtgccgtcgccgtcgccgaggaccacagacccaggggtcgtcgccgccaccaaggaccaccaagccaggtaaaacccgatcccctatctctctatctgcccgatctcctttctctctttctctctctttagatctagggatttctataattttgttttctgcaatcatgaagatttgtgtatagatatccctatttgggtatgtgtttattatttttagatgtgagaaaaggtaattgttgtgggtaaaataaatttagggttttgagattcgagttttgggactgaaattttgtgtttttatttgtgtgtgtttatttgtttgttgcatttgaatttgtttaaatttggtgctagtatttaatttttttgtgtgatatggatttgaaaaataggttgtggtggtagtttcggtaatcgtgggtggtggtgtttacggtggctatggatggaggtggtgtttacggtggtttcggttgtgttggtggtggtgtttagagtatctgtggatggagatggtggactgatagggagagaaagagctgagatgaacagatagaaaaagaaagaaaagaannnnnnnnnnnnnnaaaagaaaaagaaagaaaggaaaacaaaattattttttatttataattt

SEQ ID NO: 172930 - DNA, 765 bp, Cannabis sativa
ctcagagcacaataacggcagactctcttaagattgacatataatcaatatattgcataatatctttaaattaatagaaatgctaaaagacactagtggtgtctaacactcttctacgtgtcagtatcgttattggtctaactaagtatcgggtcccacataatttaatataacactttttaggaagtatcgctagccaatcacaacatgacatatcgagaaagtattaagtaccacgggtgtctaataggaatgctcttaaattaacaaaggcataatgttgggaagaatttatgaatgcattgagaaacacactgttgtaaagaatttatataaaaataggataattgctattagccactttgaacttagtcaataccatactcatataatatactcatataatatgaggtgacattatttattaaagggattatttcataaatacaaaaaaaaaaaaaaatacaacttcacaaatttttaaatattttgacgatttatgtgattttatttacagaaaatacgattttttttatatattgtactcttgttaatacgaaaacagaactggttatatttcaattataaccgatttgagttattttatgttatttgtttttattcattatgttataaaaccaagggcggagccacacccacggcaagggtggctatggccccccaacatttatgtatctccatatatatacatgttgcccctgattttttccaatatacgtagaccaaccgaataaggacacgtgg

SEQ ID NO: 172931 - DNA, 594 bp, Cannabis sativa
aatcctagggcagctggggtttggcattttctttgtgaattcaagcagattttgagggaaatccaagctctaggtaagctcatgactatccttttaagtttcttcagttttaagaaaaagggatgttttgcatgaattgagtttttggtgttgtggttgctgtgattagttgttgttgttttcagaagcttaaatatgtttaattatgtggattcaagcaggttttgttgatggttactaaggtttaagcaagtttggagttttgaactcaaacttgaagctttaatggtgaattttgtttctgtgcttggctagttattttgtagccttgaatgtgttctctagggtgtatagaacaggtctggaaggtttgaattggtttggggttgatttggtcgagttatggaagttttagtgtttcctacactaaaccaaaattccggttcagagaggcctgtaggaaccagaatttcggatggcttccaggatttcctcccacaaccggaattccagttggggaaccggtcaaccggttgggacaaatttaggaaccttagtttttcctatttttgtgttatttagggtattgccatg

SEQ ID NO: 172932 - DNA, 839 bp, Cannabis sativa
ttagtggtaccgatgtacactcgtgaggtgtacagtctgtaagaaagttaggtgtagtgtatcggagtcaccaatttggtaacgaaatcactaaccgatacttaaatagggttctacttagtggtgccgatgtacactcgcaatagtgacactatcattgtagatgtttaggggtcccgtgacacaaagtatttaatcaagttaggtgaagtgtatcggagtcactagtttcgtaacgaaataactaaccgatactgaaataggtttctactcgcagtagtgacactatcactgttgatgtttacgtgtcccgtgacacaaagtttgtaatcaagttaggtgtagggtattggagtcaccaatttcgtattgaaatccctaaccgatatcgaaatagagttacttagtggtgtcgatgtacactcgcagtagtgacgctatcactataggtgtttaggggtcccgtgacacatagtccgtaatcaacttaggtgtagtgcaacagagtcacccactaacccatactgaactagggttctacttagtggtaccgatgtacactcgttacgtgaacagtctgtaataaagtttggtgtagtgtatcggagtcactaattttgtaacgaaatcactaaccgatactgaaatagggttctagttagtggtgccgatgtacattcgcagtagtgacacaatcactgtagatgtttaggggtcatttgacacaaacaatttaatcaatttggtgtagtgtatcagggtcacgagtttcgtaacgaaataactaaccgataccaaaatagggttctacttagtggtgtcgatgtacactcgcagta

SEQ ID NO: 172933 - DNA, 626 bp, Cannabis sativa
  modified_base (557)..(567): a, c, t, g, unknown or other
aagaaaggattcatctttgataaatgaaattaaagtctggatttttttttttttaattattgggttgcctattcatgataatgaatcctctgctgagtacttttgcatttcacaggaatatagtactaataataactaactatttccttcaaaaaaaaaataataataactaactattaatcattaaatttgattaaatgttattattttacacccaaactttgtttagagtcatgtctcgagcttagttgagtcttattttagagacgggtcaaacgttactcaattaaatcacacgcgcacatacaaacagccattttactttcctctctcagcatactactcaaacataatatacaaaatattatatatatcaataaaaatattttttagtgaatgggacttacgaaaaatattattttctttttgctggaaaaaaaaaaattactagttttggtgtagtattttgatgcatattactaagaaaaaactacacctactgacgtatcaatatatttcagccaattacataaatatggcattatctaaccaatcannnnnnnnnnntggttttttttttttaaaaaaaaccatattaaacattaaaaaaaaaatctaaatttaaa

SEQ ID NO: 172934 - DNA, 595 bp, Cannabis sativa
cttttctctacaaaatgtcagtttgtcttattagataattgataaattgaataactcattaggttagtttgtaaggggcaaaaatctaatgtttatttttagcgggatacatacttaatgtttgtaaaactgtaatttttttctagtttcgtaagtacatttttcgttttaaatttattaaaagaatatttggaagtaactggtactacatgtttctatctagacccaataatttagaatttcggtcttatatgccctgtttaaaacaataaatatgtctgtactgacggaattaaagaaaaattacagttttataaacattcagtacttataccgctaaaaataaatattgagtttatgctactcataaatttaaaactttgaatacttatggcgctatttactcttatcaaaatttcacaaaatatcttaaataatatattaaagtaaaaattctcctaattcatacctcggtgtaccataaaaatttctaatttatcccattacttatcttctctcatttgctttacattccattactaaaattgtggattaaaactcaaccatagcaaaaagtgagaattagattgattgg

SEQ ID NO: 172935 - DNA, 510 bp, Cannabis sativa
ccccccccccccccaaactatcacttcctgcagcagtagcaacagttttttccacggcactacctactacaacagtagtagatttttcgacaccagcagcggcatttcttgctgctatagtatcagatttttctacaccagcagcttgttctcttgtccccttttcctgaccctcaacatatttattcccagcatcagctttctctttaatcatccccttattaccttcagtcttctgcccaattttctcttcagattgcttgtcttttttcctgcactcagccataatatgaccataccccttacaatgactacatttaataggcagccattcatattcaatgccttgttccatcaattgaccatattcattcaagaaccagaacgatcgatcaggattattagtaatatccatttctacaagtattcgagcaaactggaccctagttcgatccttagtatgcttatcaaccctaataggttttccaatcgtactaatcaaagcactta

SEQ ID NO: 172936 - DNA, 522 bp, Cannabis sativa
ttgcacaaaatattatctagttttagattatatatatgtatgacaaaattacaattaaaataaaaatttaatgatatagactaattaagaaccgatacttagcttctaagagcatctccaatggagtgctaaaaaaatagtgtatagttatatttaacacacttaacaaaaattattgctccaatggtgttctaaaaaatgtgttaaatttggcacatgctaaaagttgtgtcaaatttgacacaagatattgtgctaaatttagtccacaataaatgatatttttttatttactataaggccactaattattatgatttattaacttttactaaactttacattttttatttactatattactattatttaaacaataaaaaataaaaaacaatagtttttatatattctcattaaaatatcaaatgacccgagggactttagcttacatgtaggcttaagccctcactcaaatatatacatcaaatttttcacatgtagatatatacatatattaattca

SEQ ID NO: 172937 - DNA, 912 bp, Cannabis sativa
ttttaaaaaaaatacatatacatacaaatataattttttttttatttgatatcatatatcaatataaaaatatttaaaactaatacaaaactaaataattaataaaatatcatcatttaagagtaagaattttatgtttccaagaaaataaaagtttaagaattaatttaccaaaaaataaaatttgaggaccagcttgccaaaacttatataatttggggagttaatttgccaaaaaaaaaaaaaaattgaaaactaacttgcaaaacctataaagtttaagaacatgcgatataaataggcggatacaatatatgagagcatctccaataatatcaagagtgtcaaaaacctctataccacttaaaaatatatattatttttcttcatatcattttaagcacttttttttaaaataatctaatagtaagtgttttcaaaaattattaaaataatattttattattatttaatatatattaaatgaacaaatttttcttctttatgataaaataataataaaaaataagaaaagaatatataaaaaattgtatatagtttcgtggtattttttttaggggcttttttatttttacagttcaaattagtttttttttttgcatttttacgaaattctacatagaaatcccaactagccctgcaacctaaattgcaacaaaaaattgtatagaaacatttattgcaactagcgctagcgctgcaaccacaaccgtaaatttgaaaaaaaaaattaaaaaaaatagtatataaaataatttccttttttttattcagtaataaacgtaaattaaaaaatactaaaaatatatccagacgcttcgtagcatctggaatagggaaatttgaaattatatgcatattagggattaaaattggtatcctaatctaaaa

SEQ ID NO: 172938 - DNA, 1237 bp, Cannabis sativa
gggtgatggatgcacaagcttgaaaactcaagtttgttcatccatgacatattttgtatttgtgcatttttttgggtgctgttgattggaatatattgtgtatgctcattttaggtgttctggaaagtttggtggcatttggacaagttttgagttgttcggggaaacctggtgcaaaccagttaaccagtttgccaggacctgtaaaattggttaaccggttttggcagattcctcaaacaactcgttttctcgattcatgtccacttcagtgccttagttgggtgtttccctgcctcttaggatattgtagtccctattagtaataacagaaccttaagttgtaggttcgggtttcccggattagggttttaacgtatgctttacccagtttttaatatgtgattagggcatccatccagtatgagactttccgttcaagtaggccaactcacttgaattcagaaaagaggtaagaacatcgtacaatatgtgatatgaatatgcgaatgtatatatgtgttaatgtatatgcatgcttatatggttagtttactaccaacacttgtacgaaaaaatggtacagagtgcattggtatagtgtatgtggtttaaagagtacatcacggtcttaccagcactagtacaggaaggtacacggtgtatgtggtacaacacttaacagtactcggggtacggttcataccctacctacactagtacgatggtggtcctaagtgcatgtgatatagtggtacatggtcgtatcttagttagaacgttcttactcatctgttaagccatgtaaataggtgtatggccgcctagatacaagtcgttattatgtgatatgttatatgcttttcttactcagtctctcgactcacggttctactttcatgtgtaggtaaaggaaagacgaaagctgaacatgagtgagcttgagctaggatgggattgtacatgtcatggcggggcaacctagagtgttcgatctcgggacatctggggttgtcattttgtagtcgttgtgtgacctgattattgtattttggaatattttgtaaaaaaagtttagaaacagaatctcaacttttgtaaataattatgtaaagtttatgaagtttcatagttaatattaaagttttattttgacacgattctcgaaaaacttctttgattagcaaagatagcactacaattaaaaaaatcactgtagcgtgccttagcattaggg

SEQ ID NO: 172939 - DNA, 502 bp, Cannabis sativa
  modified_base (477)..(477): a, c, t, g, unknown or other
caaaacaagacaacacttgattaatagctccccaattcagcctgtcataggctttcgtgagatcaattttaatggcagaaaggccttccttgccccttttccggttgaaagagtggataatctcttgaaccagaacattattatcctgtatgtttcttccgagaacaaaggcggcttgcgtagggaaaataagattaggtaagataggcttgattctatttgcaatgattttagaaatgaccttatacataacattgcagagagaaatgggcctaaagtggttggttctctttgggttctggaccttagggacgagcactatattcgtagcattgactcctttgtgcatactgttattcatgaagaagtccgagacagcatcacagaaatcatctcccaccgaatcccagtagtgcttaaagaacagaatagacattccatcaggtcctggggctgtgtgacagtcagtagtcccgngatccgtaaggggaaacaccgggta

SEQ ID NO: 172940 - DNA, 614 bp, Cannabis sativa
  modified_base (158)..(160): a, c, t, g, unknown or other
aatcttatttagatttctgattattcttcagtgccactcttgtatgagttttttcgtcccttttttttttatcttatttgccactatttataattacatagtgggcagttaattacaaagttgactgtaatatgtttacaataatcatccctaaaatnnngggatttgattacatatcacgtagaataaatgcagtttttatttaaaattcacacagctgtgagtatcccgcttttattggaccaagatgaacgcatattaaagatatacagtaagccttatcccatggggttgcctcgctaggaatggagccgagttaactttgatggcaagttggtgctcgtcatataacttcccgagattgatattgctttaattcgaaactatagttttgggtgtcgagatgatctttctcgcatgcatgccatcttgcaacaagataaacgcctcgctgtttgtcatcttgacccaccaaactatttatacttagtctatatactacatcatatacgctaagtattgttattgttattatatctcttccacgcgacgtggttaatgcctcgtcatgcacacttgcatttgcatgatttctcgtcgatacacaagttaac

SEQ ID NO: 172941 - DNA, 648 bp, Cannabis sativa
  modified_base (602)..(614): a, c, t, g, unknown or other
taaatatcaaaacccctaaaaactatgaaacaccaaaatagaaccaagataacttagattagacttttaccttgaattacactagccaaaaccagctgaagactcctcaattcacaccaaaatcctccagaattggtgctgccttaggtgattcgagaaagaaagagagagaagaaaagagttttcttcaatttttggtttcctttttccttaattattttctaattactaattcccacaaaaataaactttggctgaataagtggccaactgccactcttagggaatgccacctcatcgtcctatgcaaaatacctaaattacccttaagccttttaagcaaacctattgtgaacctaggggtaaaatggtcaaatgtcataacctcgttcatcctcggtattgaaaatatctcataagtttatcccactaagaaatagattctagacttacccatgtgactctaatggccatccatcgcatttcctgtcgttgtcgagcaaaatcataaaaattataaaactcagatatatcacaaataatactcctagagtttaataaaatctcctaatttgagaaattatatgtaacaccctaactannnnnnnnnnnnnacgtgattttcaaacatactgtgcagctcgttgc

SEQ ID NO: 172942 - DNA, 769 bp, Cannabis sativa
ccatctggaaaaggcaatcaaccgagcggccaatgagacttggatggtttgttgtaataaatcgattgtcatcagtaggcagccatggatgttcaagcacagatgtagttttcccatcaccaatcgatctaatagcacccatcttaatgagatctttagcttctaaaatacttcgccaaataaagcttggattcggacccaactcagcttgtagaaaattaccttgtgggaaatatcttgctttgtacacctgtgccaccaaagaattctcattattgagcatacgccatccttgcttacccaaaaaagccaagttataatccctcaaattccgaaacccaagaccacccgcatccttatgtcggcaaagtttcctccaactcatccaagaaacactttttgttgaatcttttgcttgtgatttccaccaaaatttagccattaacccctcaaggctagaacatatttcttttgtgagaagaaacacattcatagcatagctagggagggattgagctactgactttataaggacctcttttccagcttttgaaaggaaccttgtctcccaactttgaatcttcttgatcattttatccttgaggaaaccgaggatagcattcttacttcttcccattgtgcacggtaaacccagataagagctattttcggaggcaggagtcatgccaagtaacccgcacaagtaagttcgatcattttgttggacattattgctgaaaaaaattgaagatttgtcaaagtttatttt

SEQ ID NO: 172943 - DNA, 747 bp, Cannabis sativa
gatgaagggggatgctagggttatgataagggaatctttgactatttgtattattttaatggaaaaaactcaacacatttaattattttatttcaaataaaataaagaaaaattattacttatttatcagatttaaaaaaatatttaaaatatttttcttgggcaatgtgtacttattttattattttaaataaaaatttaaagttatgatatagtgacatgctgggcaagtagggaaacgtttaccgagtcgcactcggtgggtcactatagatcaatatttttttaagaaaaaaattaatataaattatgagaattcttctttagtgacacgcataacgcgttggcaaacagattttctcacacgtgtggcacgtctctataggccatggttttttttttattattatttttattaaattataaattttgggttttagtatttagtggcactccatatttttagtgacacacatttcgagtgatcaacaccgaatatttagagtctaatagtgtgtgtcactaaaacctactcctaattttttagtgacccacactttaatgtgtgtcactaaaagcctaatttgtagtagtgaatgttataaccttgccgtggccaaggctaaaaaagaagtatcctctagccagagcacagacaagggaaaaaacctttctaagtagggaactttccaaggcgggaatgaagatgtggatcctcgacttggggacccaagcagcaatgttgga

SEQ ID NO: 172944 - DNA, 534 bp, Cannabis sativa
aacaccatccattcttctaaaagatcaaacttcttaccagttattacacaacaaaatcccacaatacaaccatcttcgaaacttcggttgtcttgcatacgcatcccatgttagcacatctaccaaattctctcctcgagctagagcctgtgcatttattggttatcccccaaatatgaaggcctacactctactagaccttcaaaccaaacaaatattccattgcagagatgttctcttttatgaacatatttttccctttggttcggtcactaacactcacactatagatcagttttttccacatcatactgagacttgttcatctcaaccacacgacacttcccctgtccttactgagcctaattcgactcaaaaagatagttcaattcctgaacattccaacactgacttcaataagtgccaacaacaaaatcaaaataagccaaatacacaaccatgcactaccaaatccggccgtgcacctaaaaaacctgcttatttaacagattaccaatgtgactctgtcaccac

SEQ ID NO: 172945 - DNA, 591 bp, Cannabis sativa
agtctggccttcgattgagaggcgaacctctgttctaatgccctccaaacagagtatgaggattggtgatgagcaagagaaccaagaatcgtctccgacattgaagatcgaagccagctgagaagtaattgatctttgcgtttccaggcaaagaacaggggattgtcatcgccattgacaagcttctccggtggtggaactcctacaagaaggatgtcgtctaatccatggccgatgacggtaggaatcacctgggatttccaagcaaggaaattggaacgatccaatttcacagtgaaagatgaactgagtgagttttggaaaggattccatgggttttggtgtgcggtgttttgatggaagggcccttgattcaaaccagaggggcgtggtgggttttcaacgaaggtaggatccataggagacttccgtcaatggcttcctgataccataaaagatcttatctatacaaactgagaaacctaagcttgcaaaagatacaaggcttagtgagggaactcttatttatagagattgagttttacaaagacagagaaaaaccaaaagaaaactaactgtaacaaacataac

SEQ ID NO: 172946 - DNA, 690 bp, Cannabis sativa
aataaaacactaaatcacatctttgtaattaaaatgaaattgtagttattccacgtaaatttctctttatttttttgtgagaaggtttatttgaattcttcctctaagtcagcaaaaagtgaatattgctatcaagtattaatagtatttaacactactataagataatatcttaagaataattagtgatattctatcaaagtaagaattttttagtgataacgtaagaatgataatttatgtttagtcacaatttttttttattttttagtgataatttgtgtgcctaaaaataagattttttaaagtatatttttttttaggtgtaagatttcaacatttaattataccaataatagtaagttattttttaaaaaataaaaaaaaaatgtatataatctgttaatatatttagtttcttgaacatattaaagataaaaagtatagaggaaattatattttatatttatttattttatttatttttaatttttttacttttatttttatattctttaacatatatccttattaggttaatgtaaaatatgtattaagatttaaatagaaattgagtatactaagtaatccactcaagtgagtatatttactttttttttaaaaaaaaataaaaaaagagtatattttaataaaatataatatgaaagtaattttgattaatagataaaa

SEQ ID NO: 172947 - DNA, 557 bp, Cannabis sativa
  modified_base (150)..(153): a, c, t, g, unknown or other
  modified_base (258)..(261): a, c, t, g, unknown or other
aaaaaaaaaaaaaaaaacactatcaaacttttagtcacaaaaaaaagttacttgtgactaaacatggtatatgaatacaagtagtcactaatttagttttagtcacaataagtattgtgactaaaaatacttttagtcacaacaaattgnnnnttttgtgactaatattttagccacagactttttagtcacgacgtaggaatgacaatttataattagtcacaacttttttacttttagtcataagttttgttgtgnnnnaaagtaagattttttgtagtgggggtagtgatgcagtggtggttgtagattaggattaaagaagaaaaaataataaaaaaaaaataatggtgatgctgggaatataggtacttgggcagtgagcaagtacatggagaagaagaagaaaaaataagtttttttagggtaaataccattttcgattccgtgttttgtaaaagttactaattggaccatctattttgttaaatgacaaaatgaaccttgtattttctaaaattttacaaataggaccatctagagatgttatgacaaaa

SEQ ID NO: 172948 - DNA, 640 bp, Cannabis sativa
ctttattttgtaaagaaaataaaagctattctagttataattaataaagataagaacaagtctcgtagattatttaatattaattaaccgatcttaaggcggaacttcaatctttggataatcttatcgtagaatttctaaattgttttatgtttttttatatgtgctcatgcattatatttagatttcaaacaatacaatcaacataacaatccctattataacataaccgaatttgatggtgactttctatccaaatagagaattgaaattaaatttcttttacgaaaataaaatctatttgaacttgtcgctatacaaactcgctggcatgatatacgtgaacattctaattaaataattaaacatttaaacgttcactggttcaatctattgaaatagattatagctaataatttaaatcaatgtgaaatatgatttaaacaaattaaaattgttttaatggatctatttagaacacaataagattgaggataatagattgaaattgttcaaacaattaaatctatagagataactactacaaaaaccccttttaacggcggtttttaagctctttcagcgtcggtttatatgaactgacgccataggacgctaaagggtttatatgaaccgacgc

SEQ ID NO: 172949 - DNA, 525 bp, Cannabis sativa
ataaatgcatactgcaactttagttataaaaagtcatgcatattggaataaaatccctgttttttgagcagtaaccgccccctgtcagcatttatcaaaactaagaaaaacaaccaatggaggacctttaatccaaatgttaaatctgacaatttacccagtctaagaaagcttttgactttctgatattataacccccaaaaaaaacgacagctcccttctttgagctagaagtcgtttatttattgttcagaaaccctaaaacacctttagacatatataagcttcttttcattcaaacacacacccctccactttaaaaaccctaacagagaaccctagagttgccttcgtctttgatgtgtcttcgatgttcttctttgaagaacacaaagacagcagcaccaatatcaacccagaaaaaccagaaattaaatccaaaaaacaacccaatcctagttcgaacaaacccccttaaaccgagccttcttcttcgtggttcttctctgaagaacacgaagaaca

SEQ ID NO: 172950 - DNA, 505 bp, Cannabis sativa
atggatgacacatgttaggcgcgtctatttgcgattcattgtgaggctgaccagacgtccttttagtttttggctaattaattttttgactcaattaatgcctcaaaacccggttttctctcaccacgtttgacggttacacttgattatatttgatttcccaatatttgcttttggggggaaccgatgtgtctaaggcatttgaaatgattgccttttttcactttttcgcctataaatagggctgagcatcattcacaaatttaattttaccaaattctctattaaaccaaactcaaagcaaaaaaggtttttgcttcaaatctgtcgtgagatttctaccaaaagcacccgagcagcttcatttgggctgaacttaaacgtcgaacagtgagtaagtttccaatttcttcctctttttactttgcatgtttaatttctgggtttcatacatgtgttcttgactttgctgtagaaaatagatagaaaatctaggtttaaaact

SEQ ID NO: 172951 - DNA, 551 bp, Cannabis sativa
  modified_base (281)..(285): a, c, t, g, unknown or other
aggcctttggactctgacggagttgtcgcggctagaagcgaaggagagagagagatttcaaccgtggatggccagaggtggtgatgcggccttggtctgaacgaagaagaagaaacgatagggagggagagaaacgagcggataattattattgttgtttattattctattcttaaaataataattgtctatcaatatctattttaaaattgatttattttattattttaattttattaaatcatttatcttattacatatttaatttaatttgataaaannnnncaaataaacctagatatttaaaaattagtttaaattttaaattttgaagagatatttaaggttgtttttaacaaccataaatttttaaaatttggttggttagttaaaataataatttaattatataaacatcttacttcacaatttgttacaaggatattgtgtttgttatatttatattgtttattcaaaaaaacttttttgtaaaagacctattgtttatttgatctaaattgcaatgattaacttgttgacagattcaatga

SEQ ID NO: 172952 - DNA, 537 bp, Cannabis sativa
  modified_base (127)..(138): a, c, t, g, unknown or other
cactcttagaattaacactatataagaactaatattagatttgttaggaaagcttgaattacactattgtataacatgttccaagctactcaagttattaagctcccaaaatagaagttgtaagaannnnnnnnnnnnagaaactttaacgagtgaattaaagaacttaatgaacacaaataggagttcatgtatactcaggattcacgttgatctactaatgatgatcaatatgaataactctttcatggtaaagaacacattaatgaaagatgtttattacatattggcccagtcatgcataatctaattatacatagtacctttactacatgtctatccacatatgtgatccgaatcaaaattatacacattataagtatagtgtatagtaaactgtacttagtaattctatattaaagattccaattaatttaatactctattgacttattttattcctatcgtataatcttaattctcttgtacatccttacaagactataccttctttatataaataaggaattttaagat

SEQ ID NO: 172953 - DNA, 539 bp, Cannabis sativa
gcctaatagataaaattcgagataatgccatacttgtggcatccttccattgagtgacttctagaaagatatttggaggatctaaacgaacaatataacgagttccttgacagagctgacgactttatcaagctagaggaagctgtttaacaagcccaatcagggcaagtcaaaaatatgcagtctaagagtgccctacagccccaagacatgcaaagtgtgcaaacaggcaataaatattctgcccaaacctctattggcataaacactaggggcaagtgcaataacaacaactccaaaagaaacagtgtcttaatagagataaagtattgaggccttatttcagtaattatattagttcactgaaatgtcatttatatgtagttaagtgttttaaggataaaatacattgaagggtagaacaataaatttgtccatattcgatgtagaatatctatagaggatctttgactttttggagtcaaacaatggataattcatagcatatctatttcttggtacatatagagcgttctata

SEQ ID NO: 172954 - DNA, 502 bp, Cannabis sativa
atgttattcaacatcctaaatgtgctacctcggtttgttcgagtcaaaaagaacatatatatataaaaaagaaaaaaaaagaaaaagcaaacagtcagactttccctcactcactcgtcccctttctctctctctctatctatctctccttttctctctcttcaaacacaaagcaaaaaaacccataaacctccagaaccaccacactccggcgacccacctccggccaccgcccgacctcacgcgccggaccactcgaacctcctagtgctggcgacctcacccccaagcagtgccgcttctctcgtcgccgttagcttaagatcgcaagtcaaagtttggtgtttcaaactttgaacgtatttttcggtcacctccggcgtccgtttgacgagaggttttcgtcactaaaataagctcgtcgaggagaacaacctacactaaacaatttttcccggttcgctactttttccggtgacatttttgtagctccgcccctttc

SEQ ID NO: 172955 - DNA, 736 bp, Cannabis sativa
tgtgtttcgtctctggtcagcaataatatccaaaggttgtctattgtctagaggctttatatctgacattattacattgtatgtattatgtgtagatggacatgtgatggggtgcatgtaaatccaagcatttattagattgataagccaggctacaggaatttgtctaaggctttataccagtgtttgtttcttttgtagtattcattcacaaatacaccactactgcaattaaagcatgtgttgtgatatttctttgccagtatatatgcatttggggttcaattcaatataagtgttcaaacatcaattattggctccatttgatttactctgttttatatttttttataggctttggcgtttggaaagtgtttgaaaagaatttgagtcaagtggaaatttcaatctcgattcatcggaggtatacatatatatttttttataattgctttattatattacatataattttatagaagagtttgaatatcttacatattcatccatagtgaagtaggttctgcaaaatttatgtgttgcggtgatataaggatgataaattgtctgtaatttgattatttatagttaaaattgactggtggttaggttaataaaatagggaaagtgctgcccgatttttcgtaaatatgtttatcatatttttaaagcaattgcatggattaattgataaatatgaaaatatggtgttaatgtaggttaaaatagaatgtct

SEQ ID NO: 172956 - DNA, 700 bp, Cannabis sativa
atgaatgaattgttgttaattgatgcatgggatatgttgtaattatgataatttattgatctagagtagttggataggtttggattgattttggttcgagttggggggtgaaaacccaagatttgtatcctgcgagaaccggtcgaccagttgccttgcaggggaaaaactttgggttttcctcggaattaatttcttgctcgggattgtacctagtatccattttaggctatttgagttttgtttggcttattttggagctaatggaagttaggtttggtctggttatggaaattagggttagttcccagagttttggtttaaggtatttattggtcattgttgtcgtgacatagggcccgaagtcgtcaagctttattttccacttagaccggcatgcacgcttaatttctagactgaggtaagaagagtattaagcaccatatatggctaacattatgataattatagattcggttatgatggagatctcggtatgtgtttgttttaacataatatcaatcgagagtaacgatatgtattggttgtgacttgattatgatcgaggaaaattataggacacgattattatcgttgtgactcgattatgatcgagggaaaaataataggcaacgattatcatcgtgttatgactcaattataatcaagggtaatgatatgaaacgattattatcattgt

SEQ ID NO: 172957 - DNA, 771 bp, Cannabis sativa
  modified_base (145)..(150): a, c, t, g, unknown or other
aaaaaaagagtaaataccattttgcactctgtttttgcaaaagttcttaattggaccctctactttgttaaatgacaaaaatagaccctgcattttctaaaatggtatataaataggacactgaactaattttttgtcaaaatannnnnnaataataatccgatctaaaggtattatgacaaaattatttatatttatgtatttgttcgtgttagtaattgtcttcaagttgattatattaaaaaaaaaattgttagaaattaagctcagagtcctatttttactattttgaaaaatacatggtccattttatcatttaacaaaacacaaggtccaattgataatttttacaaatacacagggtccaaaatagtatttacccttaaaaaaaattacaacattgcatctaatttctttttttctaataatttattttcgtcaaatattattgataattagttttatttattgtgtttttttattctctattaattattataaaattaaaatatctacttattctaaatttaaatttaaacatctttatataaaatatttatataatttttaattttaaatatatataataatattataaaattaattaataaaaaatattttaagtaatagtatattctattaaaatttagataaaaaactaaaaaatacaattaaatgaaaaattatattacataatcatattttatataaaatatatatgtatatctattctatataaaatgtggctatataaccgaattcttggtttat

SEQ ID NO: 172958 - DNA, 908 bp, Cannabis sativa
  modified_base (479)..(496): a, c, t, g, unknown or other
  modified_base (544)..(544): a, c, t, g, unknown or other
gcaaagcacctagctgcccacgagcccagcagcttatcacgctggtggagagggtgatttgcagggtgtcctaccgagaaacctcggtgcctacagggtgatcactcggcggatgcaccatctgggcgtgtctgaaggagtggcacgtcgagttcagacaaggagatgtctgaggcacgagcgcacacaagcaccttgtctgagtgactagtgcttgcagtgctcgaccctcgacaccacttggaccgaatttttcaaactttcatatctttctcaatttttatcggaatcgagtttcgtaaaagctaaaattacttaattttttttttacaaggaatccaattaaattattttcaaattgaaaataaaattagtttcatggaaaaaattcgtaattcacatacaaacatcaaatcacacacaaaccaacatgaacacatccaaatcatcacaattatcgttttaaatccatatttcannnnnnnnnnnnnnnnnnatggctctgaggccagtttttggtatttattttaccaagatctagatntactaacatgtatgtttcattaaaaatatgaattttctagtacgatgaaattaaacacataagagtttagaaaaccttacaatgatgggagcggaataataatgactccttctactcaaatctctaacccttgttcctttctgttgcagagtaataacaagatctgagcctcgatctccttttctccttcgggttggttaccaccgtcttccgtactatgattgagtacttgacttgctatgtgtgagcatggtactctaccactatgacttgaatgatgaagaacaatgataaggtgcaaaatcactaagaaaatgagtctctcatctactagttttcagagaatgaaaattaggtttaattt

SEQ ID NO: 172959 - DNA, 1302 bp, Cannabis sativa
caaaaataatgaaatttgggttaaaatttacataaatactgtcacatggaaatttttttaaaaatactgtgtatttataaaacaacagtggaacgcaaaataaaatagaacaactaaaaacaatagtggaacaactaaaaaacaacagtagaacaacaataaaaacttaacacagtacaccgtataaaacttacacagtatttttgaaaaaaattctgccccaaagtataaaagtaaaaaagttagaaatttcagtatgtggtataattatcccttattaaaaataatataccacataaaaacaataatataccacatgaaataatatatcacatttatgtgatgcaaaactaaatatatcattgctctaaaaaattatataccacagtgttaaatcgtcaaagatgcaaaatttacaataatctttgtcttccgttctttatataccaccgcacataagaaataatatagcacactatttaagcaatatactgtaatataatttagttcgtttttaatataccacctcacatagaaacaatatgcctcactctcaaagtaatatattggcatatgaatagagttgaatgacaaacctcatatacctaaaagtaaaactgatatgtgaatattctgaaaaatgatataccataatgttaaatctttattctatgtgaaacctaatgcaaatctaccatagtgaaaaattaatatacgatcaattttccattgtaaaaaaataatataccttagcacacaataaacataccataaatttaaaatgatataccaccattgattattttttacttatttcttaatataccttatcacacaataaatatctactattgtgcaacataaatataccaaacttaaatcatcatatactttttaatctaaatattcatttttatacttgcattttaatattttcctgtgttttttgttcctccacaattattgtttgttcctaacaaacaaagcaattttaataatttttaatatttaataaaattaaattgttggtatatacgacatcccatagaaacgatataccttagagcaatatgaatatactccaaacttaatctaatattatattaagagtttatttttaatttcttgtttgttaatatatcttagcacatgataaatatatactatagtgtaaaataaatataccaagatggaatcataatatacaaaagtgatctaaatattcttttttaaacctgcatttcaatatttttctgtgatttttgttcctccacaattgttgtttgttcctaaaacaaagaa

SEQ ID NO: 172960 - DNA, 544 bp, Cannabis sativa
cccccgcttatagggtccgacatccttgtcgatcacacttttggttgggtcaaggctctgataccatttgtaacgtcaacgcttcacgcctctattgagcgttccccctcgaaattatgactcttatacatgaatacatcactcttgctacttcttggactaacaattagccttacaaatccaatacgactgtttttagcgtgctttgtcctcactcgcatgcttcctaggaaaacctcccaagaggtcacccatgctaaaattaccccaagtcaagcacgtttaactgtggagttcatttatgatgggttactagaaaacaagatgcttcttgttgatatgggtagcactaattaatctatttaagccatcttaaactgtgtagtctcatacctacacagtctcagaatcatcacagtgatctttttttaggtgacgtgggatcagcttactcgatatttttccttacagatcacgggactactgactgtcacatgtagcgtatcggctagccttacccttagcattatcaatgatacacaat

SEQ ID NO: 172961 - DNA, 539 bp, Cannabis sativa
gggattctaccttcaacattggaatgtggtgaaacgagatttcattgacatggtgacacatttctttttgacaatggatcttccccagtttataaacaacaccaacattgttttagttccaaaaaatattgtcccactggggtcaatgactacaggcctattgcgctatgcaatgtagcgtataaatgcatctccaaagttttggctctccgcttgaagcatgttctgccctccatcatatctccggagcaaaccgcctttgttcatggaagactaattgcggaaaacactgcagtggctagggaaattgtccattccatgagtaagaaaaaaggaaagaaaggatttatgatgatcaaactctatatggagaaggcctatgataagatggactggggctttctcctggctactttgaaggggctgggttttcatcgaacatttgtcaattgggtggagaaatgcatcttggtcaaacaaatggggttgcttattaatggctcggtccatggaactctgtccccttcctgtggtcttcg

SEQ ID NO: 172962 - DNA, 564 bp, Cannabis sativa
tattcaagtgatagagatctaaggtaaaaccctagaacatatttttgtcattttcataatttttcttttgttcaaacatgtaatttttgattagttgttgtttaggatttacatgctttgttgttattttatagttatttatgttgatttaagtttgttttagaggttgttgttgtgtttaagcaaggtactttgctctctaatggtggatttggattctggttatgttatgttgtttggttgcatgttttctttttattatgatgtatatagatgatcgaaaagttgtggtgtggtttggagtcaaattgagttgtgtagaagattttgagtttttcttgcactgaatcggtcgaccggtttagggggacctgtaggaaccggtcgactggttaatccccaggaagtcatgcagaattggaattccggttgggaaccggtctaccagttggggcagttttgggaaccctagtttttctcatttttacgataattagggttttgccatgttatttaatgataggaaaacttttagtttcaagtttaagtccccgaaaagtgatt

SEQ ID NO: 172963 - DNA, 514 bp, Cannabis sativa
  modified_base (480)..(489): a, c, t, g, unknown or other
cagtacgtgaaaagacagggccatagatacaactatcccagtcagcctaataacctaaacaaccaggggttacaacctcttcctacaagaaggtgtgcaagtggtgcatggcgaccagtgctggctcgcgattgctatcacattaagctacagcataggaaagcaagacatcagttgatggcaatcatggtagaagagaatgagaagaaagacgaagatcttgaccctcgagttcaagatgagagaaacctattgaaattaattgaggaatcagaagaggtttttctcgaacgaggaaaacccacaaggtgtgtatacatcgggaagaacctagaagagtaactcaaatagatgctaataagttttttgaaggtaaaccaggatcaattcgcctggagccatgaagatatgatagggatcaaccctaatattatttgccattatttaaatgttaatccaaactgttgggttttatgcccnnnnnnnnnntccatttcaatgtaatccattttat

SEQ ID NO: 172964 - DNA, 799 bp, Cannabis sativa
tggatcttcgtctgttttgcccaaggggatgacagtcacatgttgttgccccacagtctgataggcctttcgcatcagcatagtggcatgccgactacgatcatcaatgaccacttgttggcccttaacgtttccatctccttgtccctccattcggcgaacatgcgcctctgctcttcaaatgcgagatttaccgtagcgcagagttcttccttatcatggtgcaaggtgttggtatgaccttgcatgattccaagagcagcacggaggttctggattttagtgtcatctccaatggtcgtttgaagattggtaacgggaggaacgactgtgttatgaatgccctggctggctactaaactggtattcccagtctcttgcacgcaagacgtgatttcactcacaggagttgtcacaccgtgacccacagttgatggctgtcggggatttactattggcaaaacccttgtgttcttagggttctacagtgtatgatccaccgcctgtggatttgctggatcaaccacgcctctgcgagtctgtaccaccatcgtacttgtgattagatttgagataaagagcgatccttgagttcagctctcaatgaacgcactaaaatgttgatctcacttttagccaacgataatgagtctgatttgtaagcgacaagtagtttattacgagtgtaatatagtgaaaaaaaaaaataaagacgcaagaattttatagaggttcagccctgggtagttcggtaatagcctaatcctcgttatttgtattgacttaagaataaggagaa

SEQ ID NO: 172965 - DNA, 500 bp, Cannabis sativa
ggtgatcatgtcttatgatcaaattaaggaaattgtgcaaagcatgactcatacaaacacaacaatggttatcttttactactattatgagcttataaataccctaatgatttatagaagaggatactcttgagaattctctgtaagaaaatactcattaataacagtgactcgtggactaaggctcattaatgttccaaccacgtaaaaaagttctcttctttaacttccattaattgctacaaatagctctaattaatagttgtcgaaaacctcagtcaatatttatattattttttatagaatttatattattttaatattttataaatataaaaatatttttcattaatgaatagtataataagtgacaaagaggtatttaaaaaaaaggaaccttacaaaaatattgacttttggcccaatttttacaaaaatactgtcacacggcagaaattacttttatactgtcttggccaattttttttcttttatactgt

SEQ ID NO: 172966 - DNA, 959 bp, Cannabis sativa
ggcggacaagaagacgatgatggcgcttatgtcaaagatgggtattacaatgatgggtactattacgaacaagatccaaatctggttcgagtatctaatgagttgcaagagacctaacaaaagttagcccacctgttattctaatttttattctcatgatgtggcatgtccacataggcaagattgatgccacgtggagtacaacttgtaagtaataggactaagtcatcatgcacaacttactagttgactaacactctaaatgatcaagcaggacaaagatacaatgaaatggtcaaccaggaggatttggccggaccacccttggttggccatagtggaatgggccggccagcctccaataaagggtaggccgactagcttccattctggcagacacaagtcactactacgaaagttggaattcacgacgatcttaaaagcgcttttttggaggaccgtcgctaaaaaaattaagtaattatttaaaatcgtcgaaacaaatagtattcttgacggtttataatagtaattacaggaataggcgacggttttaattggaattcaattttttaatgggctcttataaaattgtcgggtataagggctgattaaaaaattgtcacctacttctagccacatttcccatgtgtccacctacttctttttttatttcccacatgccaacctatttcttctccatttcccataccttaaaaagaaaatcttaactctccaaaacccacacacgcctccgcaccatcgccctcctctctcgttgtcttcctccctctttcgatctccctttcttcttgtatctctcgcccattgatctccacccacccctcctcccgtcggtctccctctcctctccatcgcatacgtcggaccaccaccacctcccgccggtgtccctctcatctccgtctcatacgtcggaccaccaccacctcccatcc

SEQ ID NO: 172967 - DNA, 535 bp, Cannabis sativa
tcttggtctaggttgtgtccgagtgtaaagttccaataccgatctgagtctagtttaaattgagggtctatgtccttggttctgatcctggtctgggctcgagtttgggtcggggtccgggtccagctttgggtctgattctagatgtgggtgtttgagtaggggtccgagtttctgtccgggtttgtgtccaggtcttgaccccgatctggatctaagttcatgtcaatgtccaagttcgggtctcgagtgctggtccaagtttgggtaaaggtcaggatctcagtccagatctatgtccaacattccgatctcactctaggtcatggtctgagtctagtttcatatctggatccctatcgaggtccaagtttgtgtttgggatccggtcccagatttaggtccacgtcggggtctcagttccattttcctacacgaccctgttcgggcccgagttccagtctcagtttgggtccgcggcttggtctgtgttcggttctaggttttggtctaggtctttgtcatggtcctagtc

SEQ ID NO: 172968 - DNA, 782 bp, Cannabis sativa
  modified_base (455)..(479): a, c, t, g, unknown or other
gtgtgaaatttggtaccaattttggtgtatttttagaatgaaataatgtgaagattttacactgaagtaaatgatgcattaaggatgctctaagcaataaaagtgatttgtagagagagacatggagagaagcacatgtatagaacacaaggtatttatgctttggtttgtgggtgtaataaactatagtaatttagatctagaggaccctttttctttttcataacatatatatatatatatatacattatatttacttttcttttaattataatatagttttgctcctttaattatagtatttttttaactgttcttttctgcaaaatctgaaatgattaattaataaccatcagacacttgaacatgcttaagttaaggattctacatgttttttgtttagatgtaaaacaagcttcctcattattgcttcattataataataataataatnnnnnnnnnnnnnnnnnnnnnnnnnataataataataataaaattaaaacattaatttatgcttcattactcaacatatataacacttcaaaaaaagaaaaaaaaaatacataacactttaattaatcatataatctatattatcatgataattaacatttttgtgtatacataatttttgaataatctactttgttccgattgatgttgtgcagtgattaccagtggcggaactagacaaagactcaaggaggggccaaacaggaagggcaagcaaattgtatttttacctatttctttttagaaaataataataaaattaggctat

SEQ ID NO: 172969 - DNA, 910 bp, Cannabis sativa
atagacccaacggtcaagtatttaccactatcttctcgatcaaaccatatcacataagttacaatatatctaatttaaatagtatctaattaccatacattatttaaatagcatatcataaccgtatcataatcatatcataactatgtcataatcatatcataattgtatcattatttaaataatacgaatccattgtatcgttcatcatttaaacaacataactagtttaaataatgcgaattcgttgtactgaccattattcaaactacttatacatatctatagtttaaataatgtaaattcattgtactgtccattattcaaaccacatacacatatttattgtttaaataatgtgaacccattgtaccgcccattattcaaataatataatataataatgataaaacaaaaataggttagaagtcttatacctcattcccactccttttgaatattatttcatacaaaaaacttaaagtctctacttaatttctttacctcaaatgtcgagaaaatagcttgattgcctttcatttgcgtagatccaattctttcagtactcgtaaattctagtttcaaatcttaaattaaatagtcattttaaacaatgatagtaacttgaaactgatcctactataaaatttattttctagtatcatgattatcatatatttccttcaaaaataataccttaaatcactatccaacgaacctttgcgtccaagcttgcgtaaaactcaccaaagaaaaagatgactatagtttcgactaaagattaccgaaacgtgtgaagaacttccaataacctagatttaagaaggcttgactcgcactagattcttagactcaatatgtggtgatgaaaaattgagaggcaaatataacaccctactagtttaggcgt

SEQ ID NO: 172970 - DNA, 641 bp, Cannabis sativa
agagagatcaaaagagagtgagtgagagaggaaagagcttaccgtggtcgagcagggtaagctttgtgcgaacgatgaaggggcctaattcgaatggcggcatgtgactagaggagatgtgaacgacgaggatcgctaatagaggtgtgaacgatgggggtggctggtgtagtgcgaatgatgtgggtaaattgtggaggtgcttacaatagtggctggtgcaaaagacagggctggcaggtggagctacatggtgagacatattgatagagatagaaaataaagagtttgagaagagagaaagagacataatcatgtgtgagtgagtgtatgtgtgttactgactatataagatatatagtgtattgaatattatacttagttatgggattagtgggacacttagcacaaattaatatggctatatgattatttatacattttatgctatatagaccctattttcataaaaatatatgttatggttattgtttctcgattccagagattttatataattataggtgtgatatgcatgttatatgtgaatttttatattttcacatatttctgcccgagaagagtggaaatgggtcggatggaaaatttagtcacatgaatacaaatttgtatcaagtatt

SEQ ID NO: 172971 - DNA, 1225 bp, Cannabis sativa
  modified_base (1164)..(1168): a, c, t, g, unknown or other
actgatgtttctcaagattgctgccgaagtcctccattgaggccaatgcttgatttgtgtcaagcaatccttcgaaaactggacattgttacatagaaggcagtcattgctatcaattaccccaaatctcttcaatctttccttcgtcttcgttttcccaagcatatgttatcttagtgagagtgctcttaggttgtataaattgttgtttggttttaatacacttgctgctctaccaaaaaaaaaaattataaatatggtatcttatttcatattattattaataattttatttaataaaaattaaatgcacaattttattatttgaaagtatttattaagaagtttaaaatttattatatgcagcattttaaattactttgttgaaaaaattatttttataacaataattaaatatgatggtgtagaaaaaaattatgttgttcctcataatacattatttttatatctcgatcatttaaaactattgttattttttttatatcggctttccatctcatcatcatttactatgaataaggatggaaagttggcatatgtcccgtgggtacttgtcatgagaaggaaacaattttctatccccgaatattaaacaggacaggaatagaaataacacccctgtcctcgtgttcaattttttttatttattatatgatattattaattatacacatatttttgtgtgtttttgtagtttattagtaaaattttaagtattaaatttaggatttgaatttaaaatagtcgtaaatgtttaaaaatttattatttcattaaaaaaaaatatcatgaatgtttaaattataagaaaaacttgacaaaaaataggttttttcaaactaactaataattatattagaaaaaataaatatcataatttggagaatataaccgcacaaagctcaattttaattatgattgagatttttttttaaatgattagttttagttttagggtatatatatatattagatagaagttacgtgccgaggcacgtaaatattcgttttatttaaagtttagttttttatttttttttagatttctattaataaaggtatgattatgtgaatgattggttttcttaaagtaatatttgtattattatatttggttagtaaaatataattgtgtatatatannnnntaacaatatatgaaaataatatttattatttagttatagagaatttagaggaacaat

SEQ ID NO: 172972 - DNA, 531 bp, Cannabis sativa
aaaaaaaaaacctttatttgtgtgatggaaggtgtcaagactccccacccaagagattgagaagggtagtatatgtttgaagaacaaattgccattattgaaaaatctgtaaatttatgaaaaaaaaataattaggttaagaaaaaaaaaagaaatgacatgtaaatggaataaatgaatatgcaaaatatagaaatgagaaaccctatgtatttataaatttatgtttatgtttataaatttattttcgtaaatttgagtttattataaaaccaattttatatttaaataaaatattaaataaatattattaaaaataaaatattaaataagttttattaaaaatataagaatattaaattgttggttcaaattttattttttttttactagacaataaatttttataattagagtttatcgtttttttagtggctctgggccatagaaaaaaaaattatttttggcctttatttataaaaaaatgtaatattttttaaaatcagtaaaaaaaattgtataatttcaaaa

SEQ ID NO: 172973 - DNA, 515 bp, Cannabis sativa
  modified_base (482)..(490): a, c, t, g, unknown or other
taataggtcacctgaatataattataacaataaaaaacatatttaaaaagtaacaataggaacaagttagaatttctttttgttttttttttttctaaaaaaagttagaaaaaagttaactaattagtttaatatatcatgtttcacttgttactaaaatagtaaaaattaaaaaaaaaatggtatatattatcactagtctgaaatggtgtttctgctgcagagtattttagtaatatttatgcaaaaatccaaaaaacaaagtgggaaaattatttttagtaaaagatttatacttttatattcaattttgtttatatattttaaaaatattcaagacaaaaaaatacataaaaataagactaattaggatttttgctccctgaactttaacatgtaccaaatcatgccctgaacttttaaagtcgctaaaaataccccttgagctatttagatcgttagatttaaggacttttgtctannnnnnnnnaattttactatttcagtaattgttt

SEQ ID NO: 172974 - DNA, 513 bp, Cannabis sativa
tgttatgttaagttagacccaatacatttcctattatagtattatagttgtccatttttaatgttggatgcctttatttaatattaaattattcacagttatttgacatgattcatacttgtgtgagggggcgtattaaaatctcactaatcagagtatctccaatgaaagtataaataagagttgaaaaattaaaatatagctcatttaataaaaaaaatgtgctttaatagtgtgccaaaaaataatgtaaatttaacacatagcaaattttgtgctaaatttagttcaacatttattatgatgtaaaatttacaccacaataaatacactactttttatttacatttatgtaatttttattattttattagtatatttaactatcatattaaattataaaacatttattttttttattatcttccatattaaaataataataaaattaattataaagttattaaatattatttttaataaaatattaaattttatatcaaaatttgacaa

SEQ ID NO: 172975 - DNA, 570 bp, Cannabis sativa
tgaaattttttacttttttttactatggaggtacaaattttttcaaaaatattgtgtactgtgttaagtttcttctgctgttttactcttattttttagttgtttcactgttgtttttagttgttttgttttgtgttccagtattattctaaaaaaatatataatatttttgaaaaaaaaaatttatgtagcaatatttttgtgaaagttaaaaatttaatatttttgtacgtttccctaatacaaatttatttgggaaatttacataatatacttatttttgccatttttttacatatatactgtgaggcggtaatgtttacatttttactgtgtacattatttaaattttatacggcagggtttttttttgacagtatatgacagtttttttttaaacctttatatatatatatatattttgtagtgacaaaaactgtcactttcaattgagtttcattttactttttaatgaaagtgagtcacactccatgaaagtgacaacacaccagctcctatcacacctgttattatatgagccactgtagtctatgtcgtccctactcatca

SEQ ID NO: 172976 - DNA, 534 bp, Cannabis sativa
aactacttgctacttggtaaataggtgtccatctactgtaattaaatttttgacacctaaagggaaatggactagaagagctcgtagctgtgatcacctgaaggtgtttggatgttcggcctatatacatataaggcaggacaaactataaccaagagcaataaattttttatttctaggctatctaaataaagtgaaagactataagctttggtgtcttaaactaggattaaaaagatgcatcatcagcataaatgtcatctttaatgaaatggacatgtctacggaactacaaaagaaaacagacaggtttatattcaacttgaaaatggcacagatgaatctaaaacaggataaattagtctacatacattgaacattctacatctcaaggtggacttgagacatatcaacttcccaaagatagaaaaagaagagagatttactctcttgatatattgaggttttttgaactagctaactgttggaaattattttaccagaatcttagacctactcacaagtatgttgatt

SEQ ID NO: 172977 - DNA, 568 bp, Cannabis sativa
agcctcggccctagcaccgaaccagcccctgactcggacccgaactcgatcccgaacctagacccgacttaaataaaatcaaaaaataaatataaaataagttttacagaacacacttttattttctattttttaaattaaaaaataaaagtagttatagaatgtacttttatttttcaaaaacaaaatttttaaagacaaaaattttattttaatttttgtgatttaaaaattaaaaaaaataaaagtattaccaaacggcacctaagtaactacaagatcttgtatgtttcgttaagattttatgtgctgaataatattaaacatattttaatttttatgatttacaaattgtttgaaaaattaaaaatttaagctgcatatttttttaaattgttctggagcactccaaatatatttttgtgcaaatatttatgcaggttataatttttgggtttaaccaaaatacagccgttatgctaccggattttcaaaaaaataaaaagggaatatgtctaatgttattcaacatatataaaatcaagtccaataatcaagttgagtccct

SEQ ID NO: 172978 - DNA, 518 bp, Cannabis sativa
aaaattaaaattctccttttatttatatattgattgaagaataatttgttgtaaatatttaaatttaattctataggttaatatataaatttaatttttaaccgtaataatatttaagttatattttaagtaggtatctagtctttaaatatcaagttaatgtttatgtgttatttttttattagtttatttaaataaatttttaaataaaaaaacaaaaattgaataactttgaccaattagagaatgttatgtgtctattaatttgacatttaatggttaggtatttaccaaagttttagaaatataacgtcaatatatatatattggggatttaattctgtggctatgattggttgagtacaccatagatgaaaaaaaaaaaaatcataaatgaatgaatttggttgtacataattttgttcctcttttattattgagaaatttacaaaaatactggaatttgggttaacttttataaaaatactgtcacacggaaattttttcaaaaatactgt

SEQ ID NO: 172979 - DNA, 531 bp, Cannabis sativa
  modified_base (468)..(483): a, c, t, g, unknown or other
ttttttttttttgaaagaagatggaaattttatttaacttgaaaagcaatcctctcttacaatagaaagtaaatcagatgtggcagtagcctcatcaaacatacggtctgacgtgaaacaagattgtcttgcaatgcaatgagcagccctattagcagattgtttaacaaaagaaagaaaaaccttatgtaattcagaaagtagcaatcgacaatcctgaacaagtaacccaaactgagatggcatttgaaccaaaccattaatagcttggacaacaactaatgagtcggtttcaatttccacttcagttaacgccttcgtcttgatccagcttaaagcctctttgacccccataatctcaacaatctcaggagaaaccacaccaaatttactacttgagaaagcttcaataagcttaccattcatatcacgaagaaggaagcctatgttggtttttatgccctaaannnnnnnnnnnnnnnnataattagatttacttattaatatagatcagaaataacatagatcgga

SEQ ID NO: 172980 - DNA, 900 bp, Cannabis sativa
ggttctataattgagacatataaagtcatctgatctctcgcgcgctctcatcgaactctggaggaattagcggtggctgacgttgtgatgtctacggtggctgtagcagttgtaatggcagtagctgtagcggttgtgatgtcggtggccccatcatttatggatatgagaagactgactaagcatgttgtgataacgaaggttgctgtgatgatccacccatatcaatcgaacccgaaaaaaaaaagtagaaagatgctgctgcaaaattaattaattaattagtcaaaaaatttattatttgaaaattataaaaataattagtcaattaatttaattattttagattacttttatttaaatcataaattatgttatatactgtattttattatttgttcattcattaattaaattaaaaatttgttaatttaaattataattagtggtaaattgctctaattaatttaaactttaattattagcaaaatttttatacacacatacaaatatatacatatacatgtacatgtatatatatgtacatatatacatatacatttacatatagatatataatcatacatagatatatcctattgttaaaaaaaacacaaatagatatacatacatatacacactcacacacatataaacaacaacaataaaaaaaaaaatcatatttttcacaattttcacaacattaaattgattataaatagtagcagataagctcaaaaaagggacgtaaaaatcttatacaggagaggccctaaaaaacacaatagaaaatctgaataagattgactcgtggactatgtagaattttaactgcaaaaccaggtaaaaaaccctgtgttcatatattaggttttattttttctgtgtggaattactact

SEQ ID NO: 172981 - DNA, 768 bp, Cannabis sativa
  modified_base (704)..(712): a, c, t, g, unknown or other
tgggctttcgattggtccgggtggtggtcggagattttttgtcggagggtggtggtgatggtggttctggcttctttgaagcttgaaaagagagaaagagaaaaagaaagagagagagtgttgatggtgatggagaaaaaggttagttatattatatatatttgtttatttatttattatattatatatatttttttattatattatatacataaaacattttgagtcggttcttcagaacgtatatatatataccatatgagagacgctctcacctcttcagtactcctagattttatcatttttttaagattaattagcaatatttttcccatgtagaagctattaaatttttttaacaaccaatttatattattagtttcaaggatttttaccaaatttatttaattttattaacagatgcttaacatggcgattgtctatgtatcaaatcgtaccccaaactttgatatctaacaaattaccccttaaattttaacatttaccgaattaccccttaaattgtaacatctatcaaattgtgccctccaaacatttgtctacaccaggcccccgttagtaaaattgaacggaaatccttgaattcaacaatttcaataatttgaagagaatttttaatgtcctaaaatgtttaggaggcacagtttagtagaggaataaatccttattattattattattannnnnnnnnttattattattattattaaataaaggcttaaattatgcatcatccttcaaaaaaaa

SEQ ID NO: 172982 - DNA, 749 bp, Cannabis sativa
ataaacccctaatcaccaatttttgtttttttaaaaggacacccttcacttgattattttttattttcatgcaaattatttgtaagagacaatgtacccatcaatccatcatatttcttgggtttttttttttcttcataagaatatctctttagttattgtttggattaatagtagagttaattgcggcaaaactcttaaagtcttattttgttagtaattaacttctaaaatttattttttgacgttaaaacctcataaatcgaagttcttatagtatttcgctatttccatctatttttagttattaatcgccaacttggttatccatgagtacatagagtattgtccacgtggacacaatgtacgcatagtactatgttattggcacacgtacataaatatttaaaataaaaataaaataaaaataattaatattaattttaatttaaaaacaaaaacataaaaataaaaacaatttttttctttcttttctactatttcttttttctagaattttcttctttttcgtcattcttcaaacaatcaccaccaccaccaccatccacaaccacaaaccgcccaaattgcccaccacacctaaagcctctttcttagatcacaaacccaacataatagcaaaatcatttaccatgactcaaacacaatcccacattttaaatccaaacacaaataaacaaatctacacaatacatatgtcaccgtatcaaatccaaatctcataaaat

SEQ ID NO: 172983 - DNA, 692 bp, Cannabis sativa
  modified_base (530)..(536): a, c, t, g, unknown or other
gttgaaatctttatctctagatagcatggataggttgattaaaacaagcagtaaagatagagtttgttgtgttcggaggagaaagtgttgggaacattttactaggatctagatttactatcaagtatgttgattaacatcctaaacatgaatatatctaaaataatgaaattaaacacataagagtttaaaaaaccttacattagttgcagtggattataatcactccttcctctcaaatctgtaacccttgtccctttctgtcgcagagtattatcaagatctgagcttggatctctttctctccttcatgtttggttactaccgtcttacccactataatttagtacttgacttgctatgtgtgggcataacactccatcactatagggttcaagtatgaagaacaaagaaggaggcttgaaaactttatagaagttgtctctcatccactagttgtctaacatagaaaactaagtttgatttggttgaaagaaatagttaaattgtcaagtggatgagatgagagnnnnnnnttccttttatagtgtttcaactagagcttagcgatgttcaagcttgatgaaatattcaaaagaaaagtgcaaaatgtgaggtatgtacccgatcttacagaaaatggatgttgtaatgaccgctttagtaatttggattagaaaaggcaattagca

SEQ ID NO: 172984 - DNA, 702 bp, Cannabis sativa
gtgcaggatctcgatgttcatcgtgcgagtttgttgttgatggagtttgatacttgttgtggaccatggtttttatggtgtttgggttcgagaatcaagcaagttcgtggatgacggagcttcagagcttcgagtatcaaggctattcatcgatgacggggcttcagagcttcaaggttcgtggctgttcgaagtcgactgggttgtggggttcatggtggctcattgtcgacaaaggattggggttcagcgctgttcgtggtggtcgacggaaaatgattgtgaaaatattttgtttgttctgtaaatttgtgtgttcatatgttcataatatgttacagtattgtaggattatattttttggtatatgatatctatttaactcttactataagcttagttttgttgttgtggatgaagttttatcaaaaagtgcttcaaaaattagtgtgaataatgcacagtatatgttatgagaaaaaaataaaaattatgcttctttttattctgattaattattttttataatatttttataacatgtatattgtttatttattaatgaaaatattattcaatattgtagaccaaaaaaaaaaaataaatgtatctaaaataattataataataaatagttgaaataaaaaaaatataaaataaatttaaaaacatagatatagtgacgcgcagtaaatgtagcta

SEQ ID NO: 172985 - DNA, 828 bp, Cannabis sativa
  modified_base (401)..(407): a, c, t, g, unknown or other
atcttttttttcctaatgagtccaattgaattgctacactatggaaaaatcgattaggacatctacctcatgtaattctcaataaagttttacaaactattattataaagttttcgaaatttgatctctccttctatgatgcatgtgaatttggaaaaaatttgttagtacaccaattaaaaccactcaaccacttcaactcatacactcagatgtttggggaactttccctcttcccacactagaaggatataggtatcacatcttatttgtggatgactacactgagtacagttggattttgttgtggtattttcaacacgtaagtatgcgtatcgttaacaagtaatagactcacaaagagtgagatcgatcgcacaaggattgtagttaagtacttnnnnnnnaaatctttacttctatttggttatatcgaaattaagagaagatgaaaattagaaaacaagaaagaaacaatgaaaataagaagcaaataaattaataaggaaattaacgatgattaaaagttagggctttcgattttaattgcatctattaattatggtttaacattattcctattaccaaattctatgcaatatcaggtttactaaagtatttatagtcttctcaaatatataaacctcaatcatatacaaattttctactctcgtgataaattaaacatgtaaaaggcattaaacacagaaaccgtacaagctatccaaaccacataaatactctcgtcctatatcaaaatttggttttatttcactatagcataattgacactcacttctcaaattttgtatcaaaatcataaacaat

SEQ ID NO: 172986 - DNA, 790 bp, Cannabis sativa
acggccagccgccgcaccaccctcagttatttttacttcataattagttgtgatattatattgttattacaaatgtaccattactacttttaacataattaatctactaactttttgtttataaaataattaaccacattaagaataaaagaaaaaaaaaaccatacatatattttgaaataaaataaaataacaattaatatttatataaaattgtaagtttttttttctttttaaaaaaatattcagaataaaaattaatacaacttaattgttttttttttttgaaaaaataataatttttttatgattattataattatattatttatcaatataaatacaccaataaatcatgtaatatatttatacatgtaatgaaatacttttaaattttcattgtggtatttacatgtacttttttttttctttttcatatagagtattgtatatatatatacttgtagaatagacacaccatgtgaactcatcttaatattaaaattttcttattataatttgatatatagtaaaaataggtatatatatataagataaatatagctcaaacatttatatatatatatattctactgtaaaaagtatagtaaattaaaaaaaattgagctactataaatttttttttctatcattaaccttttttttttctaaaaacatacatcgttgacgtagtatattaatttattgaacctcattttatgttatattaaaggctaattagtaattttttcctccgaacattgacatgtaccaaatcataccccctgaa

SEQ ID NO: 172987 - DNA, 672 bp, Cannabis sativa
  modified_base (454)..(454): a, c, t, g, unknown or other
cccccccccccccccccccccccccccccccccaactaaggtacccaaagacccaccaataccccgaccaccaaaatcaggagcactactacaggcccccaaaccagacccagtacagccagaattcgcaccagctccccagaacgcaatggctgctacaattctaacacattcactcgcgattgtttcttgccaaataacactgaattcctatcaaaccaaatccaccaccataccattaccatcagcgaaaactcctcatgggataacttacggaagagagcaactaataactctgctaaaggccctcagctgtgacaacaatgaccaacatcccaaacagcaagattctataattgtacatcatgtttctagccatccatattactagattcttaaaatagaagttgtaagaatcatcttctttgcgaaactttaacgagtgaatcaaagnaactaataacatgaacaggagttcatgataactcatgatttaagccgatctactattaatcatcgttatgatatgaattaagtctttatagtaaatagcatgttaataaagatagttttattcatatcggtctttgtcatatataatctctattatatatagtaccttcacttagatgtctcactacattagtaatccgaaccaagattacttacacc

SEQ ID NO: 172988 - DNA, 558 bp, Cannabis sativa
gggattcatagtcaacgcaaggggaattaaagcaaatccagagaaaattaaggcttttatagaaataccgtcatcaacaaaactgaaggaagtttaggctttaacaagaagaatggtagctcttaatagattcatttcaaaatcaactgacaagtgtctaccattcttcaatttgttgcgagggaacaaaaagttttaatggacagacgagtgcgaggaagccttcacaaacataatgaaacatctataaacacctccagtattggccaaaccaataacttgagagactttactcctctacttggctatcttggagaatgcgattagtgcagcattagtgcgagaagagggaaagcacgagcaaccagttcactatgttagtaaatggttattgggggtagaatcgagatatccccctcttgaaaaatttgccctatgcctaatttatgtatctcaaaaattaaggccttacttccaggcacatccgataaaggtgttaactgatcaacccttgagataagttttgtcaaaaccagatgactctggaagcttgataaa

SEQ ID NO: 172989 - DNA, 595 bp, Cannabis sativa
tggaaacttaaagaaacttaaaaagttgcatctttctaggaaccaactcactggttcgattccaacatctctatggaacctcaaaaacctcatctctctgaacctttacaacaacaatttaagtggaacgatcccaccagagattggaaatctagaattcctcaaactttttgatgttaagtctaatcaactaacaggagagttgccggttaatatttccatgcttcgtaacttggagttgttctctgttctcagcaataatttcagtgggacaatccctagagactttgggaagaacaatccaaatttgaacttcgttatgtttggaaacaacaactttgttggacagctgccacaaggtttgtgtagtgggttcaatcttgaatcttttggtgtagctaacagcaacttaataggaccattgcctgcgtgtctgagaaactgcacaaaattaaacagagtaaggcttgatgggaatcgatttacaggcaacattaccaacgcttttggagttcacccacatctcgattccattttcttaaacaacaaccgattcattggccacatttcaagtatgtggggacaatgtcagaat

SEQ ID NO: 172990 - DNA, 813 bp, Cannabis sativa
  modified_base (259)..(267): a, c, t, g, unknown or other
actgtgctgataacactataatcgttgacaaatacatatgttctggacttaatagaatttaaaatgccaacatggaaagttcacacaggaagagaagatcctctttcccaccttaagtatttcgaaatgcaaatggagttcagggggtacgaggggatgtgtgttgcagaatcttttctgctacctttcggaagccactcagcaatggtatttcaaattggcccctggaaagttcaactcatggaaaaccttctcttcnnnnnnnnntgcacaattctcctcttctcgccagcttccgttgcatctgggagatctggtagaagtcaagcaaagaccaagcgagcctctccgagcatacatcagcagattcatgacggaggcgaccaaagtttcatgggtaactgaagatggaaagttgtctgcgatactggggggcattgaagtcctcggtgaaccttggaaggacataaggaagaacgactcagtagactgaatgagtgactttctttaccgtgaggaaggcttcatcaagctcgaagaagctattctacgagcggaaggtgagtaaaagcctgaaaggtcaaaggctccttccaccggaacatccgcccaacacccccattacccaaataattcaagctcaaatggtaaacgttccaacaacaacaacaggcaagggaatgggaagaagggaaggtttgtcggcaaatctgagcaagcaccccgggagaatcaagcaaagtacactgcatttaccatcttgactgaagacatagaaagtgtttacatggctactcagtcgctagccccata

SEQ ID NO: 172991 - DNA, 922 bp, Cannabis sativa
  modified_base (824)..(826): a, c, t, g, unknown or other
  modified_base (855)..(858): a, c, t, g, unknown or other
actagaaaatgttattatgataccctagaactgttctgtgaagtttcattgcaattggttaggtttggagttagtttggagagtttaaagttgaggaaaatcgtgttcttggcagttcagaaccgaaattccgaatgtaccaaccggaattccgtttggttagttttcggagaagttgaattttgtatttaggccataactttttactcgggtgtccgttttggacgttctatataccgttttgaagctcgtgacgaactctatgatatggtgtatattttagagccaaaataagtttcattttattgaacttttacatcgaggttcggtaggaaaccctaggtgttcctttacagttattaagtagtgttttgggataaacgcttattggtttatcatcgttatgacatagggcctgggatgatcaatcattctccaaaaaggtcggccaacatacctaaaacaaaacttgaggtaagaaaagtattaagcactgtttattgttaatgatatgattgttatggtctcgattatgatcgagatcccgatatgtatatgttttgactcgatcttgatcgagattactaatatgtatttgttgtgactcgatggtaatcgaggtaatgatgagaaacgattattgtcgtttgtgaattggttatgattgagggaagaacacgattatcaacgttgttgtgaatgtattaagatacggtcgttaccgttatgagtaattactcctgaaaccgctgataggttgcttacttatcgttttctttatggggcaatgatagtgacataggtgttggattttatgccctaannnaaactccatttcaatgtaatccagattannnnatatcaataaagaaacataagtatttttcgttcatttgtgtatgttttggttcaccttataaat

SEQ ID NO: 172992 - DNA, 585 bp, Cannabis sativa
gaaattaaagttgacgttttacgtattttagatttttaaaacccaccttaatctctatatttttttatttggatcaattcggggttaaaaacatgtgatttcgtcgtcggaaaacctcttttccgatcgggtttgggtcgggtccgtcggacccacatgaagaaaaacgggtcaaaatgacccgggttggctaaagaagacgatctaaacgacgtgtcgtttttcaagttttttggctgctgtcgtttgctcaaataatatgtcgttttttccctgtggaaaacgacatgtcgtttttccgtcgttgtgggcaaaggattggaaaacaacgtgtcgtctaagcagtgcattttttcaaaaaatatatatatagaaaaaaaaaatcgaattttttataattttttatttatttgggatattaattatttttctatttgtgttaatttagtcaattttctatttttgtttaatacatacatctagtgtaaattgaaagtgaaaatttgtttaatttagtaatttattacatgatttatttaggcatgtaataaattgtgctagtttgtataattgtgcatttaatta

SEQ ID NO: 172993 - DNA, 572 bp, Cannabis sativa
caaagtgatattccaggtagcacctgacagctgagtgagtctttgagctctatccctaagagcaagcatgaggggtggatggtgatatacaagaatctactgaaaccgagtataagtggtgcccatgccatccaccatgtagtactcgtcaaaaaaattcccaatttttctaatggccttgtccccaatgcccgtcaaccacttgaagtctggctgagaaaagtagaagtatcacgacctgccttgattgggagtagaattcaaataaaaaaaccaactaatctcatggggagaaggcatatctcacttctggtttggcgtagagaaaaaacaggccagacatatacttgatgcccttgggagtgaattgagtcgaacagagacggaagaagtctgccaccttcctaaagtacgagtgcaaaggtagcagtagtgccacttatttagcacgagcacccgaccaggcacacatctcgctttgagggtttgagtgtaaagaccgcttagtttaaatttggaaattagtagataattagtgtttaattatgaaaaattatttatggatatttaaa

SEQ ID NO: 172994 - DNA, 1173 bp, Cannabis sativa
ggaggtggcaatgtccaaatatacccacaaatcttgatttattatttggtctctccaaaaccttgattttgtatgtttgttggcatgatacttgtgttcggagttgtggtatgttttttgttgtatgagggagtatttgttaatttttatagtctaaatcagattagaaagcaaacatgagttatataaaaaatattttagataaatctaatctgaatcataattctaagatctcaatacaattacataaaataaatctaaacaacgagtaaataaattttacctcttgatgtctatcaaggtattctagattctttttcgtattaaatattgatcatttaatccaaaagttaggaacttgatgaagacttcccactaggggaaatccttaacactcaagataagagtgggcttatatgattatttcgagagacgaaaattctatcacaatgtgtaatcaactcatgagacactgtgaaatgagatgagaaaaatcacgccaatctcttaatatgggcttcaggatttcttgagttgtgcttttcaactctcaattacatcatatatatgttatcccaattttttgtactatgacgtggaaacgcatactggtgacacatgtctgctattctctacatttggttggagagatattctgaacagacctcagccatgcatttgcacggacaaagtcttcctaactgagcagggcaagggcagatggtccgtacaacaaactgagttatttctccgagcaatgtatcaagacttagcaacttcaagattgatatcgtgaagcacacaagcaatccctacaatcatgggatcgtatcaaagggatatggcaagctgtctgaatccctcaatttatgtattctaaatatgtaatgtatgttcttaccaattataaatattgtaagcaaaagggaaaccttccttcatgcatttagccctataaataatgatccatcttcactgtaaaaggggtcgaaagaattactttagacagatctaagagaaaatactcagagaggaaacactgttttgttctcaagttaatacaatccaagggaagtaagctattaccgaactaaaagggccgaacctttttaaaatcttgtgttctttattgcttactagtttttgctctatcttaattacatttcttatcgc

SEQ ID NO: 172995 - DNA, 684 bp, Cannabis sativa
ctaataccctatagcagccgatttgtggggtattagcgtcagagtggtccgccgctaatggagttaaatgttgtagtgagagcctctgctatgttgacactgaatggaaccaaccacaaatagtgggtagaatctctcatgttaaatttgactcttatgagagtgaatttggccttgagaatggatgcaccgcctaattaaaaacgctgatgatgccactgaaaaggataagaaatcctatgaggattgggagcattccaatcactgttgtttgatgcttatgaggtatcacatggataaatccatttatgatagtattcctcagattgaaaatgcaaaggattttcttgctaccattaaggaaaagtataagattttctcaaagaatgagaaaaatgagtgctcaactttgttctatcacactaattatgctgataggggtgatattagagctcacatcgacaagctcatgggttgttactaaaagcttaagggtatgggattggatcttggttaggattacatggtgttgtttgtgatggaaaccattccttctcagtttgattcaataagatcaaactataatgctcaaaaggagcagtggaccattgaggagatgactgctattcttgccaaagaagaagaggacatgaaaaaggggagagcaagaagtatctccatggt

SEQ ID NO: 172996 - DNA, 561 bp, Cannabis sativa
ttttttttttttatatttatactatccctatcgattttttttttttattttttatttattaaaacttctataaaacgatttttttctttttcttctctctataatcgcactatttttttttatctttatatataatacacatataataataagtatacatttttatatctatttcttaacacttttttactctctcataaaattttgctttattttttttaaaaatatacaaacactaattttatttcttattctctcttttacattttcttactattcacactcaaacaactccatactatatttttttaataaatcacattttatatatataaaaaattaattaattttttttagcctttactaaaataaaattctcttacttttatatttttctcatgtatgttttaacacattttttctctcttaggaaaaaattaaaagcacccatatatctttttttcttttacatgattataataaaagtagtatttttttgtatgttttttaatttattcgtagttgatttataaatgatttgcatattttaacaaagttgat

SEQ ID NO: 172997 - DNA, 752 bp, Cannabis sativa
gtcatgggtcgcccccatcctttcgaatacaaaaacgccaggctgccttagcaatgatttgcttggttgacgggtggaatggcaccattgatctggtaggaaccatcaagtatgacttcttttgatgaattactagacaaggtctgcctgcctaccgctaggcccacgagtggaactcgtgatcggggattgggcggctgaccatttgcagtctgggaagtattcatcgctggatcttcgtccgtctcacccaggggaatgacattcggaggttgctgacctacagtttggtaggctttttgtatcagcacggtagcttgccgactacaattttcaatctttgtatggtgagcccttaacgcctccatctctctatctctcaactcggtaaacatacgcctttgttcttcgaacgcgagatttactgcagtgcagagttcgtcctgatcatgatgtagggcattgttgtgaccctgcatgagtgcaagagcgtcgcgaagattttgtaactcagtagcatctccgatggtcgtctgggtgttggttccaggcagaacagttgtgttatgaatgtcctggttgggtgcggaactattattcccagtctcttgcacaccaggagcgatttcatctatacgagttgttacatcattccccacgtttcccggctgtccaggattcacagctggcggaacccttgtgtttcctgggttttgcaatgcaggatccaccgtctgtgaatttgctggatc

SEQ ID NO: 172998 - DNA, 553 bp, Cannabis sativa
aatccatttgcaaccaacaactctttttccagcaagtttcttaaccacaatcaaagttctattttttctgagtgaggtcattttttcttgaattggttttagctaggccttaccatttttgccattgatagcttcatagtagcttgaaggaattgaactgtcaatttcatcagcaatagtgagtgcaaatgctataaattcagcatattcaagtctatcaggtggctttatttctcttctttctctgtctctggccaactgatagttgctgagatcctcttgatcatcatctgatctatcttgactttcatcaatctgattgtcttgtgtctgaactgagtcattacttggttccacctcaagttgtaaactgtttgaatttgtttctgttgcaggagcaattttagtttgaattgtagttactttcatggccatctcatcttctcttaatacaacatccctacttatgatacacttcttaaaaccagtttcaaggcaccataacttgtatcctttgatcccatcaggataacctagaaatagacacttaatg

SEQ ID NO: 172999 - DNA, 999 bp, Cannabis sativa
gtcgcagcccacctaggggtttctgggcagtttgaatgtcgaattttgttttgctcataacgctttgatccagactccgtttggggtgtttcatatatcgttagaaagctcattctgagctctatatatttttttgtatttgaatgccaattctatgaatatgtagaagtggatttagggattaaccctatttgtgaatctcagaaattgtgactaggattactgacaattgatcaagagcacccgggaatttggaatctccacatacttgggacatcaggtaagacagtagttagcatgtagagttaagcgcggtggcgctcatgtttgatatgataattgtaattaaatgagaaccgggattagggtaattaccctaaagtgagcggttatatggcctagggttattaccctagtgattaaggattttaaatgctatgccatgctataaatattgaagtaaagaattatgcgttcaaggcataatttcgttcgactcggtaattagagtcgagataaactgttctagagctttatttgtgaaaaagaaggatggttccatccgaatgtgcattgattatcgagaattaaacaagctgacgattaagaataagtatccaatttctaagattgatgatttgttcgattagcttcaggggaagactgtattctcaaagattgacttgcgttctggctatcatcagctgagaatttgggaagaagatattccaaagactgcatttcgaaccagatatggtcattatgagcttttggtaatgtcattaggattgacaaatgctccagtgacttttatggatctcatgaatagagtattcaaggatttcttcgatagttgtatcatactgtttatcgacgatatccttgtgtaatctcaaacagaaaaggacaacatctttgaatggtattacaacgacttagatatcataagttatatgtgaagtttaaaaagtgtgaattctggttgtctgaggtgtcctt

SEQ ID NO: 173000 - DNA, 593 bp, Cannabis sativa
taagcacctgttctttgcttgtgaatacagcagggactgtctccaagaagtcaaaaattggctgcattggagattaaatgcagaatcggtgcaaggcataatgaagaccataaaaaacaacaagagcagttcagcaacgagaagaagcatgttgaaagttgtaatagctgggttgatttatcatatttggggagctaggaacgatgttctatggaaccaaaaggtgaggcgccgtcaagcagtagtgcagcacattcaaaaggagagcaagcttaggatcatagagattatgcccaagaaaactaaagatgtagatagagaatggattgtgaatatctaattcattgctagatagattgactcggtttaactgtttacatagatagtctgggggtagattgagggattcggatcatgttagtatcaatagatgtaaagttgtgaaattgtaaatgttgtttgagcaatacaagttccttattcataaaaaagaaacttgttttttctgaaaacgaaaaatataataggtccgaaccctagataacatttagtattattgagcaagaaaatatttcatacctcttcacaacttt

SEQ ID NO: 173001 - DNA, 970 bp, Cannabis sativa
aatcaattggatttatatgagggagtgaattgggaggcaaagagggacagagtcacagaaagccatgatgtggggggcattttgattgacttttcttaaaccaatacgagaagaccacaccagccatcaaaattccgttgacttttttaaattttatacgagcattgctaataatattaatgtgtctagcacaataacatcacattttataattaagtaataatttcttataatttttatgaaactaaaataaataaaattatatattaaattatactaataataatattacacttaccatttctttttttatatatgtaaaaaaatattttgtgaagagaaatatatttattttatataaaatgtatttattatgtaacagaatttttagcttaacgattattttaggatttctacattaactttaacagaatattctttattaattttataatattattatatatatttaaaaataagttaactttaacaaaatatcttattaattaatcgaatatatttttattaattttataatattattatttatatttaaaaataaaaattaagatgttttatataaggaaattttaataaaaatttaaaatatttaagatattataaatatttttaatcatattttaaaatttattagtttaacattaaattaaaataaaaaaaatttcataaatattttatataaagaaatttaaatttaaaatattataaatatttctaaccatatttttcatttttattattatttattttatattttaaattgaaatggttataataaagaattgattgctttccattttagttgtggtaaatcaattcgcacaccatatttttcataatatttgggaataaaaaatttttgtatcaaatttacgaatccagcctatatatagatacacttaaatttggttatgtgagttttagttaatgttgactgaggttttcggca

SEQ ID NO: 173002 - DNA, 507 bp, Cannabis sativa
tactgccatgacatgtaattttttggctcgtaatgtgataaagtgggcattttcccacggtcactatgcttggttgaatgtttcttctatacctgtaaacatctttttgtaataaccgtgaggtctaatttcatgtaaaaaaatttatttttaaaaaaaatataagttttccaaaaaaaaaggtttttgttaaaaaaaaaagaccaagtttaataatcaaaatatctaatttttttaacaaaaggcaaaacatcttttgtaatgactattttatgtaatgacagatcgtttaatgtaaacttttttatttaggttttttttttaatttttatacctaaaaaatagtttttttttttttgtatttatacggaattctacatcaaaattcttattgcaagtaatagagcaaaatccgcaactcacataaaaatcacttgagaaacgaacttagaaacctaaagaggaaatttaaaaaaaaaaataaaaaaaataatatatagggtattt

SEQ ID NO: 173003 - DNA, 577 bp, Cannabis sativa
taaaacagtaggagcacaatatacgagtgcatatcttggtgggcctatcagtaagagagacattattactgttgtaattttgtgtctttttttatttgtaataataccccttatttatttcctatataagtattggatttattataaggagataatatccaaaacaacattattcgaagtgggcaaatatccatccaaagggcatattatatttacaaaccaatgctcactatgaatttcagaatggtgagaaagtaagaatcaccaaatgtggtcattgttttcacaacaaatgcactcgtgacattattaaaggaaaactcacccaataccctatatatagaatatcattatttacttagacaattttcattttaatgaataattaaaaagtgtgtgtcgttttttttttttaataatcatttatgtatatgtgtgtaatattattaattatatcaattaataataattattattcatctcctaagaatctcattaattattgctattttttttttaagagcattactattatgtatcaagtgtctagtatcttctagatatgtcgtcttacgat

SEQ ID NO: 173004 - DNA, 868 bp, Cannabis sativa
  modified_base (744)..(747): a, c, t, g, unknown or other
tcttttctctctcacttgcttcgactattttctctctttggctctctttttttctcactcaagttctttttatcactcaatttatttttatcactcaaattctgttgatcacccaaattttcaatctcacttggtcatcatagacttgctttggtgtcaaaggagctagagtgactgttcgctgatggaagtgaatgaatacttgttggtgaagtcatcatgctggactcaccgatcaaattgccaaggttttcctagaagaaggtgtccagcttgcattgggaccacatcgcgcaataccttgtcctcatatttaccaattcggaaagattacaaaacttgtttggtaactctcacttcaccactatcattaaaccattgcaacttgtaaggacatggatatttaagcgttggaagtcccagcttctcaaccatggatgaacttgcaacgttagtacaactaccccattcaatgatcacactacataccttgtctttcacatgacaacgagtatgaaaaatgttctcacgctgtacctcttcttcctcttcctttggttgcaagtttaatgcctgtcttgtgactagtgcaaacatgtcaccgtattctggcccatactcttcatcttttatagaattatcttctaatggtggcatatcagcaagctcttcttcatctttagaatctactttgccattttcttgaatcaccataactatcttatttggacattggctagctannnntcctcgcccttgacatttgaaacactttatctcacaagaatgagatgaaataggagttttttttttccttgaggggttgtagttgcggtggctagtttgggtgtagaggatgaactaggtt

SEQ ID NO: 173005 - DNA, 857 bp, Cannabis sativa
  modified_base (133)..(136): a, c, t, g, unknown or other
aagcaattataggagcttttgaccgtaaaaaacctgttggatccttgttccaacaccaagtatcactcctaagactaacactcaaaggcacctgtttgatgagctcaacatcacgggaatcaaacaagtcctnnnnaagctccaaatcccattgtctactatctggcttcatgagctgagacactttacagttggccagtgccggatgagtagagaccacacgggttagtctcagacaaaagccaaggtgtgttaagcacctcagttgatgaactaggtccaattctcctacaggcaccatctctaagcagcgtttgtgactcaaagacactacgccaaataaagctcggattgccacccaactcggcctctaagaaagaacagttaggaaagtatcgagccttatatatccgacccacaagggaatcctggtgcagaagtaactgccaaccttgctttcccaacaaagacagattatactcacacaaactccgaaaacccatcccaccagagctcttattgttgcaaagtttcctccaactaaaccagctcacacctttcctactactcgaactccaccaatacttagacataaggctttccaaatgtgaacaagttttcagaggcaataagaacacagacatagcaaaacttgccaaagcttgcgctacagtttttaggacttcacgcccaacagtagacaagaaacgactctcccaactttgaatgcgcatcttgtctttcaaaaaccctaaaatagtatccttatttcttcccatgacacaagggaggccaagataagtactatgttcatcagcaagtctcattctaaggatcccactgttgggttttatgcc

SEQ ID NO: 173006 - DNA, 741 bp, Cannabis sativa
cggttacttgagtgacctcaagccagaaaccctatatatagagttacatgttttcttttattttgaagtgtataatattattggtgcaatttaatattgagacttttttacatatatattttaaaatagttttatttttttattttttttatttttatgaaattctacatagtaattcctattacaactagcgctgcaatttaaattgtaacaaaaaatcgtatagaaacccttattgcaactagcgctgcaaccactttagaaaccaaaaccgtaaatttgaaaaaaaaagttaaaaaaataatatatggaataattcccctttaatatttaatttcattataagctgacctacatagaggtgaatgggcagttatgcccttgaaaaaaaaaataaaaaaaatatatgtattttggttagttataacatgtatttataattaaatgtaaaatataataaatataaacataatattagctctgagatgatagttaaattattttacacatattatagatgttaaagattcaaatcctaacaaaattatctttatttttaatatttaattagtttatgtttttcccatcacaaaaaaatgtatggccaggtattgtgtcttattttaatttaataaaaattataaaaaattgctaactaattacaagcttcattacaaaaaattgctatttttatagtgataattttttagtcacaacataaattttttgtgactgaatgtg

SEQ ID NO: 173007 - DNA, 1005 bp, Cannabis sativa
ttttttttttttttgagaacaagaggctgcaacagagaaaggaacaacaacagcaagcagccaaagaggaagaagatggacttcccctagctcacttctctagacctgagagcttcacgagcacaattatgggcttccacattaaactgccgcggaaggaactgcaaagaagctccagggaagttcgagaagagcaaacgaatgcaggaaactaaaccagaaagagcagaattgtcctgtcaatctccatttacttttgagactaaatttagacaatccgagaaaacaacttgaggagtaaactgggaatcaatgcaccacttgagactttgtaaaagagcttggccttctgagaagatgggcgagacaacaccaggcagcctccgggattgagaagccaacacagtctgatatccccttttgaaaacaaaaccagcaccagttaggcctgcctgatggtcgagggctgcatctacaaacagagcaggagtatcaggtgacaaggaaagaagccaatgctgatgagaggactgagtgatgcttgaaacttcggatggctgagtgtcatgtttttgagaatgttgtacatccttgtactcctgcaagtaattaacaacaaattcttccacattgttagtagtatgattcttgttgaaaagtatagagtttcgagtattccaaatttgccaaatgaaagtgataaagacttggaactcctgctttggcaaaacttgaaaagcctgtaagagaaagtccttgatgtcacttctataataagacaagtaaaactgtttaaaagttgaagacttccaaatagactttgctcttgtgcaaccaataagggcatgagagactgattccttgtcgtacccacagattgagcaaagtgggtcagggagactccttttatgaaaaagattgagagaacatggcaatatatggtggaaagctctccaaataaaatgtttaatcttgggaggaacagggagagaccagagggttttc

SEQ ID NO: 173008 - DNA, 620 bp, Cannabis sativa
agaagggaggccaatgaagattggatcccccgtaatgacccaaaaagaatggggccatgagcgtaacttgattggttccattcctattttcttgcccactgtcccctcagtgatggttatctccacggaggaaacttaggcaacaccgacttctcaaactcggagaggtaggaaggcaacaaaaggcaagagggggacaaaaacttcaccttcaccaaaccctcttcaaatgagggaattaataagaggcacgccgattaggcctccgatcgtaatccctgtcaaccgccaggctagaagtgaccgtgtaagggttcccaaagcaagccctaactcattccaaaaagaacatggtgacaggatgttcctccagggataccaactaataagtcacttcaactgttaagcctacctcctacacgggccctgtaactcgatcaagagcctgtgccatgcgtacaattcccgttcaggaatcagtgaacccctttgttcaaaaagttcaggaagagaggtgttgcacatctaaacactctttagaagacactccctttattgaacatagtggggaggtgtctactgatctcattactcagtttgaagcactaaccattggcaat

SEQ ID NO: 173009 - DNA, 529 bp, Cannabis sativa
  modified_base (286)..(299): a, c, t, g, unknown or other
aaaataatttttgttttataaaatgaccattatgatacaaataaaaaagtgatatatatatatatttatgtatgatttttaaattgtattttttagttctaattatcaaatagtaaaggctaaatactattttagaccctatgttttgcaaaagttacagattggaccttttattttgttaaatgacaaaacggaccctgtaatttccaaaataggaccctgagtttaattttcgaaaacttttttaatataaccaacttaaagaaaattcttaacacgaacagannnnnnnnnnnnnnacagttttgtcataacacatttagtttagattattattaaattttattttgacaaaaaatcagttcaaatttacggtttgagtttctaaagtggatacgatttttcattgcgatttaagttacagcgttagttgcaataggaatttctatgtagaattttgtaaaaatatataaaaaaaataaaaaataaaataaaaaaaaggctgttctgaagacttacacatgacttg

SEQ ID NO: 173010 - DNA, 552 bp, Cannabis sativa
  modified_base (497)..(499): a, c, t, g, unknown or other
tggaataggcattactgctactgctgttggacttatagctggtggtattgctgcggcatttgcccgaaggaattaatggcgattgtgtgaagcaactggcaacgtcctttcaagattttactcccaaaactgctatgtttaaaaatctcagcatctgaaataagttcactttgtttattatattttataattttttttttttttttctgaatgtttcttacatagctttaacaattataatgtcaataactgtattttttctggttaatacaattttataaattttcttgtaagtttcttcctagctctagataaaaggtagaattttttttgggggtttaaaaagatgatttatttgccaaaagtacttctaagagacgtgtatatgttgggttaaattttgactcaaaatatatcataaaattatatttgaatattactatatttctttttgaatgtaaattggaattttattaatttgctaaatcagctaaaannnaagattgtaattcagtaagaacatccctcccactgaaaactcgatctgaaaaa

SEQ ID NO: 173011 - DNA, 575 bp, Cannabis sativa
  modified_base (324)..(352): a, c, t, g, unknown or other
tatataaactctgaactttaggtgacaatactatgtattcataggttaattctttatttgacattttatggaactatagatgcttatgtaaactagattccttactcaaaacttctgaatttacttttggatacctctgtcatacaagtgaatttttaattgcttttaccaaattcttttagaactcatgtatagtgtaaaagggctccttacctttttgttattttgttcttctcttcatatgttttgtaaaagtaagtttttgttttatttatctttttgggggggcttgaacatcttgataaattattattattattattnnnnnnnnnnnnnnnnnnnnnnnnnnnnntattattattattattttacttagtgtacaaaaaatataggctacaattttaaactgtcgggtacaagagcctaataaaaaattattacttactttttgccatatttcccacgtgttcacttactttttttctattttccacatgcacctatttcttctccatttctcacaccctaaaacgaaaatcttaactctccaaaaccccacccacgcctccgtacca

SEQ ID NO: 173012 - DNA, 577 bp, Cannabis sativa
tagtgcgcgttgtaatttttttttcaaatcaaactgaatatgcggtttttataattttttaaactgtaaccgcacaataagatcttaaaactgcaaaaaccacactgcatatatataatgtggtgcggtgcgatttaagcggtttacactaataagggtaaatactattttagattttgtgttttacaaaagttactaattggaccatctgttttgttaaatggcaaaatggaccctatattttctaaaattgtacaaataggttcctgtaaactaattttttgtcaaaataaaacttaataataatctgatctagagatgttatgacaaagctaattatattttttatatttgttcgtgttagaaattattttaaaatttgttatattaaaaaataaaattgttgacaattgagtccagagttctatttttactattttagaaaatatagagtccattttgtcatttaacaaaacagaagatccaattggtaactttcgaaacacaaattttaaaataatatttaccctgatattataataataataataacaataataataataataagaataat

SEQ ID NO: 173013 - DNA, 558 bp, Cannabis sativa
gcgtagtcttatgtctagtaccaaaatacctagtaaataaaaggacatgttagtggttgtatggcaatggcaccaagatgcctaacatgtccttggtcccattgctatagagctactaacatatgtcctatctgttgttggtgactttacagttttgaaattctaaacttataattgtgaaacagtttcatgtgacatttacatactactaacttattgtaaggtttgttttgtgaagttcttgttttgttttttaattcaagtgatgtataatatatgattttttttagaataaaagtatcataaataacaatgtcaagatacaatagttaaaaaggggagagggagtatcctcccactaaatacaatttgtatccactgagagaacatgcttaactaatttatgagaattagtattcacagccttataaacatgagagatctgcactcttgaaaaattggctgcaagattattaatatcagtaagaatacaataaaactttgagactaagtttaaagaagattacaatctttttgttgcaataagagaatctgttt

SEQ ID NO: 173014 - DNA, 546 bp, Cannabis sativa
acagtattattgcatgttagggctgtacatctattttcgtaaaccgtccaacctaattaacccgctcaaaccaaatcgaaaatattcgacaaaatgtacaaatcgaaaagctcgatggaaaaaaacccgtccaatttgtatattgggtgggttaaaaataaaataacgcccaattaaatcgacataacccaaactaaaccgaactagaattttcatttttatgtttttaaaattttaattatatatattatattgatattaaatataatttatataaatattaaaagagtaatttgtggcataaatacctaagtttatcatccagttacaatttaatacctaagttaaaattttggcggcataaatacctttcgttacactttcagacattctgtaggtagtaggtaccttacttttatcttacacactggacaccagatggcatgacacatcatttaaaataatgttacgtcatcttattaaatagtcacctaatattcactactacaaaaatgggttttcccgacgtttttaaatagtcattta

SEQ ID NO: 173015 - DNA, 782 bp, Cannabis sativa
gacagttacccaaaggcaaaggcaaagtggagtacgcagtggttgtagttaattattttaccaagtggatggaagttgagccatgggcaaccatcacgtccaaaaaagtgcaagaatttattgtaaagaacataatttttcggttcggattaccatctaagatagtctcggacaatggtatacaatttgacagtccatccttcactaatttctgtgcaaaccatgggatcgtaaaaagtttctctgcagtggcacatccccaagcaaatggtcaagttgaaggagtcaacaagacactcaaggacaccctaaagaagaaacttgaagatgttaaaggaaactggccggaggaacttcctgaagtactatggtcataccgtacaactgagaaaacatcgaacgaacagactacatttaccgtgacatatggatatgaagctatgttacccgtagaacttgaactgccatcccacaaaagattaacatatagccaagaggccaatcatgcagtcctcacagagtcacttgatgaagttaaagagacgaactgcagcaaacttaaaactgatagcccatcagcaaaaagtagctcggtattttaacaaacaggttagagcaaagaaattcattgtgggagatatgaccctaagaagagtatttttgaacaccaaagatagtagagcaggtgtgctcggaccaaactgggaagggccatataaggtggtcgaagttctacagacagaagcatacaaattgggtaagtatgacaaaaagatgcaact

SEQ ID NO: 173016 - DNA, 579 bp, Cannabis sativa
agtcatcccacagctcgcccccagtagttgagaggtcagtcgtgatccatacttgaagagtagtaagttgaatactgtcgttcaagtttctaactttagcaacgatagtactaaatcgcgttaggtaagccttgagtgactcgcctggttgatgctttatgttcgttaaggaggatgcttcaggtcccttgtctcttgctgcctaaaattatttcttataatccttggacaactgttcccaagaagttattgaatgatgggtaaacttatcgaaccaactactcgctgctccagtcagcgaggtggggaataagatacaacgtaaattattcgagacattactggctcgcattatggtattgaaattggtaaggggggtgattgggtctgaagtcccatcgtactacaagacgtgtgggtttttgaacccctaggagaattcaaagttcataatgtctggatggaaaggctcaagctcctcgtctgagtcataaccgtgtaacttcccatattccccatcttggtatctcctgaatttatcttccaactcaatgattcgcaattggattggatcctctt

SEQ ID NO: 173017 - DNA, 513 bp, Cannabis sativa
ctccatgaggcacatccactctcgattatgaagggaaaccaagtcaccacctactgtttgttttgccaaattattacaccgtcggtgcctcaatctcgtgattatcatgaaggttaaaaatttggctctaatgtttacgattttatggaatttagtggtcaagacaatgataattagtttatattttttattttaattaagacaatttaatatttttaattaagaaaatttggatattgtgtagtcatattatggacgattgatttgacataaattaatattataataaaataaataatatgtatttttttttattttgcttcaaaaaatattttatatttattatatattttttaagtttcataatgttatgctaacaaatcacatgaatttagtgtttattatgatttttttacatgtgataaataaatgtggcctttggtaacactttttaatcagttttatgtttttaaaattggaaaagtgaataaatttttcaaaaacatgttctat

SEQ ID NO: 173018 - DNA, 744 bp, Cannabis sativa
tgggccaatggcatagcccggtttggtgcatctttgaaatgccttggtccttctgggtaaatccgataccctccatgggagtagatggcttcggttcccgggactgagaagacttcaactcattggtccctcttgcattattggtagttaggggactcctagtcacgaaggccctttctgttagttggggctttcatcctccaggagtattaattgaaggccctttctgttagttggggcttttatcctcccggagtattaattgaagaagttggttgataataacttctcagcttttcttgaataatatccacgtgtcatgatcacgaaaacccagataacaaacataaaactagaagtgtatttcgatcaatctattgtcttgatatccatatcaagtgtagtgtgcatgactaaacccaaataacaggaactgtaaggttatggtaagcagttgctttctccaccattacttcctttgtattcataaaacattatgcaacatcatttttctatatgtattactcctctagggatactgaattctttactgtttgataagtgcatttgaatgtacaaaagacacatctctaattctatccaaaaaggaatagagatgaaacagttaagaactttcttccgtttaaataactttctagtgcttttcgaaacaactaagttatttagcttcactggtggagcttaaattattatagacgatttttttacatccttctagaataa

SEQ ID NO: 173019 - DNA, 792 bp, Cannabis sativa
caatgcataatggactttaagatctccaagcatttgacaacaaataaattatcttagttttgagttttagaatttttataattggatatttttactaattctttgttcttccatctctcatttttagctactttaaggggaccaatcccaacactagtggttcaaaggcagtatgaaatgaatctgccttatggcttgcgagtgactaatttactgcttcatgatgataatttgaaatcttgtggccttctcgcgaaagaccagtgcacaataaactttaagaaccccaagcatcctacttgacaacaaataaattatacattatatatttggaaaggggtaaagattgagactgatagtatggtcgttgtccaagcaatatgttctagccagttaatgtcttttatttttggtttggttattaatgattgtaaaattcttttgttttatctaccacatgatcatttacgttttgttagacgatcaataaattaagttacccattttgttgctaagcatgctcaatatatatctagtcgtagccagtggcggaaccagacaaagacccgaggaggggccaaatagaaaggtcaagcgaattgtatttttacctttttttttagaaaataataataaaattaggcgatttaaaaattttataaccttgaactattgcaatgatggtgtcgtaccttttgaaattttttccactaaaatatgtcaatgtagttgatgtgttattgtcagcgccacatatttaatttaaaattttaaaatatattttcttattaa

SEQ ID NO: 173020 - DNA, 671 bp, Cannabis sativa
ctcttatgataaattatgaaaatatagaaatatatttatgcattcttagagttaattttgtatttttgatgataataaaataaatttgaggtagtttaatatactatgtttgataagagggaaagatgtggaggagtgtaaaggatgaaaggagagactagtcaatctcaacgtttgaaatcacattttgattctttttcgtaatgatatttgttatagttacagtatcatctctataattttttgaaaaatttcaaatagtttacagtactgaaaatagagttccttatattccaatttactatgtgtgttcaaataaagttcctgatattgtaagcataacaaacactactaagtttttttttttgaaataaaatatccaaacatgtgtttttgggcatatatatgtatagtatatttagtatattcaatttaacatatgtaataaaactaccaaaaaaatagggtaatcaccccttatactttttttttttttaatttacagtttgggttcttccagtgattgttccgatattttttatgttgattgctatgtaaatttcgactgcaatttagattgcttcgttggttgttttgtagaattctatgtagatttccgtaaaaaaatacaaaaaaaaaactattttaaagtgtaaaaattaaaaaaaaaa

SEQ ID NO: 173021 - DNA, 671 bp, Cannabis sativa
tttttcttttttttttcaatttttgtctgtccttggactctttgtttgtttttcttttttatttattttttaaaaaaagaacagtagaagtgattttatatttatcttataaatataattaatttctgtattaatattcttaaattattgattagtgtgattttaatttgttagactattttaaagattattcatgcatttagaatttttttggaagacttttagcatattttagccggtgagatcagttttacaaggcgaagcttaattatgaattttgataattttagaagcaaaactgaacttggagctcaacgtgaaagttttagatcttgttcttagctttctagaacatcttcaatcatccaattctgagtaatatcgaaagagttgtggccaaaatactatcagtcgtcacagcaagaaatttttgaaaaaaagatagcgaaaataaagataacttttcaagtcgagttgcgatttttttaaaagacgagttatcttttttttttttagtgagatatttcataaataaaatcctaattctaagagaattcatctatcttgaaactataaatagaatctgttataaatattattaattatgtggatgtccaaatcttttatttattgtcattaattgtaatcaacattcctcttttccttagttt

SEQ ID NO: 173022 - DNA, 594 bp, Cannabis sativa
ataaataaatagtataatattatatttttagtttataaaattaaatttaaacaatttaataatgtcattgatgctattttttaaaaaaaaaattaaagataaataaatagtataatattataataaaataaataataacacgtgaaaccataaatataataaggtgttatgttagtagagaatttttaatagtaggagtataaaaatagtatagaagagataaaataagatattatatttttggatgatgtgaagatttttagcaccttttaaaaatgttaccattttaaggggagaaatatttatagttgtcaaaataaacacatcatcttaaaatattattttctctctcatccacgtaagatttgttacaatttcttaaaaaagatactatgatggttgacaactctaaaagttgccctataccttattctaacctacaaatagaacattataccttcatgcaaagggttgaaaaatcatttatgctatcaagagcaaatatttagggttcttcagctagggcaaaaacacttgtgtaagaatactttgaaatttttttagctcaataatattaactcgtggaataaggtt

SEQ ID NO: 173023 - DNA, 673 bp, Cannabis sativa
ttatctaggtttcagtacatacttttcccatgcaaggttatggtgtaagtaaatggtggagtaccactcatattgtcccaattacaagtttacaacacaattgtactattgaattttagactacttagatggagaacaaattttagaaataagagttaggcactactactactatatgtacaaggaacaatactcagggatgatggacatgtgtaatatgtgggaaatttgagtttcatgcaatattgcacaccatatcaaaaagatatgttattcttacgagtaatttgcagcgaaattctcttatgttttaatttttatacacttaacccttttattttttatttttttgtgcaaaactccttatgctttagttttaatacacttaaccttcttatcttctttttttggttgcaaaacccttttatgttttaatttttatacatttatcctttttattttttattttggtggcgaaacccctttaaatttacatttttttgcaaatttaaagttttagttagatgttactgttaaatacaaactagatttcttttgtatcgattttgaggttttactgctacatatatataggtgtatacagtggtcatcccgttgatatttaacggtaatatttaactggcatgtcaaatttgcaaagaaaaataaacat

SEQ ID NO: 173024 - DNA, 510 bp, Cannabis sativa
tgcacttatattaccaacaaaaaaaaaaaacagttaatatcatgcactcaaaaaattgagaaactggtttcaagatgagaaaaaaaaaactaaacatatataggaaaaatcccataaaaatataaaaattaaaaactaccatataaaatttaaataaaaaaactaccataatttatgtaatttcctcaaaatcaacaaaaattaaataggattacacaattctatccctttttaagtgattctatatactaaaaatatatatataattttaaaaatgaaaaaagaatatatactaaaaagtgtcataaaaaaattatattatgttcataagaatgtattaacaagtttaatggcatttacactaaattgaaatttgtgtataaatgaaaagaaaaaaaaatgtataaatccgagttgtatagataatgacattaaagagagtctcgaaagtagacttaattttgtcaggaaaagaagttgtctagcatagataaaattattcttaaaaat

SEQ ID NO: 173025 - DNA, 1456 bp, Cannabis sativa
  modified_base (475)..(480): a, c, t, g, unknown or other
tgtaacccttatccatcaactccctatttattttttcaattcagccaactctgcaggtgccatgcgttaatgcgcaatagaaattggttgagttttaggaatcaaatcaatggaaaactcgatctccctatcaggtggtaaccctggtaaatcctttggaaacacatccagaaaaccactaaccactgatatccaagggaactagtctaaatccttagactcatcctcgatcacaaatagattcccataacactttaactttctctttccacctaagcatgcccttaagatagggttttgtctcactgccctcatgttggctcaataaacaatgaaatcaccactaggggttaaaagagtcacctttttgcgtgacaatcgacgatagcttgttatttagacaaccaatccataccaagaattacatcaaatttccccataggcaacactaataagtttccagacaacttgtgtnnnnnnaacacaatacaaactgacctacatatggtggatacctcaccgtgtctgctcatagctacactcaaatgtaacgcatgactaaaagtttcccaactcaaatccaacatactagcaaacatcaatgatataaaggaatgtaatgcactagtatcaaataacacatgagcccaagagtgtgagataagaaccataccatcaacaactccctggtcagcaccgccctgtacatctcaaccccaagagcataggcttgagcagatgactttgcttttgcctttctctttccctgactaggatggcttatacttgcaccaaaccctccaccttgactgtaccctttttgactcccactaggaacaggagtttggaaaccttgtgagtaccccatgtggaaccctaaaccttgtagcctaaattgttgttgatactgagactgctggcccaattggggtgtgaaaccacaggatgaaaactcagactggtttgttttgggctatccatgaaaaggagtagactctacatagctccctatgggtcttctgtgagatgcttgaaatctttgttgtcgttgtgggcaatctttcgacttatgaccttgttgaccacaactgaaacacatgtatggtccactacaagtctttccagatgaaccacaactattgctacccccaataaattgttgcccttgggaccactgtcgttgaatcatttcctctgcttgtgttcttttcctcattcccttctacatgagcctcagttcgcaaggttgctatcacacactcagtcaggttgttaaaggttaaaggggctattcgaccatgtatcgcaggcctcaaactacacatgaactgttcaatcaccaagggctggacaatgacaccaggatatgcataagaggatagctctacaaacttcatgtaaaattcattcacagtcatatccccttgtcttagaccatcaaatactccaataagag

SEQ ID NO: 173026 - DNA, 1239 bp, Cannabis sativa
agtggataactctaaaacctattctatataaattactaggtaacgtgactgcgactcgcgcaatcgttataacttataatataatttaaataatattttgaaatacttctttgtaaataatattttttatgaaggttttatcttccatctcatcatcatcgtgtagtatgatcaatctttctcttgtagtgactcgagagacaacaacatataattgaccatgggtaaatcttagggagatataatccaacatgtttaagagattgtccttgacttttatttattgtcatagcaaaatatggtgctaaaggaagttgtcgtctattaagcttgaatggctatttcgattcgttgggagacatgataattcttgggattgtgacgttttcaccgatatttgttccaaaaataatgttagctctaatggaccatttcccaagatgtgtaacaatcaatctagtgccattgcataagccttctatttgatttagatttctaaggagcattactggaacaccttccttaagtcgaatgtcgtgatttggtatgccattaaatttcaaactctgcaaaaatttcggtggatacaaaagatcatcatcacttgtccttacacttgctttgcatacagtgtctgagctataatatattctcccttctcctggtataatattcataatcatttcattcaattcatggaccatttcatttttttggtgttaatattgctctttctttcaaatatgtaggatcgttgtagttttgtaaaagcaatgggtagatagcttcagttatgctcctaccattaactctctgtcaatgtcatcatataatgaaccatctcctatctgcaacaaccatttatcaaaagtagctattttagcagcctcaaatccacttaaacttctattatatagcctcatattttggttgagctcatatattttaaaaaatggccacaagtatgatgagttgagagaagtaccaacgatgtcagctcttgtactttttggaacagctggtaatatttgtcgaaaatcaccaccacatactattgtaagtcctccaaaaggttttttagagctactttcaaaccttatttttagaatatctcttaaggtcttatctaaagcttcaaaaacagaatttacttgccataggcgcttcatcccaaatgatcaatgaagttttcataagaagtccaactaatagggtaccttgacgaatttcacaagttga

SEQ ID NO: 173027 - DNA, 602 bp, Cannabis sativa
tacatatgagttacactaataacacccttgacatttcattgtaggatgtttggtattattttctattttttgtttttaaaaatgaaaacaaaaaatagtttttgaagttttaaaacacaagtcacgtttggttagtgtttttttaaaaacaatattgatcaaaagtgaatttgtttttaaaacagaaaacatcattttgttgttttcaaaatacttattttttgtaactttattttctgaaaactgttttaaaaaaacaaggtgaaacaagtcaaattgttttcaaaaaataattgtgtttttaaaaacaaaaaataatttcttagttatgatgtcaaacatgcacttattatgtgtgctcttattttctatctctatcaagctttttagacagaaaattatggtaatcaaaccgttaaacacgtgacttgagtataagaatcactttaagtgaaataaaaaaactgttagttaaataaaaagcttattgagtgagtaataacactttttaaaggactttaaccaaataaatttactttattacaataagttttataaattaaaggagaaatgtaacggaataaatgaaaaataatcggaat

SEQ ID NO: 173028 - DNA, 507 bp, Cannabis sativa
ggcttctcttggtcgggcagacatgttggtacaacttcttgatagctcacttcactctcctttcggttgctgcttaatggttttgccataccttgtatggagtccttgccttgctattggcaagactgtattccacatgtactctatcttgacttacgtggatgccacaccaggtggataaaatttaggataacaaagagcactaataaatgacattccaatcaacacaccccacatataaatcatataagggcaatttttatttatatacaagtaaatatataatattacaaaaaaaaaatgtacaaaaaaacataattatataattttatacaattttatgaatatttacaaataaacatatatgaatgtttacaattttaacttgttgattactttcaattgattttctaaaaacacgcataaaactaaatatgtaaacataaaagttaatatttatattttgatatattactaaaataatatgtttactaaaatttaatatga

SEQ ID NO: 173029 - DNA, 570 bp, Cannabis sativa
ccccttgaaattggcgtgattagcatattatgcatgtgatatatagcatggtttcctttgtttaccagttaacatatttatttttattaaattcataatatacaaagtaaaaacttaataatcttgaataatcaaagacgaaattttgatataccaaataaatttatctatatccgttaagaagtagaattttagcttaaatatgatttttcattagtgcaatttaatgctggctaattagtaatagtttgggaagaaaagccataaatcgcggcactctcaaatctaagattgatagttagattgtcacaatcactgggtgtgaacggcaatgaagtctaaagagagagaggagaatggttaaggatgaatagtacctaatgataggcctcaacatgtaatgatggttgattaaatgtgggcctatgggctttaaaattacagaattgctaaactacataagcagtgtttagcactctcttagaaacttacaaaaatactgaaattttgggtaacttttacaaaaatactatcacacgaaaaagtttacaaaaatactgtgtttttata

SEQ ID NO: 173030 - DNA, 523 bp, Cannabis sativa
gttctctattttagttagtattttaaattttaataatatttataatttgaatttattaaatataaatgaatttgttaaaataataaaaaagtaataataattttgattaaaatattataaaaaaaatttagcaaaaaactagcgcgaacttcgtatatttagagagctctctattcttttgttattatagagagagtattttttgtatagttgactcattttttcaagtctcacttcctattttaaataaaaaaaaaaatatatatttaaaggtcgttggtgatgatgttttgaagcaacttctccaaatttattaaaagttctataacttcaatatactaatttatataaatgaaattatgtataggagctgcaaacaaaaatacacatataaataagtaaatttttaatgatggccacaatgaattataatagggaaatttacaaaaatactggaatttagggtcacttttacaaaaatactgtcacacggaaaaatttacaaaaatactgtgtttttata

SEQ ID NO: 173031 - DNA, 883 bp, Cannabis sativa
gtgatcaaaatcacacaagaatatcaaagcagcaatccacaagattattttgtaatttttttttacattgtggctaataattatattttttctgtggcatgatcaatttagaattttattttttttcttgaatttttttaataattatttactatttcttctctattttaaaataacatgtatatatatatatatatatgaagagttattaatattgcttagatttaattgtaatataatagcatcaaaagttgttaataaaaacataaatgattactatatggtaaataattgagggaagagtacattaaaatggacaagatgatgtgaaagaaatgaaggaagatgaatatataagattttttttttttttctttccttgaacaatatatattaagtgtaatttaaatgtattattttaaaaactatacaagttcaacacctcttcaaattactgttttgagattttttttttttttttatcaatattgtattattttacaatattcactttctttttttcgttcatcgtttaatttttatttatttttttgttaataatcataaacaaaatatcaatttcataaatctatatctatacatatataaatatcgattattatttattacgattactttaagatttttaatattgttatttaatatctcattaggcatattattgcacaatagatatttttgtatttcatttacataattttttagatttttgaatttagaaaaattcaactaaaatagcttcaaatacctttatctatcctcttcttaattctctcattttttttttattttcttataacctttttttcttaaaaaaacctccaataataataataataataataataataaagatcggaag

SEQ ID NO: 173032 - DNA, 502 bp, Cannabis sativa
aggccaaaaatatccttgtgtgaggatcttcttggacaggctaagacccctagtgtggtctccacagaaccctttatggatttcttccattatttgtttagtttcagaattagaaacacaccttacgtagggcatactagagcctctccagtataaggtgctatcgatcatgagatattaaggggcttggtattgaaccttttaggaggctgtgtgatcttggggtgactctcccctagtcaaataattgactattgggtccaaccagttgggctcttggttggtgactgcaacctctgccttttccaagatgctcagatccagaaggtattcaatgggtaccaccccagtctttccacttccttgttcaaagcctactttgctaaacagtcgtcagcattcttctctcttgaaatctactcaattttatagcctttgaactcttgaagctgctctcttacaacagcaacataagaagccattctttctttgcgagtttgtt

SEQ ID NO: 173033 - DNA, 995 bp, Cannabis sativa
ttggttgagttggaaagttgccaactctggcaatgtttggccgaggctaaccaatgaaacactgagttggagagagaggtagccgtagccagggcgacttgagaaaacgctgcataaaaccaacttgatcctggagtgagaaggtcgtgaggcagacctcgagattcaagaaccaggaggcaggagacagctcaggaaaacccttagaacactcaagaggagcaacctggagaaactggggatgttccagaagatgaacaaccaaacaatcaggcacctcgacaagaggtacctcggagaccccaaggattcacaacccaagggaatgaaaacaacgacatcccagaatcttctcatagaaacgagaacttaaggcgacacaggactaaggactaggagatccctcgtgctaacgagagaaatcttgggactcaacctaggacaagtggattaccaccgagacaccgtcaatgtccttcttgcactgatagggaggaggcgtatacacaccctagcaggggacatgtatcaaacatttcccaaaggagaaggcatgtacatgacgaggtaagttctagctcgggatgttcaagatctcgtgatcacaatagatctacgcgaggaggggatagacctcgacgtagtaatgatcgtgaaagtatgagtcatacaaggagtagtcaatttgagagttactcatacacgaggtccatgagtaaccatgaatgaagatagtcagatctttgtgaacatttgattagagacaatctgatttgcgcgagcgcttaattaaaatgctcctgatttatgccaacaactcaatgacaatcaaaagtaagaggatccaatccaattgcgaatcagttagaaaacaaattcaagaaataccaagatggggaatatgggaaactgcttggttacaactcagatgaagagcttgaaccttttcatccaatcattatgaactctgaattcccccaaggatttaaaaaccc

SEQ ID NO: 173034 - DNA, 932 bp, Cannabis sativa
ttaatgacgagtgtacatatatatatgttttacaacacttacgacggtccaaaataattatagattttcagtacaaagaagttagtttaattagtaaattaacatactctttattatactgagatgaacggcaatacaacaaattaatatttaagctaaacaacgaaataataaaattaccatatctatctattctatataaagtatggctatataacagaatttttagtttaacgatacctttttagatatttttacattaactttaacagaatatgctattaattaacaaaatattttttacaatgattgtatttgtggttatacacccatttgcaaccaatcggtttgtatcgaggaagtagtttggtaatgatccaagctgacaaaggttgagtttcattgtccattgcttcaagccagtgtttaaattgggaagcctcagcataattttgaggcttggtttgtgtgtaggctgcaagaacagcagcccgaaatgttggatgaagcttaatgtaggacaagaattgttcaatagggtgattagtggaagccacatgacaaacataatttttcaaatggggtggtttgacaataggtctacctttttttgtggtttgtatgtcaagagagggaatagtgccaggtctggttgttgttgaatcaacagcagtttgctgatcttgggacgattgggttgctgatgtagctgatgcagatgcatcagactgttgggaagatgaatctggtgcatgttcgactgttgcaggagtaatatgttgttgaagtgagtttgttgtattgggtactgttgctggtgcaataggtttttgacatggaaagattgtttgagaaaaacaatgatcaatctaagttaaagaaatggtagaaaagtatggaaaaatgttctcatgaaatataacatctctaga

SEQ ID NO: 173035 - DNA, 785 bp, Cannabis sativa
cataactatcatgcagtctatacagcatactaaaaattctagctgccacataagagtgagtggccccagagtcaaacaatacagaaaaataagtgtttttgatagagagctaacctatgacaacggagggactaacctctacatttgcgtgagttagagcaagcatccttgctggagcgggttttgtagttgtcttttgttcttctttcttatgatgtgggcaatctcttttgtaatgtcctagcaacctacactgtaaacaccctttccctctacactcacccagatgatgttttttacaactgagacactctgtgtaagtgtatcaggttttagaaccaacctgatggttgtctcgaccttggttccctcagaaccttttattttgacctgagccactaggtgcagtcggtgcctttcatttctgatcagtgatcgagccactacaacccctaccataacaagaggtaggagcagtaggagccccaccaacaacctgagtccctcgagactccttagtgcactccactacgccctcagctcgtagtgcctttcccacaatgtcatcataggtggtgttgtcatcagtagtgatcataaggtcatgctttatttttggattcaagccattcagatacttttaattcttactgaaatcaattggcacaattcccgaagccaatcttagcaattgatcaaactgagttgtgtattcagtaacactcatattctcctttgggtcaactgagtaaattcttttatttttgcacttctaacagcttcgt

SEQ ID NO: 173036 - DNA, 814 bp, Cannabis sativa
ttaaacattcaaattattaaaattgattgaacactcgaagtaatattttttaaaagacactcgaagtaaattgaaatgatataaatatatatatatattttaatttcttatctttaataaaattaatatatttaaaaatatcatttttgatttaataatatttttataatagttttatttttacaaataataaaatttcagaaaataataaaaacagatttttatatacttataatataattgaatggatgtagtttagttcggttaaacagaaatgaattaagtcagcactattaaaattatataaatggtaaaatatatgattttttataattatcttttagatatttattaatttaaataagatcttatctatatatatatatatatatattttaaaaaagttcttattaattagtatagaattaggattgatgaaaggcttcaattaagcggtggcagcagaatttaaattcagcgtgtaaaagatatttatcatacaaaaaatgataaaggataggattaatttaaataatttccttattagtatagaattaggatttgatgaaaaggctatatatagatacatagttacagcagaaatttagatgcaccctacactttcaaagctcgaaaatttaattaagcttagaaagaattagctaatgaacagaatatctagctctcattttctttcaacaccaaggtttcggtgttttgatcccaccaactctaactcttacccagatcacaccactaatcacaaacactacatcccaacaaccacttcaaattccaattccactactgaaat

SEQ ID NO: 173037 - DNA, 1077 bp, Cannabis sativa
  modified_base (996)..(997): a, c, t, g, unknown or other
tctcgcctctgcatctgctgctcctcacgattgctaccgaccaccactagcttctacgacttcaatcattgaagccccaatggtacagagtctctcgtcactgaatctcaactcaatgttgtccttgccgtcgctcggttcctgtcgaaatgtcaagattgcactgatctctgtcctaaatcagtggttttggagttctttcgttatattcggacttcattcgataaatctttttggctgcaagcatttggtattgatgtgattgcttcattcttggctgagtttttgagatatatatgcaaagcggtggaatcgtcgctggattttgcaactgagatagatcatgagttgataggtgaggttgtgaatattttttttttccatctttagtgtatatttttatatttatcgattctcaattgtattcttatggtttatggttgtttacagtctgggcctggtgagaggagtatccctggcaacactgttgctatccaagattatgtgcctttcagtggccttacaacattcagaattactttcttacaaaatttgagtgttctcaaatgctacatcctgttatcattttataattacagtgatcttaattgatttaactatgtatctaaatattattattttgcatctaaagctgttagaagatattacatttgtggatactcctagagttttatcagggggaaccaacgaacacaacgagcatacgaatttactggtgttatgtcatggtttgctttctagaaattttctgtgtttaatcatttcttttggacagcaacaatttatctatattattgcataccatatatttgataaaatgactcaaagaaaattttggctacttctttagcattgtttgcattgatttattatatttgagggtaattttaagatgtaatctttcgtaccagtagttttatatatggttcctgagttattggataaaacaatttttttctctattatttggttggnnaaattttgtggaagcaatcttttattttcttagtggtataattatcaataatagaccattgcctaatgatttgttctact

SEQ ID NO: 173038 - DNA, 528 bp, Cannabis sativa
  modified_base (467)..(467): a, c, t, g, unknown or other
gcgtataggacttggttccctattcttgtgtttctgggtgcttggagaggattcttccagcatatcttcgggtcctgccgggatggccttagggtgtatatgaagtcctgctgtctccatggctttttgcatggcgaccatcacctcttgcttctttctattttgttctttttgggccgcgatttcagcttcaagatcagtggccttttgtctcaatagcaacaactctgtataattgccttcgtggtaggcgtcatactcgtcaaagttcccctcgtactcatcgtcactggcctcatctcgctcctcagagtccacgttcactctcgaggccacttcctcttcttctggattttgagcatcttgaggaggatggggttgacttgtgttgttgcgagtttccaccattgttgacttaacttctcagattactatctgtttgaagacgcttccttcagctctcaatnaaagcaccaaaatgttgactgaggttttcgacaaccagctaagtaatatataagaagagct

SEQ ID NO: 173039 - DNA, 512 bp, Cannabis sativa
gccagtaattagtgtagaacattatcgacataccatcaggaccacgactactatcatcactcatcgacttaagggtagagaagacttcttcagcagtgtatggttgagtacgaaactggttcaattcacttgtgatcgtgcattaaactaaggaaataatatgattgagagcttctaaatcaatttcatccgtagcataaatatcgctgaaatagttttcattgttctaccaaaaccctgaagagaggattgttcattgccttgatcatcaattagagattttatagtgttttaagagcgccttttattttcttttgatggaaaaattgtgtatttgagtcaccaaatttgagccaagaaactgaagaaccttgctgctaataatcttcttcttgagttagaagttcatctaagattgatgcactcaatttcaacaagtcaaagtgagtagggctggtatcatttgagttgttgagagaggccactttgtcttgagtaatcttgattttatt

SEQ ID NO: 173040 - DNA, 1239 bp, Cannabis sativa
  modified_base (823)..(826): a, c, t, g, unknown or other
tgttaagagctgccattcgtccttctaaggcctgtacttcctttggctttgttggtgatggcatctctatcaaagccttaattttctcagcatttgcttcaatgcccctcgcgttgactattgaatcccaaaaattttcatgaggagactccaaaggaacacttctttgggttaagcttcatattgtactttctcagtatctcaaagcactttgcgaggtcttttgtgttgtctctactttttatcgacattaacaacatatcatcaacgtagacatccatttttcttcatatctacctcgcaaacatttcatttactagtcgccgatatgttgccccagcatttttcaaaccaaaaggcatgactttataacaataaagtcccatgttggttacgaagcttgtatgctcttgatcagggacacgcattttaatctggttagatccagaatatccattgatgaacgtcataagctcgtgtccagcagtagcatcaactaattggtcgatccttggtagtggaaagcaatcctttagacaggccttgtttaaatttgagaattcgatacaagttctccaagttccatttggttttgggacaaggacggttatccacagggatacctcacgtataaagtcgttactcaacaacttttccacttcttgcttgagtgccccttgtctctcaggatccaagggtcgtctcttttgtctctgggatgggaaatttggatcgatgttcaagtggtgacagataattttagggtcgatccctatcaaatttgagtggctccaggaaaactgatcctggttttccctcaaannnnttattagttgctattttagtttttaatctagttttttcccaatgaatacacactttgtggaattttctggatctaaaataacttatcctaattcctcgattggtttcaaagtgttttgttcatctttaatctgaggataaagatcctcatcttgcttcttgccttgtttagttgtgactgccattagctgatgaccgacttttctattctgtaactctatgtggtagcattcatgagctagtagttggtcacctcgcaccacacttacacctgttggtgtttgaaactttagagataggtgtttaattgtactaactgcccctagcccaattagcactggtcgacccaacagtatgttgtaggccgacgacaagtcaacagctagaaaatcttacattatggtagtggataaa

SEQ ID NO: 173041 - DNA, 657 bp, Cannabis sativa
gtatacaaattctctacttcacatagttagaaaaaatgaataatccaacctataaaatttgtatataatataaaacacaataataataaataatttttcttccctaaatctctaaataggaaacaaatttattcatgtaattataaaaaatataccattgtgatgagacaatatgtattcatagggttagggataagacttagctacataatcctagttgactgggtcggctcatcaaagacttcagttaacaagaaaagttcacacttctacttcaactagactttacacacagatgctaaactcattaaaaatttaatgtaagctcaaataaaagtctaaattttcttacttgggctacattaattttaatatacataaatcaaaataaatttgtttgaaaataactcatgagttgaacaataaaaaaatatttgtgaccactttaaaaatgatacttatatttattagttcttcaaaaatgtgttttaaaaaataaatgaaactataattaaatgtgacataatgtataagcactatgtttacattattattattgataatgtttattaattattaatctaatatatgtattataaatatatttgtgataatgttgtttatatacactataaatttttttatttttagtcacaa

SEQ ID NO: 173042 - DNA, 519 bp, Cannabis sativa
taaaaggcttcttcccatttagaaatccatgagacaaagttattatagctggggtatgatcaaataacaactccattgcaaaaatagcttcagcagtagggaaatgatgtaaccatagtggattggctagaacccgatcagtcttcgaatacattctttcatttccttgtctttttgttgttcctcgtgaaaaaactgcctctatatttaatgtcttcgagctgacattgctctacacagtcaataaaatcagtggctgtgttgtactttactcttttcccaactctttcttctttggacaaaatatcattaaaatcacccaaaaccatccaaggttctcgagtactcaaatgctttagatctgcccacaacacctttctcccttcaacttcattaaaaccataagcaaatgtaactagaaagtcaaacttaccatctaaagtagcaacttgcaaatggataagctggctggtacatttgagaatgttcaccgagaaactacacgggttccatgctact

SEQ ID NO: 173043 - DNA, 514 bp, Cannabis sativa
gatttttcgttaaagattgaaagccttgtatatttacttgcctctattggtcatccaatatcaggacaagatcacattgaggcaatctttaatggtttgtccagtgattgcaatatttttgttacctctgcaaacaaacgtctagatgcttactctgtagctaagattgaagcttttcttatggcttaagaagcgtgtttggacaaagatagtttagagcttgatattgctaaagtagagaaaaatttggctcacaccaaacccttcactgggggtagcggtaccttttcatcaccttaatggattttatattagagaagaaatacaagtataatataaataaatatgttatttatagaaatataattaacaaatatctgaaattttcatattcatattgttaggctatttttagcctatgttttggatccaatttatgtgcatttttagctgtgttgggacggaattacgcttgttttctatgttttcaggttctttggagtaaaagaggtct

SEQ ID NO: 173044 - DNA, 509 bp, Cannabis sativa
aagattattcataatatccaaaaaaattaagaaaaaaatttatgttcttacggactttttaagttttttagtagttttaatgaaattattattatttttatagaaatattaatagtttttttttttgaacccataaacagtttcttttaatagtataatataactgagcattgagcaagtttaagtgaattgataatggtttttttaagataagataagagatgatgttatgctatcctagaatgcaggaacggttgtttcaaaaaaaaaaaaaaaagaatgcaggaacggtatattgaaaaatacttattttatttatcaattaattaaatctacctttaatttatatttaattgaaacatacatctttttatatatattgtattcaaaatacactgacataaagaagtcacatatagaaagtatattgaagtgacatagacaaaattagtaaagtatttaaagaaaatgtaaaaatgatagactttaaaaaaaaaggtaaaaataaa

SEQ ID NO: 173045 - DNA, 770 bp, Cannabis sativa
tgggttcagttcattctcaacagtgtttcaccttagtataacaaaaaattttgtatcttacatgatcaacaattttaactcatccgacatggataagctaaaagctcaaatgtgtgcttatgagcggacattgtcacttgcaaggagggctcgctccagagttacagaaaagggcaagagaaaagttgaagatattgaggatgatacctccaacaatgctactactttgagttcaattttgagagctagaattgaaattgaaccgacaatagagacaattaaagaacaactgagcagacgtattcttttatgttctcactatggagagaatgagcattttaaagcaagatgtcccagacttctgaaccataagaacaaaggtaatacttttgtttttgaatcatgtcttttagagaatgacaaatccatttggattgttgattctagatttactaaccatgtttgctcttcattgcaggtgcttgaaacttgggattacttaaatccaagggagttaaagctcaaggttaggaatggaaaattagtatcggtccaagctagaggaaaagctcgcctcaagtttcagaataaattttgtttttagacaatgttttgtttattctaaattttagtagaaacttgattagtgtttcatgtttacaaacacatagttatcaatttaattttttgagttctatttccactatttctcataatggcattcaattatgtgttgcacacatggaacaagagctttatgttttaagacc

SEQ ID NO: 173046 - DNA, 505 bp, Cannabis sativa
ataaccttaataaaaaataattaggaaatttatgtagtacacccattacacttttaaagggctgttttggtaaatttttaaatttttttttgaatagtttaccgtactgaaaataaattttaaacagttccttatcaggcgtataaaagaaacagtcgcaaaatattattttggacattgtaaattattcgagatttttgaaaatttacagattgtccttaataactacaacgaatgtaattatgattctttagattaaaaatttctcatgaatgtcaaaacaaataaacagtttaccaaaatactttttagaggaatgcactataaacttacccaaaactttaaccactctttaaaataaaattacttttactattaaaaaattgacaaaattattaaatactgttttaaagtgtaaaaataaaaaaattcaaaattttattatactgcattttaaaaagaatctacagcatttaataccttatgtttattggtgaggtgtaac

SEQ ID NO: 173047 - DNA, 578 bp, Cannabis sativa
caaaggcagcaagttcaatcgaagctgatcgcctagacagagggttggttttacagtttaccaacgccgatgatgatgatgatgaagaccacgaactgtggttccatacccgccaatcttcgagacgttggttttgtttctataatatagtgacattttttaactcttgatatagatgatttttggatgtacaaagtatgttctaacgtgtatcaaattaattatttataatattaatgtttaaaaattctgacaccgaaaacacaaaaaattgaaaacttcaagtataaaaatattaaaaaaattaatgtttatttaatcattgcattgatatccaataggagcctttaatagtgggttttccattgggaaatttaagtttctatgcttcaaattacagttcaaaattttactatttttatcaattattcaaggtcggccctaggttaagacgggctaagcccgtgcctaaagctcactcattttagggactcaaattaaaaaaaaaattaaaaatttacatatctttttaataatttttaaaaataccattaatctttatagtaagggtctaaaaa

SEQ ID NO: 173048 - DNA, 692 bp, Cannabis sativa
aatttccgactttcaaacgccacatggtggccatcttgcataagcaccccacctatagcaaaatcagacgcatcagtatgcacttcaaatggcttcgaacaatcaggaagaaccatcacaggttctttggcaaccgcagccttcaggttttcgaatgccctttggcaagaagcatcccaatcccatcttttattctttttcagcagtttagtaagaggggctgctcttgcagagtagctctcaatgaaccgtcgatagtaattcactagaccaagaaatgatcataattcgggtacctttgttggcgctttccagtcttggacaacccaaaatttctcctcctccatcatcaaaagtccgtctctgattttttggccaaggaacatcacttcttttctagcaaatgtgcacttttcccgtttcacatagagggaattctttctcagggcagtgaacactagcttcaagtgttccacatgctcagtaagggtgttgctataaatcactatgtcgtcgagatataccaccacaaacacatcaatgaatgctcgaaatacttcattaatcaaggtgcaaaaagttgcaggggcatttgtgaggccaaaaggcatcaccaagaactgataagagccataccgagtcacacatgtagtttttggctcatccccctcccgaattctcacttggtaata

SEQ ID NO: 173049 - DNA, 677 bp, Cannabis sativa
acgggaaaagagccccaaggatcataacctcaaaatagaccaacctaaggaaggggtcctattgatgggaacaacaaaagaggtgaccccgagaaaggaattccaaaaaaaagagatccacatgcatatgatcccacgaggttattatgaaataatcgacgacatatgacacacgtgttaataaaggtgtgtacctatattgtcggttatttcctaataaccgacgtcatatgattaataaataaccttgaaagtttcccaacccacaactaactctgtagggtatagtaaatttttatatctacaatttttatacaataactgcctctaaatgttaatttttaatcatgcggatatttttacaccatgtagcttcttattattttataaaaagggtggaaaaaaagcctctaaaggcccttactcactacaagaaatgttacttttattagcacagttcgctactgcgttggtaaaagtaacttttgccagcgtatttcgcaaactgtgcaggtaaaaaggtgaaagttttaccagcgcacatttacagtggctaaaatctaacttgtaccagcgtttttacgcgctggaaaaagttctaataccaacgttgatttactatccccttttgccaacacatcaaaagtaaattccattttatcagcgcaataccaaac

SEQ ID NO: 173050 - DNA, 591 bp, Cannabis sativa
gagaatcttttttcaaatcttatacttggttatttttatagggtgttgttacgaattttaaattttgtaaaggctattattactgttaaattaattaattatagtatatgttggttaatttttaaatttattaattaattgtaatttaagtttatttggtttttatgtttgtgtatgttatgttatagtatggtactttttgttttgttttatttggtgactatttatggagcatttcatcgtcacttttggagttacttacataagataagttttttattttttatttttctttgcttattttatgattgtttcctataattagtatatttgatgttacaagatatctcctaagaactcattcttcgttttgttattattgtagggggattttctatcattcaagcagagaacaattaacttgatgggagtgctagactggtctctcttgtttgttggagctttcgattcatttatagtgtttgattgtttagctttgatctcagcttattctaagcgtgttgtaatgatttggacgctttcttagctgtttttgctagtttactatccagttttcctgaggcatcccta

SEQ ID NO: 173051 - DNA, 600 bp, Cannabis sativa
tattattattattattattattattattattattattattattattattattattaaagaaagctaaaaagtgtgatatttcaaaaatgatgaaaagtattacctaattaaactaaatttgtaattatcaacaaattttgaatattgttattaggggtgttcatccaatacaatccgcactattttgctcatagtacattggattcgcactaagcgtccatttcattttttggatccaatccaatccgcacaattgctcaaatccaatctaatccaatccacaaaagtgcggattggatcggttattttggattgattactttttaatattaagttatttaatatttatgaaaaaaatatttctttttcacattactaacaacaatataaaacaaattatagttatttatgtctccaacaatacattaaaataaataaaatagcaaataacaaattcaaagaaagaattattttaattattgtatgtataaagaattatttaattttattttaaattgtatatagaaaaaaattgtatataagaatagaatatacatttgatctattaagttttgaaatatgattgtattatatgtatta

SEQ ID NO: 173052 - DNA, 598 bp, Cannabis sativa
atctcattcagaaagtttcctctaagcttaatgtttggaatgaaaagcttttctctgaggcgggtaaagaaactctcataaaatcggttattcaagcaattccttcttttgctatgtcttgttttagactccctaaatccacctgtgcttccattcaaagcttaacagcaaaattctggtggggttctaatacaaatcacaggaaaattcactggaaaagctggtctaccatctctgcttctaagttttttgggggtctgggatttcgatctcttacttcccataaccaggcccttctagctaagcaggcttggaggatttggtctaatccgggttctcttctccactctctcctaaaagctcgttattttaagtctactgaccttctccaggccccaaatcgccataatccctcttttacctggagaagtctccagtggggttcccagcttcttaaaaaatgtctcatttggaaaatctgctctggccgtaatatccctatatctgcatccaattggattccccaaatctctcatccaaccctccttcaacccattgacccttctctagccactgtctctttttttgttaaccaaga

SEQ ID NO: 173053 - DNA, 546 bp, Cannabis sativa
ccaataaggcttctataggccgtgggatcagataggagattccctttatctttgcttagctttaggtttgtttccatgggagtagacacgggtttagcacctatgtagcccctgtcttataataattggagtgtaaaaggcctttgagagaccgaaatacctttctttgagcgaccaacctcaagaccaaggaaaaacttaatggttccaagatctttaagtttgaatttgtcatgaaggtattttttgaattgtgatatggcttggtcattgttgcttgcaacaattatgtcatccacatagattaggatggccagaaaaatgtcctttgttcttttaatgaataaggaattgtctgaaagagattgtatgaagccatccgaaatgagggtgtgactaagtttactaaactattgtcttgaggcttgcttaaggccatagatgcttttgttgagttttcacactgagttaggacgtgctttatatcctgggggaattttcatgtaaacttttgttgggttttgtgccctaaataaaacccattac

SEQ ID NO: 173054 - DNA, 697 bp, Cannabis sativa
ctggtgagttctcgtcttaagtcgtaacggaagggagagagtgagacaatcattccgtcttccagacgattctcagaccttctattgggttttactcaaaatattttattctctttctcaatattctcttattagaaaactaaaattaaaataaaaaacaaaaatatagagagttacatatataactagtgtgcaattccaagtttcattctggtgcaatgaggaattaataagttagagaatttactaagtaaattgtagatatacttattggaagctcgttatataggctcatagtgtcatactagttgagacaaactacttgtaagactaagttaattgattttagtttatcgattttaattctaaaattagactatatctagtttatgaatttttactatgttatgacttgattgtgagaaataagtttttagggttaatttattaattaagagactttgtggagtgaaaataaaaaatattattaatgacaattttatttaataattattttaattattaaataaatagttgacaaaaatagataaatagttgagaaaaatagcaaaaaatctaactagtgttgggcccactaatgacggccacttagtactattttttctccatttttattatttttttattccaaataaatcaaccctaaccctaagagaagtagtataaaaagaaaaga

SEQ ID NO: 173055 - DNA, 817 bp, Cannabis sativa
  modified_base (648)..(651): a, c, t, g, unknown or other
ggaaggaggaggaagaggccgagacagtgggagaagaagatccatacaagtctcctataatgtaggcttggtttttatttatctccttctttttttgggtaaggaaatggccctagagccgagacaatggtttgccccttgtggcactttttgtaaagaaaaatttgcgaagttggatggccaactttgctttttattttatcttcaaatgcctcgtacttttatgtttggaatttgacatgtacttgtttgcttgcattttattcacaatttaaacagtcatgttttgatcatacacaaatattttaggaattcccattgctcgtatttccctttgacattaagtagttaatagcctactacacgcgtgagcaatttatcatctgccatgttctcgatttgcgagcggtcattgattttgcctcgcaataacagttataatatatttcaactaattttgaatatacttttaatgatcttgttactttatatatattttttgattgcttacatgaatagttagattatctactcatgtgttaggtttaagtgcttttttcaagacacattgatgtctcgtttaatactttcttttagggcgagccgttagtattcaacttgaaatgcgagttatgagttatatctcannnntaacttttgattttcctttctcatcagataggtttttaatcaaaaaattataataattcgatccctttcttgtaagaaaggtttgatcaggaagttataacttataacagttcgacccctttctcgtcaaaaaggtttggtcagaagttataacagttcgacccct

SEQ ID NO: 173056 - DNA, 619 bp, Cannabis sativa
aggaaggactaggtgaggcaactgactcacatcaaattttgaacacttagagcatttttaaccacgctatctattttttagccatattttagctaaaatagctaaaaaaaagttaaaataaagagctttttttttataattatttttgctccaatcatgctttctattttaattagtttttttataattttaataattttttataatttaaatttgtcaaattttaaattaattcaataaaataataaaaaagtaataatgcttttgatttaaaatactattacaaaaatttagtaaaaaagttgagagctctctataactagagagctccttatccattctctatgatagggagctactttttctatggttgtagcttattttttgtaagctcactccctattttagctaaagagtgtgtttagagagtgttatcctaaattttttccacttgacggggcatgtctacgtggccattatcagcgccacgtggcagtacaactcacccacaaggaggttaagtcagcaccctagcgaacgggtggtcctagcactcaaacgggacaacgatctatagaccagcctgttgggttttgtgccctaaataaaaccctttaca

SEQ ID NO: 173057 - DNA, 598 bp, Cannabis sativa
gtacccgccccattaggggcggtaaccagcgggtacccgaacctacgtgtataattgccatccctacttatgtaattatccattttttctttcttttattatttaattgggataaattgaagaataccacttttttgtatccattaattaaaaatactttaatattatatttcattaaaatctacctacttttgtaagtagattgttgaatatactctcgtccaccacttaagtgtaccacatgatttacattaacctaagaggcataatagaatatcatttataaaagtgagtacatcttaaagaatatggaaatgaatgtgaaaattaaaatagataaaataaagtggatatacaatacaatttcctctatttaaaacttcccaagcccaatgttaatgaataagatgatattgtgtaatagtttcaataaatatggcatttttagaggagaagttgaagaatgctttctttttttatacaattgtgatgagacaatatatatttatagaactaaggaagggagttagctacataaccctagttggactggacctactcatcaaaggctttagttagaggaaattacactctatac

SEQ ID NO: 173058 - DNA, 1157 bp, Cannabis sativa
tacaacttctttcttggaaatgctttttggtggtgtcaggataccacctctgtatgttatgctgtcaggattagacaccttttagtcgttctcctagtccctgctttctagtaaggtctttgtttagaggtatgttgatgtatgtgtatccatcttggttgtctaacacgtctgttccttttgaaacaaaaggacttagttctttaaagaattaagcaggtaccaagttttccttggttgtcaaggcgcggttggctagttgaacgagtgtgttggttgttgtgccgtctttgggcacttgccttctagtatagcctttgagctatcttaacagcttcggtaggccatcatcttcttgtattgagctttatattcacctgggacataacctacaactgctgagggccgtggtgcatgtctaggttgttagcccaagcttcatgtgctagctagggccagcattcgaagcttcatgttcagcctcctcattagaagctttaaaattaaccttgttgcctcgtgcattagttgcccccaggtgccttaggggccaggcctgcatcgggtggtcaatgcacctcttggattcttgctctcgcttcttctccagctcttgattttctcttgaactctgtgaggttttggaagatatacttctatgattagccatgaagctggtgagagcttggcctttggtggccatgcctggttgtgaggtgcctttatgttggttgagtctcaatggttcacttaagtagttggcctgatgcttcaggtttctgtagaacctaccgcaattgttgattggtgtacacgtttatagggtgtatctggaagtatggccttagctttctgaaagccaagagcaagatgtgggttagcttctccatgactgggaaccgacttagtgtcgatcagtctcttactggtgtattatacagggtgttgtacactgtcttcttctcttgtgaagccagcactcatagcatgttctatgactgctcggtgcacgcctagctcttctttatccagggatttgggcaacacaagtggcagagctaatttgtttcttctgctcctggaatgcggttttacattcctttgtccactcaaatttgtcgttgcttctacttcatgttgaagaagggtacacattt

SEQ ID NO: 173059 - DNA, 503 bp, Cannabis sativa
tggttattaaattattttaaaattgtccaaaatttacaaaccaacatgtcgacatgaaggattttatagcatatgtttgacttgatgacaatacaaaaagcctatctgaatgttcgcaaatatcgtggaaaaaatatttttatgtactgctgcccaactaatagattatattgcagaggtgtagtcttaaataaattaaatattttatacctttcatataaagatttttttaattaaattaattatgcataccatgtctaatcatcttaaatgaaaataaataactatttgcaggaataccgccgctttatcgacactaccatattttcatcaacgaaaaaatagacaatctaattatatacagactcggctagaatgaaaagtgcaaaacacaaaagttacactattatctttgtcgaagtaaaggaagattaaaatccacccatgagtattatcttcaattatcaacaatttagagattgatttttaattttattttttat

SEQ ID NO: 173060 - DNA, 643 bp, Cannabis sativa
tataatcattcatgaaatatctaagctcggcagtactttaacgggtaggattggtagactcctgcttctctcgccattcaagaatttttttttttactttctcaataattatatagtttgtaattattttttgttattttaattattaaaattttaatgaaatcttcaaaaatttagcagaatttttatttaagaatattctatttaagaatagttatatatttttttaaatttcgtattaacaaaatatacctctatataagaataattacattttaataaatggtaaatagcgacaaaccctccaaaactttcattttagtttcacttaactcccaaaatctaaatttaggcggtaaaacccccaatactcgtgttctgttagcaatttaatacttccgtccaaatttagctgttaactgccaagttagattgtccacgtagacacaatattttttttcctttctttctttttctttttctttcttttttctcttttctttcttgcaaataccctcttctctttctttctctcgcagcaggtagcagcccaagacccaggtgctatctctctcgatccccccctctctctctctcagccatcttctctttctcgatccccccatctctctctctctctctc

SEQ ID NO: 173061 - DNA, 520 bp, Cannabis sativa
acttaatactaactaattttattgtattttctaataaataaaaaaaaactataaatatcaagtgttaagaaggtctaattaaatattatgattgaaaaaattaatttattttaaataaatagttaattataattaatttaagtaaaaaatagaattttcacctcctaataatctactataacaagttataaaaaaaatataagaattattacatgaaaaatataaattagcattttatttataaaaataccttcagaaaggtgtagacaataattttatttttaataagtttttatttgccaaaataccacctacacatatccattcctatttgcccaaaccatcagtcattacctttttaaaacccacgttcaaaacctacaaaaactacctctcagccataaccttcgccatgttcttcttctaactacctcctttatcaatttttttttatatatcatcttctgcttctctgttaggctatttttagcctatgttttggatccactttatgtgcatt

SEQ ID NO: 173062 - DNA, 565 bp, Cannabis sativa
  modified_base (322)..(324): a, c, t, g, unknown or other
gattatttttatgttaccaaaaaaaattatgtgtttttaattgatatttatattctaatattaaaaaaaaataggagaattactatatataaaaatatatattattttttgattttttttttgaaaaaattatagttgagtcatttcaataattgttagggtggtttttatataagttgttatgtagattttggttgcagaatagatagttccgttgattgatatgtaaatttttatgtagattttcgtaaaaatgtaaaaaaaatatatatatatattttaaattatagaaatgaaaaaactcaaaaaaaaaaaaatatannnatatatatatattatcacattctctttgataataacttatataatggttatttttaattttcatcattagttagtaagaatatattaacaagccattcattatcatatacacattaatgtggggaaaaaacaaatttatatcaatataaatttctatgtaatgtaaataataataataagggaaatttgcggcaaaagtcctcaaaaagttcacgttgatacagattagtccccaaggtcc

SEQ ID NO: 173063 - DNA, 736 bp, Cannabis sativa
aaaattgaaaatgaaactatagatgtcacttacaattgtagatagattagcaagtttaaaggcacaaagctttttatctggggcaagtttgctatggcccaaacgagcaagatggattgtctcaaaatcactagaacaaattaggcgtaaaatatcattgagaagactatgtttttgaagattgttcatagtaggaatcctattagacaatagtctaggtagaaaatggtgaataaattctatattgtattccatagtatatatttatatacaaagctagaagattaaataggaaactactaaatacaatttactctaaagtttacaattaatatacaattagtagtctaacactccccctaaagctggagcatagatgttaatcatgtccagcttgttacaaagataatcaacccgcacctcatgcaaagccattataaaaatatatcttaattgttctccagtcttcacatatcctgtggagatcaggcctgattgaattttctcacgaacaaaatgacaatcaatctcaatgtgcttagttcgctcgtgaaacacgggatttgaggcaatatgaagagcagtatgattatcataccataattttgcaagaatagaagtctttacccgaattcagtcaaaagctgataaatccatattacatcatacacagactgtgccatagctctatattatgatttagcattgtatttagacacaacattttgtttcttac

SEQ ID NO: 173064 - DNA, 520 bp, Cannabis sativa
atcttgccttctaaacaagattcacatatcggaagagttcaaacttttagctctctcaaaaaaccatcctttgttaacatgtttatcctgtctaggcctatatggcctaaacgtagatgccataaatacatttcatcatcatcagaaatcttttgcctcttctttgattgaaacaatgttactctacaattcattatttaaaattaattgctcacttggcttgagcacataaagtttgttactctcttttgcagaatacataggcataccattcttgaaaataataatctctttattaataaaattaatattaaaaaattattcatgcaaaagagataaataaataatattctcggtacattcaggaataaaataaacattgttcaataacaaaaatttattattaaatttcaagtggattttgccaacacccttggcagacacttgtgctccattccctacatgcatagtcccatcgacaagctcccttgacgattcaagtatctgcatagaagaacaa

SEQ ID NO: 173065 - DNA, 574 bp, Cannabis sativa
aaaacttatctttaaatgtcttaattttcttctttagggactgagatggctaatgtaggttctaatggcaaaattgagtagatcgcttgatctcaacgtgattgaaattctcgcttctgtgtacaaatggatgtgattttcgatccaccaaatggaaaatccttctcgattgaagtgggtttctttgatacaattctagaaatcaagcaaaagatagagaagtaccacaccatacccatttcaacccaagcccttgtcttgagtaataatcgccaagttctccgtacgagggcgactatgaaatcttccaaaactctcacatccgcctcattatcccctccgattatttataagaagatagtgtataaagtataatgatcaccatcgcctacattgatctttcatagtagtgataaattaatagtaaattgtagcaccaagcaagatcttggaaagcctaagacatgaccacatacgatacttattattattataactgatatattaatggaaaataacctattttcaatgggggaggtaagaaatttctcaaaaattaagagaaggtgaaaaa

SEQ ID NO: 173066 - DNA, 687 bp, Cannabis sativa
ctggaatgtggatcaaaccatctgtagtatggttggcttaatctcaaaatttttggcatcaacggtaggtggccttatactggatctggcccctgtcaagttaggcagcaaatagtccctcaggttacggtcattttgattgtgaccattagcctggtcttttacaacacctccattattactattattaccattgttgacgttgtcagccatagctacttcttgttcaatccctattacaactctttctaatattttcctccttctgttctgtttgcaagtcttctcaatttcagggtcaataggcaatctggcagttgctccttgacgtatcgtaaactaattgttcttgagaaaagagaaaaatttgaaacaaatagaattagtactgaaattgaaaagaaaaaaccaaattagaataaatttttttaataatattaactaacaatccccagcaacggcgccaagaaacttgttgtggtaatttcagcacacaagtgtacgtatcgtaaacaagtaatagactcacaaagagtgaggtcgaccccacaaggattgtaattaagtactttaaaattaaatctttacttctatgcaactatataaaatttaagataaaattaaaactagaaaacaataaaaacaataaaaacaagaagcaagtaaattaataggtaaattaacgat

SEQ ID NO: 173067 - DNA, 546 bp, Cannabis sativa
  modified_base (286)..(292): a, c, t, g, unknown or other
cgttgtggcgaatatcaatgagttgttgactaaggctttttcttgaatcacatcagataacttgggcctccaatgaactagccgaacaatgttttattatgttgggtcatcatgagtttgaaatgaaatccaactatccaagtaactagcacaatggatattgaatatgactcacgtgatggtgagatagggccttcatgaattaattaagtcttggatttttgtaaagaggaaattacacttattgggattttaaaagttgttatgataaatatggcacatttannnnnnnccaatttatatggtattttttttgtttttaggtctttttatggtattttatatgccatatatatgtaattaggttttcaaatcccatatttaatgtttttagttatttaggaagttttatttgtcattgatgccgaaaaagtcaacggagtagcggtcggtgccggaaatgtcgtcagagttgctaccggcgccgaaaaattcgtcgaaattgacattgtcgccggaaaaattactgaaaaaatcaccaagaaa

SEQ ID NO: 173068 - DNA, 687 bp, Cannabis sativa
atagtaaaggttggttgatcgaggatcgaaccacatttaagatgggcacggttgaaccaatcttggctgaagcaatcagtgtcaaggaagctctcacatggatatagagacagtagtgggagcatgtaattgtggagagcgatagtcttggggtggtgcaagcattacgtagttctatacatatgatttctttgtttggtcaagtcattcaaagctgtaaaaatttgcttgctgaattgtgtactgttgaggttatttttattaaacgatctgctaatgtagtggctcatagctttgctaggactactattttgtatcctgatcgtaccttcaatatggagtctgttcctactgatttgttaccttatttggtaactgagtttgttggttaataaagtttaacattttctagtaaaaaaaaatggttgatttgggttatctttcttcgatctattgaggaagatgagagagatcttagaagtgagcatggccgagatagagacggagaagacagggtgtcgcgaagtttttggtcttacaataaagggtaaatagtggcataagtacccaaagttttaggtttggtagcggtaaaatccaataattttttttagtggcataagtacccaatgtttataaaactgtaattttcttccagtttcatcagtacagactatgttattgtct

SEQ ID NO: 173069 - DNA, 622 bp, Cannabis sativa
attaaattaaattttggatggaaatgtgttacaattgcttgttattttattaccataaaataaattataaaataaagtttcatcgcatgatacaaataataattttacaacagtaatttaatgggtggtttaccgtagaagtgaaaaaaaaaaaaaagccaactaagagattggaaggggtgcaccattccaactagtgagacattcaagcattggatcgataatttttccttgacacattgcagtgaataccttgtcaaactcctctcctggtgatctaacattctctccagtaagcaaactagtcttccaactcctccctcacaaacttgtacaatggataagacctgcactttttgatcttgtttgatatgtcagcatttccactttcgatagcattccttgcactttcaacctctttaggcaaaagggttttcaattcttcctcaaaagctccaatcttttggaagattgaagtgtttggattcttctcaccttcactattaaccaaagcttgttctattagtacttgccttagtttctgcattaaaggataggtagcactgcagggatcatcaatgtatgtgaagacgtattccctatccacaactttaagcaactc

SEQ ID NO: 173070 - DNA, 588 bp, Cannabis sativa
ttggccgattttgatggctccctgcaatcgtggattgcagacgcctgtgttagtgaactttggtagtttagttagttatttagttagcttgctatttttgttgtgtccttctccttttcttttctgttttttgttttagccttgggctattgtttctctgttctggagtttctttctcttgttgtttctccctggctgttatgctagtaatcaaaaaaaaaaagttaaatgttcaatgtatttaaatttttatttgttaatatatgttgatggttgtattacataaagtataatagtaaataatgaaataacacatgcaataataataataataatcaaataaaaaatttgtcaaataaaaattgaataataaattttgtcaaataaaaaaatattataaatagatgaaaaattttgtactaaaaaaatatttgaacaattcgatttatcgtcgatctcatccaaattttatagtttatgataactttaattagaaggtgcttcaaatgtactatgaacgattgaattgctacccttgtaaagacatgatttttaattatttattattaatttaacttttaaattaat

SEQ ID NO: 173071 - DNA, 570 bp, Cannabis sativa
atcgaaaagacatttaaatgaaaaaaccaaacagttgtcgaaaacctatcgataacatgtcgacatacaatcgacaatatcttcagaaagaaaaaatacaagtcgacatactgcaaaaaataatgtcgatgaacaattgtcgacaacctatcaacaaatttgtgaaaaaagacaatgaattattcaataacaaacaatattaattaaccgttaaaagtgaacaaaatatcgacatgctatcgatatcctatccacaatgcatcgataaaaaatatataacacagtaaactataaaacaatgactaacaacctacgtaaattactactaaccaagtaatcacaactaatgacaatcaataatcataaaaaaaaaaaaagttaaaaaaaatggtacccgagtctctacctcgggcaaaggagcattttcgacatattccgctgctttttctgcttgtcttctaaaaacagctgggtcttggatgtcctcctcagcctaggtggcatccacaccatcatcaaccaagttctccacaccatcgtaagagatggtcctcacatattcctcctctt

SEQ ID NO: 173072 - DNA, 703 bp, Cannabis sativa
  modified_base (378)..(382): a, c, t, g, unknown or other
ttattaaattaaaaattcaaaaaagggggaagtgtttggagatctccctttcttcttgtctctctcgtccatcgatcttcacccacccctcctcccgtcggtctcgctttcctctccattgcatacgttagaccaccaccacctctcgtcggtgtccctctcatctccgtctcatacgtcggaccaccaccacctcctgtccgtctccctctctctctttctctctctttgagctcggtataaatacatttatttatttatatacttatttatttattatatatatttattttattattgtataaacataatgtgttttaaagttagcttttattgtaataaaattaattagttattttattttaatttaggtaaaannnnnaaactaatgcaggaaaaaatgggggaaaatacagatttttctgccattaatggaaaaaaaatgtgtatttttttctcttttttttacaaccttggcggtttaagacgtcgagaagtccacattagcaacagtttttaaccgtcgtctactttgcccattttatggtggtcgtaggcaacggttatagaaaccgacgtgaatactttaaacaattgttttaaaacgtcgggaaaaactatttttgtagtagtggttgcatggttcacatgatttatttcatgattatgtttaatgtatagattctattaagtctagaacata

SEQ ID NO: 173073 - DNA, 648 bp, Cannabis sativa
  modified_base (537)..(553): a, c, t, g, unknown or other
  modified_base (602)..(613): a, c, t, g, unknown or other
aagttaattttctcaaatctatctttcaatcctatcatgtgtatatttttgtacatgttaactatcctatttgacacagtattttggatgaaagtaaagtttctgaattttactactaaaaaatcagtttgtggagttaaataagaaaaatagtataatgtaaaatccagcaatttatagttttaaattctaattaatttagaccaaactatttgagtagttcggtcaatatggacaaatagaatattgatattgatttaatattatcatgagaatattttttattgttatttatatattataaacttattaaaagtaaaaaaaattactaaaaaaataattaattattataaaaaaaataagaacaattatgaaatacaaatcataattttgaaccaaaccaatttattctttagtggatttatttggtttcctttgatcattttagttttgaatttcaaaaaaccttaatggtttggtttgaaaaaactcaaaatcctattaaaccaatccttgtacagtagaacctctatttannnnnnnnnnnnnnnnnaataacctctaatttgttataataaaatttgggtcagttataaataagnnnnnnnnnnnnattgtaattagttatacatttttaagtctcgtatt

SEQ ID NO: 173074 - DNA, 699 bp, Cannabis sativa
  modified_base (221)..(222): a, c, t, g, unknown or other
tataactgggtaaatttttaggcagaatgtagatttttgggtttctcaaatcaccaacttcaggtttgataaatttcatctaagaattgggattgctttcgttttgcaacaatgtcccaatctggttcagaagtttatcgtccagaatacttagaaacagagtgccctggtgaacttgccatcccctataaacccagaattttagaacccaaatccaaatnngagataaatgatgcaaaaattaaggaacacttagtaaaaacccaccaagatgacatttccagtcgccacagacgcttcttgcaagaaattacagaagacaaatgtcgtttcttgcgagatgctgcttggcctgaatcccccaatttatcctcaattcctctggctaggcctttatttttacccagagtaacaattgcttttgagtcaggtgacctggactttgaaatcatgacctccaagcctcgaaaattaaagactccgtaggatcctaacgtcaccttcgaggctgaactgatagagtcgaaggtgtgagccatcagagattacgtaggtaatcctaaggacttgtgttattaaatataagcgagaatgctgggttagatcggtggctgttggtgttgggaatactttaccaggatttaaatttactaaaaagtatgtcgaattaacatgctaaatatgaattctctaaaacaa

SEQ ID NO: 173075 - DNA, 607 bp, Cannabis sativa
aatccaaacatgcatgaggcacaacaaaattgaaattatgcgcattcatctcgttttgtacctgtcacttccttgaacaacaatatatatatataagcacacatatttaacaacaataaagaagtgacttcattatcataatgcatgttcttaacaaaacacaagccataagcaatctgtacaaaatactagcatgtacataaataataaactcccactgagcttaacaagctaggctctcaacaatcccattcgggcaatatgttctaaggatacacatatgggtaagcctttcgttagtgagtctgctaacatgccagtgttaggtgtgtattcaatggaaataagagactttgtaactttctctttaacaaaatagtactttatgtcaatgtgtttagagcggaaagtacttctaacattttagagaaagctactactacagaattatcacaatacaatttcagtggcctcgtgataaagtctacaacatctagtgatgaaatgaaatttttcagccatattgcttgacaagtagcctcataacatgccatatactctgcctccattgtggatgaagctgtgagtgtttgcttgacacttttcc

SEQ ID NO: 173076 - DNA, 546 bp, Cannabis sativa
taatctaacttgaaataataatttaaaagttaactactcaaaataggtaaaaaaaatttattattattattttatttttctttgaaaaaatagctaatttgtattttgttggtatcataaagaaactaaaaagtttcatttttgccttaaaaaaatgaataatttcaggaactaaatttattacatttttctactttcggtagtaattatattgaatattatattttatattgacatggcaccattatttctgttcatgtattttttggaagtattttttatagttttttttttatatatatatattttgatttaagcgtttatatattacaaccatattttacttgggattcgaactcaggacctccaacacacacccacccacctatggtcacttgagctagcctcaagcctgaagtggtttatatatatgtataatcaaactaaacataatatttatctatttattaaaattttactatgagttatgacataatacttactaagtgtaatataaacactataaattattcacaccatgaacaa

SEQ ID NO: 173077 - DNA, 535 bp, Cannabis sativa
tttcatagcttgaattgggttatacaaatggagctacaaattgcagaagttgaaactgacgctctaatggttttgaatgctttgaataggcattactgtactatttctacttttaaagatttaattgtagatgtttctagtcttttgtcaatctccctagagttgctattgtacatatcaagcgtaaagccaatatggttgcacatgtgttggctaagtatgctatagagttggatgaagctaactgttgattggagaattttcctccctaaatttactctgatgttgtaaataaattcctttaatttataataatggggtgttttctctaaaaaaaaacaattctattaaaacatgaaaagataaaggacaaaaagcaccttttatacataccaaactgaaaattatacgtatttgcttacacagattgacagaatagtgtaaatagaatgtatttaaattcatatgaagaaaattgtaatgccctaatctataaggacgccacgtgtgtgattttataaactagtttaatact

SEQ ID NO: 173078 - DNA, 557 bp, Cannabis sativa
gatgtattattcaacaaaataaaattttggaaatttggaaaataattttctggattgaacccccctttctagccgaccctctctctctccttcacctcacttttttaaattttgttgatttggtggaaagtagcttggatttgaagtagcttgtgcatgattttgtttagagaagcttgaggtagctactttatctcttaattttttgatttaattgatgaatgttgtgttaatcataggtgtttttgaagctctttgagtgtgttttggtgttcttgtgagttgtttatgcatgttgttgtgattttgaggcttagtgatcatttttgtatatttgagcttatggatgtgtgttatttgcatctggtttgttttgtatgcttttagggatgaatataggatttgaattttttgtttttgatcatggaattctgggtttttccttaagatttggatgcttgagttttcaagctttgaattaggtataactttgacatgggtgctttaaacttgaatttcttgttcttgtacttgatatggagcttggttttatgctt

SEQ ID NO: 173079 - DNA, 520 bp, Cannabis sativa
tatggccgagatagttgcctaattattcccgtgaagttaccaaaatacccctggtctttttatcaattccacggtcgtaatgataaaattttcactaacaagactgctaatctctttttttaggggatccttatatgttggagaattttagtttaaatccttcttttttcataattaattgttcaaatattgttaaaccttcacctttaccgcctaagttaacgacgcattcttcaagaaacgacatttcaatttgtttttcttttaagtacaaaattttaatttgtttcttcttcgtgtttgtgccgtattaaaaagctcagtccgtatttacaacactatacataagtaaaaaatacccccaaccgaatttgattactattatatttaatagcaggatgagaaaaaaaaatgagctaactagtcaatgtttaaaaatgcgtttttgaggcgcgcctcaagctgaggcgtttgaacagtgtctcaaggcgtgcgccttgctgagaagaagtgaggcgta

SEQ ID NO: 173080 - DNA, 517 bp, Cannabis sativa
ttatccataaatcaactccaaattaataaattacaaaaaaatcaagaaaaatactacttttattaataatgtaaaagagagaaacatataggaggagtgtttttaattttttttctaagatagagaaaaagtgtaaaaaaatatgagaaaaaatgtgaaagtaaaagaatcatattttagtaaatgttcaatgaaattaatttagatttttttttttttataaaatgtgattaattaaaaaaaaatagtatgaaatagtttaagcgtgaatactctaagaaaatataaaagagagaaaaatattttataagtgtttgtatttttttttaaataataaaataaaattttgtgagaaagtgaaaaaaattatgaaaaaaaatataaaaatgtacacttattatatattttttaataaatatataaagataaaaaaaaattgtatgggagagagaaaatttgaaaagagaaaatgatagagagaagagaaataaaaaaaaatcagccaagttaacataat

SEQ ID NO: 173081 - DNA, 959 bp, Cannabis sativa
tcagcttttggctaattaatgctccgactcaattaatgcctcaaaatccagttttctctcaccatgtttgacagttacacttgattatattaaattcaaaatatttgcttttggggggaaccgatacgtctaaggcatttgaaaggattacccttctttcatctttccgcctataaatagggttgtgcatccttcacaaattcacttttaccacattctccattaaacaaactcagagcaaaaaagaggttttcacttcaagtctgtcatgagatttctacaaaaagcatccgaacagctttatttggactgaactcaggcatcgaacagtgagtaagttttcaattccttcttcttttttactttgcatgtataatttctgggtttcaaatatgcgttcttgaccttgctgcagaagataggtagaaaacctaggtttaaaactttgcaattttctttataataatctgtgaagcttcatgattgaagacgttggccttttgatcgctcattgtctatctttcaccttgcttattcgaatcttcgtgaaatttttccctaaacccaaaaatttcaaacttctaggttttgacttgtttttgaatattttcattcttttaatctgttgagtactcctggtgggcatattcttctgtttattgttcgatatcctgaccaaagactcatctcgtttgttgtcttttgtagatgaacccttgtgagttttggggaagcgaaccccaaatttaccaagacttgcttcaacttgtatacaaggaccaccctcgtcttcgtgccagtctgtcctcttcaagtgacagactttccaattcatgccttgaagactaggaagtgagtagtgaacactcttttactccagaacctgaagtacaacaccactactactccgagcagatcgttgaagagggatacgaccgcttcatttgggagttgaagaa

SEQ ID NO: 173082 - DNA, 784 bp, Cannabis sativa
ttaagtatgcttttaggaactcttttggttgctacttgatattagtcagtgaaaatgcctctagtctctagtgccttgtaacctagaatcactttttaaagtcctttgatagttgttcccataaagttatgaaatggttggtggacttgtcgaaccaactgctcacagctcatgttagagaagttggaaataaagtgcatcacaagttatctaaaacattgcttgctcgcattattgtattgaaattgttcaggtgagccatatgatcagttgtcccatcatattgcgtgacattatccttgaggaaattaggaattcaagatatttggatgaaatggttctgtttcctcatctaagtcgtatcctgacagttttccatacactctatcctggtatcacttgaatttatcttccaattgtattactagtaaatgaatgggatccacaggctgttgatctactttttgattaagttggttacgtagatcgggtgcattttgatttaaatgttcacataggtctagttgccttagatttaatcgttcacggaggtctggttcacgatgtttctaatcgtaattactcttggatctagtccctgagtgacttttagattggtaactacgtgagttactcgtactttcttaatctgtaaaataatgtcgttacctattcctatcttgtatttgtctatgagtcccagttgacctacagtgtctgtgagatcgcgactaccttgtacttgaactagcttcacgtgactcatctcgcattggccttcttc

SEQ ID NO: 173083 - DNA, 527 bp, Cannabis sativa
tcaaagtggattgttgttgtttttagccacatattgagtaacttaaaaaaagtattgattattgaagccctttttggtgcaacgtagcgaccttgtttactcggcctctctggtttttttctagactgtgttcgaggaccaagtaattctttagagacttgtctttttccactcacaagttgcttcttctgcattggttattggggcgttgcctctatatggaaaacaaaacaattaagttagagtttttcactaatcaataaatatattaagttaagagaattaattaaaacatacaaactctattccaactggcgtaatgtagtccttcggccatgctacataaagtcctatagcatgacctacactggtgtatgcatggtgaacgacgggacatggaagaagggcattttctacatagacttcatcgatgaaaacccgacgataatccttgtagaggaaatcagaaccctggaccaagaacttgccattcttcaaatattgctccttcaccatgaatcccttag

SEQ ID NO: 173084 - DNA, 621 bp, Cannabis sativa
aagcacttccattatagcgatgtcggagggccagatagcgtattcctagaagataattctgacgtccctttttattcaagcacacagaataaggaattaaatgttcctcaaatctcgacagatgatcatatcaatataaaaagggaaactacctaaaatagagatcaagcaattaattcataactaattacccataattataggacacaaaattgacaactcaattgtgtctattttcctagtcagtagatcagtctcctcatgggccgagccttacgagaacagcctaacttatgtattttcatgtaaactccccattagaaggaaaaagggaaactaagtataattctcttaacagtgtaaatacccaaaaaaatccttcagattagggttgaactcttgcaatgttttcttaagaaaaatttgagaacttattctcattatattctcaaaggcttttctagctaaaagatacataatagtatcgactcgtctactaaggcttgttaacgccccactacgtaaaaaatttgtgtgttgttctaaattatttctttgaattattcatttctttaattctaatttattattcttagtttttttaaaaatattggtaaatat

SEQ ID NO: 173085 - DNA, 657 bp, Cannabis sativa
tcatatctctaatatatataaatatatataaatatcataatattttttgggatgttgtgtttgcaggcggagctacgacaaggatcgccggatgtgatgcacgaggctatttttagaattctctgaggtatatattatttaaacagatcaattttttgagtaacaatttgcatatttgaaacttcatatttataaactaagaaagaaagagagcttgggtttttcttagaagccgctcggttttggtccaggtgtttttgagaaaaagacaattttgaaattgaaatgagaaggtggattaatattgaagaacatattaggacaccattgacccaaatttagagaagaaaatggtagaaatgaaatatttatgtgtgtatatatatatatatatatgtaattctctctctctctctcataaatatataaaatagttttagggtaaatagcagtataagtaccaaaagttttatgtttataagtggcataaacttaatgtttatttttagcggcataagtacccaatgtttgtaaaactgtaatttaatttctctaattttgtcagtacaaactgtattattgtcttcaatagggcacatataaggcctaaattcttgattattgggtctaaatagaaatatgtagtatcaattactt

SEQ ID NO: 173086 - DNA, 997 bp, Cannabis sativa
  modified_base (479)..(491): a, c, t, g, unknown or other
ggagaaggtgacttgatctcctctaagttttcttttccaaatactcatatatcattatttatttttattttaaaatcaactaataaaaatcagatttattaaatacaatcttacataaagacaaatatcttaaccaataccatttagccccctaataaaattcaatagctaaaggattaacaaggctagtttggtcaattctaaagcttaacaataaaatcccactattgacgtaccaaaacataccaaatgagactctctaaaggcccaacgtcgttttccacagcttccgaacataaccatagaaattacgaaatttacataaatagcataataaatagatatatattaacttaaataaattcccataatatgcatattataaataatatttaatctcataataaaccctagttattaattaacccaaagtgttaatcataagcggtctttgcaattatccccccgttaaaaggatnnnnnnnnnnnnntctaacctgaacaactctggataatgagctctcatgtcatactccaattcccaagtggtttcttccactttactatttctccaaagtactttaatcaatgctatgattttgcttcgaaggaccttctcctttctatccagaattttaactggttgttcatcataagacaggtctggttgtaactccaaggcttcataactcaggatatgcattgggtggtcagacacatacttcctcaacatggaaacatggaatacattgtgtacgactgaaaatgatggtggtaaggctatccggtaagcaacctgtccaaccttctcaagtatttcaaaaggtcctataaatctaggacttagcttgcctttctttccaaaacgcctgattcctttcattggtgacatgtgcaggaagacatgatctcccgactgaaaagtaacatcccggtgcttgggatctgcataactcttctgccagctctgtgaagcaagcattcgagctttaatctt

SEQ ID NO: 173087 - DNA, 586 bp, Cannabis sativa
ctctacgcttcccagggatggggctctccttctctccacgaggtcgtttggttcttcgacctgaagtctatccccaagcaaggcaggtcggggtatttttatttctctcagccaggcttcaagtggttgagcgggacggacaacaaggccatcagcaaaatagggcattttgttgatgagtacttcatggtgaaggatcccttactcggtttcagcagatttcgacatatcaccctcctcccctcacccttactcttagggatagggctcagaagcttgcccggttgccgacggaagacagggatattatccagtttacctctaatgcaaatctggtgcaatacgggctctacccagaggacttttcttctaagtctgtgacggggaagaagaggaaatttgctgctgctcagcctgaacgacctcataaggagaattagttgattcaacttaagcgagaggctaagttgaagggagatgctcgggcagagaattatgctcaggagtccatgaatcctgaagatgaggccgaggctcaggctaaggctgaggctgagcaggtggctcctttgaggaggaagaagaa

SEQ ID NO: 173088 - DNA, 725 bp, Cannabis sativa
ggtaaaatatttccaacaccaaggccttgtcctcataaaaaaattccctcaaaacctcatcaccaagactgaggaggatggcactgtgtgccttggcttcaatctcatgtttcttcttctcgtcttcaatcaattccatggcttcagcatcaagtgcctcatagatccattggtgaactagaaaggcctttattttgattctccattggctgaaatcatttgaaccaatgaacttgtccaccttaaaccttgttgtagccattcaaaccaagttcttaattgcttgaatttgatatttgaaagttcgagtttaattcttaaattgttgaagatgaatcttgattggttgaatgtgattcttgaactcaaaaccctaatctctaataccatttgtggtgaataatcacattcaaaacactgttgttataatagtagtgatgtttaagaacacacaaacacaactagaaccaatcacaaaatttaaaactagaacttagatgaaattagacaaaaaataaactcagctcgagaatgaatgaatcatggatctttattgatttaatagtcagtaatacacaatgagatctgtccaagaatacagctcagcacaatgaacaattacaaagaaatgtctcacagtggaggaagtcacttcaagagtgatactcccatgatatccttccacacacacactcattgtgatcttgaactctctctctctctct

SEQ ID NO: 173089 - DNA, 519 bp, Cannabis sativa
ataaaataaaaaaaatattattctcttttctttttatattaatatattgcaatttaaatttatgttataaatatctcttctatttttatcattaaaatgttacaattcaaatttaaactcacatatctctttttatcttttatcttatattaaatgtaactttatacttttttaatagtgcaattcaaatttaaacttatttcacatatttataatttttttttgcaattattatttttttactcaatccacatatcaagaaaaaatatatttttattattgtttttttaaacaataaaatataaaacgtagtgtttatatttcttaaagaatcaatgacgttactaataaaatattttttttattaatattttataaaataaaataaaataaaaaaatgtatgatatttctaaaaaaataaaagtgttataaagttaaatggactaaaattataaataattaacaataagttttgaatattattaattattaattttttaattttttattatttattt

SEQ ID NO: 173090 - DNA, 579 bp, Cannabis sativa
atctacttcagaatcctcaatgcacaagtacggtgacattttgtttacagaatcataatttatttatttaataatttgtggtatatatatttaagtttaattcttaattgtaaaatgaatatttaaatttaattgggattttattgtaataatatataagttatattttaaaactttgtaggtacgttaaatatcaagtcattattcacatgtcacttttttattcgtatatttaaatttaggggtgttcatcaaataatcaatccaattcaatccgcaaagtgcggatatctacacctgtgcagattggattcgattggaaaatttaaaatccgcacttgtgcggattaaatgttgattgacatgtaaaaataaccgattcaatccaatccacacatatttatatactagcaaaaagttacgtgcgaggcacatatactaaaatttatgctaagtattttttactttatgtaaaagtgaaacaattaaaatttttaaaaaaatattattagtgattaggtgagattattattattatgtatatctaaataatataatttataattttaacaattaaaa

SEQ ID NO: 173091 - DNA, 529 bp, Cannabis sativa
taaagctgtatgaagtatttaatggaagttagaagaggaaattttacgtgattggggcattaatgagccttagtctgcgagtcattgtatttatgaaagtatttattacagaactttttcttggatgtaccccatttctatttatcattagggtacttatagacgcataatggtggtaaaaggccacaattatcgtgtttgtttacaccattcttgacacagtttcccaaatctaatttagggcataattgcctattttatgatgggttttaggctatttataggtgtttggtgggatgtgatttatcccttatttatgactcgacgacttatttatgcaactgtcgattgatgtatgggggctcgtgaaatcagggaataatgagcttaaacccttaaacacatttttctgaataagacgtctgacgttcttccccatgctacattaaatgcatacacaatatcttggtcctggatgttggaaatattttaccaggatctagacttactaccatgtatgtttcattaa

SEQ ID NO: 173092 - DNA, 546 bp, Cannabis sativa
tttttaaaagaaattcctgagagtgattgccattttttgcgacatgcagcctagccaaaacctcaaattgtaacttatatccctttagcgggaccttcatttttacctcgagtcactgttgctttcttaccagatgacctagattttgaaatcatgtccacggctcgtaaatcaaagacccccaagatcccactatcacttttgaggccaagctgattgaatccaaagtaagagctattgaggactacgtcggcaatgtattaaagtcttgtggcatcaagcaagagcgaggatgtcgcattagatccattgctctaggggagtttagctgctttccaccagaaagggtgattcgagaagaatgtggtgaagccaacactatttcctcgtcagggattgacgcttggagcctcgagcacatcaaggctaaagcagtacttcccttgagggaatactttaaggagttttgtaattatctcggaattgctccttttcaattaattctgacatcttacaaaattctggcttgcctaaaggtcctatacc

SEQ ID NO: 173093 - DNA, 785 bp, Cannabis sativa
ggccctgccactttgatccgctaggatgcttgcgtcaggttggtcacctgtggtggccagacttgttacgcgtgttgtggtgatgggattcaccacatctgtagtactcatggggattctagttgtaactagaacgcgagtgtctggatctgcaatttgtggatcttgagggagacccgagatacagatggtgcgaaatgagttcttcttatgttcaccatggcgtttgatcacatcacgatatccacgctcttaatgaaagcaccaaactgttgaccttgaaaagtgatcaaccaacaacaaggtcatgcaaatattatgcttgccaagtgtgtgcacaaatacgaataaagcaatagacaacgggatttcttatagaggttcggcacccttgtgatagcgggtaatgacctactcccctttaacttgtattacactaagggaattactatcaagattactataggtgggatctgctatagtaccctttggattacaatgtttgaatcgatgtttggcagaactcaagtgttggatagcctaggatgttagacagcctagaatgttggacaacctttgttaatggagagcctaaggtaggcgtgtgggagagagtaaggaagagagagagagtctgacacttagagagtgtgaggtttttagcttagaggcggcttaagcaacttaggttttcagctagaggttaaggcatttatataggaagccttaaaccctaggtgtataattcaaatccttaaaaatagtagtgttggaaattattttac

SEQ ID NO: 173094 - DNA, 634 bp, Cannabis sativa
atatctagacacaacagtctatggtctgaagtactcgtttggacggaacagagaataccttttggaaacaggtgaagcaaagctccattcacaatgcctttatccagggcagatttcacatggttcttgccagaccggtgattatcccaagtcatcatatccccttgaatgtgcatattgattaggtcacgggactccacaaggtgagaaataaaagggataaaggggtccctgcccaacgacacgtcctgctcaaagggattaaggacaaaattagtattaccaaaaatcaaccaagaaccaccaaatctatcccctagagccatgatcttagaccaaaattgttatttagcatggttgtaaggcggtccatacacacacaagaggagccaagggtgggtagggggtccgaatagacaagacctgaaatatggttacgagagcaagagatacactcaaaacaaaagccagtcttccaagctaaaataatatcctcagcagtaccaataggcggcacaaaaatattaaagtaaaagtggtgagctttcagaatacgtaccaggggattagcacccaccttgagctcagtcaaaaaaaacaaaatcaggagagcgcgatctgagcagggacttca

SEQ ID NO: 173095 - DNA, 837 bp, Cannabis sativa
agtaagcttactatttattaattattattacttggccatgagctaagttagatctggttctagaaaggctagatctagtagttaccttgcataacttaagaattgatgtttagttgttgttctgcaacctaatttgatataggaatatattgaactaagttgtagaacttaatttgtgagttttaaaaaattctcataaaaacaagaaaaattatgttaactctattcaactttactgaagtaatgctgaaaaagatttagttattcaagtctattattctatagatacttttttttgtagataattttccaatatttgttgtcttagttcgagtttattttcattgtcaccaatttattttactttcatcaatcatatatatatatattttttatttttctttcaaaagaccttaagttgttaattagttgagcttatatttattttaattagcaattccttgtggagacaatactcaacttatcattatattacttattgtcgattgcgtgcacttgcttataaatacaattttcacaacaaagttcaacatggtagttaacacctaagaaaatactaattttgagattttgctgccaaaattaaaatttgaagattaattgctaattaggtgaaactatttgagattttgcggcaatctattctgttttctttttttttttttgaagaaaaacgtatttcattaatagaataagttagacctcacggtcattacataataaatttaacgggatggtagatagcgggatatcaccaaataacttgtgggtaaacgcccacttagccacattatgggcaacaaaattacaagtcct

SEQ ID NO: 173096 - DNA, 941 bp, Cannabis sativa
gtctttgctttatgtgcttattttctttttctcttcaatcttgcttttgcatctaatactttgctgaatgttataaccaaagtagcaaactattttgtgtaaatttatgattaagaataaagattaagggtataaaggcttgtattatagttggttgattagacaaatttcagtcaagacttatgttagtgtgttagttgtaatctccaactaatctttagttgttgtaacaaactctgctttgagtatgtaataaagattagtattggatatttcttatataaaattttaagcttctcatcttaatagttaaatccaaggccatcaccaaagaagaatgatgacatgaattcaaacataacaatggtgataattgagctgatatatatagtacttaattaataacagcagttaattgtattttcaataattgatgtcaaattagagcagatttaattaagaattaggagaaagattaagatatctcaaattttttcaattcacacaactatgagtgtaatgtttatttatagagctagcttattacaagaaaagtaaagtagcagaacttaacaacttgacaaagaattaattctgttataaacatggtattaactaactctaaacttggtaagtgtacatgacatgcggagctaggataagatagtagggggggccaatatcgagcaatgcatacaaaattgaaagaaaatgtgatagatttttaattttcataaatattttatataagaaactagaaaatttgaaagtgatgttataaagtgttaggaactcaatttaataatactaatatttactctattaatattattaaaaaattacactaattatatactacgtcacatttatatacataatgtatagtatttaattaaatttaagaggatataatatattttcgggaaattctataatgcacc

SEQ ID NO: 173097 - DNA, 554 bp, Cannabis sativa
ctctctctctatagaaccgaccctttctatctctctctaatttctcttcttaaattgttgaatttgtgacgagttgcttggattcaagcttgttttgtgggaatctttgaagcttgatttcattggaaacttgaggtagctttctacaactttaattttaagttttattgctagaatttaagttggtaaagcatgcttcttggtgttggagttcttgtatgcatgtatgtggaagattagcttaatcttgatgctttgtgattagttgtgttgataatctttggttattattttggattaagttttagagagaattttagggattttattggtatttctaatctgttatgcagctctaaatttattgttgagtttaagttgagatatgttcttgtattcaagctctagtataagtgattgtggtgatgtttgctcaagttttgagcttggattgtaaattgctacccttatgttttgatgcatgttttggtgggaattaatgtatcaaattggtatttttttattctctggttgatgagttataactatgggtt

SEQ ID NO: 173098 - DNA, 939 bp, Cannabis sativa
tgtgtcatcccacgagagaagatcttctaatggaccctatagtcatgtatattgtgtatttagcctcgatagtctaccttcttttacataaaacctaaatgggtcacggatatgccctgacccaaactctagcctacataaacccatttattcctccatgcaaagaaaatgaaaaaagatacttagtcgaagctctggtaaaatactttctaaaatttcttcttcttcaaaagaaacttaatgagaccacctcatagccagagttagggtttctactgtaaagcaacatctgtaatacattttaaaagcctataagaccaatatggactcgtggactagggataattaacgcatgaaacacataaaaatttgcaactcatttacttgatcataacttaatttcttaagctttctgttattcacatttctacaaaagtatgacacgagcatttaatggagaaggccaaattaatcctcctttgattgaagtcctttaatattgctctatcgctaaagggcttccccgaaccaagaatcatccagaatgaaggggcacatggaagcctacccacatatgcctctacttcccaaatgcaaaaggcgaagcgtctcccccaaacccaaaagggtctaacaaggttgctctcttagcttatgtccagatagatagtagaaaggcctaaagcgaatatcgaccttcatggggcatcagggatgtcgaccttttacacacgccaagtcaccaaagtggcggttattctttaccctataaagaccctgttattctcgtgcaaagggagcaagctgaaacaaatagctaaaactctattgagattacccttgatcttgtttttctttgaaaagaaactaagggtaaagagttagggtttcctacaaaaatactgtaaacacatcaatatcgctcttaaaggctaatag

SEQ ID NO: 173099 - DNA, 1441 bp, Cannabis sativa
ttgtcgttacttgccatacaaaaatccagtttacactctcttttcctgcattcttatttcaattaaaatatgttaacaattttcagttgttattgggccttttttatttctttttacaaagtaattatcattgggcttagaagtctaattattattgttgtagttttacatttctctaatattattagtgtttgtttattattattaattaatatgtacttactttttttataattttttcttaaagctgttttaaaatacattattaaagtattaatgtttatttgtaataatttattaacatctatgtttatttttcttccattgcttttttaagatattattcataattataatttatattattttatttttttttttgataaaccacataacattataatccaattactaaaacttgtgacaaaaaagtttagtagctactacatataatataaataccacaaattaagtttaataatccttttcacttcatgaattaagtgtaagtgtactttataggggtttttacaaaaatgctagattttggataaaaatttacaatgttactgccacatggaattttttacaaaaatatgtctttttataaaacaaccgtaaaacaataaaacagaacaattaaaacaacagtagaacaactataaaataactgttgaacgacagtaaaaacttaacacagtacacactataaaaaaatactcagtatttttgaaaaaaaaattaccccacagtaaaaaagaaaaaaagttaaaagtttcagtatgtggtataaaaatccctattatcttaaacaatactttttcacttcatgagtcatgaatttgaaaagggatcataattacattataatatggtaaaattttatggttgtctccctaacaaagatattagtggtgcaccccttatgaccatatttggataattatagttttaatatttttatgtgatagtctttatatagttatagtagtcattttaacaccttttttttttatttgaattatttgctatgttaacaataaagtgtattttagttcaagagcgaaacaatatgaattttagtatttttgtaaatttccctaatatttatttatttatttattaaggtaatacattttgagaaaaccatattacctcttgatagaccaaaaaaataaatatattaggtaatgaaaaaaaaattaaaagtaattttctccatatagaactaaacctaataaattatatattttctccatgtaaattgggctgacaacattttggagtgggcccaaagcccaacaatgaatcttttctttaaattaataagcccaaatgaattgtgtttgttaagttggaaaataccacttttattaatcaattaattaaatttacctctaattttatatttaattgaaacatacctctttttatatgtatt

SEQ ID NO: 173100 - DNA, 717 bp, Cannabis sativa
agggagtttttccaccatagttcagctgggtatgattggtatgaattttcgggaagaaaacccaaattttctggtctgccagaaccgatcgatcggtgggttttggtgcaccagaaccgatcgaccggttgccctgcagggagaattttttgagttttcttcaggttctcttttggctcagggtgttgcgtagtatttgttttaagatgtttttatgttgtgtagcctaatttgggattgttggaagttaggttttgttcggttacaggaattagggttagttcccgaagttttggtttaagctcttcattagtttttgttgtcgtgacatagggtccggggtcgtcaagctttgttttccacttaggttggcatgcacgcttaatttctggactaaggtaaggattagggttgtacaaaaaatttcgtaaactgcccaaccgaataacctgcccaaaccaaaccgacataactcaacaaaattctaaactgcccaatcaattaattgggcaggttgaaaattgacccaaaccgcccaattaaacctcccaacccgatttaacctgatttttacttttttattatatatattatataatatatattaaaaaaagtcttaaatcttaaattctttctcagcctctcaaaaaaattctttctcgtatatattgtgcatttatgtggttaatttttattttagttgaaactaaaaaaaaa

SEQ ID NO: 173101 - DNA, 668 bp, Cannabis sativa
aagggtgctctcacatgcctctaatataatcaattagtataaatcatcccattataattgttaacaattgataggcaccttaattaatggttgtgattatggaatttaatatttgggattatattagtccgtacaataattctaataaatatgttgtcttatatggtgttgattatttttaggttatatatattttcggcacttgaagaaattataattaaatattttatgtgagagttgataatgtatattaattatagttacaatagacattttgtaaatgaatttttgaaaaattctagaaaaaagaaaaaatttcaaaaaaatgctctttttttatgttttatttacaattttacgactaaagtttgtatttccaaaaaaaatacttttaaagttttaatattacaaaaatatattttactctataagaagtaagaaaaactaaaaagcaactagaaatcattctcacgataattataaacaaccaaaaaataactttatgacaactataaataaattataaaacaactaaaagaacagtttattattttgattgaagaagtatttttgtaaataaaaaatatttcacagagtaaaaatgaaaattttttcatgttgaagtatttttgtaatttttttttaaatttttaatctaatttgtaaat

SEQ ID NO: 173102 - DNA, 597 bp, Cannabis sativa
gcttcctaaggaagctgaggccgcgggtaatgaggaggtcgtggacgaggctatcagcaaagtcgcggatggatctgcccctactgctcctagtgcttaacttttccttttcttttaatatttacttgtgttagaatctcttctctttttttatatgcggtacaagggtactcgcgctttgtactttgaacaaatttacgtttatgtttcttttgaatgactttacatcctctcggtgattttatctataacattctcgcagtacacaggtactccgttctttgctatttaaaatattttgttcgcgactttaattacaacttggtgtaataagtagaaaatttcagaaactttgaaaattttcaaacttgaaaaactttccctttttatatataatcaatagtacatcatggtatataccccgtatacttaggatttttttaaaaaaattattaagtataaatacaaggcgagtacaaactagaatatgcgagtactattaaaaatagaattttaggctctcgccattccaagcccgttgaatagtagtaccatccagttctgcgagtcggtacgtggcgtcaccaatcttttctg

SEQ ID NO: 173103 - DNA, 1038 bp, Cannabis sativa
tttctgcttgaaggatgatgatggaattttgcgtcattgggatagcggtttagataatgtcattgttgatttctattctaaactgtttactgctgagcctactagatgggaggatgtgcttgattgtgtcactcctagagttcgtgaggaacacaatgatctttttcttcgaccgattggggatgatgaggtcaaagatgcggtttttcaaatgcaccctgataagtctccgggccctgttggtatgaatcttaaattctttcaaaaatattggtcaattgttggtaatgatgtgatcaatactattagagcttttttctgcaatgagcaaatgccgaatgggatgaatgacactaatattgttctcattcctaagaagaagaagcctgatcggatgagtgagttgcgtcctatctctctttgtaatgttattgctaagataattaccaaagttcttgctaacagaatgaagggattattatctgagattatatctttgaatcaaagtgtgttcattcttggaagattaattacagataatatcatggttagctttgaagttttgcactatttgaagagaaagcaagttggcaaagatggatacatggcgctgaagttggatttaagtaaagcctatgacagagtagattggcatttcttgtgtgttatgttgagacgaatgggttttgctgataaatgggtccgacttattttcgattgtttatcatcggtgcattatcagattgtaacaactggccatactttggtgccgattgttccaagtagagggcttcgacagggagatcctatctctccttatttgttccttgtgtgtgctgaatgtttttctgctgtcatccgaaggttcgaagagaagaagtggattcatggaatcaaagttgctaatggtgcaccgttggtgtctcatatgttatttgctgatgatagcttcctatactgtaaggctataaatgaggaagtaactcgtgtgcttcaactgcttcaactgttttctatggctactggtcagcaagtgaa

SEQ ID NO: 173104 - DNA, 529 bp, Cannabis sativa
gtctccggtcttcttccccaacgatagagccatattcgcacgagcactatgtttaagatctggtttttttaaaatgaaacttatttgaaatctagttttataatttcatttttgatgtataaatttttattaagtttaagacattttgggggacgtaggaaacgcggagtcaaagaggtggagcagttggagctggtgactggcggcatcggcgactaagtttaagacttataacttgagatttgtatttaggtttttgttctattaaattttgtatttttttctttaatggttagggattttagatgtttatgcccatttgtttataaatttttgatctaagtgtatttttcttttttgagaaatgatttaagtgttttttcagttctgtatatattttgttatattttattatataggtttttatatatagccaaattaaaacatattaagtttggtatataataattaaattatatcattaattattttattatctataataaaatcattattataaatttataat

SEQ ID NO: 173105 - DNA, 566 bp, Cannabis sativa
acaaactaatagcaccacttgggctcgaaaaagatttctatctatgcttacaattgaacaattcattctctatctataacagatacttgttttgacaactgaaaaatgaattctacttcttatttttagaaaatcaaataatcctaggatacaaaatttcttttctttttgatttttgtgatccgagaaagaacacttacactagcactttagagttataaactcgatcgttatattcttgtgtgacctcaagtgtttatatcataacactacttaactctggtgtgcaaatagtatgtgtatgtgcggttgttcaactcaatgaacttaccagcacttgcactagaatttcaggattaaaaactcggttgcttgagataaggtcaacatttcattaaactataaaaatactaactcaggtgtgcgaaattcctgaatgacacttcaacccatggctcccgtatatcaggataacacctggctcccgtataccaaagtttctgtgacatacatggttctcgtgtaccatgattttctatgaatgctcatgtaacgtgcatagctcc

SEQ ID NO: 173106 - DNA, 538 bp, Cannabis sativa
cttccttaaatcttcttcgaatttcttctaggttctcgatatcacgctttttggaagtgaccttttcaaagatctctcttgttatctttgaaatatcaaactggtctgacactgtaacccacactcttagctcaaaatgatttttaactcgaacatcgtcgtaaacaagttgagcaagagtggtctttccaacaccacccatcccaacaatggggatgactgaaatgttagtaccaccatcaacatcgtctttcagaagcaaatcaacaatggcctctttctcatcatgcctcccataaacattagattcttcgagtaaaggagcaggaggcctttgagaagaagaagtgttttgaaggccttctctcaagccaagagcatctgtttgagcaagaagatcatctagagtaccaaggatctcagtggcatcactctgtacagctttattaaagctgaacccaaaaggtggcatcgatttcagttggtgaaataccttggtcgtgcggcttgtaagcttggatcgcagagcttcatagtc

SEQ ID NO: 173107 - DNA, 572 bp, Cannabis sativa
tcgcctatacatcgcccaataggttagattttatgtataaatgtatatatgtggggtttcattcttttttgttccaaggatatcgatggtgagggatttgtttggagtctggttctttttaacttgggaagaagtcttcttagttcatttgtggtgctagagttcttactttggatgagattgaagggctgaaaaatttggatgtacaatgttggggtactgtagaaggtgatgagggtgaccccccgagattgtggataccaaatgggatgtatcttggtactgcttttaggagaagtataggtgatttcatagctgagtcaattggagttgttgccacacctgaaattgtggttttggagctcacacaagacaaccctttctttgtgcttgcaagtgatggcgtatttgattttctttctagccaaactgtagttgacatggtaaggtaccctgttcccacaatcttgcaactcagatctagaatctatgaagtttgtatagtttgcttgatcgaatgttttgaagcttgttttatttatcgtggttgcatgtgttgggttttatgccct

SEQ ID NO: 173108 - DNA, 524 bp, Cannabis sativa
ccagttttgctaaggcatcggcataagagtttggttctctcaaaaattttgttcaatttttataatcaaaattttctaagttctttcgacctttctctagatattttttccatttttaagccctttgcctggtattcgcctagaacttgattcacaattaactgcgagtcactgtaacatactagaatcttcacttttaacacttcagctattttcaaaccagctatcaatgcttcatactcagcctcattttttgaagtgccgaattggaatctgagggcatagtgaaacttaaagccttttggtgagattagtatcacccctgcacccgagccatgttcattggatgttccatccacgtaaaattttcaagtgtctgcatctcacagataagtggattttcatctagaattgtcccttctaccaagatatctgccaaagcttggcccttgatggatgttcttgggtgataagttatgttgaactgccccagtttaatagactattttatcaatcttccagaa

SEQ ID NO: 173109 - DNA, 644 bp, Cannabis sativa
gcggtggtggttttcagatctggggttttgagcgcatatctaacggaggaatttgatctcttccatcggaggagcaaaaatctggggttcggacctcttcttttttggtttttttttttcttgtttacccatttttatatatatggtttctttatttttgatctcgtactttggcactatttaatttcagatttgattttctttacttgttaagttgtggtgtgtgatggttcatatctgggtttaattattatttttttttttgggtatgatttagatgtgaaagataggtcgaggtggaagtggtagtagtttttgttgtttaggtacagtatgaagatgatggagaagatgaaagaaataaaaaataagaaagataaaaaatggaaaaatacaatcacaataagaagaaaaaaagaaaaaagaaaaaaataattatttatttttaattttaatatgatttattttaattttaaaatattacttatattttaaaaaataaataatttatatgaactaataaaattgtaacacgtgtacattgtatatacttttttttttaacaaatacattgtatatacttggataattcaatatggtagttaactgccaaaacagatggaaatgactaaatgctaacagaa

SEQ ID NO: 173110 - DNA, 856 bp, Cannabis sativa
cataagtcattccctaaagtgctcagttcttttgataaaaatatgcattcagcccatcagagccaggagctttgtccccagagagttgaaataaagcagacttaacttcctccacagtgaaaggggcgtcaagaaaggcaaactgttgagaagtaagccttgaattgatagtggagaggagcagattaacagcatcaatactgctgccttgagactgaaagagattagagaaaaaacggcagacttcagcttcaatggcagaatgattggaaatgatggtgccatcttcaagggtgagcttcctaataaagttggttttctttctagaggaagctttctgatggaaaaacttggtgttcttatcaccagctcgaagccaatggactttggaacgctgcttccagaaaatctcctgtttatagagaaggctatcaagttgggattggagattagaaatctcaagcaactgatcaggggaagcagggagagaggaagaaaggctgctaagttgaccatcaatttcattgatcctataagataaactattgtaggatttgttccaattcttaatggcatgtatgcagttgctctgattcttaagaaaattcgatatagggtcagtcctaggattgtgattgacagaagaccaggaattagcaaccgtggagtagaaggagggctcagtgagccaatggttttcaaaaagaaaccttttatttttaactttatgcatactatcatcagataggacaatctttaaaaccctatggtccgaaccataaaaaccaaggtggtggaggagagcctgaggatagtgatgaaaccatttatcattagctatcccccaatccaaccg

SEQ ID NO: 173111 - DNA, 970 bp, Cannabis sativa
ctccttaccaccgaattctatagctacatggactaatttggcaacgaagtttatatctaacttctttcctccaacaatgtctgctaagttgtgaggagaaattaataatttctgtcactaggatagtgaatctttccatgaggctcattaggaagtgtcctcatcatggtattgagaagcctagaacactagaacacttatagatgccacagctggtggggaatttatgaggaaaagtgtaaatgaagcctatgaactgctagaagagatggccctgaataatcagcagtggccaactgaaagaagtgagacaaagaaggtggctggtatgcatgaggttaatgccataacaaaactaacagcccaggtagaggccctgacaaaactgatagttgtgcaggcaaaacaggatcaagttgtttgtgagctctgtggaggccctcatctctatgaggaatgcccggtagatgtgaatattttgccaatggatgaagcaaacgccatttggaattactctcaaaacaacaactttgggttcaatgaaggagggggtcgaaggaatagtggattctatcagcaaagaaatcataaccaaacgctgaaccaacaacaatcacagtaacaaggctctagtgggagttctagtcttcaaaaaaaatttattgctacagtttatgacagagactagatcatccattaaagacttactgactcggatggggcagttggaaactcagatagcaacttgtcctcaagggaacttgcctagtacaatagaggtcaatccaaaagaacattgcaaagcaattaccgtgagaagcgggaagaagtatgaagggcctgatgaggggcattcagtggaagaagagactcgggatcaaccggcaccggtatcaacaaaaagaagactactgaaactcctccaccaagaccagcgtctccaccaatcagtatagatcaccatgtgaag

SEQ ID NO: 173112 - DNA, 843 bp, Cannabis sativa
  modified_base (571)..(575): a, c, t, g, unknown or other
  modified_base (625)..(627): a, c, t, g, unknown or other
  modified_base (716)..(718): a, c, t, g, unknown or other
ataatattttatattgatatttattgatgtgaaaaataaaaattcgaaatttgtaaaaaaaatatcacaaaaatcgaattttgggtaaaaaaatcacccttggcagagggacaggttgtatgcagccctgtctgcgcctagggaagcagcagggtgggatggccggcatttctcgatgcctacagggtttacctgcacgagttgtaacctcctaggcgaggctctcctgtttgaacgggtgataccgtgtcttcatacacggttttgtcccagtccgcgcgcacaagctcccttcttgtccgagtttctggtgcgagcgagcaccatgcttgaaccacttggacccgatttttcaaatcaacatatcaccttcaatttttatcggaatggagtttcgtaaaaatcaaaattacttaatttttaacacaaaatctaaataaattattttcatggaaaaatttcgtaaatcacatacattcatcaaataacacataaaccatcatgaacacatccaaatcaacacaataaacaatattcatcgttttaaaatccatatttcatgaaagtaaannnnnaccatggctttgaggccagttgttcggaatattttaccaggatctagatnnnctaacaagtatgttgattaacattgtaaatatgaatatctctaaaataatgaaattaatcacataaaagtttagaaaaccttacattgnnngcagcagaataatatgactcttttcgctcagatctctaactcttgttcctttccatcgtagagtattatcaagatctaagccttgacgtctttctctccttcgggtttggttaccaccgtcttac

SEQ ID NO: 173113 - DNA, 600 bp, Cannabis sativa
agtctgaatttatccattgaaaatacacaaaaaagaattatgatttaagtaatggaggcttacataatactactagattttcatcatgtcaaacatatgcataaagtataattaaattgaactctgccacttagctcctatctcactaataatgccagtataatatgtattagaatatacttagaacaatatgcttatgaaactctggcaaagctaaacatatatctgtttaacacactaggaacatatacaaagccaatgaatttgacattataaatataaatggtagcaaagattaaaaaaaataaagaagaagaagaagaagataattatgaccattgagttaaaaagaatgaagtatagtatattacttgctagatctgttccaatagaagagcacttgttctgaaatagttcccaactctccttgtcattgagcaaatgaggttcatggatgaaaccatgtagatctgcatgcaaagctacatccttattccgagtagtgagtaagatcttgctatgtgtgtccccttgagtagtagggaatacatgttttagaagatcccatgttgttgtggtccatatatcatcaagaaccac

SEQ ID NO: 173114 - DNA, 682 bp, Cannabis sativa
gaacaaataatatgttaataaaatcaaaaagctgacaaaatatgtttcttcttgttatccatgtttcttagtatgtgacatgtagcatatacaagaaaagcttaatctcataatctcactaatgaaagtcctctattacgatcctatcacggagaagcctcacggagctgggaacaagtcaagactactgggtaagcaaaagtccaccctaccttattctagtttcccggacgtgaaagaccctattatctctcctagaccaggagtggtccaattatggaagcctacccagctaatactcgaatgggtactcgaagggcctattgcggatattgatcgtccaagtgtcacgaatgtctacccttggcgcaattcaaattgtccagtgatggttatacttttttagacacaggatcagatcttattccctgtgtccaggcatggtagtgcacgaacctcgtccaccttattgccagatgaattaacctctatttttaaaggtgaaatctttggtgacaagtgccctctacttttaaaggttgaacatttgagcgacatgcgtccactgagtacaaatgtccccaattgtccacctacagcacgcacaggcacaattgtttccatgggaccaatatgttggaatatattttaccaggacctagatttgctaataagtatgttt

SEQ ID NO: 173115 - DNA, 912 bp, Cannabis sativa
gtcctaggtctggtctggttttggatccgagtcttggttttggtttttgtcctagtcacggtttgggttttggtcttggtctgggtttttatttgggtttgggttcaggtcttggtcctggttcttgtcctagtcctagtcctagtcttagtttgggttcgggtctgaatctaagtctaggtccggatctggctccgggtgtgggttagggtccttggtctgggtctgggttaaggtccgagtcccaagtttcgatctcgatctaagtctgcgtttagtttcaagtctatgtcctggtttccatcccattctgtgttcgagtttgggtccgggtgcagctctaggtttgtgtctgattctgggcttgggtctaagttggggtcccgagttcgagtccaggttcaggtttggtcctggtatgggttcgtgtccaggttcctgtgctggtttgggtccggggaaggttttgggtctgggtctgggtccgacttctgattcacgagtccagttcaggtcctagttcgaattcgactcctggatttagaccttgctctgggttccggggactaggtccctggtctaggtcccccatccatgtcccgttcttaggtcctggtctgggtccatgtccgagtttgggtcccgagtcttcgttttagtccaactctcggtctggatttaggtccaggttttggtccctattttgatctgggttcaggtttgggtccttctcaaggtcgggatcctggtctgagtcgcgggtctcaggtcccagcgagggtttaggaccaagtcacgtccatatcccggtctaggtttgggtccaaggtctcaagtcccagtctttatcaaggtcttagtccatgttctggtccgagtttgggttatggtttgggttcggttctggtctca

SEQ ID NO: 173116 - DNA, 862 bp, Cannabis sativa
actcgtcagcatcagggaaagtcaagactctcatccaggtcctggatgaggatattagcaaaacatctataagatcaacaatgcaaagccggatgacctccctctgtgaaggtcgaactaccgacccgaatggattttcgactgatttatcattagtcatttgaaattttaagtagcagtatatttctttgtttcggcctcatcaacatcatactttttctgtaatgtttctcctatttttttggcaaatttttcaaaactataaataatcatacaaatcatcagagagactatttaaaataaaattcttatacagaaaatcattctccacccaaaagtccttttccttaatttgcgcttcgtggaatggactctcttgagtcaaacagaacttggaatatttagttgtgttatatccaggttgtaagataatacgttgtaagcgtggatttttaaaaagaaattgagatccaatggtactgttgaaaagtagacacgtcttattgcgaaagagtttaaacaaagagaaaatatagatttacatattcacatgttactagaattacacctattcgtgtacttattgctcttgctgctattcataatcttgttgtgcactaaatgcatgttaaaacaacgtttttaaatggtgaattagaagaagagatttacatggaccaacctgaaggttttgttgttcatggttaagagcataaaatgtgtaaattatataaatccttttatagtttgaaagaggcacctaaacaatgtcatgagaaatttgataatcttgtcatatcacatagttttgaagtaaataaaagtgacaaatgcatttattataaatatgaaaataacattt

SEQ ID NO: 173117 - DNA, 1000 bp, Cannabis sativa
aaacagagatagatgcacaaatcctgtttcttctccaaaggaaaaatacagaacaaaaacaggggagttggtggttgaggcttacagcgggttttccttgaagccctagtttgggtttggagatccactactcaggatgatgatgttcatgttgcaaagaaagaaaatacactgttagttctggatttttggagagaaacagagagagaaaaatagagaaagatcaaacattgtatatatacatatatattcagattacctgtcaaaatattgtgagttggaatccttgctgtctaatctcttgatcattgaagatctatagtggaagaggcgagctcaagaggacgtacccagatttctttggggaacctctataaaatctctagtgcattctttcctttaatttcctgcattttttactactgtgtttatttattttcttatgggttttttattttctgggcagtggggataatttttctgggttttattgacggtgttcttcatgtttttcaaagaagaacagtgaagaaagagaggatcgcggcttagggttaattgctgggttccttttctgggttgttgttcttcagagaagaacaaagaaatagatctgctgggttttctaagttggaggccgtgtatgtgcttcgatgaaaagaatgtatatatatatatatgcaaaggttaaatctagggctatagacgacttgtagtaattcaaaataaagggctgtccttttttcttgggtgcttaaatcacagagtcaacaggtgggtttgactggggtaaaaggtctcaattgaccttggcttttgattagttttgtgctatgtgtagggacatttcagagaagaaaatcttacattggtatctgagccaaacaaggtacaatctgcagcaaatattaatcaagaaagcataaagaaatcatcaagaaagcatcaagattcacattcataccagcaagaatttaaatacacaaaaccaagattgcaa

SEQ ID NO: 173118 - DNA, 647 bp, Cannabis sativa
ccaccagtgagacttacttgcgaagcccctgagggaaccagtggcaaggccagtatgagtggctcgaccgggatagtcgcttggagcctcgaacatatcagggctggagccattaccccctgcgagactatttcaaggacttcttaaaccatatcgggcttgccccattccaattgattcccatttcatacaaaatcctcgcgagtttaaaggttctgtacaaaatcttgaactgggagtgccccactcccaaggaaatagagtatctctactctgtcaaggtcgttcctaccaggaagaatgcagcagggggttttttactgccttgggactcacacaagtaaccttaagatcattgtggatttgccaaataaaactccctttaaagacgaattcttctggacgacttgtctttccccaatcggcacaaccacctttcgcataatacgtaagtaattttacttaagacttggttaaactattctatgtcttttactcttgttatgctgaattcaattttgcctttattttcgaaaactgtctcgaaaagaccagttccaactcctgagatggtcgagcgacacaggcacctgttgggtcttccatttggccttcggtcatgtgagtttcttttgaacgaggtcaac

SEQ ID NO: 173119 - DNA, 532 bp, Cannabis sativa
taattttgaaaaatttgagtaaaaaaactactaaaataatataaaaatatatgtaaaataaatgaattagatataactacttagaaaaatataaaaaaaaaaaaccacacaccttaaaattcttttgctagtgagctcgttaaatgtattttatttataagagattcagaatcaaaaaaccacaaaaacaaccataaagaagggagaagaaatgtatttataacctctattttccacatctactgacataacaccataacaacatgagaaaatctagaaaacaactattctgacgagatgaaacaagaatagtgaaatcgacgtcaaatatataaattatagcaaaacaacactaaaacaaataaaaaaaagacttaacaatacataaaataaaaataaaaaatatgttaatggagagagaacctgaggaagagtacggtgaaaaaaaaaagataataaccataattttaaaacacaaaaaaatacccacaaagaagataatgaacacgaaagagatggctcaaataccatt

SEQ ID NO: 173120 - DNA, 711 bp, Cannabis sativa
ccacccgtttgggagtacgagtttatgggttcaagtgcgggttaggacgggttcggttggggtgaggttagggccgacaaaacaggttatacacgataatacgactcgaaactcgtatgagagttagcgggtttgggtttgccttaaatgggttcaggtcgtgttcgggttgacttgtctaacccgttaataaacgggttgtgttcgagttgacacggctaatataaaattgacccgttaatgacatatttaaagttattttagtactttaatatatcataaataaattataaacttgttgaatacttcataaacgtgttattaggtaaaatatttaaacaaaatatacttataaacgagttacacgagtcgtgtcgtgtcaacccgtttataaatgggccgtgtttagattttattttttggcacgattattaaacaagtcgtgttcgggttgaacatatatctgttatacatgagtctcgacacgacatgaacacgacctgtgaacacgaattgtcacctctaggtgaggttaggtttttagttgggcttggccaattttgttttaaaatattatttttttcagtaaagtgcccaaattaatttattaaatataataataaaatattattagtaatcacattcattgtaatgaccgctctagtaatatgattagaaaaggcaattaacactaatttttattattttatt

SEQ ID NO: 173121 - DNA, 504 bp, Cannabis sativa
tacaaagtaacgacctgttaagtttagcatataaaccctaagttttcaaattcaaatttaaaacttatatctaacaaataagatttttatttaattattctatttagagttaaattagcacctttattattttcttttacaccattattaggtttaattagattataaaacctaaatctctcacattcttgttacgtaatatggagagagtctctaacctaataaaatctcatctctttctttcagcttgaacaagatacttagagaagacactcataaaatcctaatcctaccatttattcatctcgctatctttcaaggatttattatttttcttcttgtttcgttctcttcgccaaacaccgctcatgattttcatcaacgtaaggttgagatcatcatcaccattctaataattgagatttcaagatctaggatttgattaagaagagttatcaagaggtaagagagttcttccatttattgttgtgaacttttaggtta

SEQ ID NO: 173122 - DNA, 1314 bp, Cannabis sativa
ccattttcatttgatgctccatccccatataatttccaaggttttgtatcttgcttgacaagtggatcttcatctaacactacccattctattagaaaatcttccaaagcttggcccttgatggatattctcgggtgataggttatatcaaattcccccagctcgattgatcattttatcaatcttcctgaagcatcaggttttgataaagtcttaaaatggttgatccgttaagacttttaggggatgtgcttggaaataagctcgtagtttacgagatgcatgaatcggtcatagggtaagtttttcaagaggggataactcaattctaccccagtaaccttttactaaaatagtaaacagaattccagtgctttccctcttttcgcaccaaggctgcattgattgcactttctgagacagctatgtaaaggtataaagtttctccagttatcggttaggccaacactagaggggttgatagatgtttctttatgcctttaaaagctttctcgcattcttttgtccattcgaacttcttgttgcctcgtaaaatattaacgaatggtagacacttatcagttaattttgaaataaatctgtttaatgctgccattcctcctattaaggcttggacttcttttggcttcgtgggtgatggcatctctattaaggatttaatttttttaggatttcctcgttgcccctctcattaactatgaaacccagaaactttcccgaggagactccaaaagaacatttctttgggttgagcttcatattatactttctgagtatttcaaagcattctataaggtcctttgtatgatcttcacactttatcaatttcactaacatataatcgacatagacttccatatttcttttcgaacattccattcacttatcgctgatatgttgcaccagcattcttcaaactaaagggcatgactttataacaataaagtcccatgttggttacaaaacttgtatgctcttgttctgggacatgcattttgatcttgttatatccagaatatgaatatgcatccatccatgaatccatgaatgtcatcagctcatcagctcatgccatgcagttgcatctaccaactggtcgatcctcggtagtggaaaataatcttttggacattccttgtttaggtctaaaaaatcgatacaagttctccagacgccgtttggttttggaacaagaacaggatttgaaatccacaaaggatagaaggcctcgtagatgaaatcattgtttaataacttgtccacttcctctttaagtgccccttgtctctcaaa

SEQ ID NO: 173123 - DNA, 615 bp, Cannabis sativa
cgtactcgatcaacgtgaggaggggacggtacccatcacaatactgatcaagagagtataggcacaagtataactgaaagttgctcaaggatgaggtctatgagtaggacgaggtccatgcatgagtaggacgaggtccgtgagtaactatgaccagcaacaaccggatcttcgtaatcacttgaatcagaaaaaaccttaccttcaccaacagctcagtcaaaagcaagaggatcctatccaattgcgaattgatgagttggaggaaaaattcaagaggtatcaagttggggaatatggaaaacaatttggatacgactcggacaaggaactcgagcctttccatccaaacattatgggtactgaatttccctagcgattcaagaaccctcacgtctcgtcatacaatgggactacagatccggtctcacacttgaataatttttatactatcatgtgagccagtaatatgacgaataatttacgctgtattttattccttacctcgctagttggggtggcagcgagtagctggttcaacaaatttacccatcattcaattaccttttgggaatagttgtctaaggacttcaagaaacagttccaagcagcaag

SEQ ID NO: 173124 - DNA, 717 bp, Cannabis sativa
atgtgaatggttagattaatttttgttaactttatcttaaatttccttttttgaacatatcactgtaagtcatcactagtgtcatccaaataataataggagcgattccttgaaatcctcccactatgattaggtgctgtgattctatatttaggcactttagtggtatctattactattttaggagataatagaacatatacaggatcaagaacaaatatattctactaattttctagccatgaaatggtccacccttaaactattgagaattttttttttacaattttgatggatttgagtagaatattatatctatgtcttgtgatagataccaatcttgtcgcaaagaatcccacttaattattgttaagagaatctttggatacttgataagcataataaatttaggactttggtattccaagaactaaaactttaaaataataagccactcatatgccgaatttgttggttgtaagacaaataggagtagtagtagtgaaacatgccacttctaagaaattccctggagtcatgctttagcaagaaacaaaactcggtagccccatccacaacggaagccgaatatgtagctatacgtagttgttgtgcacaaatactttggatgaaacaaactcttaaggattttgatattgattttgagtgtacacccataaagtgtgacaatactagtgacattaacctctctaagaa

SEQ ID NO: 173125 - DNA, 638 bp, Cannabis sativa
gtatcagctgtcaggcagttgctctaagagttgaaggaatataaggtggagcaaatcccacgagaaaagaatgctcatgcaaactgcttagccaagatagccttagatagcaagatagaaaggttggggtggtacctgtcgagcaacttgcggaacctagcatcacgactaaagaaataatggccaccaatgaacaaaggtcagattggacggaccccatcattaagtacataataacaagagaactgcctcaagaaaggatcatgtccagaaggttacagtaccaagctcattggtatttaatcatcgacaatgttctttatcgaaaggggctcagcatgccatacataaggtgtgtgtcggatcctgaagctagacggattatgcaagaggtctatgagagattttgttgagaccacaccggaggcccaagcctctcaaagaagatattaagacaagggtatttttagcccacaatgaagaaagatatagactacatcctttagtgtgatccaagcctgaggtttgcaaatatcccaagggccccacccaatgaaattactttgatgactagcccctagccctttgcggtatgggaaatagatctcattggctccctacccacaggaaagggtggg

SEQ ID NO: 173126 - DNA, 785 bp, Cannabis sativa
tgtttaagaatagccaaaagaaaattccattcgacacggtcaaaagctttttccatgtccaacttgagacctacccacccaattttacctaacttcctatggttaatcgcatgaaccatttcctgagcaataaagatgttatcaaagatgagacgatcagacaaaaaggcactctgagtgagaaataatatcctccataaccaccttaatcctattagctataacctttgcaacaatcttataaagagttgtacagagactaataggtctgaaatctttaagagaggaggcattagcttttttggggataaggacaataagagtgctatttattgaattcatgctagcattattattcaggatgtcaaggatcaccatgcagagatcctcccccaaagtattccatttttttgatagaaataagcattcatcccatccaaacccggggctttatcttcagaaagctgtggaaaatataaagccgtcttgacttcatcagcagtaaaaggggcatctaggaaaaattgttgagcagaaagtttgccgctaatggcagacaaaagtaggttagtagcattgctgctgctaccctgagagcaaaaaagagtggagaaaaaacgacagacttcactttcaatatcagcatggttagaaatagtactgacatcctcaagggtgagagatctaataaagttagttttcttcctggaagaagctttattatgaaaaaatttcgtatttttatcaccagctttaagccagtggactttggatctttgcttcca

SEQ ID NO: 173127 - DNA, 541 bp, Cannabis sativa
ctgtgatcgatcccacaattggagacttcttacctatattagtcaaaacattacctcggcccctagataattattggggactttaatgcatttattaacatggatgataaactgggtggtaacatggatgataaaggctcctctaatgattttcagaattttatcacttactttaattacacctcttgatttcactggtgacaaatttacttggaataataaccaaccaaatgaaggaaacattcaagaaaaaattgactggtgtgtcatcaatgacccttggaaagactatttttctcaagctttgcttaaccatagtggttgttttgggtaagaccacatagctatcatctttagtctcactaccacaaattaggcttttagtgacactatatagtgacatgcataaaagtgtggtcactaaaaatttaggagtaggttttagtggcacacaccattagactctaaatattcggtgtttatcacccgaaatgtgggtcactaaaaatatggagtgtcactaaatactaaaacccaaaat

SEQ ID NO: 173128 - DNA, 674 bp, Cannabis sativa
tcagctcccccaacattattattagccttattattattaaaatttatgactatggtcagttggtcacctcttttgtattggttgaccatagtttattccacacgtttgaccaacgccacaaattttagaatagaatagaatattcaattaaactaactaattgcttatagatccccacatgtcgctaatctcatcactaatctctactctaatcattacgtattatcctttatcaaaacaatcttctcaataaatctaggagttgtgtcaaattattttaatggttatagtagtaaccctatttttttaagctcttaaactttaacttctcaatttttttattttttcccctctaatcattttgcttttttgggtttgttcatataacgttatttaataagaaaaaagaaaaaaaaaatcatattaaaagaaaatgtataagtctatcaaatgaagtgtccaaagatagatatagtttagtagttagttatctcacatttcctaaaatcaaaaagagaaaaaaaatcaaataatttgttgagttgagtgtatctaaaacatatatttttttttgaggctgattgtactttgtctggggatgctttacctatggtagttgcatctttggtttatggatgatttgatttaataaaattcatcatttttcaaaaaaa

SEQ ID NO: 173129 - DNA, 615 bp, Cannabis sativa
gttctccgagccaccacccactctgtttgttggtcgatatgctttacattagccaaatttaggttccttctgggatcaattttacgaaactcgagttcggaactttgttgggtattttatcttcgtcgtttttcttgattttgatgggttatttgtttttatttataatttttctgggttttggttaggaaaatgggtttattatcttcagtatttggtagagaacatttgctttagttctttctttttgggtaattactgaatttattggttcactgatgtaaaaaggaaatggaaaaacaaatgttaatgcagtgtttattgaatttaaaagttaatgaaggtttattgatgaaatttagttgtagtttaaattaactctgcaacttttttttataaattcttttttttttttcttttgagtttatttctaattttagtgttgaaattgtttttacagtgaaattatctcaattgggttgtccaagcttatcaggtacaatacttttccacttctaattttacttgtttgactttgaattcaatgataagtttatgtgtatgtatgttatttgcttagtgttacttcttctggttgtgattgctatggttaat

SEQ ID NO: 173130 - DNA, 598 bp, Cannabis sativa
tatatttacatataaaagcttaccatttttgttttctgcggcattaatgtctgcttgttccttggctgctacatctgagcatatgagaagaacaatagcaagtaaaagaccaatgtaaaccaaagttttagagcccattctttttcaatttttaagaaaataatagtaatgtatacagagaaggatatgaaaaaaaataagcaattgttatttgtatttatagactgactgaggcataggaagaaagatatggagttgagaatcatttactctaaaatcattaattcccataatatccacacaaaattaaataatttcctagatatataatataggaaaattattgagtacactctccaatatattggtacaccctgtcgtgttatatataaaatactcaatctaatttaattgacatccaattaaaaattttaaaattcacacttatgcgaattaaatgttagttgatatgtaaaagtaagcgatctaatctaatctaatccaatccatccacatatttatattaattttaaaaaaattatatataatattaatattttaaggaaaaaataaataactcaaaaatctaatacatatc

SEQ ID NO: 173131 - DNA, 556 bp, Cannabis sativa
aatgtgtatctaacccattttgttttatacttaaaaatttgttgggtcaaaatgttaggtttaatggaaatagttagtaagcattaaaaatttaaagtatgatttttcatgatagcttttcaaaatacgtatttgttaaatatgcgtattctttcaaaggttgcaacctttcttctttcacttaagtaggctgagcagcggttggtttgatcagtttttttttaaaataaaaattcagaattcagtttttggtttggattggtgcaatttgaaaatcgattgactaatctataatctatcttaaaattgattgttttgaacctcggtttggtcggtttaaaccgttcaaattgaacttttcttttctttaaaataagatcaaatttattctataaccatattattctacattctacaactacaactatacagattaattgttcaaaaattaattattttattcttataattgtaatataaatgaaataattatatattattattattattattatatattatcaataattataatacataaagtaaaaaaattaat

SEQ ID NO: 173132 - DNA, 534 bp, Cannabis sativa
gggtcataggtaaaaaaaaattttgggactcttattataaatagtatttttaaaaattattaataaaaatatatttttaaaagatatttttttatttgggcccttaaaatgagtgggccctaggcgtaggtctaatctgcctatgcttagggctggccctggctgcttagagtatctctaatggtgatatttttagaggaaattacattatatacccacttgttttaatttttcggttcattttcatattctttaagatatactcacttttatagatgatttttccattagactccttaagttaatgtaatatgttagacttaagtagagagtgagggtatattgggtaacctacttataaaagagggtatatttggtcatactgcaactacttgtcactacaggtttgacaaaaattgggttacgccaaagcatccttcacctcagcctcatgttcatctcacagaacagagccctattcttgatcatcagactcaaactctccctgactttggagatgacattggatggtat

SEQ ID NO: 173133 - DNA, 502 bp, Cannabis sativa
ggagctcagagatgagagaactgggagggaagtttattttaacacagttttttaaaacttgtttaattcctaaaatcaattttctaaatgagagaattttcgcctctccttatgactcttaaattttgaacatcgtcaatttttttcataaactattaaaatggttagatttaaagatttttgtataattttagtaagaaaaatttaatatggatgaaaattcacggacataatttatcacatgtcaaagttggagagatatgatttgatagatattaaaatccggaaaagtacacgtacaatcagtgacatacccaaaatttaattggagggtgggcgtaaatttttttcatacataaaaatattccaaaataaataaataaatataaagcaaaacacaattaaatatttcaattcccaactaaaaaagtattaaatatcaagtactaaaaaaaacaatctaatgttcaaaatatataacatactcaatatcttaaaattt

SEQ ID NO: 173134 - DNA, 555 bp, Cannabis sativa
gattaattagtgctttcgaattgatccataccaaggatgtggatgaggtgagacctttactcgcactcccatttgggaaacctactccgactcatgtctagtttagttttgataaaaatggtataaattctcagtcaacgatcaagaactcaacaaggattcgtttagattttttaatataccatccttccctcgtaatgctatatatttagagaaacactaaaaggtatcagtaagtactattatcataattggtaaaataagcattaaattttacttaatttaaaataataaattttaatgaaatattgctaaccaattaataaatttacaatgtatcgttaagtggtgcaagacattactggcagctcttctactttactattgttcattcaagagtatttagctttgtaaagtgatatttgtcgattcacttctaatattctatgttactcgagtcagaacattagctagtgataaacaacttagctataatttagaaaaatgtcaattgattatataaatattagatttttttttttttaaagaaacatg

SEQ ID NO: 173135 - DNA, 639 bp, Cannabis sativa
ttttactctctttagacaatattaatattgtccctaaaagttttgttcttttgttgaacaattagatttagtttattgtttccttgagctacagtcaacaattggttgctttacggtgaacgattggttaaatgattagttgatcttttattttttactattattaggttaattcctattagtgtttttatggggttagaatttttagtttcatgtgttgaaactaattagattttcccattagtcttgtcttttgacatggttctatagtttctctaattggttttgatttattggtttctgacgttagttactggttcttggttctgggtttgttcgggtgtctatggcgtcgagtagttatcagcgaatggaggcaacggggaacatggcagggatttttatgccgaaatggcaggtgcaaccttaaatagatgaattaaagaagctttaagctggattgaccgtcatttgtggggacaattgattttagaaactgatagccaaattactttgtcattctcttttggcctattagttcatgatgttcttactcttctcttatctttaaataatgttgagttgtgttttgtcaaacgatctgcaaacaagctgactcatgttttagccagggattct

SEQ ID NO: 173136 - DNA, 707 bp, Cannabis sativa
tgagacccaagacttgaccccagaccaaaaccctgaacttggaccaagaccaggtcttgggacccgaagtggaactagaataggactcgagaccgtgatccttatctggacccggggcttggacctgacccagagtcaatttttggatctgggacccatacccagactcaaacccaaacccggactcggacccaaacttggaaccagacctagacacgtacaccgtgacccgaaaattggaagcggaactggaagcggaccgagacttgggaacaagaccaagggactaggacccagacccacacccggaccgggacgccgactcgaattaatactaggatcgtgactcgagacacgaacccaaacccagacatggatttggatccagacccggacgcagaacccggactgggattggagactcagacctagaccaaggtccagacctggattggggacccaaacctgaaattagaaccagaattgggacccaagatttacaatgtgacctaagatccgaccccgttcttgatcccaaacccagacccaaacacggacttggacacagactgggacccaggatctgaatcggaacgagactgggtcccaagattgggaaccggatcttgaaccatgacccgaggcttggacccaacctgtagtgggtgtgtggatcttggaatcttaccaagacccaaacttggaac

SEQ ID NO: 173137 - DNA, 549 bp, Cannabis sativa
  modified_base (170)..(172): a, c, t, g, unknown or other
  modified_base (202)..(202): a, c, t, g, unknown or other
atattttatatattcattatttaaatagttgtttataaaatgaccttatttgaaatttaaaaatatgatatttttaataaaataatctagattttttttttttggaaaactaaccccagatattattttatcaactttaaaatttattattttatttaaattaaattatnnnattagataaatgatatttatttatcatttnattttattagatatttaatttaattttatttttaaaaaaataacaagaattttgaaaagttagttgataattttgaaaagatatttaggtttgttgtaaacttactttttcaaatttataggtttaattttaaattaataatttaatttattttcgaaaataatatttaattatttagcttttttgaaaattaatttaattaattatttaatttaaattaaataaatcctataatcaactatccaatgttgttacatgtgtgttttatttattatttatatacaaatttattttataaaacctattattgtttgatctaaattgctatggttaacttgttgacatat

SEQ ID NO: 173138 - DNA, 532 bp, Cannabis sativa
agcagtggtgggcacgggacaagtggacgacgggtacgggcggagctttcttggaggaggagtcgtgggaggatttggatgttagggagagcctctctgtcgttggactgagtcggccgccgaagaagaagaaggagatacgaatatgagatggtggactggcgaggagatgagatgaagcaaaggaggcgggttaaagttttggagaaaacgaaaagagcagtattatatatttatattattcacttttatggttaatagttaatagcttaatattgtttttaaatgtaataaaaataaaagaaaataaatattttagttattctcgaattacaacccaactgttatgttgtggttttttaaaatccgaacctaatacctgtgtggcccatttttgagttggacctgacctgaccctacgggtttttaatttttcaacttttttggcagcaagtcggggcgggtggtcgggttttcgggtctaaatgttcagccacataataaaataaaacattgtaatttgattggatca

SEQ ID NO: 173139 - DNA, 542 bp, Cannabis sativa
ttttagaggcactatactcattgtcggtgataactttattggtaatgagcataatgtcatacaatttaaatatcctaatagaaataggagatattatcaaaccaaacaagttgtctattgaactaaaaacttaacatagataaattaggatactattaaaaattcggataacaataactcaaataaatatatgttaaaatttttttaaagatatttgtactacacaaaataacatttttcgtacatttttgacaccttatgaaattaaaaccctttcgaaattttttcactcatccgaatagaattcatcttataaatattatcaaaagaaaactattttgtaaagtaatatacaagtggacaaggtttagaagtcccattttgcaaccccatcaaagcttaatgtgcatacttgacgaagtgtaatcatacattagtaagtactctagtttgcaagtaaaacattagttgcattctcctttcaagaattatggacattttcactatgttaggtataggggaaaaatgtggaagggatagaa

SEQ ID NO: 173140 - DNA, 660 bp, Cannabis sativa
tattttttctacttattttataccatttttgtttaattttttatgtcttatatcgaattttataacttctattttattatatatattattaattaaatacattttttataatttatgtagtcttactgtgaaatcttttcttatatttgtttcgttgatagcatcaattttgaatttcacaaagtacatttaatttgtttccctcatatgttatattgactgtttttgaagtatttatgacagtattttattattatatgtttaaagtatttgtgagaccacataggtttttgcactatttttaatagttttgatgccttttacagtttatgtgccttttatggtattttgtgccatttattatggcttgtccctatttgtttaggatagtctttgtgttatggttaataggcaagagaagtgatacattttgtgctcatgatttctacttcaacgacttttcacttataatagataagtatttcaaatctttttaaatccttatattcaagagggatttatttaccatcgttctttcacattactttttttcttcatattgtgtggtaatagagtttatttttcttattttgtaggttattttgtgaagggcctacacttaaagagcatttactaataaatttatttttaaatataatc

SEQ ID NO: 173141 - DNA, 804 bp, Cannabis sativa
tgagaaaaacgtgagatatcctcagtcgatccattggtaattatcattcaactcgccaataaaaggatcaagagagtgttagtagacaatgggagctcggtaaatatcctttataaggaaacactaaggaagatggggctcgaaaaagccaaattaaggtcgtatatggtgaatctttatggattcaccggagacaacattgctagtcttggtataattgagctcgcattaacattgggcgaggcacccctatctgccactgttatgcaagatttcctagttgacgacctgccatccacttacaacatattattgggtcatccgacactgatcggactagggggagtcatttcgatcaagcacgtatccttgaaattccaaacaccaaaaggcgtgggagtggtgcgtggcgaccagatgttggctcgcgattcctatcgcattgagttgtagcataggaaagccgatcatcagttgatggcgatcttaacagaagaaagtgaaaaagaaagatgaagaagaagatcttgacccccaagttcaagatgagagaaacctattaaaaccaattgaggaattggaagaggttattcttgacctaggaaatcctacaaagtgtgtatacatcgggaagaacttggacgagagctcaaatagcaactaataagtttctgaaggagaatcagcatcagttctcctggacccatagagatatgatagggatcgacctaaatattatctgccatcatttaaatgttgatccaaactacccagcgaagagacaaaaaaggagacccttggatt

SEQ ID NO: 173142 - DNA, 606 bp, Cannabis sativa
  modified_base (203)..(209): a, c, t, g, unknown or other
aaagaaccactctaacttttagaatcaagtgaggggtattctcatcaattgaaaataacaagaaaactacatgaaattaatagagaaataacatccacacaacgacaaaaaaataacatacaaataataaaaactccataaattacaagagtataacataaaaatacatcaaaagagtattttctataaataaaatcataaannnnnnnaaaatatttaaaattccgtgaagctgtatttttgtatttttttttttgttgtttttgtttttgttttttttttttaaattatccctatattttatatatatattaagtttagattgagttagaaaatctagtgttttgtgaaaataaccactatgaaaatttctattagaaaaatatcttttcgaaattattatttacaaaattactacatttggtcacaaaaataacataaaattataatgtgcgatcttaaaacaacaattattattgttttgcaatcctaatttatattatgcaaccataatagttgcatagtgtaaatttaatataggtgtcgtttggtaatacttttattttttaattttttaatcagaaaatgaaagtaaaatttttgttt

SEQ ID NO: 173143 - DNA, 545 bp, Cannabis sativa
gtagttgaagtagtaaagattgaacaagctaagtgaaaaataggcagagaggagagatcgagagagtgatttagggtttttttcccaaactcctcggatcgacctcggagttgagaaataagggagtgagcgaatgagggtttgagatgagaaagaaaaggaggaaattacactctatacaatttgattttctatacttacatatacttaatattttattcttaaaacatatcaccattgaaaatatatgatcactttatctaaaatctaaaaatacccttctctaatttcccatactttttttttagtgcaaaaacataaaaaaaaaaaattgggggtccgatggggtccgatggtggtccgatggtcacctgatcctacttttgtaggtacaaaaacataaaaaaaaaaaaaaaattggtagcagatctagtccgatgggtccgatgggtggtctgatgggtggcccgatgggtggtccgatgggtagtccgataggtggtccgatggtgcatataggggtgatgtaaatgggggtattttag

SEQ ID NO: 173144 - DNA, 514 bp, Cannabis sativa
gccgccccacactccggcgatccaaactttgcagcttctgattcagccccacctgcacctgcacacatgtaaattcagcttattagttttcaacattatagttttatagtatatatattgttttcatgttctgtatggcctatgggccttttactttttgaaaactacttattttcagtcctagggccttaatattcttactcttagcctataggcactctatttttaaacattactattgtttagccctattactttttatcatggattgtgcaactgaacaggcggtctttaatcctagctatcttcttatggccatatgtaagcattcagatttactttggatttgctttctatattttggattttttgggattttattgctttgtctctgagatctacatcttgatttgagctgattttcctggtttttgaaagataatggtggagatttggaggattggggtgtttcggctgggtcacgaagaaagaggagtttcctccattttttgtg

SEQ ID NO: 173145 - DNA, 511 bp, Cannabis sativa
agcgtgtgtctttatgttatcatgtgatatacatatatataaaatatgaacaataaaaaccctagctaggttattattacatatgtatatatttataatataaatataacgagttaaatattattttaaattttgtgtaattttggaaaaataattaaatgaactctctattttattaaatgacaaaataaattttatattttttaacacgatataaataagaccataaattaatttttttgtcaaaaaaatacttaataataacttgatttagaggtgttaataaaattatgattacattttcttcttctgttcgtgttaggaattgttttccaattagttatattataaaaaattatcaaaaattgagctcagagccctatttttataattttaaaaaatacagagtccattttatcatttattaaaacataggggctaaaaaagtatttatcctatatatagcaggtctagaatttaagagtaatttacgacataaatacttaagttt

SEQ ID NO: 173146 - DNA, 652 bp, Cannabis sativa
tctctctctctctctctttcatcactcccaatagtttgtccactctatacaatttttttctttacaaaaaataactctttcagtttatacatgatctttaatttttacgttatatcattataattatattataattataagaggggctatttacaaaaatatgggaaaatgaaaataaatgttttaatatatatggcataaaaatgttaattaccctaaatatgactttttttaaaaaaaaaacttacaaatatggaaaaaagtcatgaggaatgccataaaaaattttaaatttgtgtgttttttttatttttttttaaaaataaaacactaaaataaataaaaaaaatgatctcaactgtagatgttattttttttttacagaaattaaacttgttttttttttatttaaattactgtttgtttttttttattttttgttaaaaactaattatttcattaaaagcatcagaaaaaaaaatcagtttcatcaaaatcattctaaaaaaaaaaaacaatttaaaaaaatataatctaaaaataatacatactttacattggaagaaactaataatttcattaaaagaataaaaaactagtttcattatgttattacaaatttttttatttaaagttacttttttattatttt

SEQ ID NO: 173147 - DNA, 638 bp, Cannabis sativa
aagagttcgaggggttttgttcgacattggatttataatagattatggtatcattttcggttataaataactaaaacaaggtaaatatgatagatccaccccaaaaatatgaagaaaaaaaattggaatcaatcaatttaaacagatttgattcaaaattttatggtgaatgatatcttaaaataattgaaaagttttatacataatcaattaagaattattaacaaaaaaaatttgaaaaaccacaaaattaattttaaaattcaatcacataaaccctaaatttttaaaacttaaaactttctcaatttactcaatgatttcatacacataatatatcaacagaaagaaaatttaacgaggaataaaacccctaaagttttaagattaaagaacgaaaaattcaacataaaataataaaaaaattaatatgtaattaagggtaattaatatatacatattaattgttacacaaattataggccctaaatcatatacaatagacaatctaataccacctgttagaaacatgattaacccaagatactaatttgtatataatatagaacacaataataatagataataattaggtatgcgtacctgattgatccataacaattatctcaatttgatag

SEQ ID NO: 173148 - DNA, 665 bp, Cannabis sativa
gaattgaaagtattaggagttatgtcgtaatttactcaatatgaaaatcataaacaatcaaataacatcttaaagtttaggatcacttacattaatggtagcaaaataaatatccttctatttagtactctaactattgtttctttctgtcgcatggtaaaaataagtactgaacgtaaatcttcttttcctttgaatgtgttcatcacggtcttctgcaaaggtctgggtatcatcttgaatagagtgggatgatactcaattcacctttgaacatattttgagagtgagaaatatattataattcgaatttagctaaggaaaggaagaagggtgatgtctgacaaagaattagggttctcttagaattaccaagctctctctctctcttcactttctttatataactatcacctaggcttaggtttagataagatagacttaaaataaatacaatgggcttaaagaaaactctaggcagaaatcactaatgggccattgagttagatttttgccacttaatttcatgtaataaaactaatgtgtgttttctaattttaccacatatcacatccaattacttaaatactaattttattttaataattataaataattattaaataaaaataaaagttaattatatttattaattatacccacaa

SEQ ID NO: 173149 - DNA, 539 bp, Cannabis sativa
aatatttatagttaaagttgtttaaaattaataggtacccattaaaaagtagagtaatttgtgccataaatacctaattgtttaactctcagttgcaaataaatacctaagtttaatttttggcagtagtactaataatacataagttataattttagaacttttgtaggtacctgattaaataaattgccatgtgacaatccctaattagtccaagtcattaaaatttttattattttaaaaaaattggttcaaatataccaataaaaaaatgacacatggatataatattaaacatttaacggttaggtacctatagagtttcagaaatataacttaggtattattaccgcaaaaaattaaacttaagtatttatttactaatatgagttaaacttaagtatttaggtcctaaatttttctaaaaaaaaaatatttaggtcctaaattacttatttcaacatatgtaactacccaaaaaaaaaaatacatttatttatatatatatatttgttataaatattaataattatgtggat

SEQ ID NO: 173150 - DNA, 792 bp, Cannabis sativa
tatatataatgctataaaatacaaaattgtattaatttttaatatgtttctcaactttaatcttaggtctgccaactaaacgccttgcaaatagttagtgctaatttataataattattaaattatattatgtgagaactgatacttaattgcaccaataacaatataatactttaagtagtggtatgcaccaactatatttcttaacatctctcattacttttccattatcttatctttactatccagtactcaacaccactattagggctcgtttggtacgccatataaaggtcgtattgtattaaaaaaataaataatactatgtttggacaaagcaatgtattgtattaattattacgatcaaactttttaatacaatgtatgttgtattatttaatacataacaaatggtacgtattagcttgtattataatatttacaaaggatttcaggtcaacaccaatctctgacccaaacccggatccgaacccaggacctagacccgaacccggacccgaatccgggacccgaacccagaacctggacctggacccggacccagaacccgaacccggaccctagacttacaccccggactcaaacccaaacccaaacctaaacttgggcccgaatccaaacccagacccgaacccggacctgaacctgaacgtaggatctgggaccccgacacgtagttggcgttcgggtcgagtgtgtaaaaaatatattataactttacacgatcaattaatacaagtcaataccaaacattgtattgtattaaataat

SEQ ID NO: 173151 - DNA, 762 bp, Cannabis sativa
  modified_base (539)..(545): a, c, t, g, unknown or other
gtataagtcaatgctcgagtctttgtcctgtttgattgagtgtttttagtttttaaaattgtattttctcaaaagtaaagtatgaatataaaatagttttttgtcaaatagtatttagcacaaattttttaaaactattttttgattttttcttactaaaaaaaattaatattttaacaccataccatgatatgaacccatctgggtccgggttcaggtatagttccggatctaaaatccgagtatgtgagtaaaaatttaaaatgtaaaatctgttctgttttagtttttaaatggaaatttcactaaatatacataaaaaaactcctatttcaaaaaaaaaaaaaaccctcttaattattttgtacaaaacaattctattaacttcccactttacccaaagtacccttattattattttttcaaaacctaaaaaaaaatacaatttttattagggatatttgcggcataaataccatacgtttgtaactttaagtatttaatccgtcaaaagaaaaaacatgtggtatataagtgtnnnnnnnttaaaacatcaagtatttatgccggaaatactctatgtttggataggatttaacagaaaagtagtgatggaagtaacggaaatgtaacttaaggtatttaatccgtcgaaaaaaaacatgtggtatttaagtgtataaaaccgaaaacgtatggtatttatgccacaaatatccctttttattaacatcccccaccaaccaccccatcaactaactc

SEQ ID NO: 173152 - DNA, 816 bp, Cannabis sativa
accaccatatcatcttcttttgttatagaatctaccatgtaccttgcttctttttctttttgagcacgaactcaaaaaaacatatttcttgtgtacaattttgttgcctcctcctcgatatgtgccatgtttgtctgctgaagcaacggcatagtattcatcgtgtcataatcatccttggcatctcgagttcttagcaatgacattcccacatcaataacacgaacaaattcatacattttcatcttctcattcactcttttttttaagtagagcatgcatgccctcacacctttgtgttgttgtcattacaacaaagaaattacctttcaggtatgcctctgcccattgctcttttctatcagtcatccactttgcccactcgttttttggagcccatattcttcaatcaaatctatccataaagtttcaaactcatcaacaaagtaatagttaaaattaatttattgagcttccttaaaaactctagatccttcacagctatcgcggacttcttgtggatgtgccaataacataatctatgaacaacttctggcatggttacattgattgcaagtcttattgctggatcaccacctatgacaaccgtatttggtataacccctcccatgtagtctataaatgtttttgttgcccatgtgtatgtatctgaggactcgtcagatagcaaagcgaacccaaaaattgttaatctaaaatgattattgacccctaaccaaaccagaagaggcttcccataggcgtttgtcttgtacgtgcaatcaaaggcaactgaatggccaaacaaatggtagt

SEQ ID NO: 173153 - DNA, 556 bp, Cannabis sativa
aaactcgtttgaatagctgtggtatggaattggttcgggtgcaattgggattcgcttgttgctttacggtggatgcaaggggtaagagtggaggtttagcgcttctttggtcagaagatttcaaagttgaaatcaagtctttacgatctctcacattgatgcattggtggaaaatgacctggggttcatttggcatttcacggggttctatggaagcccggaccccggaggaaggatggactcttggaagcttctgagaagactaaaagatatgttcactaatgcgtggatttgtggcggcgactttaacgaaatcattaaccaaaaagaaaaaaaagggtggaggtcaaaagccagactaccttatgaaaaactttcgatctagcatctcggagtgtaagctgaaggaaatctcctcggatggaaattcttttacttggtgcaatggtcgagcttctaatctaatttttgaaaagctggacagggtgttgtgcaattcggcttggctggacagatttaaatctaacaaagttactcttctaaaatggtggaattc

SEQ ID NO: 173154 - DNA, 853 bp, Cannabis sativa
gggtagtacttagctttcatagcattgcaccagggccggttatcattggtagcaagttgccaagcaagtttagataagagggaatcattgatatcttcaaatcgtcggaatcctaaccccccccccctctgcttcggttgaccagggccagttataattgcatattaccttaaaaacatcaactcattaaaaattcaacaacaccaacactaaggcctaaatatcttgctttacaaacatgtaatccaatctaaatatttctttttcattttcctaggtaatttgtatcctaattctcatttcctgttgaatacatgaaattaatgcatataaagtaaaaactttctgtgaccaaaaatctctattttgatttctccatagtgaagttagagtcatggatagtacttgcttcttaaatggaaaaaaacttgcccgggatatacctctcaaaagaggcattagcttgttaggtaatattgtagcagtgaacggtaaaatagaaaatgagctgcctatgaataaacaccattaatggatgtgcaatatgtaagaaattagtgatttctccttacacctaacagataacacaaatcaggtatcaaggtcaatttctacctttactaagtcaaacaaaccagttgactccaactacttcattatgatcaatatcgaaaccctttggaacaatcaagaacaactcattttctccaaacacacaccaaagaaaccctagcaaagttgagagttttctcttcaaaaactcaaagtttgcatcacactacaacaatttatgttaatagcggcggacttattagcggcgggcactctccgccgctaataacaggggtattag

SEQ ID NO: 173155 - DNA, 548 bp, Cannabis sativa
catagacaaaagttacacaaaaatcatttggaattcctgccattttaacataacaatgaatatattgatccgtttcagcaacaacaataacctgaacaaacactttcctccacaagagcaaaagcctcccctctataacattactagagtaatgattccaaccatgaaacctagcttgaaccataccctcaactttattattcttcattttagtctccagtaaacaagctacacctatattttttattctgcaagtatccacaacaatatcctgcttattactactattcaaccccctcacattccaacacattattttacaattatccataaaacaaccagctaaaccaagttccccttagtctcttcaacaatttgaacttgaagagcctcataagcatttttcgaactattttctttggtgttttcagccccctgcacttggccttctaacattattttcattttgcttctatttgaaacaagttttcttggtgtgatccaatctgtgcccttgcctttttctcctccttcctcatttccttctc

SEQ ID NO: 173156 - DNA, 506 bp, Cannabis sativa
  modified_base (411)..(412): a, c, t, g, unknown or other
acttatcctccaattcaatgatttacaactggatgggatctacctgtcgttgatttgcattaagttgatggcgcaagtcaggtgcattttaatttagtcgctcacgaagatcaggctgtgttcgattcaagtgctcgcggaatttaggctatcttcgatcacaattactcacagaccttttctctgagtaactatcaaattagtagctttgcgtattggtcatgatttcctggtcatcataacatcgaggtctacttccctcacgtgtttgcctgcttgatcgactgtgtcctcgagaccttaagtgtcctgaactagaacttgcttcatcttgtatcggccttctccttcagaagaggttagatacacgccctctagttagatacgtgtatactgttgggttttatgccnnaaataaaactccattttaatgtaatctttgttatttaaatgtcaataaagaaacaaaagtattttcatcacttattgtgtcatttggttcatgt

SEQ ID NO: 173157 - DNA, 616 bp, Cannabis sativa
tacctttctagaattttgaaagttattgctaagaaagaggattttcagtttcatgagagatgctcggagcttaaaatgaatcatttagcatttgcagatgatgtccttcttttcagtaatggggatttcaagagtgtgtactaccttctacaaggcttaaagctttttagccaatcttcgggtctgcaacctaatcctcaaaaatcagctatatattgtagtaacatggcaagcacggaagtcactaggattctggatgcctccggattcattcaaaaacagatgccttttcattatttgggagtgcctatttgtgctaaaaagatatcgaagaatgaatgttctgctcttgtggagaaaatgacagcaagaatccgaacttggagatcgaggaacttgtcgtttgcagcccgagtagtcttgattaactcagtcctattatccattcatgcctactggtctcaggtaatgatattgcccttgaaaattgtccatgatattgaagctatttgtcaaaattttctatggacagggcaagataaagccacgggtcctggtgtgatagcttgggagaaactgtgcctttctaaaaactgtggaggacttggtttcaaaa

SEQ ID NO: 173158 - DNA, 589 bp, Cannabis sativa
aaaaaaaaaaaaaaaacatcaatagtctctatcgtttgttgatgagcccatattaaccttataaatatgatcaatttatgtattaatattctcaaattgattctttaaattattgattagtgtaattttaattttttaggatattttaaagactaatcatgcatttagagtcatttggagggatgttagcatattttggtggaaaatagtggaagcagcgagctcgattttataaggcagaacttaattgtaaattttgacaacattagaagcagaactggacttggagctcagcataaaagttttagattttgttcttagcttttcgaaacatcttgaattgtctaattccgagtaatatcgagagagttatggccaaaatactatcagtcgtcacagtaggaaatttttgaaaaaaaagaagataaaaagatagcgaaaaaaaagatagcttttcaagtagagttgcgattttttttttatcttttttataaagatgaattatcttttcttttagtgagatatttcctaatactataaatataatcctaattctaaggggattctgttgacgcgatttttcgtcaac

SEQ ID NO: 173159 - DNA, 615 bp, Cannabis sativa
aaatgagaatgatacaatacaaggagatccaaatagtcattttgaacttgtcctaaaattaggagaaacattgttactctgttgcaatcttttttttcaaaaaaaaagaatagtactttatcaaatgagctattatagctcaaatatttagctcatgaataatgtttaactacatgtaaagaaatattatttagtaatgtataaatattatatatttttttttaaagtgtgtaatattattatatatatatttttttttgaaataaataaaatatattaaattaaataattttttttaaaggaattattacattgaaaatagagtaatttgcggtataaatacttaagtttatcttttagttgcaatttaatacctaagttaaaattttggcggcataaataccttctgttacactttcagatatttcgtaggtaccttactgttatcttgcacattagacaccaaatggcatgacacatcatttaaaataatgccacatcatttaaaatattatcacatcatcttattaattagccacctaatattaatcattaaagtaaaaattaagtttgtttttaaaaaaatatttccataaaaattaatttaataaattt

SEQ ID NO: 173160 - DNA, 749 bp, Cannabis sativa
aaaaatattcccgtaacacttttttaaaaaactaattgggtatagcccattgaaaatatgtcaaccagggcgctagacccagtgccatgtgtgagcttgggcgctaggtccagttttaggtctttcaaaagttctatttgctccccaaaaatacttgaatcttattcttttacaaaaatggagaatatgcttagaagaatttttggaaaaactcctcagaattagcccaagttgatagaatttcaatttgggcagtgggctgacactagatgtcaacccgagcattggtcgctcattttggcctcttggttagtctgtttcttcctaaaaagcacttgtttccttgtttttgatgaagacaaaaaaatacccaagaaagatttttagtttgatgcttgaaagtggcccaggttgacaatatgtcaacctgggcgctgggtgcctagggcacctggtgctgcgggtgctaaaaaataaaagttctctgaatttgatattgattcctcaaatatgtttgtgagatgtctaattcatgtcctagttcaaagtttgacacatttgtactaagaaaatcctagaaactaaaaccgtagttggggtgtcaacctgagcgctaggtgaaacactaggtacccaggttgatttttgtggagttgtttcatctattttcaactcttgggccttggacttggatgcttcatgtctttatggtgtagaatactaaaatagtgagttggaaacaacttgga

SEQ ID NO: 173161 - DNA, 505 bp, Cannabis sativa
  modified_base (449)..(458): a, c, t, g, unknown or other
aactggtttcttcatcaagaaactcaagaaactagcttcttgatgaagaaaccagtttcttagtgatttttgcggtgatctttttgacgacaatgccaatttcgataatttttctggcgtcggcagcaactctaaagaattttctgacaccgacagctactctggcgactttttcggtaccgatagcaaactcaaaaaaaatgtcagaattggcattgtcgtcgaaaaaattatccaaaaaattaccaagaaactggtttcttgatggtatttttccagcgacaatgccaatttcgatgacttttccagcgacaataccaatttcgatgacttttccggcgctgacaacaactccaacaactttctcggcaccgacagctactttggcgacttttccggcgccttttctggcaccggtaacaactccggcgatcactgtagtttcattnnnnnnnnnntttttaaaaaaaaaaaatatgaagggaattttaatttttttttatgg

SEQ ID NO: 173162 - DNA, 1037 bp, Cannabis sativa
ggcacaaaacccaacacttctagctaaagacagtgattcaaaaataaaagcaattaaataagataagtaaaagaaataaaaaacaataaaataatgtgaacaccagattttaaaaaggttcagccccgtaagtatggtaatagcctactccccttgtatttgtattgacttgagagaatgaacatagtgttcttcctctcgaaagctcttacaattgatccctgagtaactttctctcttagatcactcttttctctcttgaatgtatatctaaagcaattttctagatccccttcatagtgaggctaggctactatttatagggatttcatacatgagggatagtttcttttttgcttataatgagtaaaataagaaaatacattaattacataattacaatacaagaaataagaaactagaatgtgttgacgttattctctgactcaatctagtaattacaagaatttcccttgcatttggacacaacgagattgatctctggaattgccatctctcatgctccactagaccttagcacatttgcatcttggtcggacatgtcttcaaccatcttgttcagatatctgaatattacagatgctaagtagtcatttatgggctgctagggatattttcctccgtctagatatctaaaatatgggacatgtgtcatccattcctattgccatgtcatggtgcaaaaaacagaataacacatgctctaaaagaaaatgatatactatacaataaaacatatatataacaaaaaatatatatcttacaatagaaatatatataacaacagcaagtaaatataaaattatatgggatgctaatataattatatttcatgtcaataaaagtacaataaattagaacttacatattattttaaaaaaatgatataccttataacaataactacatataatattcaccaaaattaactacatataataataataaaaaatatatattacaaatatatatatatggaacacttcttaattgatattacccatgaatggttacta

SEQ ID NO: 173163 - DNA, 589 bp, Cannabis sativa
tacttatgtactttgccattgtagcgagatgaaggcattacttctggccttgcttataaatttggatcataaagtataagtacagtataataatgagacataagaattaattattgaaccaattaggttgacacaatttctttcataacaaattttactatttctaaatcatgtaatttaagtctatgaaaaaaaaaaaacttaatgtacttttaaaatgcaatgtattgaacatcaatgtttataacaattataggcaccaataattatatggataccgtaaacaatggtactaatctattaaacattaaactcatatctaagtaaatcatgtaatttaaaactatggaaaaaatgttgaagtgttttttaaaatgcaatatagtgaagcacaacactactcacgaacttactatgaatgtttgtggattatattctcaaaattactgatatttatctttaaacatcctattaatcactttgtaataatgaaacaactttgaaagagaattactgcacacgcacatattagcagtgaaaatcaagcactagttagtacttaagaaatttttttttagaaccaagttaa

SEQ ID NO: 173164 - DNA, 661 bp, Cannabis sativa
gttagcatactgctaaaagaagcaatgttattaggcactactggtacctgttactttctatggttgacgctctatgatttgttaaaaatattccctaaaatttattgtcttaagttttatacgttgtgatacttaattacactaatagcggtatgacacataggagagttctaggcaccgatagtgccttgtagcatttctctgttaaaaggtaccaatggtgcttatcactatctttggtgtcatatctctattagtacaattaagtaccaaatcccatataatttaaggttataactttagagaatatcgttaactaatagtaagatggtacctttaaagaatgttagacacctactatccaataacaatactctatcatttgtatttgtaatatatttttttgacatttgagaaagagaggattcgaacatatttctatatgctagtggatgtaaacgcaatcaaataccaaaaaacaaaaataaacctttcatacttatttaacataaaataagttaggtacatatatatattgggaccatgtttccgaaacattaaacacaaaatatctagattccgagggcaatagatgaatagaccaccaccacgcgtatggcaagcaatctattgcccattattatacactaaaaccaaaacc

SEQ ID NO: 173165 - DNA, 855 bp, Cannabis sativa
ttggtgtattatgggggattttaataacattcttcataattctgaaaaaaagagggggaagagcttatcctcggtggcttttagaggggtttcaagagacgattcgtcattgtggtttatgttacattgacttacttggtcacaagtttacttgggaaaaaagtagagacacttctgcatggatggaggctaggcttgatcgggcaatggttaacttcgcttggttgactcgttatcctggagctaagctttttaatttggcggtgtctccttcggatcataatccgttgttcttagacatgttgcaacatgttcaaccggctggggatcatttttttcgctttgaaaatttttggacaaggttcgaggagtgtgaggctgtcattagggagagttggagtcggtcgggtggtactcgaatgcagcagaaaatttctcaatgtgggcaggatttaaaaccttgggggagtacggtggcagggaacttttctgcaaagattaagcaatgtaataatgatctcaaattgcttaaaggtaggcgagatactgaggggaaaaagctgtatgcggacactaagcttcagctctttgaaacacttaaccagaaggagatcttttggcgtcaacgatcgaaacaattatggctaaaaaatggcgatcaaaacagtaagttttttcattcaaaagcttctgctcgtagacgaaatactaatattgtttgtttgaaagatgccatgggagagtacaaatattgggagtcggggttgggtgacttaatgcttgattatttctctaatattttttcggctgagcctggtagttgggatgaagtgttgagttgtgttacgccaaagg

SEQ ID NO: 173166 - DNA, 818 bp, Cannabis sativa
atcttcttcatctacaaaagatttttcatacaaaatccaaccctagtctctctcttttctcttttctctgtacctttctctctctctctctctctctctctctctcaatcttttctttctctttctcgaaactcaatctgatcgttctacctgaaaagataagtgttggtagtatttataggcttaggatgaatatcataaagttagtggttgcaagaagcgagattgttaagttagttaggaaataaccaacttaaccaactctcctttgagtgagatctccatgtaagcataagtataggtgcttccaggaacatgcatgagagcttttaaaaacacgaacaaaagttactcactaaaggataggagagagccagctagagtcgactatgcggaactcctttctaggaggaacaactatccatctggaacacctttccagaggaaggctagctttcttgaggacccttagcattccaggacctgctctcgtgagtcaacaactttccgggagtgataataacttttggagacctttttattttgagaaactattctacgaattccacatagtttcttcaaatataaaagtatgaagatgatgaagaaagaatgcagccattgtggtgtttctgaaatcttagtttactaacttttgagattgatcaagttcaagtaatgcttgaacttgtttactgttaagaccttattcctaacatgatcaggattatcttttgttctgacgttctctaaatcaaccaaccattcttctatcttctctctaatccactagagtcttatatttatatatttactat

SEQ ID NO: 173167 - DNA, 522 bp, Cannabis sativa
aacacaaggacttctaattagtgtatgtcaataatacgtattattcctgtaaaatgatgggtaagtctaagtcaatagtatacttttctaaaggaatatttcggtagactatagtctatatccgttttgacatatagaaaagtttctttgttcatttttctttttagaaatattgagactactattatatgatttgtaatagttaactttataattaatttcttttagaaatattgagactacttgaattatatgatttgtgatagttaaaatctttcaaatttatatgctgttttggtattcataattccatttaaaaagttatgttaaatgccaaataagcatgttagagtgtacataggtctacacacgatatatttgtattgatctatgtaattttagttatttaaatttatgaaaataattaaaaattaaaaaacaaaaacaaaaataagttgaaaaaaaggagtgctattgtaaactttctattacaacctcttagtcaactttcgtgctcgaaaa

SEQ ID NO: 173168 - DNA, 694 bp, Cannabis sativa
gtttttgtcaaataaagaagaaagaagtactactacgtgttgatcactagtagtagtagctaatattaagtttggtgtttgtcacatgttttttgaacaaaaaggaatcacgtgtggagtgtgttgggtggtgcagatttctttcttacttcttcaatctttctataatttcaagaacaagatgttacttaatataagtgctttataccttaacctatcttttgattggacagactctgtctcaagctaattaggcctattaggctgaacactctaattgggctttttttataagaaaaaaatttatggttttttgtatatataattgtaaaatatttaaaatatagtattttcaaaatataataagactgtttttttaataaaatattaaatgcagtattttaaaaaataaattaagtattttttttataaaatatttatattttttagtaattaataataaaaatacaaaatatgatgtttttaaaaaataaatttggagtctttttattaaatgacttttaaggtctagaatttggatggaatggctttagccgtgtgcccatgcagccccatccttaaacagatccgaatttagatcattgataatatctcgaggctttccattcaaaataatatggggtaagttgaaaaataccctcttttattcatcaattaatcaaatttacttcta

SEQ ID NO: 173169 - DNA, 773 bp, Cannabis sativa
ggtcatcgtcgctaacattggagtagacaacattgatcgcatattagtggacaacagaagttctgttttcaagcttctaagcagatggggctgtaggagaaggatatgcgaccagtggtttcgagtatctacggttttaccagagacaccattgctttaaaacgaatgatcaagatcctaatcattttaggaaccgcacctgtcgtggccaagtcgatggctgactttgccgttatcgaccagtattcagcatataatgcagtgattgaccattcaatcctaaaagaaatgaagatcataacatccatctaccatcttaacatgaagttccctactcccgctggagtaggatctgtgcgaggagtccagtcgaactctcgagaatgttacaatacaacattaaaactcgcagaaaagaaatcagtcaacatgatatacatgctggaagcaccacctcctcgacaagaagtatttagaatcaaggagataccgcacgaagaaaagccagacttggatctgaggatcctcgattttaccattgaagtacccattgatcctttagataataataaagttttgaaaattggttctaaacttacttttcaacagcgaaaaaagctcgttacttttctcaaacaaaaccttgatgtttttgcctcgaaacattcggacatggtcagaatatctctgcaggtcatgtgtcaccggttgaacattgaccccaaagtgcgaggtgttcgacaaaagcatcacaaaatggaccccgcgaggta

SEQ ID NO: 173170 - DNA, 631 bp, Cannabis sativa
atagtgttgttctttgttgtattgaatggctctgaacgttgttagttgtaatttgtgacttttgtgtcctcgaaatggaggtagagtttgttccgaacactctgtgtttttctgggtttttttgttttttgcgatattgtacgatgttttgtgcaatgtcataagaaatctgaggttagaggtgacatgattaattttggcgacattgtacgatttttgtgcgattttgatgttgggcgatttgtgtgcgatatttttgcagcattatgtgattttgttgcgcatgttatcttgtgcgacattttgtgatattgtttctttgctgtgcgattattgtgcgacatgatacttgtttctattatttttgtattaggcaacattgtgcgacattcgtcatagcttgtgcgatatagtatgccgattttttctgtttatttatttgtatttctttgggacagattcaactgtatttgtgcctgtactgtatgatggcatttggactgtggagggtttcaagtaggaatttgattcctcaaaaagtaagacattgatgtttgacattgactctacactgaaaaaggtgcgtgaagttttgcatgaggagttagatgtggacccattggtgtatgaa

SEQ ID NO: 173171 - DNA, 630 bp, Cannabis sativa
gttcaggtctgggtttgggtcttactcagattcatgttccacgactcaaaccaagactcggactcagacccaggtctgggttatgggtctgggtcttggttaggttctgggtctgagtctgggtgaaggtctttgttggagagtgcgggtatgggtcccagatcaaaacacgaactacgagttaggttcaagccccgggtccagatctagttcacagtcttgggtccaagtctagttccacttcgggtcacaggtgccggtccaaattctaggtcagggtccgggtctggggtcggattctagttctcaatcccagttctaatggtcgtgtcctgggtccaggtcccatatccaagttcgagtcctaggtcccggtccgagtgtaggacccggggccaaggtccaggtgccccatccaggtccgagtaccgtgtttagatttgggtctatgttccgtggcccaggtcgagataccccatccaggtccgagtcctaggttccggtttgggtcctagtcccagtttcgatttcgattcagtgtctgggttcgagtttgggtctaggtctgggttgagctctgattccttgtccgactctgtgtaaagcgcgcttagtttaatttggaaatta

SEQ ID NO: 173172 - DNA, 597 bp, Cannabis sativa
cagctcttatacatgcagctactaactattgatctaagattaacgagacatatgcatgcatcagaatatacaaacaagaaagggatattcatccacccgagtagaatgaatatatcatcataaactgcctcacattacatatagcgagaagatcacctcgcattacaaaagccacaaagagaacataacgagatggaaaccatcccaacacttagcatttttccttatcaagatggacaaggaacataactcgcgaatcagagaagatataaccttccacgccagcaatgaccatctaaaggataaaactaaagagcagttaggtagttatttagtattatcccacatgtgatttaaataaaaagtgaggattgtctacgtttcatgaacagttatacttgaatcaattccaaaaaagataattgtcaacctatactacctaatttttattttcacagtttcactgtgcgggaagtaaatcaccaatttttcaagacttttgtcagacatcccttcctagttttctaaatcagaagcaattttgtttatctgattatcaaaagtatacaattgtgatgagacaatatgtatttatag

SEQ ID NO: 173173 - DNA, 660 bp, Cannabis sativa
attaaaaaaatcataaaattaaaatttctcaaaacaataatatatatgaaatatttttaatggttaatacctatatttatgggtattaactaaatttaactatattacttttagaaatattaaactattagattttgatcagatgacaaataataaaataaatatttgaatttctatatttaatttataaattttccttttatattttagggaatatacccatttagtacctgtgttttaatgaaaaatatatttggtaccttatgttttcaataatacttaattagtacctcatattttttattgtacatatttatcctaaagtaaaatttaatcaatacagttttatcattttaacaaaataattttcagttatgtgtaatcaaataagtaaatttgaattcagaattcataaaattttagactgttaattgtattgataaaattttatcaaaaaaatttgaatttagggtaccaaataagtataattttaaaatacaagatagcaaataagtattattaaaaatacagggtaccaaacttgtatttagacaaaacacaagatactaaatgtgtacaccctatattttatttacataaaatacactcttttaatatatttttatgttgtacatatttttttatgttatattttgatgt

SEQ ID NO: 173174 - DNA, 579 bp, Cannabis sativa
taacttgttgcgcacctatctaaaatgataaatgcaaagggaattcacggtatttacatcagatgtaaaatcactaacagtgtaatttaatatcaaattttacttattttattttaataataagagttaataacgccatatgtacttaacattttaagtatataagtggtataaattcaataatttttttattgacatgtatactcaatatttgtaaaactgaaactttcgtctaattttatctgtacaaactctattagtgtctcaaatagggcatatataacacccaaatatcaaatcactaggtctggatagaaacatgttgtattaattacttctaaatctttttttaataaattcaaaacggagtctgtatagacaaaattagatgaaaattatagttttactaatattgagtatttatgccactaaaaaagatcattggatttatgccattaaaaaaactcattggatttatgttttttacaaactcagaactttgaatctttatactacaaattttcctaataataattatagaaaatcactaaccatataggtgtcaccttatgctggtgc

SEQ ID NO: 173175 - DNA, 640 bp, Cannabis sativa
  modified_base (352)..(355): a, c, t, g, unknown or other
  modified_base (601)..(606): a, c, t, g, unknown or other
gcctgctgagatggcaggactgaccacatctatagtgttcatgggagttccagtcatggttggaacatggagattaggatctgtagttagaggatcttaaaaaagatctaatgatgtagattgtgcaactgggattctccttgtgttaaccatggcatttgatcagatatgatatcagctcgctttcaataaaagcaccaaactattcacctcaaaaagtggccaaccgatagcggaatcatattaatactgatgcttgccgtgtgtcacacaattagaagtataaagtaaaagaacacacagatttttatagaagtttggccctctttgttagcgggtaatgacctactcnnnntttagttgtattgataccgagagataatactattcagatcactataggtagaatctgatatagttctctttagattacagtatatgaatcagtaggcagatctttaatgaaagagagatcaagccttggaggtgtgtgagaaagaggaagagagagccacttgtgcatgtataagagagataaagggagatagactagggttccaaacttagaggcttcaatgagacttagagtgacttaggtttnnnnnnttgagttaaggccctttatataggagagcataaa

SEQ ID NO: 173176 - DNA, 744 bp, Cannabis sativa
ctaaaagatattaccgaaatatactaataataaaaattaaactttgaaaggattttttgaaagaaaaaaattagaataatatagatacaatttttctaaattgattattataaacacatgaaattcacaatctttagatctacgtaaatttaacatcgaacaactatataaaatatttgcaatataaatttatttaacatttttcagtgttgccttcgggatttttggaaacatgtctccggagcttaaaagtctgtacttttcatgtctaattgtgcttgtatcttttgagagtatgccattaaaagctcatataaaattaaatgtcatttattttgcatccaaaatatattattctttataagaaatttataatcacaacaataaaaaaacttctaatggagtattaaaaaaaatatgacaaacgcttaaacactaaacaaaaaatgctaatgaatgaaataaattaaatctttgttttcaaaagattcaagaagattagtgagggctttgacgatttttttgtgagagaatttcaaattcttaaaaatgtaaaacatatcaagtgtcaaataatatatgaacatattatataaactttagagaggtattggaacaatataacttttggtaaatactataacatttttttttttatgaattttggtaatactataatcaaaatactttataaaattaagaaagaaagataatatatttcttaacttctcttacaccaatatt

SEQ ID NO: 173177 - DNA, 656 bp, Cannabis sativa
ttttaagaatatatttatatctatgatatttatgtagggaaattttcattaatatactttaaattgattttatttgtaaaaataccttcaacaaatttatttgcgcaaataccgatgtgccgcatcagtataaataccgaaattcaaaattattaccaaaaattaaaaaaaaaaacttgaaaattctcgcttccagaaatttcggtgttttgcaagtttaaaaaaaagtaacattttagttgcttttgatgtaaataatatatcaattagttactttttattccaaaaaaaaaagtttcaagataattttttgtcataaacatttagttacttattttgatcaaataactttaaaactatgatttaatttttttaattttaggctatattatatgttattttattatttaggatactttgaggttatttatttttttctagcaattttaaagcatattttaagttgtgggaaacagtttatatattttgtctgatataaaaaatgataaacaaggtaaaaataaccaatccctttattttatagattattaacatagaagtaactacaatataatatttaaacaaaataagtataccatctaattttatgggtttactacaataaatattataatatactacaaaaaatcttactt

SEQ ID NO: 173178 - DNA, 511 bp, Cannabis sativa
gtccttaattataataactttaagcactagaaggagaatattttcattgttcttggctgcatggatcttgaccttgcattaaggatggatcgtcctactcctcttacggatactagtaccttcgagcaaacgaggatatatgagaagtgggaccgttcaaactgtatgagtcttatgatcatcaagcgcgccatacctgaggcttttaggggtgcggtgtccgaggaggtcaccaatgccacaactttccttgctgaaattaagaaacactttgtaaaaagcgataagggaaacaagtactcttttaaggaaacttatttccatgaggtttaagggcaaggaaaacataagggagtacatcatggtaatgtctcaccttgcttcaaagttaaaggcactaaagattgtgcttttagatgactttcttgtgcatttagtgcttatctctcttcctccacaatttagtcaattcaaggtcagttacaactaccaaagggagaagtggactctt

SEQ ID NO: 173179 - DNA, 742 bp, Cannabis sativa
atgcaacttgatgttgtaatttttgattagttatcttttaaagtaatttgaatttgttttaagggtggcaaaacgtgttattgtattattgtattatttttgtgttgtatttgttttgacccgtttttgtattttgttttaatttgttgactcgttttcgactcgcatctaattttctcaatcttaactcaattcgtaaaaaaatcatgtcgtgttaatgttgacccactttgacctttttatttaacgtaaactttaacttattttttgaaaaaagagggtagaaattttattcaacatgaaaaaatatcctctcttacaatcgaaagcaaatcagaaggagcagaaagctcatccaaaatacaacctgacataaaacaggacttccttacaatacaatgagcagccctatttgcagatcgtttaacaaaagaaataaaaacattatgtaactctgaaagaagcaaacgacaatcttggacaaggaaaccaaattgagatggcatttgaactgaacctttaatagcctgaacaactaccaaagagtcagtttcaacttccacatcagttaattgattcgtcttaatccaacttaagacttccttaacgcctacagcttctgctatctcggggggccaccaacccaattttactatttgagaaagcttccacaaatttgccatgtttatctcgaacaatgaagccaaaaccaaaccggttttcagtttcaaaagggccccat

SEQ ID NO: 173180 - DNA, 522 bp, Cannabis sativa
ctctgatatcagtacatgcacaattaatccaatttatatattaggttgaaattccgtgcaatgaaagtataattagttttctttttaattaagttaaattaataatgttaagtgtaatgtatgtttaattttttttaattaggtaatttatttttttaaaaatttttgaaatggagtttgagagggatttcttttttaaaaatatttagctattgctatattggtgaatatgattatatatacatatttttttaaaaaaaattaattaaataacgtatctgataatacatatattgtaatttactatattcttaatcaaaactcacataactaaatttaagtgtgtatatatatagattggattcttatattatataaaggttttttattctcaaactttaagaaaaatatagtgtgtgaattagtttactatagctaaaacgaaaagtaatcaatttcttattacaaccattttaatttaaaatataaaataaataataataaaattaaaaatatttataa

SEQ ID NO: 173181 - DNA, 683 bp, Cannabis sativa
ttgtttcatttcttggttagcaattcaggggaggcttagaacaaaggatagattaaggagaatggggatgaacattgaggaacaatgtgagctatgctcaacacagaatgaaaatgcaggccatttattctttgcttgcagtgtatctgctgcctgcctacaagagataaagaattggctgtcatggcatgttgcagctgataacatctccactctaaccaggtggattgggagatcaaaaatgagcaagtttaagaagaatttctttgttgttgctcttgtgtgtttgatatacaatctgtggaaagcccgaaatctcagtttgtgggagatgactaaaatgaatgcagagaagttgattgaaggagtaaaaaaagaggtccttaacaggactgctgcagtatggccaaaaaatgtatcaactgaagacaccaactggtctcaacacctgtaactggttgtattgatgtttagtctgtatagctcaaggaagtttacacaagtattaagtgtatagttttaagttttgttatgccattgaggcgctatttgtttgtacaaaaatggtttttgagtaaataatattcactgattcatcaaaaaaaaaaattaaaataaataatttacaactttaatctattcttcaaataaaattcgaaatttcagcatttaagaaatgcaat

SEQ ID NO: 173182 - DNA, 982 bp, Cannabis sativa
gtatttatttacagtcttgcttttccactcatattacagaaaactataaatcatggatcataagtcatggctttggctttctaaaagggactaactttctcaaacttaattaaccttcttggaatttcttggtaagtacttgttatgataaaatcagttgagtttattgagatcatatcagttgtgaactgacatgaaaaatggtactcggaattcaatatttataagctttggcactttgcaagtgtttgaaaagaatctgagttaagtgggaatttcaatctcgattcctcagaggtatattcttctataattgctatattatccatagcgaaataggttttgagactttgtatgttgcggtgataatggaaggttgataacttgcctgttttagtgaagtaagatttgtgaaatttgtgtgaagcggtgatataaggatgaaaacttgtgttctctgattgtttgcagttaaaattgacagatggttaggttaataaaatagggaaaatgttgtctgatttttcatagatatgtttatcatattttctaagcaattgcatgcattaattgatatatatcataatatgatgttaatgtaggctaaaatagaatgtctagtcaaatcaattctaattttgaggatgatattgattttgtgccatcaacaatatattagtaatgcaatagataaaaatcagactacagggacacagaaaaaaacaagaacctctcgtgcatgggatcattttacacgacaaaatattgatggcaaaattaaagcagtttgcaattactgcaagcctaagctggtgggagaaagttctaagggaactaggcatttaaattctcacgtagagaggtgtccagtaagaaaggcctaacttgcagctaattctagtgcaactacaagcccttcagttactttcaattttgatccagatttaggaatgatcaaattggctcaaatgatcgttaagca

SEQ ID NO: 173183 - DNA, 715 bp, Cannabis sativa
atgtacgagatggctgagtgaactggagttctggagcgacaaaatggaaactttaaggaggagaacgcaacatttaggagtgaaaatgccgcaataaaatcacaaatggagtcactaaaggctaccatgacgactcctggtgttgctcaaagtcggttccgagttccaattacaccaatggcatcattagactcaactcctataagaatagagacccaagtctctaatcaacaaacacttggagggacatcgactccaacgttaggaaatcattctgtcgcaggaggttctcaatctcaacaatctgaacatactgatatgcaaacagatgggacaaactctagaggtctaacgaccaacaatgtggcctccgacctgcctacggtcagccttcctacaactggtctgcctacggtcagccttcctacaactggtcttcctacggtcagccttcttacaactggcctgcctaacgtatagagggactttttgctcctaatgatcaagatattacatcattcataactgagcgagggactttttgctacaaagtcatgtcgttcggactaaagaatgcaggtgccacgtaccaaaggctagtcaatcgtatgtttaccgatatgcttggaaagacgatggaagtttacattgacgacatgcttgtcaaatctttagcagcagagaatcacctcgatcacctcaagcaagcattcca

SEQ ID NO: 173184 - DNA, 563 bp, Cannabis sativa
ttttcagaatacaatggtaagatgtaaaaccatgctcaatctattcaatgaacttaagaaaacttctcattcctagtattaagggtttgaagagaacatcaaaacctatggatggtggtatacatggcattttacttgctctctcacaagcaacttacattagtaaggttctagagctcttttcaatgactaactctaatggagtcacataacttccagacatggagttcatttatcttagcagttgttaactacttcaaaaaaagatggccaaaaaaaggatttactaagcatcaatagtaggaggtcttatgtatgctcttgcatgcactaggtcagacatctactgttaagtgagagctgtgagtaagtatcaatcaaaactagaaaaggaacattagaagatagtcaaacatatcccgaaatataaaaagatgaatcatatgttagtcgataagggtggtattttaaaatccttaggctatacctactcaagtttctagacttgcgtcaatgctagaaagtctacttaagagatggtgattactttgggggtggagtag

SEQ ID NO: 173185 - DNA, 712 bp, Cannabis sativa
tgagatttttcatgagatgtagtgtactttcattatcacagtgcacaatgacatcgtttgagttgatgttgagctcacatgtcaatcccttgagccaaattgcttctttaatagcctctgtagcagccatgtattcaacctctgtaaaagatagtgctacaaccttttgtaggttagatttccaactaacacaatctccataaacagtaaatacaaaccctgtgaataactttctagtgtctaagcaacctgcataatctgaatcaacatatccagttaccaattctttgaattttctagtgctatcataggttaaaccagtgttcaatgtgccttttatgtacctcattacccatttcaaagcagtccagtgaacatttcctggattagcaacaagctgcctacacaacttgcataaagaattttactcattttctctttctctggatctgttgatggtgtatgggagctagacaatttaaaatgttgagctagaggtgttgaaacccactttggaaatgtccattccaaatttgtttaacactttctgcaggtagctcttttgggaaggaatgataacatttgatgcaggtctttgaatgtcaattccaagtattttcttagcagaaccaagatctttcattttaaactcttgactaagtttcagtttaagcttgtttatctctgatttttctttaccaaatattagaag

SEQ ID NO: 173186 - DNA, 645 bp, Cannabis sativa
gaaggagaaggtcgagctcgaggctaagagggctcagatgaaaattgaggagatgtctcacgatttggaggtcgagaaggagaatggaaagaagcagtatgaccaggcggtctcggactacatatacaccactctctccaaagttccagacttcgacttttcaatcctcggagcagaagccactgaaatggctgaggcttttcgcgccatgtcacacacacaaactcaaggcggtggtgggaatcttcccgaggaggctgaggttgcggatgctgaagaagtcgagaatgaagcccagcaaagtcgcggatggatctgctcctactgctcttaatgcttaacttttccttctcttttatatttacttgtgttagactctatctttttttttttgtttatgttgtacaagggtactcgcacgttgtacttagacaaatttatatttacgtttcttttgaacaactttatatcctctcggggattttttatctacaatattctcccagtacacgggtactagccttctttgctatttatgatattttgatcacgactttaattacaacttggtgtaataagtagaaaatttcagaaacttgaaaaatttcaaacttgaaaaagttcctttatataatcaattgtaca

SEQ ID NO: 173187 - DNA, 510 bp, Cannabis sativa
tggctgagtatttgtcggcggcgtcactgagggagttgtgggggttggtggagccacaactgcgagtattcctgacagagaattttcaaagaattgagctgagacagaacccacaatagctaggagaaagagggagttggagctaattaggagagagagagttgtaaataagaaaaaaaaaagtaaaaaagaaagaatttttttttttaatttatatacattttatattttaaattaatttatttttaaatatttatttacgtgggtcaataatattgtatcatgtgtaaaatatgtctatgtagggaatacttcttaatgggtaatacccattaatgggtaataaacaaatttaactatatatattaattttaaaaatattaaaccattaaattttagtacgatagcgaataaaaaaatacatctttttacactatatcaaaaatatatttatatgagataatatttaagtctaatttaactttttttatcacttttttgccgaaaaac

SEQ ID NO: 173188 - DNA, 537 bp, Cannabis sativa
tagaagaagagtcagaagacgtttagcttggattagtctaaagctaaagactaatccaagctgaaagcctattcatcctcttcttccggatcttctttcggatcctcttctgactcttcttctagattggctcctgagtcctccccttgctgttccaccggctcaggatttgctggtagttgtatttcttcttcagactcattcagatcttccacgtcagaaccatcctccaagatgtctcttgaaattggctcataatcaaaattttatgcatcctggtaaatgtcaactattgtctttgggatgttggcaatgtagtaatcatgatattctgcccccagtttatggttgagcaaggttctcacaccttgctcattcattcgcagaaccaagacagagaaagtgttaaggaatctctcaaacgactctttatacttgttatgttctaaaatgtaacgactccgttcacttgtctccacattcgatctaggtgagctcttgcttcctcagaccttagtgagtgtgacataactatat

SEQ ID NO: 173189 - DNA, 516 bp, Cannabis sativa
aaaaagataaggaggttaagtgtaggattgttcaaaaaaatttacaaactgcccaactcgaataaaccgcccaaaccaaactgaataaaccacaaaaaatacaacccaaataactttacgaaaaattcaaatcgcccaaagaatatattgggcgggttaaatattattctaacccgtccaaataacccgaatataccgatttacatatttttcactaaaattatctataatataatatataaattacgtttaatagttaaactattttacatttaaagtttgtaatttatagtgtttacgttgaaatttagaatttatagttgatcattttgattatatttgaatattgaagttgaaatttagaatttacatataagtatatttttctattctaatttttgaaaaatattatttaatactttaatgtttattcaatttatattattttttagcattaatttaaagagaaacactaaagggcaccagtggtgcctagcaccctcttatgtgtcaata

SEQ ID NO: 173190 - DNA, 991 bp, Cannabis sativa
  modified_base (944)..(945): a, c, t, g, unknown or other
tttttcatatataaatcgcgtttttcgtttcaatttctctattgtttttgtttgtttttcttctctgtctgggtcaaaaaatatctctatgcttaatatgaattccttaagttctactcctgttccccctttgatgctcactcctgatgagaacatggtctataccatgactgaaattcaggatgactcccccctgatataagtcttcttcttaaactctgtactgttaaacactttaatcgagcttccctgattaaaactttaaccccaatctggacttcccaatgtcgtttccctgttactatttctgaacactctgatggtctttttcttgttacatttctctgtgaagggaataagcgtaggattcttgatgggcagccttggcattttgcccaaagtctcaccatctttgcagcccctgatacttcctttcctattatccctgaccagctgcattatgtgcccttttgggtgcaggtgtatgggatcccctttagatgtaaatcttatgatttggccaagcttatagccactggggtaggagatttgattcaagtggatagcactactcttaaggatgggactgggccttatcttacggctagatatctgttggatgttaacaaatctattaggagaggaattaatatttgtttcattaaaatgggtaaggaattcactaagtggctagattttaagtacgagcgtttgcctgagttttgcttctactgtggcaagcttgaccatactaagaagtattgtcatgcttatttgcaaaaatgtgatgaatccattgtcccaccacactgtccctatgataggttactatgtggcaaagagaaattatgtgagaaacctttgccttttgagtatcctcatgctccagctatttgttggattttatatcctaaataaaatttatttcaatataatcagatttnnttattaatatagatcagaaattacatttaatgttgcatagttcaca

SEQ ID NO: 173191 - DNA, 761 bp, Cannabis sativa
ggttcgagtctaggtccaggttctagtccgagtcttgagttccaatctaggtctgggttctgaggcccacgtctaggttccccatccaggtctagggccttggtcccggtctgcgtcgatgttcgggtttgggtcctagtcctagttttgattttgattcagtgtctaggttcgggtttgggtcggggtctgagtcctactccgagtttgggtccgggtttgggttcaggtctaaatctcagtctgggtatgtgttcgagtctaggtccgagttcgggtcccgactgcgggtacaagtcaaggtctgggtcagggtctcggtccggatctaggtcgtaagtttcgatcctagtgtgggtctaggtctgggttcgagtcttggtttgtattcggatccttatctaagtttgagtcttggtttggaacaggtcccaggtctaggtctgggtcagggtctgggttttgggtccgggtctcgatcctggtctgggtaaacgacagtgtctgagcccgagttctagtcttgatttgggtctggggctaggtccaaaattcggttctaggtctggttcttggtcggggtcctggtcacggtcctagtcttgttcgagggtccttgtaaggcggtttttattcaggttccagttttgggtcccgggtctgggtcagggtccgatttgggtcttggtccgggtttgggtcctggtttgagtccaggatctagatccctctcacgtgtctcgatctggttctcgtttagg

SEQ ID NO: 173192 - DNA, 523 bp, Cannabis sativa
  modified_base (478)..(487): a, c, t, g, unknown or other
tataggtcactaatcctatttagttactatcacgaattgtcaattctggtataattaagcatgagattatatatattttaatttaataattatccttaattatttataagcattttagtaatgctaataatttacatgacactactagtacatgtaacaatgctccacactctactcttttatagagaagtttgtttttactctaagggctcaattgagatggtctctcaaattattaaatttaatatttttaaatggttttgtagttgtttggctttttttatattaaaacaaatatagttgttgggatttttttatttttacattttaaaagtattttttttaacaattttacgaaaatttagatagtaacttacatagcaactaaagagcaatttaaatcgtaactaaaatctacataacaatccacataaaaaccatcacagcaacccaaactataaattacaaaaaaaaaaannnnnnnnnnaaaaaaaaaaaaaaattttttttcaaaaaaaaaaaa

SEQ ID NO: 173193 - DNA, 873 bp, Cannabis sativa
  modified_base (576)..(576): a, c, t, g, unknown or other
ggtgttccgatcgaaccctcgtgggtgactggggtcatgaagaagatgaaaaaaaagaaaagaaaaaataaaaaaaaatctatgattttaaaatgtttttttttagttttttattttatttaaatttttttaattaaaattattatttggaccaataaaaatttgacacgtggcatttcatttgaatttaacggatccgttaaaaaaaggaccaacggacttacagaaaacttgaccttggggactattaccgccaattttcgaggttggggactaatctgcattaacctcaagtttttaaggacttatgccgcaattatcccaaactaaaacaatgactatattacaaaaaaaatatgtagtaataaataatttgataacaattccactttaatataaatagataacaacttaatattaagatgtaaattaattaggcattaacaaatttcatcaactcaaaaacaacacataaatcatctccaaaaaaaaacctacaaaatactcgtgcattaactcaaaaaaaaaaaatgtatctatgaaaaataaaatatatactcagttagtttttacctngttgaacaactaaataataatgcgcaaacaatttgataacaactctattttaatatgaaaaattattaggcaccaacatagtgtgttaacttaaaaaaaaaacacaaataatcttaaaaaaaataataaaataacattcttaatatatatgtgtccatgataaactaaatatgtttagacatttttttttaacacaaccagataacaacaaaaaaataattatataacaattgtactgtaatatgcaaaataaatagacatcataaaataattctacagattgcatcaactccaaga

SEQ ID NO: 173194 - DNA, 706 bp, Cannabis sativa
ttgtaataccaattgttttggaaaatttcactatatttatgcatatcttagggaaaaaataaaaaattaggccaacaactctattttgttgtagagttttcacaactgtgttggaatatattttactaggacctaaatttactaacaaatatgtttttaacatcctggatgtgaatttctaaaacaatgaaacttaaacacatataaagtatgagaaactttacattagtgcaacgaaattaaatgactcattccgttcagatctctaatccttattcctttctaccgcagagtataatcaagatctgagcccaacactcctctagttatttagattcttcacaatcttacacactatgattaagaactaactggctatgggtgggcatacactcaatcactaaggctcgaatttttatgtgaagaacactataagatttcgaaattagaagagagaaaagaagaataagaagtctcaaactctttagttgtccgacaagatgtaaactaggttttgagtcattagttggattatgagactattcttttttttttttatgctaattcacttagggttaggattgaagtatatggaataaaaataataaaataatagaaaaaataggacttaatggtcggccacaaagtgggccctacactaattatatttttgccatttttcttaactatttatctattatttcac

SEQ ID NO: 173195 - DNA, 828 bp, Cannabis sativa
  modified_base (708)..(711): a, c, t, g, unknown or other
agcccaacaaaggatagggaaaattcgaaaaaaaagaaagataggcaagcacaacaagggctaagagatctcaggaagtcaagtgagagagggtcaaagcttaaagtgggcaatgatgttggggtccttgtgttggccactagttctcaattccacacagttttggcaagctagcaagcttagaagaagtccccatgtccataagcccgagtctcatatctataggagaaaggaccacgatctattaaatcactctctatgcgcattagttcacgtggctccttttttcttcccacttcttacgaatgtcttctttctcttagtagagcgcaagccgagctcaaactgcgattgaccctacttttcttttccactcactccttatctcttcttctcttttgttcatttaattgaaacgatacatctagggctcccacattgtcacgccagctctgttctcaactcttacgaacgatttggttaattaacttatatatttaaaaatataaaaaaaatggaggctaaaaatttgcatgataataattaatgaatttctacctcgaccaactctttttttataaggctttaatttaccttaaacccaaccttccacactattggagtttcaataaaatatttcactcacaaatattaatgtaataatatatagaaaatgagtatccattctgttgggctttgtgccctaannnnaactctatttcaatgtaatcttttctattcaatatcaataaagaaatagatttattttcattacttatttagtgtgttatttggttcatgtgtttatttatttgtttatttgattta

SEQ ID NO: 173196 - DNA, 886 bp, Cannabis sativa
tgagaatcaaaagtttcaaaagcaacagcaaaaaaagtatctaaagaactagacagattattagtataaaagccaatgaagattgaatttttccaggctttcctagcatatttaattgcactccaagatggcatgtttcactgactctgtggcttgatgacagatcgggcagacaggagatggaatgatgtgtcgaaaaaatagagatgaagcaacagggattgagtgggataagactccccagactaaatgtttaactttaggtggaacattggaagaccaaactttagtccaaaaccgcttactattctgaaaagaggaacccgaagctatgctacgattggtcaaggcaaggtgataagcactcttaacactcagaatgcctgaagattcctgtccccagatgagtttgtcagatccactagcaccagagattggaacatgaaggatattggttaccatggaggagtcaaaatgttgattgagtctatctaagtcccagccacctgaaggagaaagaaaataagaaagagttgagtcaggaggaggagaggaggcataaaacgtataacgaagcccagggatccaatgatcttgaatcgtatgaatattagagccatcaccaaccttccaaattaaccctctcttcattaaatcacatccccaaagaagacttcgccaggaataagaaggactaaaaccaggacctgcctcaaggagcgaggaattaggaaaatacctagcttttaaagtttgactaagcaaagaatgaggacatgtgaggacccttcatgcttgcttagcaagcatggcttgattaaaatgggttaaagatcgaaaacccaaccctccaacaaactttgattgacaaatagctccccaattt

SEQ ID NO: 173197 - DNA, 520 bp, Cannabis sativa
ttttattagtactttattagtatttgtttttgcactatttttttgatggtttggatgctttctatggctttcgtgtcatgtttatggcttgtccctaattgtttagggtagatttgtagtatggtcaatgggtaagagaaaggtttcatatttggtattcatgacttccgcaaacgactgttgagatttgacagataaatgttttaagttttgatattattatatgaattgagttttacaatctttattcaaattacatatttttttattaaattgtgtggtaatagagttttattgttattttgtaggtcgattttgtagagggcctactgttacagagaatttgctgataaattgttaaatataatttatttaagaattgtcatcttgttactattaagatttttattatttttaatatcattattagggggtaattcacttttctttatcttttattttgtagatatttggtggagtcgtttgatatgtttacgagttggcgtgtagttttcgatgt

SEQ ID NO: 173198 - DNA, 551 bp, Cannabis sativa
tatgagttatttgtgaaaaaaaaagtatttttagattcggcgaccctggaagacccgattgaaggccaaaaaatgtcacaccagttttagatagaaatattaatggaattattgggataagttgattttagaaataccgaggtattttaggggactcgaagttggctaaatactttagaaatagaaatttcttagtgactaagaaataataagataactattaataataaactttttattaatattatcttattattatatattattgttataatattattttaatattattaaaacttatcagttcatacaatatatatattatatatgttatatatttatatcaaatgaaaaaaacagtacgaaactttcttcctcattcttcaacaaaactttcttctcttttatccattttctttgatttttaacttgaaatctagcaatttatactctagtaatagcgggatagcaaatccttgaagaggaaaaacttaaggtatggtttaattacgttttaagctaaaaatgattggttttatataagggtttcg

SEQ ID NO: 173199 - DNA, 662 bp, Cannabis sativa
  modified_base (244)..(246): a, c, t, g, unknown or other
ccctggttttgaacaatagcatcctactatctgtcactgtaaagtctctggcttgaccagctcaaacctcatctctgatcttaattaacttcggatcagtcatctgagcgactttaattcgttctaataaatcagattgcagcgtcaagttatgaagtttgcctacaacaaactcaatgctagatctgactatatcctttgctaactgaggtgaaatcaaaatcatactagctacctgcccggnnnccttcctgctcagggcatcgaccactacattggccttcttagggtggtaaaggatctcacaatcgtaatccttaactaactccaaccaacacctttgtctcatattcaaatctttctggataaagaaatatttgagacttttatggtctgtataaatttcacatctctctccgtagagataatgtcgccaaattttcaaagaaaatactaccgcggtaagttccaggtcatgagtcgggtaccactgttcataatctttcaactgacgagaagcataggcaataacccgatcaacttgcattagtacgcaccgcagaccctgtcgggatgcatcacaataaaccgcgaacttttctttatcagaaggcagagctaacactggagctgtaattagtctctgcttcagctcctgaaaa

SEQ ID NO: 173200 - DNA, 529 bp, Cannabis sativa
cattattgccatgaattgctgggctatttaaaaagaactcatctgtcagcacaagtagctttgagtcatggataaaatctgttgaaaacaccatcaagattaatgtggatgccgaaacaagtagagagtgcatcagtacatctcttttaagggggtgcattgtagaagtaccctatacttctacatcggtatatattaaaggacaaaacttagtacacatctctaaaggagtgttttggtagacaccctttcagcattcctgagatttttttagtctaattttattttcataattatgtacgttgtagttatataagatctcatgtaaattttaatatattttatgtttataaaaccgtaattatgtaaatatgttaattttatttttaactcaaataatttttttttgaaaataaaatcatcatctttattaaatgcaatctatagtgattacatgattaaaatctggagtaacatcactaatcctgataacacgatcagcaactaaataagatgctcgagctaagaa

SEQ ID NO: 173201 - DNA, 504 bp, Cannabis sativa
ggtttgaacaacatcaaatgtgtgaagaaattttttgagttttgcttgatttggagaaattgaagtctgctaatgaagatagtttgaagaatttttgctctaattttacaaacttaatgaactgcatgccttgacatttcaaaccttgacggtgatgatctatatcaagagttgtgcatgctatgtcataacatacaaaaagaaacaaaaaaaaaaaaaaaagctattgatgtgttgaattatatgaaagaagtaaatggtagttactctaacacttgaatcgtttataggattctactgtcaattccagttacaatttctcatgcaaaaatgagctttttgaagttgaaattgattttatgttcgaccaactatgtcacaagatagattaagcaatttggctatgttatctattgaaaataatttattgggaaaacttaattatacaaatttaattggtatatttgtatcgaaaaatgcaaatttatgtaattaatttacgtg

SEQ ID NO: 173202 - DNA, 626 bp, Cannabis sativa
tttgaacttggcatacagtttatgaactcgtagtcactgcagaaccatccgaagatgttgctcatgctcctcttcgattgagagtacacaaggatttcgtcgataaatactataacacatatatcgaggaaatccttgaatatcttattcatcaaatccataaaagctatcaaagcaattgttagtccaaaggacataaccaaaaattcatagtgcccatacctagtgtggaaagcaatctttggaaggtcttcctctcggattctcaactgatgatagcccgatcaaagatcaatctcagagaagaccgtcttcccctgaagttgatcgaacaggtcgtcgatcctaggtaaaggatatttatttttaatagtcaatttatttagttcttgttagtcaattcacatgcgttggatctctttcttcttaacaaataacacgggagctacccagggtgacccactaggtcgtgaaaaccctaggccacgcattcattgaagttgaatgttcaattccttaagctcagctggagccattctgtacaataccttaaaaactggttctgctccaggtgctaaatcaataacaagatctatttctcgctgcagtggtaaacttggaagttc

SEQ ID NO: 173203 - DNA, 1256 bp, Cannabis sativa
gtagtgtagccttcgctagccaactaccttactgagatcaagttctttcttaggtcgacaatttgcctgacatccttcagctcccaaacagacccatttaacttaatcttcactacacccttaccaacaatatcacaaggttcgtcatcaccaaggtatacctttccaaagtagtgtggaatgatgctctaaagtgtaacacccaagactcatccttgctctctagagagcatatcaacgcatcatcaccttctgatgtagaagtaacatttgcttctgccttcccatcttgaccttttggtgcactcttgcactaatttttgtagtttccaatcttaccacaattccaacactcaatggtcttcaagctctgggaactatttggattcctagattggaccacctatctttagatttacttcaataattcgatcttccatggccaggccctctagttgaatttcttcctcttaacactgtatataatactgaagaggttgatgattcacctgactctctacgtcgtatctcttcactgagaactagatcacgaatgtaaagactcggttttgaccgagtcaaatgtatatatatatataaaataataattaaataataatatatatatgtgtataaaaaaaaatatttgattaatatatatacaatagtcagacccctaatcgtctccctctctatctatctatctttctctttttctctctcttcaaacccaagcacaaaagaaaaccgacaaattccataaccaccacactccggcgacccacctccggccaccgcccggccccacgcgctggacaaattggaagcccaagtgctggcgacctcacccccaagcggcgccgctcctctcgccgccgttagcttgggattgcaagtcaaagttttggagttcaaactttgaacagattttccggtcaccttcggcgtctgtttgacgagacgttttcaccactaaactcagctcgtcgaggagaacagcctacactaaaccatttttcccggttcgctacttttttcagcgacatttttgtagctccgcccctttccggtgacagcgtgtaccgttttgacaaacggtgtgcatgggtgtgatctactcgtcgaggcggtcgttttgatatacactacccctttttttggtgacatttctgatacaccaatttttaccgccaccgattgttaatgtgcaccgcttaggtgaggtttcggaatcccaaattttaaatatagtcata

SEQ ID NO: 173204 - DNA, 508 bp, Cannabis sativa
ataaggtatattctagagagattgtctaagaacttaacgataactcctatccactcctgaatgtacatccataggcttgaatacagatgatcctacttcaaagtggatatttgcttattactccttacagagaatgatcttgtcaaaaatattatgaacaagatgtaaacgccatagatatattgctgtggttatgatcttttgatgattcctaggtctagttacaacaaagagttcttagaatagttgaagtggattctagtcacagaatataaaactcataatccatacatttgacatacaatttagatctattgacaaaaaataaatattaacaacttgtgatagttaggccttcgggtttgtggttttcttcccgagtttgtttgaatcttcattatttctgatgatgtaaaagatgcctaaaaaaattttaagaacttgattggaaacagctcaagttggcaatatgtcaatgtaacgccctaatgctaaggcacgctacagt

SEQ ID NO: 173205 - DNA, 721 bp, Cannabis sativa
gaggaaagacgatcccaaaaggctgcccaaagagaaaaaacccaactagtatatccccctttatgctgaatataccgagctcaatgaaactcggggaaatatgtacctcgcacatgtacaggaattcgtttttagcgagccaaaacctatgaaacatgcgaggcgtaaaagggatccaactaaacggtgtgaatatcatggagatattggtcataccacggaagaatgtctcatatcacaaggacactttcaacgatatataaaggggcaggacgatgtccatgatcagctcgatctacctaataactcgagcgacccaggaatataaccctttctgtaagaggaaaggataccttagttatctcaaaagggagcaattcacaagaatacaaggggtggttactccggcaaaacaaatttgtaaaagaattgcgacttgaatagatattggctcactgtggttgccatatcaagctgtcacgtggaaagctggacgtcaaccagtagcagtcgaagacagaattaaaaccaggattactttacctggaaccccaggatatgtcaaggattgaccctggatattgaaacaattgtggaagtatgttaggattgaccctgaacatcgaaacctgttttatcaaaaccaggtgctcctggaggattgataaaataagagattgaactggggaagttcttttgagattaatgattgtaaatcaca

SEQ ID NO: 173206 - DNA, 618 bp, Cannabis sativa
caatttgtataggtatacataatacatgattgatccgtagcaattacctcaaaactaagtcttcttccctagatttctaaatcagaagcagtttatttatctgattattaaaatgtatataattgtgatgagacaatgtatatttatagagttaggggacttagctacaaaactctagttggactgggtctgctcatcaaaggcttcaattatacaaaactctaggtatacaaaactctagttccctaaatttctaaataagaagcagtttatttatctgattatcaaaaggggacttagctacaaaactctagttggactgagtctgctcatcaaaggcttcagttgtacaaaactctagctacaaaactctaggtatacaattgtgatgagataatatatatttatagagttagggggacttagctacaaagctctagttggactgggtctgctcatcaaaggcttcagttaactagaaaagtccacacttctgcttgacctagactttacacacaggttttaataaaaccaataaaatttaatgtaagttcaaataaaaagtctaacatttagtacagccaataaaacaccaaagtacctaatattactatgagt

SEQ ID NO: 173207 - DNA, 740 bp, Cannabis sativa
ttgttgacataacatatatttttttattaacatgctatgtatttttattcttatttgttgttattatatatatttttattgtaagatatatatatattttttgttatattgtatataagttttattgtatagtatatcattttattttagaccatacatgtttaattttgtaagtatgttataattattttatcgttgtatataattttgttaatatagtatatataatattttttaacagtattataatattttgttatattttttattgtaggtatacatgttttactatatgatttatgatttttgttgtgtatagtatatcatttatttaagatgatatttaatttttattttattatatataatgattatatataaattttttggtatgtatatatatattttaatagttgtatctataatgttattagcatgatatatattttttgaggattaatttagtattgttataattttttttgtggtatataattttattattacggtatattaattttaagtgataggatatatcaaatattggtatatatatttaatgatttaatatatttatttatatttgttacaatatactaataaggaatactaaaaaatatataactgaattttattattatgttttttttatcaagaagaaggaaaattaatcaactcgccaaatcaaacaaactaaacttctcaaaggagaagcaacaaccacaaagcctactaattac

SEQ ID NO: 173208 - DNA, 525 bp, Cannabis sativa
ctgtcaagaatatacaagaagtagaaagggcagttgaccaaatctagtatagatcgtacatggacggtagttggagtcggcgactcttttagggttccctcatttgggatctttgaggaaaaggatcaagttggcccttgcgaacagcttgatgcactatctcctttcaactctttgagcgaaatgcgacaaaagaaaggaaaatacatggaccgactccatcatctccacctcgtaggaactatgagatcaccccaaggacgccttcagcatccaggttcgcggactgaccctagaaccctattcaataagtggaacgctttagctgtctccttttaggttgggtaataagggtcagagaaggacaatcacttattcttaaaattaccattcttaagacctggaaaaagggggggaagctctccgttcctgattgtcatgtatctagatccttcggaaccataagaatccttagttagaataagattctaactctccactttttgagattttgagaagagttgc

SEQ ID NO: 173209 - DNA, 747 bp, Cannabis sativa
aagagtttttacaccacatagttaaatttctaaattttttacttttttattgtagggcggaatttttttcaaactactgtgtttttttttttcaaaaatactatataagtttggtactgtgtactgtattaagttttcacgattgttacatggttgttttttagttgttctactattattttaattgttttgttttattgttttatgaatattttataaaaaatagcatttttatataaaaaaaaaaaaaaaatctgtgtgacagtaaaattataaatttttcaccaaaatccagtatttttgtaaaaatttctttaattttttccaaaaatatattgatgaatgaatttaattgcatccaacttaaaagagtgaagttaataaggtgtagtgtagggtatctatgtatttattttgacacaacagaaattaagttttgatttttatagaagagaaagaaagtaaccaaaagcaatgaagaagagtgaattgggccgtagcattgggctttgaagaggaaaaacgtcggtcgtgagtcgtgagagagaataatgttattaagacaaaaaccaaaagagaagagaaatggtaacttagtgatgtgattgcatttgcatggacattaattattattcaactctgccggttgttgaggatttatgttcgcttaatcatcaaaccttgttttttctcattctcaacttatatattattaagctaattagtaatttttccccctaaattttg

SEQ ID NO: 173210 - DNA, 559 bp, Cannabis sativa
atgagagacagattccttgtcatatccacagcttgagcaagatggattagggagactccttttaagaaagagattgagagaacaaggcaatatgtgatggaaagctctccaaataaaatgtttaatcttggaggggataggaagagaccaaagggatttccaccaatgaaggtatggattaggatttgaggaggaaggaacctgaacagaatcaagggtgcaggcaagatggtaagcagatttaactgttaaaatgcctgaggagtgaaagccccaaataagcgaatctgaagattgagggtcaattggggttgtgaggatacgatcaacttggtaagaaggaaaatagtgattaagctttcgggtattccaagttgagtcatcatttaagaagaaagagacaaaggcttgggactgatggatagagtgcaagagggtaggatgctgaatgtttggaatccaattaggagcagataagggaatattagttccagtaccaattttccaaaccaaccctttttgaagtagattgcgaccccaaaggatacttctccaggtg

SEQ ID NO: 173211 - DNA, 959 bp, Cannabis sativa
  modified_base (930)..(930): a, c, t, g, unknown or other
atttatcttattttaaggtagcgacttacctttctaaagataaattatgtgttattttaccttatttgagacatggtacttacaaaataaggcaagtcatttactttatttaaagcagaaagtttgtctcataaggtgtgtcatttaccttattttaagtaaggtatttaccttaataagatatgttgtttatcttattttaagacaagttattttccttaataagaaatattgtttaccttattttaaggtagtggtttatcttttactgataattttttttatgtaccttatttaaggcactgtgtttacctaaataaagcccattatttaccttatttaagttaaaaagcttgcctaataaaacgagttgttcactttattttaaggtagtgattttcatatttaatgattattttagtttaccttatttaagacatgtaagttacctgaataagacatgtcgtttacattattttacgctaatatttttacctttttaataataaatatattttaatttatcttatttgaggcacggtgtttatctaaataaaacatgtcgtttaccttattttaaaataatagtttatctttttaatgataaattatatttttgtttaccttatttgagacatggtatttatacaataaggtaggtcgtttaccttatttaagacatgaagtttacctaaataagacatgttatttatcttattttaagatagtagtttatctttttaatgataaattatattttattttactttattttgaggcacagtacttactaaaataaggcgagtcatttaccttatttaagacaaagtgtttactttaataagatatgttgttcatcttattttaatgtagtgatttacctttaactgataaatttgtttttgtgtaccttattcgaggcacgatgtncggacccaggatttaagttgaggtggggc

SEQ ID NO: 173212 - DNA, 651 bp, Cannabis sativa
agcaaaatcgaaatcaaggcagttagaggagagagtttgttggacaatgatttgggcttgctcttcttagaggtcgatcgtcggaggcaaagaatgagaaataaggaatttctcaacaataacaatagagaaataaagtaaaaaaaaaataaaaaaagaaaatagtttaaaacaaaggaaaaaaagaagcaaaaagaggcaaagtgaaaaattaggcgccaaaatttgagtcacctgctcagaggaatgaggtgttcattttgtcttagtttatatactaaaatatacattattaattattattattattattattctgatgtaatttctaaaaaaaaaacagtatatatataactatttaatgaattccagcccaaatggacaaatcctcttttaggaaatttttttttatttttaacttattatgtcctaacacatttttttagtccattaatattagacataatatgtttttttcctagtgcgttactgttggacatgaaatttttgaaaaaaaaaattatgtccagcacttttttttttacatgaaaaagggacatagaaagggttatttgtagtagtgtctccaaattttcaagacaaagattaccgcagcaagttctaggacacgcgtagggtaattcttctcat

SEQ ID NO: 173213 - DNA, 724 bp, Cannabis sativa
tcactctattttcttctataaaatgagtgacagagatgactatattctagatattctatcccgtaatgatataaatcctttatcctaaaaaaatttcctacttatatatgctaagtaaaggcaacttaaacttagagttgaattagtactttaatggtggtccaagctagaataattactaattgaatatttggtataaatttatatttttgactttaaattttagaatccaaatagaaatttaatttcagttttaggaatacattgaatactacaatataactttcacaagttgttaatatctattttctatcaatggatccaaatagtatgttgaatgcatgtaaagtgagttttatattctgtgactagtttaatccgcttgaacgattctaagaactctttgttgtaaatagacttagggatcatcaaaagaccacaccaacaacaatacatctatagcattttcatcttgtgtgtagttgttttgacaagatcattctctgtaaagagaaaacatgtcaatatccacttggaagtatgtttatttgtattcaaacatatggatgtacattcaatggtggatatgagttatcattaaactcctagatgatctctctagaatataccttatgcaaaattttttgaaatatatgaaaattttcataaatttctagcaatggtgaaatccattaaggtaagtggttaaagatcttgcaaactg

SEQ ID NO: 173214 - DNA, 1180 bp, Cannabis sativa
aacgagagcgtatactctttttagggttagggacatatgcattaaattattaatatctaatattgaatgatttatatataaatattgatttttttttattatatatgaggctgtcacttttaattgtacgaagatcacttagtcatgaataaaacaattagtaatatattaaaatctggcaatctttaatcaatggttgttaatacggtttattgatgctcgttctttggtgcaagtaattttgattatgattattgatatagtatgatatctaaatgaaggtgttgtatataataaaaattatatatgacaatgactgatacgaataaagctatttttatcaaacttgccgtttacttaaagacttaattcttagcaaacttctattcatgttattagtttctcagaaaaaatgatttttacaacttttgttttggaaatttaataatttggatgggtgagaacatgatttataatatggattgactttcctaacagattgaatgttgatttctttatgtgttaattctagaactaaaacgttgcacacaaatttagatgagatctaaattgtacttctagtaataaattaatggtactaaagattaaagaataaagtaactcaaagggtaaaatagtaatttgaccaaaattagttatgaactgacacaaggaggattaattactggagttgattatatcaatgaacactttggtaaaattcagcaaatatagttttataattactgagtttaatttcaaatttatagttgattaatcattgaattaataaataaatattatttaattgatgagactcaataaataaatctagtttattagaataataagtccacgattcttggattgccacctagaaacattgtcaaggataggagaaagagttatataatgttgttcgaaaaaatttattttgaatttgtaaaataataattatttatttttgtaataaattatttatttttcaaattaattaaataggaaaaaagacaaaagttgttgagaaaaaatttgtaaagacattgttaagaaaaaagttgtgaggacaaaagactatgtcttaattaagacacgcctacccatgtcattattggtttatttttttagttaattaaatatttaattaattcaattggataaatattttaatttgaaaagt

SEQ ID NO: 173215 - DNA, 676 bp, Cannabis sativa
ttgtttaactcacaaaactcgaatctgggatcccattctcagacatttacagataattctcggtcctcagatgagcgctgagtttcgatatctgtctccggttcatcatatgatcatagaacttatgagtatattttcgatttgtgtataaagtgcagttttgtgctgagtgtaattagtggctgtctttgatttctgtggccagtgctggagctggtgatttttctctactctttactgtgatttttttttatagtagaatgagaaaaatggaaagtatcaccaaaataaaaggtgtttgaactcaactaagtacagccataaaatgcatgaaattgtttggatttggtagttctttttaatgttttttttttctcctcatttgatgtgtaaaactaaatattatattgtattaatacaaattatgtaacaaactgaaattatacaattgaggtttatgtttttgatttggggttattattacttgttagtcaatggaaatcttcattggataataatgaggtatcaaattaaaggagaagaaagagaaacacatctaagtagacacaaactatggatttgagtttggaaggattataatgtaaaaggaatcttgatgcaaagaaattattaaaactaattgtgtaattattaaaagggattttttctataataa

SEQ ID NO: 173216 - DNA, 900 bp, Cannabis sativa
aatataaattataaaaagagaagataaaaatagagaatttatgagatttagttagaaatactttttatcaaattaaatttaataaaaaaaaaaatagagtatttgaaactaagattaggtacccctaaaattatctgtatatatttataaacttataattattaaaaattaagtatatgtcaacaaatatctttgttaattttaaattattgatcaattataaattctttgcattgcaagcaattatatatcactctttttttaaaaaaaacaattatttaaactgctatacaaataaaaaaattaaaaatataagaattaaagaaataatagattgatgtattttgagtgattttaaataaaaactgacacttcaagtaatggtaaatttagaaaattaaagaatgaatagatatataaaatattaaaaattgataaatacatagagaagtcatacaattttaaagaatatctaaactggaaagattaataataattgagaaatataaaagaaaaaaaaaattcaatattgaatctagagaaaagaaagatgtagtcaaacgtattattgtaaaaaatgggtaagaattacataaaaaaaaatacttatcttattttaaaatataatacatataaacctacagccgatttatggcttaataagttagattttattatttttttaattaattaataaataaattttataatcttaataaaaattaaaaaaaaattaaaaaattaaaaagagaatagataaaagtaattggaataattttaaaatagattttattatttttcttaattaattaattaattaattttataaacttaataaaaaattaaaaaatgagaaaattaaggagagaatagataaaggtaattggaatgattgtagag

SEQ ID NO: 173217 - DNA, 804 bp, Cannabis sativa
taggggtgttgagggagggctaaaattcactctaaaatttaaaaacatattagaataaataacggcataagtacttaaaatttaagttttataagtgtcataaacctaatatttatttttaacagcataagtactcaatatatataaaactgtaatttttctttaattttgtcagtacaatttttgtgttaatataccactaaaaataaatactaactttatgccgcatataaacttgaaattgtaagtacttatgatgctatttacctaatatattaatgtaaaattgttgctttcatatgtataatagttaaatagaacaaatttgttaagatacttttatgtatctccgagtttgccccccctttttttttcttagtgtctatattttatttattaagaaaaactaagaaagtataaggtacaaaatagatttgaacttatgactactagaataggcggatgttgccaaattatcattctatttaaattaaacttataaattattagtttatattatattaaatgtataactaaccctgctctaaagttaaattgtgagtcattgtacacaagcacaatccctttattcatatatttatacattatatgacatgccttataatcaacaagttgaagaaaaattcaataggagttgagccatacattgccaattaataatatatatggttgtttggaagatgatcctattaaaaaaattcttttttcttatcaaccttagaacaaaatagaaaacgtttttacagctaggtctaaaccaaaatacttacccaaaaacagcct

SEQ ID NO: 173218 - DNA, 985 bp, Cannabis sativa
tgcccgcgtacgatcatcttcaatggattgtagattttaccatctacaacgattattctagatatggtcatatttacctaatgagcaagaagtccgaaactttttgaaagttcaaagactttaaggctatggctgaaaaacaattaggtaaatcaataaagacacttccatcatatcgttgtggtgagtatttaaattctgaattcaaagactatttgttggaagaagggatcttgtcccaacttataacacctagaacacctcaacagaatagtgttgcagagagaagaaaccaaacctttttagacatgtcagattgatgatacgttactcatcactgccactgaatttctagggatatgcacttctagctgctacctatattttgaatgtagtaccctcaaagagtataagcaatactccaatagaattatggaatgtaaaaaaacctaatttgaaatatttttgtatttggagttgtcctgctcatgttcttaaatctaagtttgaaaacttgctcctgttagaacttattataccatgatttagattcattaacatgtatgttgatgaataccctaaatatgaattctctaaaacaatagaataaaacgcatataaagtttagattaccttacattgatggcggcagaataatatgtctccttctgcccagatctctaaccttattgctttttattgcagagtaataacaagatctgagcttggatctccttctccttcagtttggttaaccaccgtctttcgcactatgattgagtacttgacttgctatgtgtgggcatgatactctatcactaaaggtttgaatattgatgaaaattatcaagaaggattcaaaatcactatgaaggagtctctcatctactagatgtctgatagagttagaaaactaagtttagaatggttgcagtaggttggatgagaaatagagcatcgtgttccttttatagtattccaacta

SEQ ID NO: 173219 - DNA, 867 bp, Cannabis sativa
gtcatcatccaaagagtcttcttgctcgtccaggacggcttttccttttcccacgacaggcatgccaggttccctaattcggatagcatgctgtatgggtacttgctcagtcgggagagtcttcttcttcttatgcgacctctcctactctgaatattcttaagcctccttctcctgctcagaatattcttgagcatactgttttgctccagcatcacccttcaacagagcatcacgcttgagttgaatgagctccttctcttgctcaactccttcagcttgtcagcttggcctgacctagatttcttcttcctccccttcaaggacttgggtacaaaatctaccgagtaaagctggtacttcacaaagttggcctctgtggtgaacaaagtgatattccgagcagcctccggcagttggagaattctctgggccctttccctaagcctgaatgtgaagggaggacaacagtatactgggatctgttgaaagcgtgtgtgagcagtctccataccgaccacaaagtaatactcgttaataaaacgcccaattttgctaacctccgtgtccacggtgcccgtcagccacttgtcatccggctgagagaagtcgaagtaccccgacatgctctacttgggggtatacttcaaatcaaagagttagttgatgtcgtgcggagacggcacaccccatccttgaatggcatagaggataaaaaaggcggataagtatttgatgcccttgggtgtgaactgggtcgaacaaaggtgcaaaagcagcatcacccctaagtcagtgtaggcacttgaccaaacatagtaccttgtgttgggttttatgccctaaaaaaaactcatttcaatataa

SEQ ID NO: 173220 - DNA, 578 bp, Cannabis sativa
aaatttgctggcaatcggagcaaggacgcaaccatacggtagcttcaaagttttgccgtcaaaaccttaaggcgacattatacgatcaactccgaccaccatttgaaaaattgggtggtaccgttgaaatcagcgtcacgagaggaacatcctccactaattcatttcgctcaactcgttattttttcccgatgagatttgggtatctccgaccttagaagcattttttgacgattccagtgtttgtttgggctaacggattgtacatccgtgatctactcgtcaaaggagttgttttgatatatactatccctattttattttcagtgacgtttctggtacgccaatttctattgccaccgatatctaatgtgcaccttttaagtgaagtttcggaactctaaactttaaatatagtcttattatatgtcattggactcggttttgaatgtagaatgcaatgatgatagttatttagttatttgatggtatagatgagagtgatttctaagatttgactaaacaatattggagttcgggacttgagagcttaggattgttttttggacaaagtttaa

SEQ ID NO: 173221 - DNA, 906 bp, Cannabis sativa
aaaaaaaaaaaaaacttaaaaggatagtttgataatcaaattaagatttagatcttaaaaatattcattttagttgcctatttcagatggatactcgggcctgggttgaagatgtgataagagatctctttgtggctcgtgaccaagatttgatatttagcattcagcttagtgactcggttgttagagatggatggagttggaagtttgagtcttgtggccagtattcaattaaaagtgcatataagttcttgcaagaaacaaaaggagcttagagtgtggatggcaatgcaggtttttggaagactttatggtcgttaaatgttcctccaaaggttagtaacttcttatggagagctgcatcgggtgtccttccaacatgttttcagcttcaaaaacatcatgtccttgttaatgctgcttgtcctctatgcaatgttgctgcaaaaactgtgcatcacgccttggtggagtgtgagtttgctactcctgcctggaatcgcagctcggtggatgttgggggtggctctgcaacatttagcagctggatactgttgttattcggcaggggacgtgttagtgagatggaggaagaactgtggtgagttgggctatttggcgtgcacgaaatgattttatttggcaacaaaagagttgggttgtatcaaatattattgcatcagcgaaaaatatgtttgatcagtataagtgtgctcaaggtagaaatggtctttctttgtctcctttgaatgaagggaggcgacattctgagcattagaatgcacctatgttacattagatcaaagctaatgttgatggggctttgtttgatcaggaggatcggtttggtgtgggttgcgtagctcgggatcatcatggtaatatgctagaagctttcactaaggg

SEQ ID NO: 173222 - DNA, 661 bp, Cannabis sativa
tctggttctgaaaaaagacctcctccagataagattgagtctcgtaaggcaaagaaaaccaaatcttcgaaatctaccaaggatgtattttgggttatgttgtttttcaaattttttttttagtttttttcttgttactttgttttttgtttgatattttgtgtttcacattttccccccttgttgttttacgttatctccgattctgactttgaggatgaagtctttgatttggaagtgaagcctaaagttaaatccgaggtatgtttaccttgaattttatcatttttttaagttgaaaatttttaatcacccgttgtttttattttgtttttgttttacctgtttataatgacggttttgtgttttgtctcatttttgtgtgtatttctctatgtatttttgttgatgttgtttttgtgttgttttttggttttgtttttgctattaaacagttatagcattatttgtattttagtgttttattggctttttctcaacagttgtttcaatgtttgttttcagttgttttcgtgttgcttaattaatttcacggttgacaattactattgtaatttcatgttctgcatagtgttgttaatatgttgcttgaaagttgttcatcttttaggctgaccatgttggagttgttttttaaatg

SEQ ID NO: 173223 - DNA, 1278 bp, Cannabis sativa
  modified_base (796)..(803): a, c, t, g, unknown or other
caaatcatccaggagcaagtcgcccaaattccaatttaactggctaggtcccggaacgggtgaaaacacccaagacaacaacaactcgagaagtgaatactgatgagtctatatttgtcttataaatatgatcaatttatgtgttaatattcttaaattgattctttaaattattgattggtgtgaatttaattttttaggctattttaaagactattcatgcatttacagtcttttggagggattttagcatatattggtggaaaatagtggaagccggcgagctcgattttacaaggtataacttaatttcaaatttggatgactttagaggcagaactagacttagagctcaacataaaagttttagatctcgttcttagctttctagaatatcttgagtcgtccaattttaagtaatatcgagagagttatggctaaaatactatcagtcatcgcagtaggaaatttcaaaaaacaaaaaggaaaaaagagagtttttcaagtagagttgcgattttttatctttttttttaaagatgagttatcttttcttttagtgagatatttcctaagactataaatagaatcctaattctaaggggattcatctatcttttcaagcacaataaatagaatcctaattctaagggggtcatctatctttacaagcactataaataggaccttttaggctatgaatttattgattctaaaactacaaattagagagagaaactcgaagagatagcaaggaagagacggagatcggcttcattctagttcttttcttctnnnnnnnntcttactaaatattatgattttcgttataatgtctagctcaaagtagttttcttttagttaagggttatttcaaaacccgagacatgaattcttaattttattattgaatgttaatttttagtttccattatatatcaaattacttctattcttctatgtcaatgttatgtttattgttttaatcttgtttagatggccactaaattaggttttactttaatctttcgtcatcttaggattactattcacctagtagtctaggattctaagtgtttgtgacaaattgcaatttttatttgtgatgaagaatagaacctaagttaaatgaattatatgcttcattgatttgttgcctagaatagtatatctccataagactcaaagctttatctaagttaaataaattgcatgcttcatggatttactgcttaggtaaaatagttaattattgagcgcttcgccttgattacatac

SEQ ID NO: 173224 - DNA, 1020 bp, Cannabis sativa
tttttttctggttgttctattttttgtattacatttcatgatttaatgttttccccctttttgttctaggtttcctcagattctgattttgaggaagaagtgcatgctgagagacaaaaacctaaacttaaatcgaaggtaattttaaattcattttattgagttaatttttacagcagctttttatgtcactgatttattgtttatcatcatttttttatgttttgtgttgttctttatgtatttctgtcatgtattgttgttgatgttgttttcttgtttttattatgttgttgtttggttgtttttgtattacacaattcaatgcgtattttgtgttacagggatttactgcaattttaccattggttgtttatatgtttattgtgagtttttttttggttgtttatcacatttttgtattaacaaccattttagaatttttattttttacaagttgttacagtgttgttaatatttttagttgtttatctgtttattgtgagttttgtttgggttgtttatcataatttcagtattgacaaccattttagaattttcattttttacaagttgttacagtgttgttaatatacttagttgtttatctgtttattgtgagttttgtttgggttgtttatgataatttcagtattgacaaccattttagaattttcattttttacaagttgttacagtgttgttactatatttttccagagttgtttatcttttacatttatcatactggaacggtttcataaatgttgtttttaggttttgtattggttgtactttggttactaaattttagatttgtcttgtacttgttgcttgatttttttttttaagttgttcagatttgttgcttatgttttattttgtatttctattttttgcaggtccatgttaggacctcagagaaagttgaaggatttgacttactgaaaaaaaatccccctaaggtgtcttttttttttttaattctttttattatttcttttctgtttctgttttagt

SEQ ID NO: 173225 - DNA, 677 bp, Cannabis sativa
cattatatatattcttcacattatgtattaacaatctgaaaaataaagtaaaatttacacatttaccttgtaaataggaatgacatacccgtgtggattacacgccattaaattggctacatcaatgtcttgtgtcttggacaaagattagaaaggaaagggtcacggtgagggtttgtggagagaaccagtaaaaataaaacatatggtgagaagaaattagactgctcgtggtttaaaaataagcacaaatccaaacttccaatagatatgttcttcacaaatctgtttcacctaaatgcaaaatacagaaatcaacaatcaataacaaaataaaaattaacaaatatatatatatatatgaatggatacgacttgcacaaaaaacccacaaaataaaattatttttcattactttaccttgttaataggagaatgttgatggagacaactaaacaccgttaaaattactacattgagctcatgggtcttggaatgaggttggacatgataaggttttcggaaggccttattgtcgatgtggctaggtgaagggtttgtggagagaaactctctcatctaggttgaagaatagtcatgttgacattagttagatgagtgagagtatcatgttccttttatagtgtttcaagagggctgaattttatggattaaaa

SEQ ID NO: 173226 - DNA, 635 bp, Cannabis sativa
aggttgagtggatatatcgggtggtaagttttggttgtttgtgattggtataggtggcaggggatagtcatttctggtttctattggttgaatggttggtggagttggtatatgtggtgggatagtggtggaactggtgttgacatttctggtatgtgggagggtgtcaaccgtgtgtaggacaggtgtttgattggagagaactcgggttggtggagcagtggtagcaggcacattagatgaaatattaggattagtttgagagccattagaagtgtgaaaagtaaatgaaggagatgagtgagatgcatgtacctgctgggtgtcagctgctggatactcagattgggctggaaaatttgtttcattgaaagaaacatgccgagaaaggatgattctcccatcagggtgttcagacaagtaccctttgtggtgagttgaataacccaaaaacaagcaaggttgagatctcagttccattttatgtttattatatggcctcatgtgtggaaaacaacaacaaccaaatggtttcaggatattatagccaggtcttttcttgaagagacattcataaggactaatatttcctatcacaggagtgggtagtctgttgatagtgaatactgcagaag

SEQ ID NO: 173227 - DNA, 790 bp, Cannabis sativa
agacttaatctgttgcgtaatccgtataatcttctttattcgtgtctttgctattttcctccatttctctttagaatcgtccccctttgtcgaaagactgtttagggcatggggcgattgttgtccccaccttctgcgtttttttttcttttactctctctctctactttcgtttcctttgggatttttgcacctgatgtttgctgagaaaagtcctttgggtttccaattttggcaaacattcgaaagaggcctctttccagctgttaggggacccccattcccttttttgacattagggttttttttggggcctaactgctggactctttcttttttctgaaacaaacatgtctacccctacgtcaggaacaaaatcttctaagaagggggcagtcgctctagccaccctggaggaggtcatgaagggcccagaggcccaagagaactacactccacaatgatttgtgctcaccaactagagaagattgtgacggttgctgggattaaaccgtccgcgtctagggttttccatcgcctgcctcgggatcaagagacgccaattaacaactaccgggggtttggagcttggagccagacccatctcatgtccggggccatgcttccccttcaagattacttcattaactttcttacttttgtaggccttgcgccttacaaactaattccacaagcttatcgccagctatccagcttatttattttttatgtagcaagaggttgggcttcacctagctcggccgaattttacatttttatgaacttgtat

SEQ ID NO: 173228 - DNA, 636 bp, Cannabis sativa
tctgcagtaaaatttgtgcctcacaccaatttctctctttaccagagatatcacttgaggcatcactttaaagctcgaactgtgggatttgggatcacttcacctttatgggacatggtgtttggaacccttcctgcaaaagatgcaggtgggaaaattagataacaacaatggtagtaatagtatggaaaatcatttatgatgtttggcttacatgggttttccttctgattttgtattaagccttgtcatgacatctttacatatgtatgtatcaccatttcatctgattaatttaaatatcatcttacagttatagttagggtgtgggtttcatatgattatttcttctcccattaacctccacctaatcttgcactaatgattaggattatatttgtatcattttagttttccttctttttcatagattctattcaggaaaacaggatcatagattctattattctctagctgattctggacttgaaaatagaaaacagaaacagtagaacaatagcaagtgaataataaaggctaattaagattttttctccatgaactttgacatgtaccaaatcatgtccctgaacttttttagccgttaaaaactccccctgaattattgagattgtt

SEQ ID NO: 173229 - DNA, 636 bp, Cannabis sativa
  modified_base (298)..(305): a, c, t, g, unknown or other
ttggcaaattagtttctattttttggcaaatcaatccctaaacttttacatatttagcgacattaagtccctactattaataatattgactttacttatttattttacatttttaaaatttatttttgttttatttcaattttaacactttttttgaaaactaatatatagtttcctatgaggaaattacacttactatgagattttaaaaatttttatgataaatatgacacatttaagtttgaccaatttatatagtatttttttgttttaaggtctttttatggtatttgatatnnnnnnnntatgtaattaggttttcaaatcccatatttttatttgtttaggaagttttatttgtcattgatgccggaaagtcaccggagtttgctgccggtgccgaaaaagtcgtcggagtagcggtcggtgccggaaaagtcgtcggagttgctgccggcgccgaaaacttcgttggaattggcattgtcgcgagaaaaatcaccgaaaaatcaccaagaaactgctggtttctaagaaaccgggaaaccggtttcttggtgatttttccgttgacaatgcgaattctgacgactattctgacgctagcagctattccgacaacttttccggcaccga

SEQ ID NO: 173230 - DNA, 740 bp, Cannabis sativa
ttttttttataaagtatgataaattaattaaattaacttttaatttaaatttaaattaaagtttatataaaaaaataataaattaattttattgataattattaaagtttatataaaaaataataaattaattttattgatattgttaaataattatttaagttatattttaataaataattaaattttaatatttaaaattattttttttaaaaataaataaataattaattgattaattaattaatgttagttttaaccattaaatttaacgaaaattaaaataaataattattaaacgaaatttttttgttagatagtcatatttaatataagagagatttatgttttttctttttttaagtctgtttcacacttctgtcacaatgtgaaagtttcaagttcgaattcccctcttaaagtttttaaaaaaaaagttcatgacactttatactaatttttttttttcctatttttaatttttttttatcactctttacccatttttataggtcatatcccatttgtgcattagggattctaattttaaaaaattatgtgaggttatatttggtactttgattataaaagaggatatttattaattaaaattattttgtagttatatttgattaatatgtaataaaaaagttgaaattacacaatatatgagaaaattataagagtttacgtttttatggcataaataaataatatcatgggttttttttttttttttt

SEQ ID NO: 173231 - DNA, 583 bp, Cannabis sativa
tatacggcgtaccaaacgagcccgcaatccgaggttccaaaccccaaccaattcggaccaaaccatttgagactggaccaaatgaatccggtgtgaatgatttgatcaattcggactgttttatattctctagttcggtcacagttttagaaatctcagtagcggttcaaaccaaatcaatccgtataattattatatatatacttcatatattattttggacaaaatgttgatctttggaaacaactttaggtaaaatatttatattgagatttttttttataataataatttttattgttacttatgtattataaacttattaaaagtaaaaaaaataccgaaaaaatgaataattattgtaaaaataaattataacaactacgaaatacaaaccatggttcgaaccaaaccaatccgtttttgagtggtttggtttggtttgatcttttaattggtctggtttggctttgaatttttaaataaccgtaatactggtttggtttgaaaatttttgaaatttggaccaaaccaatctgtgaacacccttataggaatatacactatagtacaaatctctttg

SEQ ID NO: 173232 - DNA, 701 bp, Cannabis sativa
gagagagagagagaaagaaacatttattaaatagacaactttggttgaatacaactaatatgcagagcaagaggctatttatatagctatgaatttttttttttattattattattattaacttaattattggagaaagaagatagaaaattaatagacgacttaaactcaaagaccatatatatgtagcacgtgagcaaattcataattcaattgtgaaataaaatattgaaaaaaccactatacaaaaccatttataatcatgagaagacgaaagcacatagttttgttatctatatatataatatatctatgtattacacagtatattgaattgtgtcaactatgagatatttatatatatataaatattctatgtattagatagaagaaatcaaacttgacagaatactctcttttgttcttttgtgaataaagtaatgtatatactatatatacatatgcacttgtaataattaaagaatgtgaaagttagtgatcactatagaaaaagctttggtttttgactcaatatagtacttcttctcaactggctgctatatatatatatatatatatattgtattttatttttatatatagaaagtacttcaatgaaaactaataattaagagaaaattcaattgatggcgggtccctttctttgacaaaaacaattagattttatccttttattacac

SEQ ID NO: 173233 - DNA, 872 bp, Cannabis sativa
tgtgcgttcaatcttggggtcaattggagcaatttcaaagtcctcttgttggttcatacactatagatacctgagatttcaaataacaaaccagcaagatcaaaaaacatacaaatagaatgtcaattagttgataaaacagaatttagaacttaaagtccccggcaacggcgccaaaaacttgttgtgaaaattatattgatttataattgccacaagtgtacacaatcacaaacaagtaatacaatgataagtaatcaaggttcgtatccacaggaacttttacactaaataatgcaaaattaactaaaagtaattcaaaattttcaaataaaaagaaagcaaaataactaatcaattcaagagaaaaattcttaaccttagttctagagttgagaaataatattttaagctaaataaactaaaattaagaagccaaaagtgattaaagttgtgataatttcagatttagaaaatagacttgggtggttaaattccccctggtatgttccagttgatacagcaatgacttaggaatcctgtcagagttaacaaatttcaagaaaaaccagcaagctttttccaaaacctgcagtataccatccataacctcaacaatgtattcctacgctaaatcaggtcacaaacagtctaatatagcatcaaatctttagttaagcaaggtagcaaaatatgcctatttcactactaattaatacctaaacgagtagtaaaaatcatacatcaattaaatgggttcatctatgtcttacttttccaagtaagatctagcttactaaatgttaaatctggccaaaaattaacattcaatcaacatttcatcacatctaattgaacaaagataggattac

SEQ ID NO: 173234 - DNA, 812 bp, Cannabis sativa
tcttatgaatattaattatgtatactattaaaatatttattatattatatacaaaaatagatgataaaaaatgagtcttttaatatagggagtttgtgtaatgccttgctcattgggatgggcttcgcggttctcggcttctaatggagtgagaatttcccatctaaatgggaagcagagcggaaacgatgattgttttttgtcctcaaatgataaacgaggtgaggatgataacctgtttaatattatagtatttttttaaaataatatttaataatttataatttatgtttgcataatgaataatatgtaatattttaatttttatacaattaaatttttaatataaattttttttttatattaaggtattttttactctatccctgtctcgttaggggattttatgtcgatttcgatgagaagatataaagattgaatagggatggagattaaaatctttaacaggaatgagaacttgctaatgtcgtgcccttcgtgcattagagtaagctttttgaagttcttttttaacttgtacaattaattttttttttgaaagcatttgggtaaaaaaaaaaagtatttttatttatttataaagtcgttctaaaagaaggtggggttttataacttttcttggaaggagagctattttgctaaattaaataatttataatttatttataaaaaaactaggaaacaagcgcggttttgaaatatttaaagaaaattatatatatttacattcaaaaatatattaattttatatttatttattagtttaatatttaaaaatatatgtaatatga

SEQ ID NO: 173235 - DNA, 526 bp, Cannabis sativa
acaaattacaaattatatgaatagatatgaatagccctaacacacaaaatatgcacttataaaaatattcttaatagtacatttccaattaggataaaaaaaaatcttaagaaaaaagaaacaaattgaacaacatttcaatcatagtcaactcaatagtaaaactaaagattatttacactttaattttttacttttttaatgtgggcccgaattttttttcaaaaacactgttttttttttatttaaaaatattgtgtaagttttgtactgtgtactgtgttaaatttttactgttgttctatagttatttttgagttgtttttagttattatgttttgtgtttcactgttgatttataaaaacacattatttttaaaaaaaaaatttcgtgtgacagtatttttgtaaaatttaacccaaattttaatatttttgtaagttttcttaaaaataaggagaattctcataaatatgggaattgagtgtatagtttatttttttatggcataaataaataatacta

SEQ ID NO: 173236 - DNA, 516 bp, Cannabis sativa
cctaattattgtatatagtctgttatagtaattactctcaatatttaggcaatagactaattgcaaatgagttcaattgattattatatattaatctgataattgtaatatgcatgagattcttcacacactttaacagtgtgagattgaatagttcttagagttataatatacttttgataccgtgttataattgtaaaatatattaaatttcatctcaaaactaattagtaataaaaaaaaaacagttcatgaatcttatatattctattatcttctcacactttaataatgtgaggctctctaatatttatgttaatgcattatatcttagctacatttaagaactatttattactttataaccttttattattattatttttcattcaatcgttctctctctatcttcattctctcattattttttttttcttaaaatattttttttttgacaaagtgattagaatcattcatgaatgtacgacgcagacgtccgccaccggcgctggaacc

SEQ ID NO: 173237 - DNA, 544 bp, Cannabis sativa
gtctcggacctagactgagacctatatcgagacctaggacatgaaccgaaaccagactgtgacccgtgattgggattcagatcttgtcctgggatttgggaactagggcttggacaagacccatagtcagtgtcttcatttgggactcagagaaggacccgaagctggacaaggacattgacccaaacccagacgtgggacccaaaactgaaacttgaaccaaaacgtgaccaggaccctagaacaggatcgggatcgtgaccaggacctggacctagaccgagacaagaaactaaaccagaacccagcctcagaactcaggctcggacccagtcccaaacccagactaggactgagactcgaacccgaactcaggacttgatcctagacccaaaccaagcccctgacaaaaactgggcttcagacctggacattgatacgaacaagaccgggactcaaataccgacccatacccagactggcatcgtaacacgggacctggacccagacgtagacacagacccaaacctgggacccagatcca

SEQ ID NO: 173238 - DNA, 620 bp, Cannabis sativa
gtaacaaaatttgtagcatgttattaggtatcaattcatggaatatgattgagaagctttgtcactaggctacgtattttggagaatgtagaaagaccagtcaagttattttgtgacaataattcagcaatgctatattccaataacaatacgagctcatccaagtgaaagtatattgacataaagttcctagttgtgaaagaaatagtgcaaagtggacagatatccatagagcacattggggcaaactccatgatagtagattcgcttacaaaaggatcaccacacaaggtctttcatgggcacactgatcatatgggtgttttcttgtttgaggatatcatgatttagtaggagttcgtattttgtttgctttatgtttgtataaggcatttatgtattttgttattttctgatcataaatgaagtatttagtttattcacactcttttgttatgtttaagtctgaactcactttagtttaaggaggaccacttagaaataggcatgttcagttcacattgcctgtaatttctatgatacacatccataattgatctatgattgatcttaacaaatcttgtcttgacaaattttgtcttaatgatttttatcttttc

SEQ ID NO: 173239 - DNA, 500 bp, Cannabis sativa
  modified_base (365)..(369): a, c, t, g, unknown or other
taatatcaaaggaccaataatttaataataaaaatttatgcatgctttgcttttaaaattaaagaatcttatcatcatcatcacgtattaaaaaaaatagtgagatcacaagtaatcaaaagagacaagctatttgtacatatcatactgttttctagacccttagttttcagtatcaatcatagaaaataacatcataaattgagcagtcgcgcctgataatcactagaataccagggactcaaattttattaatttcctatacaaattctcggtcttttatctacactttgagtgcacatctggtttacctatgatgccatagagattagattatgaaacaacaatatgcacaaatcatgatnnnnntggctctctataaataaaaaaaaaaggcgaacaattataaaaaaagagaatatttccttttattataaaaaatctagcagcataacaactgtaatttgaataaaataaaaaattataacatgcattaataa

SEQ ID NO: 173240 - DNA, 994 bp, Cannabis sativa
gaagactcaaaactcccaatttttgagtaaataactttgccaaaaaatgaaaatatgaagttgtgaatttgaatcttctaacttcatgactctcagttattattaaaaactagacgaacggtcgagataaaatcagaatcggataagcaaaacccagcgcaccaggccatttgtcaacctgggcgttgggttcttatttcggagcttctcggatgtcgttttgatacttccaaggttcaagaacttgaggacaaggtctcctaccccgttttcaaccattttagagagaatgctcgaatcagaattgacatttgaatgatcaaaaccagcgcaccaggttgattttcaacctaggtgctagggctagcaccaggtcaacctgggcgctgggctcagttgtgatacccttagaattgtagttttttccctaagtttacttgtatcttcgttatttctaattggaaaaaatacccagaacattttttttcaaaaaattgattaaaaattacccatgttgacatatgtcaggtgttaacctaggtgctaggtccagtttcaggccacttggaagttctgtttggtcccctgaaaaatttaaatcttaatctttgatgaaaataaagaatattctcggaagaatttttgaaaaaactcctcagaattagcccaggttgacaaaatgtcaacatgggcgttgggccagctccaggtgtcacttgtttccccatttttgatgaagatgaagaatatgcacgggttagatttttgatatgatgcttgaaagtggcttaggttaacaaattgtcaatgtgggtgctgggcatcgggtgctcaaaaatgaaagttctccgaatctgattctgatgccttaaatatgttcatggtatgtctagttcatgtcccagtgaaaaaattgacccgttttcacgaagacggtcctgaaaaccaaaaccctagttaggttgtcaacttgggtgctaggtgaaaccctaag

SEQ ID NO: 173241 - DNA, 538 bp, Cannabis sativa
tctcccaactgatgttactttcgcccctacagtagctcctatggcggcatctcgacgcacagccaacaggaccagatctcaaaatcctactgatgttcacgaagatcggtctccaagaaccgaagatcaccaaattcctcaaaggcgatctcactctcttctcgattgtcatgccaatgaagatgcatctagccccttcttcctcagctccggtgaccatccaagtcttgttttggtgtcaactgtactcactggaatcaattaccagtcgtggaaaaggggaatcaccatggctttggcagcgaagaacaaaattgattttattgatggctctctcccaaagcctaaatctggtaactctcttctcccttcttggcttcgttgtaacaatatggtcatgtcttggcttgtgaatttcgtctccgctgaaatcgcccaaagtataatgtactttgacctagctactgatatgtggcatgatttagctgaaagattcaatgagggtaatgctcctcgaatctttcaacttcaaacgcaa

SEQ ID NO: 173242 - DNA, 518 bp, Cannabis sativa
  modified_base (456)..(464): a, c, t, g, unknown or other
agttcttagcttatcctgctaagaaatcctcttgaatcttaaacagttcaggatcttctaattgtgccactttaattctttttaacaagtctaactgaagtgtcagattatacaatccctcaatcaaaaattcaatatttgccctagacatctctgaagctaactgaggagaaatcattaccatattggaaatctaatctgccccttttcgacttaagacatctgccacgacgtttgcctttccaggatgatacaggatttcacagtcatagtccttcactagctctaaccacctcctttgtctcatgttcagatcattctgagtgaaaaagtatttgagacttttgtggtcagtatagatctcacaccgttcaccatataaatagttgccaaatttttaaggcaaacaccactgctgcaagttgaaggttgtgagttgggtaacgctgctcatannnnnnnnnttgtcgagaagcgtaagctatgactttatctgcctgcattagcacacagcccaa

SEQ ID NO: 173243 - DNA, 826 bp, Cannabis sativa
tcacaactcgggaataatttattaaaatatttaaaatcaagattaatttaaaggcatgacttttttttattatttttttgtaataatttaaggaaaaaaatacttagttataaattacatcaaaaccataaatttaatcatgaatttaaactgagtaatcattttaaataatagtaatgagagattgagaaattttttaaaaactatatatcgcttacaataagaatataaaataattttgatatttaccattctcaaatgttattccctagtatatatataaagaaattttttaagagagttgaggtggctttctataaagatagtattatcatcttttttattttatggtggttttaaatttttttaattttttttttatataataacactaaattaaaactaactaattaaaagaaattaatcatcaatggcttatagaattttaaaacatggcttatagtattctaaaataaaaaccatttatatatgataattacaatattataacatatgtattgactatttgaattcaaccattaaaaaaaaaatttgtatttttttgtatttatttatgagaattttcatctcttcataattcttgccatactatatatatgtatatcttactattgttcaataacataaaaaaaaaacttaaagactatcacatatataccataaaaatatatattttagagcttgaattttttttttaaaaaaaattattctatgagattaggaagagagtcaaactattggtatggttatgattaataaggtatgcattttctattttctattagtatttttaaatatgtcatat

SEQ ID NO: 173244 - DNA, 613 bp, Cannabis sativa
agcaaaaactagaggagatcacctttattcagttggttttctggatttttagctagggattcaagtgagactcaagttgaggtaaaccctagacaattggttctttgttttaaagctttgatttggttttagtttgtgattttgagatataggggctgttagggttagaaatgtttgagctttgatatttgaattaggttttgtgcaagtttgagctttgagttcaatgctttgatcaataatggcatatttgtttacactgagtttttctgtgaaatactggttagaaaatgttgtctatgcattgtttaggttctctggaaggtttggttgcatttggtggaggattgagcaagaaatggaaagtttggggtgaaccggtgcaaactaactagctagttttaacagtacctgcaaaacctagccagttttggcaggatccccaagtgcttaattttctcgattcgtgtccattttagtgttgtagttgggcgtttccccatttctaaagttagagtaacccctagagagtataacagaacctagggttgtgggtttgggtttcccagattagggttttgatcatgtgatttactcggttttattatgtgat

SEQ ID NO: 173245 - DNA, 508 bp, Cannabis sativa
aattctgagtgcaaaatatctaaaaggaaaggagtttctgaattgtaagttcaagaactgtgattctaggttttagaagaatgtggtcaaagctagtaagattttgagagaaggagcttgtaatgtggtgaatgatggcagggatactaatatttgggaggatccatgggtacctcatggtaaatctttctaccctaagtccagtgggcacccagagtttggtctgagaaaggtggccgacctcctgactgccacaagtgattgggacattcagaaactgaattgcttctttgatagagatactatttctgctatcctaaaagggagaagaccctctggtcaaggaaaagataaataaatcttgacaaaagagtgtaacgggatcttctcatgcaagtcggcctatcttactcaagcattagatagagctccacagtgtgaggttgtcccctctacgtggaataagctctagaatagtaaaatcttagagaggcataagatcctttgg

SEQ ID NO: 173246 - DNA, 993 bp, Cannabis sativa
  modified_base (786)..(793): a, c, t, g, unknown or other
tactttttttttaaacttaaagagacttatttgcattttattcactgttccccttagttcttttagtgttcctttttacttttcttctgttggtttttgtacatcattaaaattaaaatgaggatcatgtggtgatgaaaacctcatactttgcgttctacgtacatgatcaaataaataagcttttcgcatatatacttcatatatatacagggccgaccctaggcataggcgagctaggctcgtgcctagggcccacacctatcgaaggcccaaaataaaaaataaaagaaattattaagctgtaatttaagtaaaattaagtgtattgtaaacaacaaatattcatatcttagttggttaaggtatatgtaatactatacaatgccatgggttcgaatcccataacactcattttttaaaaaaaaaattatatatattttgaagggccccaaaatgaaatttgccttaagcccataaattgtcaggaccgcccctgctcccttatgtattacaatgtatagaattaaaaaaataaattaatcaattaaattatcaataaattactaatttaaacaaaattacataaaaaaagataagattttttagaaaatttaaaagaatagctggaaaaatactttatattataacaaaattttaattacacgttcagtaacaaaatgattttcttcaatcttggttatctagatcaccatcttggttgtctagatcaccaactgggaatgaaaattccgtaggaataaattcaaaattatgataattatnnnnnnnntatattgctacatcataaataggatcattaaaaaataatctgagtgataactgtcactcgtggactcatccaacgcctctagatatggaccaggcttctcagaatgttgtttcctattactttttttttacctttaaagagacttcttagcattttattcactgctccccttatttcttttagtgttccttttttctttt

SEQ ID NO: 173247 - DNA, 677 bp, Cannabis sativa
  modified_base (652)..(652): a, c, t, g, unknown or other
tgcaaaaaccggatgcctctagacggatactcaaatgagcattggagttgggccaatatgagattaccttccaaccccgaacaacaattaaaagccaggcattagcagactttgtagtagaatgcacaggcaaggaaaaggtgtatttgaaaacaaccacgagccagtacaaataccttagcctagtaacaatgaagacaagtcgacttggaaactacatgtggacgagtcggctacagatcaactatctggtgcaggaatcgcccttgttacacctggggggcagcacctgcacgttgcagtcaaatttggatttaaattatccaataatgaggctgagtatgaagctttgatcgccgatctaaaactagcccgggagatgaaggtcgaacatattgaaatttgtagtgattcacagctagtggtaaaccatatatttgtaatgatagcgtatctgagcaaaatacacgacatgcttgcacagttcaaaagctatgctcttaggcaaattccaagggaagagaatacgactgctgacgcattgactcggcttgcgagtagtaatgtaaatgataatgcaaagctgattcctattcagtttctcgaagaacctagcatcactggcacaaaagagattgaaatgattgatacntccccaaactggatgacgccaatag

SEQ ID NO: 173248 - DNA, 788 bp, Cannabis sativa
aaagaagaagtgtttgaaacttttatgattcgtgtagacttcatattttcaccatacagataatatgcccaactttcagtacaaatctattacggtcaattaaatatcatgactgaaataccactgctcatactccttcaatggtcaaggtagttaggcaacaattctcctaaattgtgtaagaatacaatctaatccttgttcagaagtgtcacatcaaatcataatttctccttactgactggtaatgttaacattggtgcaatggttaacctctatttcaattcttccgactgaattccactaaaggcatagacaaccctcaacaattattccgtagcatcatgttagttccagaaaacctctaaccttcattgcaaatttagggtcagcaaaactcatgtttcttatatttagcataaaactaatgcttctagagacattacaacatcatccaaagatatctcttctatgcattctttgaatcggaagaaatcacgataccattaatgaagacaactacgaagtcatcggcacgaaaaactattttaggaatatcctcatttcgagtcttcagctggtaataactagatcgaagaccaaacctagagaagatgatccttccctaaaattattcaacataacatctattcttatcaaaggatacttattctacacaaataaaactggtgtattccagaatgaaatacttagactagtaatttcaagcccaacctttcctacaactgaatcttcactcctttcaattctacagttaccatccaatt

SEQ ID NO: 173249 - DNA, 891 bp, Cannabis sativa
atccttaaatccccagcacttgtacaggtaatttatcaatttattatttaatacaaaatttattaatgtattaatttcttcatcaaattaattaatatttgatttttgataatttcatttgcatgcagtatatctataaaacatattgttatccaagagaacacgagcagttgaaggggcttagggaagccactgtcaagaaatataaaatagagtattttttttcttccttaatcttttttattttataattagtttattgcctaaaattaatttaattaaatttgcgtacatatattgaggaaattatattatatactcacattactttactttgttttaatttttatctttattttcatattttttttaagatatactcactttttttagatgatattcctattatactcattaaattaacataaattatgtgttagaattaaaatagagagggagggtatattggacaactcactcataaaagttggtacattttattgaaatttaatatgagtgtatttttgactaatggatataaaaaagagagattcttcaacttatcccatatatatatataatatatatatatatttatatatatgtatacacttgatctcatttgtgctaaaggctaattctctcatttttatcatttattatttgggataattgtggcaaaattcttcaaaaatttagggttaatgtaaattagtctccaacctcgaaaattagcaataataattctcagggttacatttttcgtaagtccggtggtccctctttctaaatgaaccattaaacccaaataaaatgccacatgtcaatttttattagtctaaataataattttaattaaaaaaatctaaaaactaaaatataaaactaaaa

SEQ ID NO: 173250 - DNA, 788 bp, Cannabis sativa
gccatgtgatttctgcagtgagataagctagacttctgtattcagcctcagtactgcttctggagacagtaggttgctttttggaggaccaggtgactaaattcgtgccaagaaaaacacagaatccagaagtgcttcgtctatcatccggatcattggcccaatcagcatcacagtagcctgtgatgtcaagagtgggagttctttgtagatgtaggccatgatgaagagtccccttgagatatcgcaatagtctattcactgttttccaatgcgattgcagggggttctgcataaattgtgagactttattaacagagaaagcaatctctggtcgagtgatacacacatattgcagtggccccaccaaacttcgatatagatgaggatctgagatgggatcactgcctgtcgatgagagtttctccccaccagtcattggtgtagttaagggattagcaaactgcattttagacctgtagagaaggtctgtaatgtattttctctgagaaagaatcataccttcatttgtgtagtgaacttctatgccaaggaagtaattgagaagaccaaggtctttgagagcaaactttgagtgaaggcagtgaataagatcagtaatagcagtagatgaactccctgtgatgataatatcatcaacataaacaagaagaaaagttgtgtgctgaggagtgattcgaataaagagagagtgatctgacttggcattatgaaacccgaggttgtacaaggttgaactgagtgtatcataccaagctcggggagct

SEQ ID NO: 173251 - DNA, 789 bp, Cannabis sativa
taattactttaataatatctttttcaagagtgcataaaattaaataaaaattaaaaaatatatatgtatacaatctctaagtatacatgataataaataaactattacatatatttgcaaccataaaacaactaaaaatatactaaatactagacaacagtgctacataataacttagacataatatattatgtcgacaatctaaaatttgcgaaaaataacataaaaacaatattaatatataaacacatatacatatctatttatttttatcttaattgagcaatttaataacaattaataatttaaataataataagcaaataattagtcaacaactttaatataaagtatcaataattaggtatcaacacattacatcaactcaagataaactcaaaaacaacacacaactaaattaaatttaaaagatactacaaaatacttgtgtaacaactgaaaagtatatgagaattttctcataaatatattttttaaaatattttatttacattttaacaattcatatttttttatttgcaaatttaatttttaaatacatttttaaagttttaaaattacaaagacttctcatttaaaaataacattgtgaaaaaacaacgaacaaataacatgacatcaaatgcattacaacatccaaatcaacctaagatcaattataaataaactatgaaacagcaacaaaacaacatcgaaaaataactaaaaatatagttcgttgtacacattctagtctattttataaatatttttaaatattgtgataat

SEQ ID NO: 173252 - DNA, 814 bp, Cannabis sativa
acacctcacctgaccgccaactcatcacggtcggcgcgcgtatatatggtggtctagtgtgtgagtcctcacttatgcatacaaaactggatgacagaatcttcattcaataattcattccaattttattatttttaattcagtataacaatttttccttaaattttcaacgatttgggtctttttctcttagaaatttctacacatttagggtgcctttggtaatactgttttaatcagtttatgtttttttaattagaaaagtgaaaatattttttaaaaatatattctataaaattgtttttattttttaaatttttaattgagaattaaaatttcaaaaattctaaaaacaaataaaagtaacttttaaatttacacttttattatatacatcttcccattgtaattaatggtgtagaactataattgggtttaaattaatattaatattaaaatagaatttgcataattatatttcaatcttaccaaattctttatctgatcatcctctctcatttatcattttattatttataactaggggactaagtgcagatttgatctcattttttatacaatttatagaaacaatataagttcattatgattattataactatcaattattgttattattattattattattattatagaaacggtaattgacacaaattttcataattataaataaattgaaaagaaaatgatttaattcccaacagagagcacatatatacacatcctaaatgttacatggtgtaataataatataatattattacatacacaactaaaaatatactatcaa

SEQ ID NO: 173253 - DNA, 817 bp, Cannabis sativa
  modified_base (748)..(753): a, c, t, g, unknown or other
  modified_base (779)..(783): a, c, t, g, unknown or other
gaatgcaccaaccacttttcttctgcatacgttcccaaggacttcaaccatcaatttgaatacgaaatgaaggatttcaaggctaaggagcttccaatcaatccaaaccaagggaaccccgtagatcgtttatgggcgatcctcacaagtgattcttgagggtaagtattatgccttgtgaatggtggtttgaactggattatacatattattattttttgttgctccattgatcttttatttctatctccacagggatggacatagattttgcaggcaatcttagaggtcctcctaatgctgaccagaaatccaggaggaaagttggcatggtttcagattttactaaagaatccaaccatcccaagacccaagactgcacaagaagacctttgtgccaacctctctctggtatcgagaaatttcctgaggctgggaatgaggtctcggctgtaggatatgggatcctctgatgtggagaatgaggtctatgcagaggtcgagaccttctacatgtagacggtctttctcgagctatgtgtagccggtctttctctaagctatgtgtagatagtctttctctaagctatatgaagacggtctttctcgagtttatcgaccccttacattctttgtttaggaagatgacttaatggttttcccctagtggaatttttgtaaagacaagtttgtaacccaacttgggttttcttaaatgacttgtactcttttcatttgaacttaatannnnnntgtttgcttgcgtttttattcacaannnnnacaactatattttgatcaaatgtaaagtactttt

SEQ ID NO: 173254 - DNA, 914 bp, Cannabis sativa
ctataatgtacaagtatataaatagaaaggtaaaattaagcaaaggtgccttatttcatgtgttgttcatgagaaacgacaacaaaaacaagtaataatgttaaaacaaacggcaatacttttgcgtgtcgtttatttttatgagtataggctatatagcatcgaaaccctgcaacactatgatcaacatgtttcagacaaaatttgtttaatttcagatatgtaaggcactgcaggcagaggcaggcactgtcgtttgcttcatgaaacgacaacaaaatcatttttatgactttatgtcatttcccattaccactgcttccacttagtgatttctctattttcaaaatttatgcttaaaattgactactctaattgtaatcccaattttcttttatataatagtgcatatactgtatttttttttttttttaaagatgcatttcaaagttttaggaaatagatttaagcaaattatacagaaattataattaaatagaattttagtaaaataataaaatcaaaatattaaaaaatatgaaatgcaacaataataacaataaacaatctttaggtggcgtttggttacaaaataaaaatgtaataggaatgggaatggtaataggaatatgaataggaatggaatagaatttctattcttttgattagtaaagactatggaatcaataactgaataagaattgtgatgattggtatagtatagaatgaaatgaaatttttattattttgaccaaaatgtcctttacttttttaaaataatttttgttttataaaattaacattatactacagataaaaaatataatatatatttatgtattattcttaaattatatttttttaagatctaattatcaagtaatgaaatataaataaatatctaatttaatata

SEQ ID NO: 173255 - DNA, 527 bp, Cannabis sativa
aaatcacgataatttatattagaaccattagtaacagtataaaataaacagtcgttattttattttatcttggcaatcatattagtcgtctatttttgaacagtaatttgcgccataatctccataagtgcttagtttattgcaactaactctcaattttaaaatttttgtagtaagactccctaaacccatgttctgttagcaattagccatttccatccatttttaggtgttaagtaccatgttggactatccctgtgtacacactgtgttgtctacgtggacactatgtacacatggaacaattttattggtccacgtaaataagtatttaaaaaattaaaattaaaataagttaattagaaattaaaaaaaataaaaaataaaataatttaaaaaatataaaacaaattataaattaaaataaatacgaaaaaaaacataaaacaaaatttaaaaaaaaaaaccctaacctaaacctaaaacacatatctttcaccctctctctcttaccggaccccaacccc

SEQ ID NO: 173256 - DNA, 562 bp, Cannabis sativa
gatgaaatcagaaagggtggagggaagattgttttgtttggacttggaccataaggagttgaccaattggtaaaaatatttattagtgagccaatgtgtaatatcctaagattaagagaatggattggcaaaccctaattagttaactatgtataattatggaattatattattatataatttattatatgtgaattataatgatttatgacatgttaagaccccgttggtaagccaggggcattttagtaattttgacccgagaggggtaaaactatgaatttaatttaattatgtgcttatggactatattattatatagtaggcctattttttcctttttcaggtgtgttctgacaagttggcgcggtatagtcacaaccgggtttttcgggccgaactaggttccggggctgaaatatatttttgggatatttgattgtcattttatttttatatgagaaatcagaaatcattatttatgtaaaaaatgtgagaattatatttttgcccttatatgcttgaaaatgagaatttagccctaagggcaatgtggtaattg

SEQ ID NO: 173257 - DNA, 504 bp, Cannabis sativa
aataattacaaaataatttaacaaagagaaaggttaaaaaggtcaaaaagaaaaagaaaaggaaaaaaagtctacactcagtactgcagcaaaagagagtgtggtccacatgtcgtactataattggaagaaaatgggacccacccttaaacgaaatttcacatgctctgtcattttcggtaacgatcctccgtacgaaggtccacgtgtcaaaatctcctttgaaacagttaggtgtcgctttctatgcgctgtagaagaaccggcggctgcggcgcgttattgtcggcttccttacggttatgtctttctgcaggttcttgtcggctcactcggcggctaccttttccattttccaaagccaaattctggtccaacccttctattgtattgtagccaatagccattaacatttctcaaaattatgtgtggcaaaaatttctaaacattttttttttagaagaaatgctaaagggtatcagtggtgtctagcaccttcttacg

SEQ ID NO: 173258 - DNA, 1128 bp, Cannabis sativa
ttaataaaaccaataaaagttaacagaaagttacaaaaatattgggttttaaacaaaaatgtttacaattttactgttacacggtaaaaattacttttatactgccctgagcttttttttttcttttatactgtagacaccgaatatcaagaataatgcctccatcttccatacccacgcacagaactaccataaaaatacgaacacacctggaaaataaccattaatttcggtgagattgaacaaaaatagtgaaaaataaataataatcatggcataacaacggtaaaacaacactaaaacaaataaaaaaacaaaaaaagattaaaaaaaaccaaacatcttatgcacaacattaacaccatatgcaatagcgtctatatttacaagctagtcttgaaaaatcagaataaaaaaaaatactaaaaaaaacctaaaccaacacaaaataaatgtaaaacaatgaagcaaaaataaccacttaaaaaatcataaaagaaccacacacctcaaaacccttttgtcagtgagctcgtcaaattatttgtaggagaataaaagtaaaaaaaaaaccacaaaaataaccaatagaaaaagaagaagaaatgtatttatggattccatcttccaaacctacggacagatccaccacagcaacacaagaacaactgaaaaataaccattaattctggcgacatagagcaagaacactaaaatcgacatgaaataaataaattataacaaaacaatcataaaacaacactaaaacaaataaaaaaaataaaagaaaaaaagatttaaaaaaaactaatcatcttctgcacaaccttacactagatgcaatagatgttaaatttgcaagcccagttctgaaaaatcagaataaaaaaataacacgcttatttttctaaaaaacgtgactgaaaattttaaaaattaaagaaaaaaataaaaacaagatgaagaagaattagaactggacaaagaaatcaaataaaaaaaacatatttgttaatggagagaaagagagagcttttgatgaaaaagagagtgatagattatggcaaaacaatcgtaaaacaacactaaaacaaattaaaaaaaaataaaagaaaaaaaattaaaaaa

SEQ ID NO: 173259 - DNA, 577 bp, Cannabis sativa
tatcattattataagccgtcagcctttttcatgtggattttggtgtgtacgcaaacataggaaacaatcaaaatctattatatgtaaataagactttactatatgaatatggaatgatgaccctacttaatcaaaatcatatcagtgtgaaaactcttgaaataaaatattgtttgactcttcatatcaaatatatatatatttgtttgactcagtaataatgtcaatttttttcctgcaaaaaatcaaaataaattatgtcaaccttttcgatctctatacattacaatatactaccaaaaaagtaattaatttttttttattttacatcaaatttttatattatatcaaattttaatttctttacttttttattaaatcataccaatattatattttaaaattaatatttaaatatataatattaatttatacatataaaataaataattaatatattgataaaataagtttatatagagaaatgaatagtgggtattattatttggctaattagtaatttttttccctgaactttgacatgttgtaaattgtgctccctgaatttttttggccg

SEQ ID NO: 173260 - DNA, 537 bp, Cannabis sativa
  modified_base (120)..(122): a, c, t, g, unknown or other
acttaaccgaaataactgccaaccaaaataactgtcaaggcagttaagttggttgtttaagtgttctaaacctcacaatttccacctggtttagtacactttaacaacatagtaatccannncataaaagtaaccaatagaactgtatctaagatccaatgaaagtgaatctcaatgtgagactctagtttgagttgatgttgagcaagtcaagacaaagtctaaacttgtctctagtcaagctctttgtgaaagcatcagcagggttatcatgagtgtcaatcttccttattgagactgttttagattgaatcacatctctaataaaatgcatcttgatgtcaatgtatttagttctctcatgaaacatgggatttttcatgagatgcaatgcactttgattatcacagtgcactgttacatcctctgaattgatgttaagctcacttgtcaatcccttgagccaaattgcctctttaatagcctctgttgcagccatatattctgcttctgtagaagatagagcaacaacctttt

SEQ ID NO: 173261 - DNA, 645 bp, Cannabis sativa
caaatatgtaaggtagttaagtgttcgtaaagaaattaattgacagtaggaggttatttgctttccaatttactgaacataagcacattatagttttcaaatatctcccgaaagaaaggagaaacaaatatgtatatgcatgatatttaaaaatataggaaatgttttgtgttaaggaactattatatgaaaagtacaaatcgatactttatttataaaaatatttttataagatgtagataatatttatacactatatgtgctcttaattatcaaaatacctcttatactatcacttacacaattagacgaaagttgctgagtgatttgttgaaggttgcattacacgaaagttgctgggtgtggttgaccgaaggttggattaaacgaaagttgctagatggttgaccgaaggttgcatcagacaaaggtttttaatcctaagaagcatggatagtgggttgttgttgatgcaacatttatatatattgcgagcgaactaacgtgtaatttaattgcaactaaaaaattaatgtaaaatgtgaatgtgtatatgtaaaaagctatttgtcagtatttttttttcactgattgataattacttgtacctcaataataatatgtggagaaataactgttagcaaa

SEQ ID NO: 173262 - DNA, 507 bp, Cannabis sativa
  modified_base (399)..(409): a, c, t, g, unknown or other
atgttgtattattaattattgtgacaaatttaaaagcaacaattttggtatgtttcttttattatttttttttaatatgtaatttttggtatgttagctcatatattcattgtggggagattatatttgcaccctcaaaaattataactacaccctattattaaattgattccgattaaatattattttttagggatattggcggctaaactacctgaactttacggtttgtaatacttaatcacaaaaactaaaattttggcggctaaactacctaaaccctggtttcgttttgctctgcacacttctgtctaaaaatcacagttaagtgccacagtgggctacccacttgtacacacttgtacacgtggcaattttttttagtggtccacgtaatannnnnnnnnnnaaataattataaatattaaaaaatcaaaaaggaaaaaaattaaaaatatttttttttacttttttttttcttttccttttctttttttcttttctttt

SEQ ID NO: 173263 - DNA, 1027 bp, Cannabis sativa
tacgtggcggtacaatattttcatgctcctctcggtcttccgcaggaggatttctctgagctggcggttgaccatgggggtgtggtggtttaaatcgaatcaccgtggccatggagatactgcgttgtggcggtgcctttgtaccataggagtattgtggtactccatgtgcctcacacaaggtggttataatatcagcaagcccgagtccacccccacaagatccctcaaccatcatatcaaaactcactctaattatgtcccccacattcaggttgtaacccttcatgatggcataaacaaatttcaacctgtctatctaagcatcagaataatgtttgtttggtaccaacctcgcactaacaaagtatagccatgccttggctaccgggtttagttcacacctaaacagctgataaggttctccatcgattcatgaaacttgaggcctgggtagcccaaagtttcagttatgtcctcataattcagactctttgctcgaatttgttgttttagtggttgttcttctacggtgaaggttggtaagtcatagacagcatgaatagcggctgtgaaaactggcactttcaccccctaactttgaccttgtcatcctctctatctggccaattggcaaagaattctaaagctaaggtttggttgttgcgctcagtgacatccacaaacttactccagcgcctattgactatttgctctctcataagctcaaatacaacaggaatgtttctagtttgtgtaggatcaccaatgtctatgcccctatcttcgatgaagggtctatctttaagttgcaaaaatcgctcttgtgcctcaatattcaaaaatctcgccctatcaacattagagcgacccctaggtgggttagatgaagaagctccccctttctaacttactctagctcttttaggacccattttcaaaaattctaacactcaaaatttaagaaaatttcggcagcacttccccttaaaaattcactttccgggtaacaacccaatcacaaata

SEQ ID NO: 173264 - DNA, 666 bp, Cannabis sativa
gaactctctctctccctttaacccgtttgattttcaaatttatttgttgagaaattgcttgaagttgggtgtgatttgaagctttggaattgtggattcttgagcttggagctaggtaatttcttgctgagtttatgtaaagattgttggtgaattctcttgctgaattttaggttggaaaaagcttggttaagtaattgtaatcttggtatgcatgtgttaggttgttcttgatgcatgttaggtgatttggtgttaatcttgtgaaattgagcttctatttattgcttgaattgttgttgagcttgggctgagattttatggtattcttaggttggaattttatgtgtaaagtaatgttttaatggctggaaaaactgtttgaatagttgaagagaaagctcctgttcttgagcttgagatttgcttaatttgagcatgatattgagtgtttttgagcaatatgaattctgggattttgatgcatgtaatgtgttaaatgagtatctattatgtgctaataatcctatatgttaatttgtgaattggtagtgaaattgcaataaaaagattgagttttgggctgaaaattcgaaggtttgctgctggttttctaggttctgcacccagatgtcgcggccggctcctttgagtggaccagggaat

SEQ ID NO: 173265 - DNA, 861 bp, Cannabis sativa
attaccaggagccccccagctccgatttataaacggggctgtagggtcgtcaaacaaactcaatggggcctcgggcgaaaaagaacttttccttccaccctttatgagaagtctctaagtcagtaagcagggaacaattcttcctggggcgaagatggtaacaccccggctctttttccatcagagaataaaagtggatgacgtcggatacctcccattgaacgcccgccttatcccctaacacaatcagacctaaaagaatagcccacacattatggagtaactgggcaggagcaagcgagtaatgtattagaaattccttgatgagcttaggaatgggtagcctcagcctaattttcgactcaaaccaatacgagtgtaggcacacccactcatttggagaggaatctgccctctcatgctgtttgggaagcctaacttcaacccccgccggaaaaccacacgacaaaaccagggagtcaagttcacgctgggtgaggaccgacggacaacttgacttaacatccaaataggaactacccagggcatgttttttctcttttgacttcttcaacgggggaatcgccagagtaaccccctcagacggggctgcttgactactaacacccgcctcgcccccaaaggccagagcgagagcggggaataacggagacactacccagacactcaacctctgggtcatcggggacttcaacattctcagcctccataggaggagtatcagagactaacagcgactcgatacagtgtacacgtagcacaattttattggtccacacaaataaatatttaaaaaataaaaaattaattattttaaaaacaaaaaataaaaaaaattct

SEQ ID NO: 173266 - DNA, 508 bp, Cannabis sativa
ttcttttaggttagtgattaataagggatgggatgtagtagctatagtgaaattatggtttcagtgtaattgtaattagcactaggttgtttatatagattcgttggtttattgattagtgtccctttatgtgtatgtatataatgattattgatgatttttcctttgggggttaagaaacagtaagatggaagggaatgataaggggtagctgcaatgtgtattctaggcgtcatatatcacataaatactttagatgctcacaattaggcatgtcacgacacctaattatgaaaccctaattccctaaactgggattactggaaagctaagcccgtgaaaattaaacttttatctaaaacggaatgaaaataaaacttgaaataactttaaactttacaatcaaaaatgatatattttggatcccaaaaaaatattttacaaactattacaagtccttttcactagccgacctaagcggaacaatcagagttacaaaagtacattg

SEQ ID NO: 173267 - DNA, 733 bp, Cannabis sativa
gagagagagagagagagagtttcggacgagagaagaggtacgtaccgagagaaagagaaggctggtggacggacggtgggaggccggcaatcttttgaaatggcggctggcgcttctatgctggattttgaaatgggggatgggtctgctagagtttcgaaatgggatgggtctgatgcgtgcaaatgaaattaatgtttgtgaaaattgagttttacaaatgtattaaccttttttgcttcagtggagaactgtggtaaatgtattaatctcaattttgaaccgaataaaaaaaatggcttcacttttccaccgatgcaaaatgtaaaagataatttttaaaattatcacattattcctcgatcctgctctttgcgtcggggaacgagccaacgctaattggtattttttagcttcggttatactctaaagcatacaaattccccttattttttgcctcggtcaactattttggtgagacgtgttagccgacgtaaatagtacattttgtagtaaattgtgagttttatttagggcataaaattccaacttgttttagctcttcgtcaaaatctgttcgaatcaagcctctctctaatccaagaatacaaagaagcaaagtcagtggatacaaagtgttggattttgtaccctaaataaaacccattttaaaataattacatttactaattaataaagatcagaaattgtattttatattgcatggttcaca

SEQ ID NO: 173268 - DNA, 516 bp, Cannabis sativa
tccaacagctaaaccttcatgaccggtgtaggcagcagtagaatccagattctcagtagctgaggtgacatgatttgtggcaccagtgtcgacgaaccagccagaatcatctccaaaatcaggcaggaatgtagtagcgtaggcttggggatcatactcgacttcatgctccgtgagataggcacgaggagcggactgagagttggtggatgattgattggtggtgccaggcttgggagagacccaatttttgtcgaagcgataatggcatactggttcagtatggccaaatcgaagacagagttgacacaatggtcgattgtgctgaactgggccacaataacctcctctagttagagcaactgacagatcagttagagcaactaactaactacaacttgtacacttatcaaacggtaattaggaatgtcaatggggcgggtcggatctgatccgactctgatccgacctgatccagatcatatacggatttgccccgccccgtcccgctggatc

SEQ ID NO: 173269 - DNA, 830 bp, Cannabis sativa
aaaacaaaattaagaagataacaacctaaaatggcagagagaagagagtgaaccagtaagaatatgtgtcaatttcatagaagagttttgaaaatttcttagaaaagttttagtgtgaaaatacaattgagtcaactgaaaataaataattaagctagagggaaataaaagacttattatttgtaagataaatttaaggttgacttttaaaattaaaaaaagtgatccttatgaggtattttgaaaaataatgaaaaatcttattttaatttaagtctttcagaaaaagttaagatttgtaacttctttcacagaggaatttatttttaaaattaaaataatttatataatttttagtttactcacaaaagaatttttttttaataatatcgaaacattaatttataaaatattttttattgaagaaagattttcatataataattattcaaatggtaaaaataagtcaaaaaagtagaatcttaaccaaacgagacaataatattacttgattgactgattcattaatatttgttcagaaatatataaagtctaaaaattctaaagttctttggtccaagtctatgtcaaagaaactttgcccatttaggtgttagtttctaacgcgtctttaattttagagtacagtttactaaaatattttttaaggaatacagtttagtcaaaaaatttcctaaggttatgtttgttaaagaggaagaaaagtaagataattagagatttggaaggaggaagggtagtgtgattgatggagatatagtaacttctcactaagttatttagtaaggagtgagagaagagaggaaaag

SEQ ID NO: 173270 - DNA, 604 bp, Cannabis sativa
ggtcgtcaaaagtaggtttttgagcccgatgataaggtatggttacacatgaggaaagaacgattcccagccaaaagatgttccaaattgctacctcgaggagatggtccgtttcaagtgcttgaaaggatcaatgacaatgcctaccaacttgatttacctagagaatataatgttagtgctacttttaatgtttctcatttgagcccttttgatgcaagtgatgatttgaggacaaatcctttttcaagaggtggggagtgatgagaacacttaggctaaagatacaagtaaagttccatttggctcgctgacgagggcgcgagtcaagagattcaaagaaacactgaacaacttagtcaacagatttttaaaacaagaggagaccgcagtcaacactgaaggaaaacaaagatttgtgcttctcatcaaagtagactcaatttagacccaaattgagcttatcacatttttcaagacatttggtagctttccttttttattttgcttcctttattttgtctttgttttatttagaaaattatctttcttttagtttcattttttcttggttgtaagttggctatataaagccttgtaaaca

SEQ ID NO: 173271 - DNA, 714 bp, Cannabis sativa
taagtaatcaagtattataatgagctctcaaacccatattttttattatttatgagaaatagtgaaaagtactagtagtacttagtatttttttgtgtgtcaatatcgttattagtttaattaaatattggtctcatatagtaatataataacttttaggaagtatcgctagtcaattgcaagacatcatatttaaaagtactagataacactggtacccaatagtaatgcttattatttatatatcagaaatgctaaaagatactagtgtctaatggtgtctagcactctcctatgtatcaatatcgctattaatgcaattaagtatcaggtcctatataatttaatgtaatagattttagagagtcgttaatcaattgcaagatgatacatctgaaaagtgataagcaatactagtaccaaataacaagacgacatgtttagaaatattagatactactggtacccaataacaatacttattatttatatatcagaaatgctaaaagataccaatgtccagtggtgtctaacactcctatataataatatcgttattggtacaattaagtattgagtctcatataattcaatgtaataatttttaaaaagtgccgctaatcaattgtagcattatctaatcaaatgttagacccaggattagtatggtgtgtggaacatagtaaataaaagggtgtgtgactcattgtattg

SEQ ID NO: 173272 - DNA, 717 bp, Cannabis sativa
gatactgatcgagagagtactggcacaagtagaactaaaacttactcaaggacgaggtccatgagtaggacgagatccgttagtaactataactagcaacaaccggatcttcataatcacttgaaccagaaaaaacctgagcttcgccaacagctcggtccaaagcaagaggatcctatccaattgcgtattgatgagttggaggataaattaggaggtatcaagtcgaggagtatggaaaacagtctggatacgactcagatggggaactcgagcctttccatccagacattatgaatactgaattcccccagggattcaagaatcgtcacgtcttgtcatatatgggaccacagatccggtcttgcatttacataatttcaatactatcatgtgagccagtaatgttacgaataatttatgctgtattttattccccactttgatagttggagcagcaagcagctggttcaacaagtttacccatcattcaatcacctcttgggaacagttttcgaaggacttcaaaaaatagttccaagcagcaagggacaggcgacccgaggcatcctcactcactaacataaagcaatagtcgggaaagacacttaaggcctaattaagttgtttcaccacagctgctgcgagggtgagaaatttggacgatagtacccagcttactgctctttaggaatggatcactattgatctctccac

SEQ ID NO: 173273 - DNA, 511 bp, Cannabis sativa
  modified_base (457)..(462): a, c, t, g, unknown or other
ttttttaaaaaaaaagttattattaaaatattaaatatttatttagaaaaaaaatctgatgaatatataccaatatatattataagtttatctttaaataataataataatacgttttataaagaattatctagagtttatattaaaatattaattacttactagatattttaatttagaattttttttcttgagaacaaatttttttagtatcttatatatgcattcaaaaacgaaaataaaccttagagaattcaaaacaaacccaaatttaaatttaaataaaaattgagtctaattaaaaaaattattattaaatctgattttatttttttttgaatgcaatgaccaaattgttcattccaaataataatgctatataattgctattaaaattgcttagcaaaaacatacaaactagtaaagaatatcttaattaaggtgacgtttggtaacnnnnnnttaatcagttttttgtttttaaaagtggaaaagtgaaaatatttttcaa

SEQ ID NO: 173274 - DNA, 539 bp, Cannabis sativa
ccactttcactgactcatccaaatactaacagagtatgttgattatgatatactgagaatttttgaagaagaagatgctgaggagcctaaaaattcaagttttggaccaaatatgaaagatattgatagatattgtgaatggttaaggaaatctatatacatatagaaaagaaaaaaggaaaaaaaaaaaaaaaagttaaaacccattatactgttgtatattttggttaaatataataaaaaggtaagaacggtgctttatacctttgataatttcatattataagtatgtgaacttttgatgtagtgcaaaacataatcattaatttttttttctgttaatcattaattatgttttgaatttttaataaacttatagagtgtacaaggttacccaagaaatttaaaatcatttgtagatgtaagttaaaatttgatgatctgcatattgttactatgccaaaaaagttaccaacaatatttgttacaaccatattaatgaggcttagttaaatttattaagactgatttgcccttca

SEQ ID NO: 173275 - DNA, 955 bp, Cannabis sativa
tccacaatgcaacatctttgaaggcaaggcctcgttgagctttagtcttataaatctctatccaagataaattacctgtgttaacccaattttttttagtgatgtggacatcaatatttgacatgtggtaagaaggatcacatcatggtgttgagtaaacccgagtcatagcagccgaactgggaggaggacctagccctgcgcctacgttgatttcaagagctccggaatagaagttaagacttcaataacttgaatctaactcactatcttttagtattatcatgtaccatgaatacatggagcaacctaatccaagccccgtgagcttgaattgcacgaacctacaatccgaaagaaaacctgggcacccagggtttcacctagtgcccaggttgacatttccaactagggtttcaatttttctgaccgtcttagtgaaaatgagtcaactttgcttcgggacatcaactagacataccacagatatatttgaggcatcagaatcatattcagagcaagtttatttttgagcacctggtgcccagacacacccattgcctaggttgacaatttgtcaatctacccaccttccaagtatcagattgacgatttgacttttgaatcttcttaatttgtcttcataaaaaataaggaaaaatgtactttcaaggaagaaacaacacttcctttgctgccagaagtaaggcccaacgcctaggttgacacctgggactggcctagtgcccaggttgacacctggggctagcccaacacccaggttgacacctggggttgtccagtgcccaggttaacagtttttcaacttggggcaatttcgatgatatttttcaagaactctttcgagcatcttccctgattccataaaagattaaggtccaactatttttggggaccaaacaaagctttcgaagggccataaccgggacccagc

SEQ ID NO: 173276 - DNA, 590 bp, Cannabis sativa
taaaatattatgtttttcatatttcttttaactattttcttttaatttttcttataaaatattttttttaaaaaaaaaaaaacttattttgtcaacctttacaaagaaaaaaaaactataaaaatgaaactttagatatatatattatttaggattcttctatgaagaatttcctaaatgtcaataggacatttaatagcttgttctaattgggtaagtgtattgtaataccgtggtcttagaatgtaacatatttaaactaggattgattaaaatatttttttattcagctttattttttggcatttgctatttatttgagaaatgttatttgtctcccacgtgtccatcatatagtctatcatctcacaaattttttataattactttttttattagtttattatttagttttattcaatattatggacctcactaatataattaatcgatctatcctcctcctttctcttttatgtctttctctctccttaagccctcagtcttcttctccatattctttttctctcttgatatatgttttttaatctatcttcatctttctaataatttcttcttcttcttttttt

SEQ ID NO: 173277 - DNA, 535 bp, Cannabis sativa
gttgatacccctgccaacccaactgatctcactgcccaatgtcagcaattgatctcactcctaagtcagcatctcacaaacaccactgctcgcgtggattttgaccaacaacctgttgctgcctccaatttggctggtaaaaattcttttctctctgattttacttggattatcgatactggtgcaacacaccatttgtgtgcacacaaatcttgctttagttctttttctaacactacatatcccaaagatgttatcctacgcactggccataaagttcatgtggtaaacataggtactatcaatataaactcttctctgactttgaataatgtcctctttgttcctagtttcaaaataaatctcttatccattaatgaactattggacagcacctcatttacaatcaatcttgacaataacacttatgtaatccaggatccttctcagaatgtggagattgggatagctagatagcatggaaaactctatctcctgcaacagaagacatcccttgctgctgcttctcaaagtc

SEQ ID NO: 173278 - DNA, 1411 bp, Cannabis sativa
ttaccatatgatatgtattctatacaaacttattttattgtatctcattaaattttatatatctttaaaaataataaataatgtaaaaattgttataaaaataaataaactaaaatgtaacataattgtatcttactcaacaatatacacgttcaaaatgaaattatagttttaaaagttaaccatctaaaataagtaacaaaaatatatatgagataatatttttcacaaaccaaatagtattttagtgtcctatttttgaagtaacatctcataatttttaaatataattttttttgattaacaacatataaaataaactaaaaagttgttttgattttgaatatatggtttcaacatttttaaatgatcacattgaaaaagtatattgaagtggcactatgtttgagcctagactaatggtgtaactgattttttttttaaaatgataaaaataaatattaaataaagaaaaaaaaataaattggtgttatttaaaaaaaacaaaaaaaaatgaatcaggcattaaaaaaacaaaaaaaaataaaaagagaaatgcaagtaaatagttcaatttataactttactgatagttaatgtccttttttttaaaaaaataataaagtaaatatcattttttactttttaatacctaaaatactcttcattatatgaaaggtattataaaaatacctcagagtaatatgaatataacatacaagtactatatcttagagtaatatgagtattatgtcctattttacttttgctgataggtattcttttaattttatttttatttctttccttcaagatatataatataacatacaaatattatactttaaaataatatgaatatactacaacaattctatagtcaaataaatatatataaaaaaaacttaaataaacttccccaattttttttttctctttctttcatgatataccatagcaaataaaaacaatataccactctatttatttattttttatttattaatatatcatagcacataataaagatatatcgtacaaaataaaaaaaatactaaaaacttaaattaatattaaatagttttttttttctttctttcacgatatatcatatcacatacatgttagaattattataatggactaatacaatcataggtttaattccataatacacaatcattaactatgtgcctaatattactaataatcataatgtgatggttaacaacttaattatgtgttagaggcacatgaaagtacccttaatactatagttgacccattaaattatagtttactactattaaaccacttaagcccaatttgtatataactccttagggttataagggtatgagatttatatatatatatgtcttatgtgaagaagtggttgtgtgtgggttaa

SEQ ID NO: 173279 - DNA, 549 bp, Cannabis sativa
aaaaaaaaaaaaaaaacctctatatttatagacaacattaaacttttgcaagaaacttccataacacataattttccaagtttgtcatctcaaaataactttcactacagaagaactagttggctaactttttgtttaataatgcaattttgaatataataactactatgtacaaattaagttgtctaattattcattttaacttttgttgtttcataatatgtctgtacttttaaatgtatacatttatgcactttctttttcttaatgtacaaattatattttcatgtttaattatttctttttcatttactgttttattttacttgtcatacattgcactgtgaaagcacgtactagtatctattctatataaaatgtgtctatataacagaattcttggtttatgagaaattattcggtgacttttctattttattttaatgaaaaatacttttattctaagatattttattataataataaaaatgtattttcaaattttgatatttgcaattacactataaaaaattttactttttgtcacaa

SEQ ID NO: 173280 - DNA, 551 bp, Cannabis sativa
  modified_base (338)..(340): a, c, t, g, unknown or other
atttgttcaataatcattatgtttttgaatttttcaactggttaaaaataattttaaattatttatagtgttgtaaattagtcattctatcataaaatgataatgtgtctgtgttagactattatcatgttaacgcctttaattttatttaatttttttcaaacagtaattgacttttagtttaataatttttttaaaaagtacttttattttttattttttattttaaattacacacatgacacttaaggggaaatagtctaaacagtcacgtcatcattatatttgttactgtgtattgagatttttggaaactgattaattagagcttaaggaannnataaaacaataaataatagacaagtaattttttacatggttagggcgttaataatccataatccacgagtctgttgtattgaccttgtcaacgagtgtttaagtattacaagcacggcacttaaccctttggttagaggatcagctaacatcgactcggtcttgcaattttcaataacaatgtctcctttcttgaccaaatctctgacagt

SEQ ID NO: 173281 - DNA, 1023 bp, Cannabis sativa
  modified_base (718)..(721): a, c, t, g, unknown or other
aatttttgggtgaaaacaccctagctgcccagaagagtctactagcagcctgtacgcgcgcgcacgagaggattgtaaagtcttccgttgagtttcctcagtgcctgcagggtctcgatgcacatagtcgtgtttgaaggcaggttctgggtgaggtgaccaaagcttcagacagagattgtcctagcacgcgcacgcgcgcgcggatgctcatcttgtccgaagcttggtgcgtgcgtcgtgcaccaactctacaccgaatgcaccaaattttcaaatcgacatatctttctcgtttttaatcagaatcaagttttgtaaaaataaaagtttcttaatttgtcataaggaatccaaataatatattttcagaacgaaaagaaaattattttcatggaaattttttgtaaatcacatacattcatcaaataacacataaaccaatatgagcacatccaaatcaacacaataaacatattcatcgttttaaatccatattccatgaaagaaaatcattaccatggttctgaggctagtttttgggaatatttaactaggatctaggtttactaataagtatgttgaattaacatcctaaatatgaatatctcaaaaataatgaaattaaacacataagggtttagaaaaccttacattgattacagcagaataatatgactctttcaactcaaatatctaacccttgttcctttctgtnnnngagtattatcaagatctaagcttggatctctttctttccttcgagttggttaccaccctcttacccactatgattgagtacttgacttgatatgtgtgggcatgacactctatcactataggccgaatagatgaagaacaataaaggaggcaaaatcattatagaagaaactctctaatctactagttatttaacagagaaaactaggtttgatttggttgaaggcaatagttagatgagatgagagcatcatgttccttatatagtgtttcaagtaaggcttaggtttgaattatatagat

SEQ ID NO: 173282 - DNA, 1014 bp, Cannabis sativa
tgtgagtactaccaacggttgagtaccgcttagtagaaccctagctggactgggttcagtgagttcgttcggaggatagtgactccggtacaccaaagctaacctgagtacatactatgtgtcacgggacccataaacaccgccagtgacagtgtgagtactaccaacggttgagtgccgctcagtagaaccctagcccgactgggttcagtgagttcgttaggaggatagtgactccggtacaccaaaagtaacctgagtacttactatgtgtcacgggacccataaacaccgccagtgagagtgtcagtactaccaacggttgactgccactcagtagaaccctagttggactgggttcagtgagttcgttcggaggatagtgactccggtacacaaaaggtaacctgagtacgtactatgtgtcagagatacagatagtaataggatgtttgctgtagtgagaagtagtgattgcaaccgtattaataaatagcgaataataatcccgtgggatcaatgctgaatgcaatgattgtgggattcacgctgaatacactgatagcgggctcgtgtgctgatgactcatgttgtgagaagcgtaattttcaagggatgacattgtaactgttgggtcgtaattcacgctgaatacactgatagcgggcttggtcgccatgcgcggattgctaaaaacaaacgtattgtggccattgttaactgttcgaatatttttgaaacagggatgacattgtaatcataacgaacaccccgtgaaaaattgtaattttcaaaataatattccgacatgtaatttttggcatgaagattgagacagagatagtaacaggatgttcactgtagcagtcccacagaaatgatgatatggaccaagtgtatcccagtgtaatatgggacggacattgttcaatcgttgtactttgtcaattcacagagcactaaaatattattttaaaataaaggactgcttgtgactgttgggttttatgccct

SEQ ID NO: 173283 - DNA, 846 bp, Cannabis sativa
attatatgatatatgggtgccaggatttggcacgggctttcctgattaggcaatgcaaatacaggattttcaaactaaagcatcaatttgccttattaggtaatgtaatgtattgaaaattgttactttatgagttatcatatatataaattatatttttaaatgaatatgattcctattattggtataatagttttgtattaccagatatctgtatactaatgcttattcatggcagatgccagtagtaatttgaatttcatcttatgaacaatgcgtaatgatttgattttgattgtgtataaatgataacatttgaataataaactatataatcattattattacttttcttgctgagtccttgtgactcacaggtgctatgtggtgcaggtaagggcaaggaaaagttagagctgtcatgaggtgactaccttctccaacaatgtacatattgatcccaccggcttgtgtgctgagttgccaggagttgttttggactggctgtatctactgtattttgaattgtgtttgaattgctattgtctatagtttcttttttgggtaaatcttttataacagggatccccagaacacctttttactgccgttataatgtctgtttccaatcttttattttagtcaagtttttaatattctcagaatttttaataattaatgaatataatagtattaatctagtttacaaaatcaaagacgtggcatccctatggaatagtgtgttacaacttggtatcaaagcagccatggttttaaaggtcctgaagactggtcgaatatgtacattttctgcgaagacatgtcgactcatgatatagtaagtgt

SEQ ID NO: 173284 - DNA, 566 bp, Cannabis sativa
taaaacaataatttccagaaaattcaattttgagttttgtatctcctctctcagctacataaattctcaacgttttgatacatcataatctgatatttaattgtgtttatcttcttccaacaactataattttatagcattgaatttccataacatatatacaatttactcacttaaattaagcatttatgtttatgatcctaagttacaaaacaattattgttttgaattcttatttatgttacaatatttaatttataatagactataatttatataatgtattcatcaaatactataatataacaatctctcactaaatcaaaatttgtaacacactattgtaatatttatttagtcaatcaaataaatattatattaaaatataacattcctcaactttaattggagataaatatacactttatagaagtcttgtttaggtgcattaggtaaaatatatttcgacttggattttaccttagtatatttactataaagtttgatgaaattttggttaccgtaacattgaaccactattcttttagtacaaaccggtgataaca

SEQ ID NO: 173285 - DNA, 658 bp, Cannabis sativa
taagaaggtaggaaagaagaaggcgtaagtggaactcacacttttttgttctattgtaatttatttttttttcttaaaaaattcaaatacttaatgtttgagaaaaaaaatcggttctgatacctagattttggagaatgaaagtttagttttgttaacaagtttttatatcaatagtataatgcagtgccgatccatttgtcaagaatgacttgtatgacatcaaggctccttctctcttcaaccaacgataagttggaaaaactcttctcgagaactaagatttatctactgaaattttaagctttaatgattttgattattatttctatttttgatatttttttttatttttgggataggcactttaagatttaacttagttgctcatggatttgcaattttcagactaataaaaaacttttttttattagtatttgtgtggatgtaaagctctatttgtactttattaggtgttttggtggagaaatgtgattcctagctagactaaagccgtcattttttttttcatcttttcattttgtgcatttaagttttgggtggtttaaatttaagcaggctaccaatggtgaaagctatgtcgatatttaaatttattatgatgataacttcagtgcttaaggagattaggatgaca

SEQ ID NO: 173286 - DNA, 578 bp, Cannabis sativa
ttcctcactactttcacaaaaaaatggagtccatcatggctcaattttgtggggaagaactaagcacaataggaaagttcattggaagaattggtcccacctttgcaaatctaaattccatggtgacctaggtttccgatcaattaatgaaagctttcaatcaagcaatgttagccaaataggattgccgtattcttcaggctccttcctctcttgttccccatcttcttatggcccggtactaccctcattctactttccttaattccagtaaagggcaccatccatctcttgtctggaacagcatttcttggggcaaagcactcctcttgtcgggtttacacaatatagtgggtaatggtacctccatctccatcttcaaggatgcctggatcccgggttatggaaaactcccctacctccaaaccccaaatacccttgacaggagcatgtccagccttattacaactaacagagaatgggatataccacagattcaaaccatattcccaagcaatgtttgccaagctatacaatgttgggaatattttacaaagatctagatttactaacaagta

SEQ ID NO: 173287 - DNA, 520 bp, Cannabis sativa
cccgatattacttatgctgtaaacgctctcagccaatttatggcgaaccctcgtactactcatcttcaagcagttcatcacctcctaagatacatcaaaggcaatccaggacaggggctgctctattcaagaaattcctcgctgcatctccgtgggttctccgactcagattgggcatcttgccccatcacaagacgatctacaaccggtttctgcatctttcttggagattgcctagtgtcttggcgaacgaagaagcaaccaaccatctccaaaagttcagctgaagctgaataccgagcgttggctgctacaacaagtgaaatcacttggctacaatatcttctagatgactttcacatccatcaaccacaccccgcattcatctactgcgacaacaattctgccatccatatcgcaaacaatcccacttttcacgagagaacgaagcacatagagctagattgccatttcattcgtgacaaaataacaaacagctccatcagactaattcctattt

SEQ ID NO: 173288 - DNA, 658 bp, Cannabis sativa
  modified_base (265)..(286): a, c, t, g, unknown or other
tgatggaatggttgtgtacttagattaaaccattaaaagattcatgtatgacctaaccgtgaccttaagaaaaactaaaacttttaacataggtttgcatgtttaatagctattcaaagtatttaggggtggaccattcaattgtaataagataagaaaatatttgtttcaacaaatactacttttctaagaaaatgaataagtttgaaaacaaagtagcaaagtagaggagatattttttttaattctaaagtgttctatcatnnnnnnnnnnnnnnnnnnnnnncactgcctctgttgtcttgacatagtaccttgttgtagtgggagcgtttcaaggaactcaccctgttatgatttggaagacacttgtgatgaaaatcaattgttagtttaaacaagtaatggaaagtcagaaaaagaactaagaagcttagccaagagaactatggttaaaacaattcatatggagtaaccaaaagtttattattacaatggcaagaaaggaaattttaaaaaaataagtctatttaatggactgaacaaaacttcatgatactagtattaaaggtttgagtttatctaaacttgtggcttatggtatacctgtaatttaattactctagtgcaagcaacttacttttgtaagatgttgaag

SEQ ID NO: 173289 - DNA, 531 bp, Cannabis sativa
  modified_base (485)..(491): a, c, t, g, unknown or other
aaataaaattttgtaaaataaactcaaatttaagcggtaaaactcccaaaactacaataccgttagcaaattacaacttctatctaaatttagctgttaactgccaggatggattgtccacgtgaacacagtatacacgtaacacaattttattagctcacataaataattatattaaaaaaatgtaaattaagaaatcattaactttttttttattttattttcgtttgtttcttttttcatttttgcaaataccttcttctctttctctctctcgattatgcagggcgccagcccaagaccaccatcatctgttggcgccgaggaccaactgagccaagtaatcttgatcccccctctctctctatcagccatcttctctttctctcccgataatacccaacctcaggaccacccaggtgtcgtcgccgtcgtcgaggaccaccaagccagttaaatctcgatcctctctctctctctctctnnnnnnntctctctctctctctctctgtccgatctcctctctctctc

SEQ ID NO: 173290 - DNA, 865 bp, Cannabis sativa
tccttcagggagtaaatctcttacaaggaattcttttctcgatttgtttgttgaagggcctggtaactctttgtgggcagacatgctgctttgagttgaattgttctcttcttctttcccttttgtcaagggatcctgctagcaagatgtggttttacctcttggtcactgtaaactagaagtataagagcagactgctggtggatcgggctagccttggtaatgactaggtgcccagccacgttgagggagcattgcctagcctgttgaatgatgttatggctgtccaacttgtgaaggtaatggccggccaggttgttgattctttggccggtcagcttgctgaggtcatggtctgccagccttttagaagccaggtcgatgctgcagtttgatcccttctgcactcggttggctttgcccctagcataatttctatagagcctttgtgcactcttgtcaatagttatttagcttctttcttggaaacacttctttgaggtggcattgggatagcatgcatgtgcattatgttgtgcaagattggacaccctacaattacctccctaatccctgctttctggcaaggtgtttggaggtatgctgctgtaggtgtatccatgttgattgtccagcaagtctatttcttttgaaatagggaggcttagttctttaaagaactgggcaggtaccaagtttgccttggttgtcaaggcacaactagctagtcgagcgagtgcatcgactgtcatgtcgtctttgggggacttgcctcttagtacagcctttgagttgacttaacaagtcttgatattagctcaagtaggccatcatcttattgtattgagctgtatattcacctagg

SEQ ID NO: 173291 - DNA, 668 bp, Cannabis sativa
taatcaagatcaaatcttttagagtaagcaattgaaaatataagaaaaaaacatgtgaagaaccaaaaaaaaaaaaaatcatatttaatataaatgttaaattaaattcactcataaacaaattttacaatactcaagaatcatattctgaaattattacaaccgatcactcgaattaagccttgactcatctaaaggctcaatagatttgacttaaagactctaatccagatcgaatcctctagagcaagcaattgagctccaagacgtagctcaaaaattaaggtgaactttgagaaaattctagtgttttctgttccactttctttttagtatttaatgataaaacactataaatctgattttagctctaattaattcatgagaatcaaacaataggattgaggaatagctaaagcgtaccggagtgcattgaatcgcttgaagaagggtataatcttccaattttgcatcaaaacctttgaaaccttattttcctgatgatcgggaagaactctagaaaaaataacgatacgatgcaaaatggggaccaaaacctgttatattaccagctgttacaaccgttggtaatatttattaattatttttaatttggcccctcatcaaatcagaaactatctaattggtatccacatattaacatcatg

SEQ ID NO: 173292 - DNA, 637 bp, Cannabis sativa
cctcaacatcctttttggccaagtacacttatgtttgcattgtgttggaaatggaaaggttcttagtagcagtcgacttagctcgggaataggtgtaagccatcttcagaccagtttgtgcagaaaaaaggcattaaaatccaaactagttaaagagagatgaacgggagatgttagaaaagacttacccgtgaaagctctttcaagaatcctcccatgaccatcttcaaagacaagtcattgtctcccccagctaactgctcgttcacctcagggaccgactggctcacatagtggttgagcatgtcgctacctcttttggtctctgtgtgcaataccaaaggtggggtgggagccttaactcattcagactcgcttctgatcagctcggatcctccttttgcttgctcaggttcctccgaactctacttgggaacctttggacatagtgattttcggggcaagagggtccgcgacaggttgttcctcggaaagatcaatgactactctagctggtgctttctcttttgatggaatctcaccgcctttagacttctttgccggaggagaggcgctagagcttccgcccattctcttattcagagcgtcaagcatctgctgaggcatgtctgtatag

SEQ ID NO: 173293 - DNA, 626 bp, Cannabis sativa
aattatatggtggtcgaccatatatggtggtttaagctattctttaggctcatcctaagaatggtgtgatgtaacagtgacagagatataataataaacataaattaattttttattcattaatataaattttttaaatcttttgcaaacatttaaaattcttattttaattcactactataaaattggctttatccatcggtttataattttcttttattatttctcatcggtttttaaaatttttggctatgtgggtgttataaaaatgtagaattttaaaagacagtttataactgttagaaaaagttattttaaatgaaagtttaaaattgttagaaaaatttatttgaaatgattgttataactgttggcaaaaaatattatgtagattaaaaaaatacatataagctagtttatcatatatgaattattatttgaattccactattttgtattacaataataatataaatttaatataaatgaaaaaaattaagaaataagaatcataaaatataaatttaaattattatgtttacaacatttttcgtagcaaaatataaagtatatacaaattatcggtataacagacaacaaattcttaattcacaaacgtatatcca

SEQ ID NO: 173294 - DNA, 563 bp, Cannabis sativa
ataataataataataatacagtaagtggtataaaatatgtgatataaaatactattgttttaacacttattcctaaatgtaagtgccctaatacagtaagtgacttctgtcttattgcatgctgtaatgtcatttataaaaccgccactaaacttatttgttcaaggttgaaagcaatactttctgatctgattgcgcaaaaccaaggtggattcatttttgggaggtttattgcccataacatcatgatttgccaggatttgatcagacactatggaaggacaaatgccaaggctagctgtatgattaaacttgatcttcagaaggcgtatgatactcttgattgggactttttggaagaaattctttatgcatttcagttccctgcgaaatttatcaagctgatcatgatatgtgttcgaactcccaggtttttacttatgttcaatggttctttacatggatattttgaagggaaacggggattaagacatggagatccaatgtcacctctgctttttgttcttggtatggaatatctttcaagaataatgatgaagatt

SEQ ID NO: 173295 - DNA, 569 bp, Cannabis sativa
atctttgtcattgacgttcttcttacgggttttgtacgatttgatttttgacctcaagcattcagagggatcatcatgtcgttcgttgtttcgtcgattgcagggccattcatcgtcccaaaacccaacttcaaacagtaagtgacttctctctttattttgtttcatacttttaattttgcatttatgggtttgaatactaatttcttagttagcacctttgtttccttatttggttttagcaattttagggttgatttgtatctaggtaaatgttagggtttaggcaaaacataggtttttgagtttctccaatttatcaacttttagtttgataaatttcatccaggaattgggattgctttctccttgcagcaatgtctcaatctggttcagaagtttattgtccacaatatttagaaatagagtgtcccactaaagttgccatcccatataaacccagaatttcagaacccaaatccaaattagatataaatgatgcaaaaattaagaaacacttagtaaaaacctaccaagatgacatcgtcagtcgccacaaacgcttcttg

SEQ ID NO: 173296 - DNA, 595 bp, Cannabis sativa
aagacaatatatatggaatagtccacacggcctcatgcatacatacatgcaattttattcaattagtaatatatacataaaaatatataatatatatagtggttgagcaattacccaataaagaaatctagacctaatgggaaatcacatagcttaagccttaatgcaactactaacaaatatttaacacaaatctatgggaacaagtagtcaagtattattaaataagttaatgaatatcgagcaaaaattaagggaaaatattaggaaattaaatatcaaattgtgtgtactcatattcttttaatattaatataaatataattttggatttgtgttttaaaaaaattatttattggacttttattaatgacagctcggactctattttttaaaatagtacaaaataatatcacgagttcaatttttgtcaatttttttttctttataaccaatctcaagctaattcgttgtgctaagagataatatatagataagtagaacctctatctaagaatactctattcaagtaacttctaatttgttataaaaaaatcaagtcccaatttgggccaattataaataagaataacct

SEQ ID NO: 173297 - DNA, 680 bp, Cannabis sativa
accccaaagttattattagaaagagtaatatatattgggaatatttatagtaggacattgttttgtctgcatagggtagtaaaacaaaatgaatttttataataaactaataagggcagcattttataccttagaaagtaaaaataaatataaatagaaaataaaagtttttatttacaaaaataccgacttaacaaaaaaaaaacggagaaaactcctccttcgtgagccgaaacaccccaatccacaaaatcaccactattttttttttcaaaaactagggaaataagctcaaatcaagatgtagatctcaaaaaaaaagcaatcaaattctaaaaaatccaaatacaaaaagagaatacaggaaaaattatattctaatgctaaacaataaaacaaagaacatatgtaaaaaaaccaaaaaatataaacaactaaacaacaagaaaaaaaaataatcattaaaaccaataaaattaaaattttaaaaaaggtcagcaaaaacaaaaaataaaaacaacttacgaaatcagttaaacataggccaggatatgcaagcttatggaaccacatcttggatgcaacatctgccacgccaaaatgaaaaggtggaacaatctgatccttgccattcaagtaaacattgtccttgtcatggctaaaagaaacatgaaaaaaaa

SEQ ID NO: 173298 - DNA, 1032 bp, Cannabis sativa
gaaaggagagttaaactctccaaaccaaaagtcgcccctaaaaaaatagtcttatttttttttaaaaaaaaataggaagctttaggagcgacaagtgtcgcccctaaaagtattagaagcgacaaaaaattattaggggcgacataatataagttgaaaatcaaacgttacttttaggcgggaattttcccgctcacactattaggggcgacaatgtcgcccctaatgccctgccacttgatacaatcaaggcattaggggcgacaattgtcgctccaattgtcgcctagctcttatagtgtgcacattaaaagtcacatttcccattctcgagccatttactcttcttctttccccatttttttttcattttctctaaaaaaaacccctaacccatttcaaaatattaccaatctcattcctaatccgatctcaaaacattatcaattgccgacctccgatccccaaccacccccgcacggcacacctgcaaccgccgctcctcccagccgacatttccatagaaaattttggtaagtttataactatatataattataaatttttttttatatattctcactacatatctggtgtatatatacattagaaatttttcatttaatttattttttatgatattttgttaagcatgttttttatatttgaaattttgggctatagagaagaaattatagattgattgatgataataaggatggtctttattttgatacttttcttttctttttatttcttggaatttattttattttattatttttttgtgatactatatactatagatatgtacaaattaagattgtgggcaaaaatagaaaagaaaaatagagttaaaaaattatacaagctaaaataattttttttcaaactatttgttttacactttcactgtatatatatattatttgtattagtatatatttatatttatttatatgaatatatatttgtgcgtatacacagggacggacccattaagattgatgtgggggctatagcccccacgaa

SEQ ID NO: 173299 - DNA, 639 bp, Cannabis sativa
tttatttttatttttttgaaataactcattaatgatatatgtgatactccatcattagaaaaaattaagagctacaaaaatgtcctcacttataagaacaaaagtgatgctctcacttaaggaataccctataaatatatatagataaattttattctttatcccacaaaaaatattaagttcttatttttacttcaccaaaattttaactttttataatttcctcttagaaaattatatatattttaaaagatttacccatataaaaaccatatttattttgttttttttgagtataaaattatatttccttctaatattccattttaaaaaattatatattcgaatatttttcaatagagattagtaatatgttgtaaattagtaacaaaattgcctaaggtaataatataagaaattagaacaaacattcaatacgagagaactttcactgctgaaacttaaaaactccaataagctatcaagcactacaaatggtgttgcagtcatttaagactcaacaatgtcccacgtattgtaatattaaagaagcaactcttaagtcttaatccttttattcccaaaaaaaaaaaaaaaaaaaaaaaaggggcttttttttttttttttttaaaaaaaaaa

SEQ ID NO: 173300 - DNA, 532 bp, Cannabis sativa
agcctctttagttgtggggaaatgagctaacagggaatttcaaggagagaattcaacggtgtaaaagacatattgggatgctcaaaggtaacactgatgctggctcggttacccaatatcatgaagcaaaaaaattactggctgagatctaccaccaaaaagaaatattttagaggcaacggtctaagcaactttggctaagagagggggatcgaaacacaaaatatttccaagctgctgctagttctcatcggaaaaaaaatttcattcatcaattgaagaatgaagaggatgattgggtcaattgggattttggcttacctcaggtaatggttaattactttactgatattttccactccttggggtctcatggtgatgatattcttgataaaattcagccatctatttcttatgaggacaatattgggttacttaaaccggtgggtgaggaagaagttcgagcggctgttttccagatgcatccagataagtctcctggccctgatggtatgactcctgcgttcttcca

SEQ ID NO: 173301 - DNA, 849 bp, Cannabis sativa
aattaagatataataataaaacatttgcttactttgtggatttctttttggccaaattttatacaagccgcaagttatcatttcaatcatatggtgacatggtcactaatatttattcctatccatatatatatgctacaaagtccattacaaggccaaaatgcacaaggacaaattcagatgaagagcttaattttaattaatggaaaggaaattagaaaccctaaaaaaggtttaattagactcaagcaagacaacttccatactatatgtgggggggaaacttaactgagttttgatagactaatcctaatatatggtgaaaaactaagatggtgtttgattgaaagaaatgaaaatacaagaatagaaatgagaatgagaataaaaataggaatgaaataaaataaaatttaaaatgtataaaaaaatttataaaaaaactattaattttttttcttatgaaatgttgttcctttcatttcaaaatagaatagtcattccaccataatggtagattaaaatattctaatgcaaccgaaaaaataaaatgaaaattattttctttccattccatttcattacatctaaccaaatgacacttaaaattttcaactaataaggagggtgtgctaacttagaatataaaaactaaaaccatgatttctaaacaaaaactccaccaggatttctcacaaaaataaaaaatataaaactccatgaggatataaaatctaacgactaaagtttatatagttgtagttaaaagtgttaattaataaaagaggattgttattaggcaccagtggtgcttagcacattctcgacatgtcgcgttgcgattgacta

SEQ ID NO: 173302 - DNA, 622 bp, Cannabis sativa
acttttgctgattggattggatcagattttagctattgcgcagattggattgaatccaaaatatgaaatctgcatttagtgcggatcgaatgcactatgagcaaaatagtgcggattggattggatgaacacttctagttggaatccaaaataattgtggaagagttgtgaaaacttaacacagtaaataatataaaacttacacagtattttttaaaaaattttaccctacactataaaaaaaaagtaaaaaaattaaaaaaaaaaattaaaaatttcaaatatagtgtaaaaattggaataaattgaggaatatttctttttatatatatatatatatatattaattaaaaatacctttatattatattttattaaaatctatgagtgaattatctaatatatctttactttttacttaaatataacacatgatttatattaatttatgtaatataataggaacattataagtgattatatcgaaatataaaaattaaaataaataaaatgaagtaaaaactcctgataaactaaaaaggcgtaagttgaaaaataccccttttattaatcaattaatcaaatttgtctctaattttatatttatttgaaacatacctct

SEQ ID NO: 173303 - DNA, 643 bp, Cannabis sativa
agttattagtgtgattccattgtgactgttgtgagtgttatatttgattttggtgtaaatgttgtcaaggtgcaatggtgtgggttggaaagagtagtgatttttgaacaagtgtggaaggttgtggacattgcagtgtagtgtatgatttattgttgtgtcgaggggcaccagttaaaaagagaatcagagaagaaatttgttgtgttaggatggtgtgcaactgaaacgaagagaaaataccgaaagttaagaggaccgccaacaagaaaaaaaagaaatcactgcatgaaattcctaagtttcattgcaaggcaaccgagacaaagtatcacaagaaggtggacaatcgggagttttatatggaggggggattagtagccgatatagaggacattgatgagttgcccgaatgggtcagtgaaacggttcataagcgggattggggactttttttccagcagagagagcaggcagtcatggaagttgttaaggaattctacgccaatttcttatcctaagaatggcccactaaagtggttgtgcgtgaagtattagtctcattctgcgctgaagaaatcaacaacttgtttgggttaaaatcaatcgaatgccaatactccgctcaaaaagggcaagtgag

SEQ ID NO: 173304 - DNA, 853 bp, Cannabis sativa
acattctgcttctttaaaagctcaatttccttggaaccagcaacgaaggccttcgaaaacatagttataaattgcgaagccaactctgcagaacgaggcataagttcctcagaaggagtcctctcaacctttgacatgaactcctcgcccacgaacttctcctgaagagctagaaaatcgcgagctcgaacagttggatcggtcacgactttcttccccttgtcttgtgagggcctcaccagcttcttggacgtatcagcagctggagtaatcacgacgtcacttttccttttttgaggaacgacaggagaagtcgttgctgttccagtcttcggcttgcgattgagaacaggagcttgcttcaggaaagtcatttctgcgaagacaagaaaagataagttaaaatataagcaatgactcatatatatatatactgcatatatgcgatgtgttacctgatgttggtctagaagtctgtttagaaagacgcttgtctatcttctctctttgcttctcatacgactccgtgtatactggctcctgatgaaggctagcgttctctggaattagcctatgttcccacagcttcaaggtcgtgcacagtaatctttagtcgcgatcttgaacagggaggcaaccgagaacttcaacgacttctttgctaaccaagtccaatactggtcgagctggtctatctgcgaacaataagaaagagcgagttatatcataccacaaggtaacgtaaaaattaactaagtgttaaagtgtgcgacgtactaggtcgacgattaaaatcagtcctaattcctggtactttaaacacgtaaaaccatttagatttccaatctcccat

SEQ ID NO: 173305 - DNA, 531 bp, Cannabis sativa
tcagcaaataaatttgggtaagtcttctgttttcttcagcccaaatgttcatggtcatcttcgtaatagcatctgctctatgctccatatgcctgaagcttctgaaaacagcctttatctgggtctccctaacataattgggagaaacaaaaatgctattcttggttttctgaagaataaggttctgaacagaattaatagctggactggtaagctgctatctagtgcggggaaggagattctcttaaaaacagtggttcaatctcttcccacttatgctatgagcgtcttccttattccccttggtacttgtgatgagattgagaaactaatggctcgtttttggtggaaaactacaagcagtaaaggcaatggtattatctggatgaattgggatcgtctttctcgtccaaaagaagttggcgggttaggctttcgtcttctccatgattttaatctggctatgttagctaagcagggctggcggttcctgtgtcaccctgactcccttgcctccaagatcttcaaagc

SEQ ID NO: 173306 - DNA, 715 bp, Cannabis sativa
ccaagataggcaaagtggcaagtggttatggtctgctagagctatggaggctgactctgctatggaagccgaagctttagcagtcttttgggcactgcaattgggatcagaatgtggtctcacctccattgcagtcgcgtctgatgccctgcttttggttcaatctttgaatgctcgaaaacttcctccttgctggaagtcaagggcagctgttgctaagatatggagtttgcttgaagtctttactaattgtgttttcatccatttgaatagaattgacaatggccaagctgatgcacttgcaaagcttgcgcgaaacaatgagttttttctggaatttaagttaagggagggatccccttttgtgattcccaactatgttttctttgaatgaacatcttttctctcaaaaaaaaaaaaaataggccatcctttttttaaaagcaatgaatacatcattgacttctttgatcatttgggcatgctcttagttaattgttcttttagagcatctccaatggttaaaatttaaaagatgcttgcttatgtggattgcttattttgcaaaatataaggatattatatcattatcgattaataaatgctattatagtaaattatattgatgccactatataatattgatgctatctcttttaaaaaaaattaaaggtaaataactagtgtgatcatatttataatagatcggaagagc

SEQ ID NO: 173307 - DNA, 528 bp, Cannabis sativa
acaacataaaaaaattatatttttagtaaatagaatcaaaaaatcgtaaaaatatttaaaaattccgtaaaaccgtatttttgtaatttttattgttgtttttgtgtatgaaataaagtccaaaaacaacttttagagcccaacaatcatttggtttacatgttcattaaagaggcaacattagctaaactgaaaagaaaattatataaactttttggtaaaaaattttatacttttatattcaaagtgtttttctatatttttacagacgcaaaaatattatgaaagtaataagaaaacaaaataatataaataaataataaaaaatcaacaataaaataagaagagtacaacataaaattacatcaaaaagttatattttatgtaaataaatttttaaattcgtaagaatatttaaaattttatacaacttattgtaatttttttgttatttttgtattttttttaaaaaaaattatgccaaataatattgcatttaattgaaacatacctctttttatatgtatt

SEQ ID NO: 173308 - DNA, 1196 bp, Cannabis sativa
gatcacaaatcgctctttattcaaaatccaatcgccaatacgatagtgcaaactcgtagaggcctgactgatatagcaaaattcacagacgctggatcctgcatcgcagaacccaggaaacacgagggttctgcctgctgttaatcctggaaagccggcaaacgtggggatggtgaaacggttcctatagatgaaatggcgcctggtatgcaagagactgggaataacagttccgcacccaacaagggcattcataacacaactattttgcctggaaccaatgcctagacgactatcggagatgccactgactcatgcagggtcataataataccctgcatcatgatcaagacgaactacgcgctgcagtaaatctcgcgttccacgaacaaaggcgtatgtttgccaaattgagaaatatagagatggaggcattaagggctcatcatgcagagatcgaagatcgtagtcggcaagctatcgtactgatacaaagagcctaccaaactgtaggtcggcaatcgccgaatgtcactcccctcggagagagggacggggatccaatgatgaatacttctcagactgcaaatggtcagccgcccaatccccggtcacgagttccacttgtggacccagcggtaggcgagcagaccctgtctgataattcatcaggaggagtcatacctgatggttccaaccaaatcaatggtgccattccacccgtcaaccaagcgaatcaaccttaaggcagccatgcgcttttgtgtttgagaggttagggacaacccatgacctaaggaatgatctaaaccgaaggaggggagtaaacgatcaaaatgttacgacaatcgtgcagcccgaagcccatactcaaatccccactcacaaagatgctgacgtaatccaaattgaccagaatgtcgagtaggtcagcccagccgtacaggctcagctagacgaacttaaaaataggtttcacggcatggctggacaaagaaaaaatgatattgaactagaccaagcacgcgaaactcctttctcgccggagatcaatctcctgccactgccccacaagttcaaaattccgacgtggacaatgcacacgaggagagaagatcccctttcccatctcaagtactgcgaaatgcaaatggatttgcaaggggtacgaggagatgtatgctgcaaaattttcc

SEQ ID NO: 173309 - DNA, 590 bp, Cannabis sativa
cactatcatgcattcaaatcagttaacctctgaaaacaaaggaaatcgaccccaacaaacacagcaacagaactcacaatttcactttgaaaaaccatagctttgagtaaaattttcatctcttgataaaacaaactaatcaccaaccctatcatgcttgaatcaacattttaaatcatgttttaactacagaaattaacaacaacatacaacagcaagtatcacaacaaaaccaacatgcaacactcatcttttttatcattttcaacaaattcaagagggaaagatatagaaaccttaccaacacttagaaatcaaaaaaaaccttgatgaatttagctagaaacacacaaagaattcccccatcccagctgctcaaaaccgaaagagacaaagataggttttgctttttctttgatttttctaacttttgaaataaaacaaaacatgcataagtcacatatattcagccaacataacaataataaacatttaatttcacattactaagtccataaaaggacaaaacattaatgggacaaaatgaccattttgcccctccacagtaaaataacataaagggtactaaa

SEQ ID NO: 173310 - DNA, 1022 bp, Cannabis sativa
ttaaatactggatccactcccgaaacaaattcaataacaaattcagtttcccgggtaggtgacaatccctgcaaagacatcgaggaactcgcataccaatctcatattttcaggccccgatgtcacaagttggctagtgtccactgcagtaactatgaaccccagacaacctttgcccatcaggtccttagctttcaatagtgttattcttggtaggcgtatcctttgaatcttacccacgaacaccgctgggttggcactattgggctcaaacaccaccatattccgcttacagtcgatattcactccatattaagacaggaaatccattcccgggattatatcaaagtcagatagttgtaactcaatgagattggcggtcaactcacaaccgtcaatccaaaaagacaaggaccgaatccacctagttgatactataaggtctcttgacggtaacagggttccaaaccccgaagcataaatatcacacggcttgtggaaactttcactaactctactcgatacataggagtgagtagctacggaatcaaacaacacagtatatgaacaaccattaatagacaactgacttgtcacaaatgacggactagcatcagcgtcagcctgagtcatagtgaaaagtcgcccatgttctgtacagtattcttcttaggctcctctttcttagcctggggacaatctctgataaagtggcccagtacgccacactagaaacatgccttggctcgacattcactaggatgatgcttcttgcatttaggacacttgggatatgaccggaatgaggacctgcgaccctgacggccacctctgttttctcgaaactttctatttccccctgatgctccggaagcctcagccttccctttgtgctcaaggttgccattgctggtccccttactgatattaccactagcaggaggatttgataccgtgacggcatcccttacagcgtgctctttaattacttgctgcttcgcctcctcagcaattaaggccaa

SEQ ID NO: 173311 - DNA, 850 bp, Cannabis sativa
acgcgtacggacgagatcaatcgactgcttcatactctggctaaaaactctctatctgattttgacaaggtggagatgaagagtttgttatccaatatgactttcaatatcataatgagaatggtggccggaaaaaggtattacggtgatgacgtggcaaacaaagaagaagcaaatatgtttatgaggatttttgatgaggcggtgtctagtagcggagtagccaatccggccgatttcttgccggttgggttgaaatggttggcaatgagttatgagttgaagatgaaaagggcttctaagaaaatggatgcttacttgcaaaagcttgtggatgagcgtcggagtatgaaatcggacattaccatgattgatcatttgcttgctttgcaggaatctcatcctgaatactattctgatgaaatcatcaaaggattcatattggtaagttatatttatatgaccaatatatatagaatttttctctctttatttattttattgattttttttaattattttatataaatatgtattaaaaataatgatatttaaataatatagagataaaaataaaaaatatataatttttgatgtaattaatgtaaaacttttaggtgaaataaaatgggtaaaattttagtgaggtattataaaggataggggataagttgaaaaatacttttttttattcattaatcaaaaatatctctatattatattttttaaaaatatactaacttttttgagtggtttgtctaatatactcttactctctacttaagtctagcatataatttgtattaacctaatgggtttaataaatatatcatctataaaagtgagtata

SEQ ID NO: 173312 - DNA, 749 bp, Cannabis sativa
attaattaacaatgaggaaaatagacaaaagaatatcaattaaaattcacataggatgccacataaattattttaaagtccatatttttatttttaatttataatgtatactacaaaaagtatttttttaagtaaaaaaaaatgtcaatttttatctctaataattttaacatttaaataatttaaagtaaacttacaaaatataaaactaagaaaaataataaaataataataataaaaatcaatttattgaaatagatatgtttcgtattcgaaaattgatataataaaaaagtaacaaacaaattaaaaaataaataacaaatgtgaaaaaaataagataaaaaatgttcaaatatatagtcatataagtgtgttactttttaacttttgaacaaaccaaaatttaagagaaaatatttagttgtaaaaaaatatttttatctcgaacaaataaaaatataaaaatctaagacattaatcaatcaatcaccttaaaaagataatatttctaagacaaaaaaataaataaataaataaaagtactatttataactgttgccccttattttgcccaaaatacgtggaccaaccggatgatgacacgtagatggaaagggtttagcatgtaaataaatcagcgaagtctatttaaccacagggatcagccttagacatgcctcccggagaaggcatgtaagtctcacatgctcccggagagcaaagctacaacaaagcatctccgggag

SEQ ID NO: 173313 - DNA, 698 bp, Cannabis sativa
agcctcgactttccaagcaacagaagcaaacaccacaccactagaatcacgaaaaaccattctgagaccacaagaacccccattgaagtcgatggcgaccgtgttaacttcgaagaaatcagtggctggaggagaccattgagaaggaggcttatcttgcctgggagcaggaatactagaaatcaaagatgcaggatagttgtttaattttcatggtgataagattagagaaagttagtcacctaaggacccaccagttccggcaaaatagtagagttttcatgcacaaacttgtttcgattttgagtttaagtactagaacgggttaaattgagttgtttatcgatttactgttattgacatagggcctggaatcgttgagcgttttccacacaagttaatcggcacacttgaatttctacttgaggttaagaaaaagtataattttaccacctagcatgtcaatatatgattcggtaattaccgtctataagagagaattgttacgttatttggttgtctcattaggcaacaatttaaggaagatttattactctattggctgtctcattaagcaacagtgttagtttttatagttcatatcggagttgcaacggaagtagaataaaattttggatttaataaaaataattattgaatctgatatgaaccataaatcaagattagctaacaaccta

SEQ ID NO: 173314 - DNA, 509 bp, Cannabis sativa
gaaccgacggtggtaaccctgataacaaacaaaaggctgatgctttcgaaaaatcaagggcaccagaaagttttggggaaacagaggtggccgtcagggctgcagatcttcattccgatcataccctgagtgttcgaaatgcaagaaacaccatcagggtgaatgccaggccaagacttgtttccagtgtggcatggtgggccactttattcgagattgtcctcaggccaagatagaggagctaaaaaagaatactaatcagaacctgggatgactttttaccattactcatgctaatgcggatgctagtccgtcagtggtgacaagtcagttatctataaatagttgttcttacactgtgttgtttgattcgggagctactcattcctacgtgtcgagtagagtaattgacagttttcataaaccatgtgatgtgtatgctttgaggtttggtaccctgttacctattgggattttatgccctaaataaaacccatttcaatctaatc

SEQ ID NO: 173315 - DNA, 603 bp, Cannabis sativa
tggattaaatgactttacaaacacagtgtccacacacacacatatgaagtggagtcgtttcttctatactttttcaaactctgtcaagttacaaaatatgccacaaaggagatcgtctctagttatatctattttaaagtattaaacaattcttattttatattaaaaaaatcttcttacccacctatctctctaacaaaccgcatatcctaacaaattattaactatactgcatatcctagatatctatctcttttttactatcaactaaattatagcacacaatacttatagtttattaggcactatttcacatctcattctgttggtagtgaacaattctccgtgatatatgtcaggtatatatcttttttatttattagaattatatttatttaaacgtcttgtttataaaagtattatatatcctcaatatataacaaattatttagggtctgctacaaaaattatttagttcatatcttgcgatgagtgtcattcaaaaaaataattggaaaaagataaggataatttattggtttgtgatttaaaaattgtgttttttaaaaatgtgttttagaaacaaaaatttaaattttgtaa

SEQ ID NO: 173316 - DNA, 614 bp, Cannabis sativa
  modified_base (294)..(294): a, c, t, g, unknown or other
  modified_base (506)..(515): a, c, t, g, unknown or other
  modified_base (568)..(585): a, c, t, g, unknown or other
atgtatgtgttaacgcagactttcactaaccagatttgagtctaaacaatgataaacttgcacagaaaaataaaaacagtaaaaaaaagtctgaacacaaaggttttttatgtgattttgcagttaaaattttacatagtccacgagtcaatcttattagatttctaatacagttctagggcctttttttcttatgaatttttcgtccctttttcagacttgcctctatttataattacatagtgaggcagttaattacatagttgactaatatcttacaacaattatcccctnaatcgtggggtttgattacataccacgtcaaataaatgcggttaatatttgaatatcacacagctgtgattggtctgcttttacttggtcaatgtaaatgtgtattgaatacgatgcaactcatattgttatgggacgtctcactgggagcatagcaacaataattctgatagcgagcttttctcacatctttgttggaatttattttaccnnnnnnnnnnatttactaacaagtatgttatttaacattctaaatatgaacttctaaaacgannnnnnnnnnnnnnnnnnaaagtatgagaaaccttacagtgattgca

SEQ ID NO: 173317 - DNA, 588 bp, Cannabis sativa
agttgattttttatttagccatttcagaaaacagtttttgaattagtttaattaattcaaaaaattgatttttaattaagttatttcgataatcaattttaacttagttaactcaagtagtgagattttgatttatttattttatttaactaatttttgtgtgtaagtgtttattttagttactttacagaactagttttttttgtctcagatttttaactagttaataaatataacttgtttctttatattatattttgtgttattgtacgttatttgttttacttattttgttatagaaatggttcaatttagatttatgtctcggtatttttagaattgatccccacattttttgaatttataactggtttgaattattctgtgttatttattttaatcattatgttatataactaattctattttaatttatatctgagtcatctactctttgtgacttttctggcgacttaaatttttctgacgttggtaattttcccaacaatacttattaattattattataaattttatcaaatttatttattattttttttatttcttatattttaaattttaattatt

SEQ ID NO: 173318 - DNA, 1153 bp, Cannabis sativa
  modified_base (1082)..(1083): a, c, t, g, unknown or other
ctcgaattcgtgtcgtactttgctggtgccggctcgtatttcttaaatagcccaacccattttcatattcgggcttaaattcgtgttttactttttcatattttttttacaattactaaattatatgtatattttataggcgtagttatatttatataatttttgaacaatattttatagataattatataaaataattattaacatcatgagaatttaaatatatactcataaatactcaatttttatatcataccctataaataaattaatatacaaatcttaacttttcaagttttaatagttttaattatagaattataatatttagtattatatttaagtttaattattattttatcttatttataattgagatagcccggggtcccattgggatcgtatggagagtttcctagctcggggctcattgatagcaggtgacccgcaagacacgagtcttgctcgtattggtgccacttgggccgaggatcgtgtgagccttagccctcgcacatttggttgctgttgggctttgtgaggacccatgattgagtcctagctagagtttacaaatcttttcaagtctcctttttaaaaggcgacgtcgaagttcttacttggagaatttcggggttaatttgggtgtttcggtaaattttttatatgtttggcattcaggaaaactttttagtttttagcctgactttttttcccgagcatgcacaaacgttataattatttagggttacttataaatttttaaaaataattcaaatagttaaaaaataagatttaaatattatgttggacgtgtgactattttttcttatatacatgtagtaagtaataattatttaaatttaattttttaatactataaactatttataattttgtaaaaatatacatataaacctaaataattacaacttatataaacacaaacataacaaaaaagaaaaaaaatgctctcttggtatcgaaacacttaaagaattcttaaaccaccaatttttgcgaagatatattgagaacacctacttttcgagtgctttataaaaagggtaaatactattttnnaccctgtgttttgcaaaaattacagaatggaccctgtgttttgttgaatgacaaaatggaccctgtattt

SEQ ID NO: 173319 - DNA, 623 bp, Cannabis sativa
tcttccttttatttttcctgctggtttttcaagtctttcttcaaataaccaacaaagatcttttttatctttgttgttactattttctgttgtttatttctgtgtataggttcagttgggttaaagctcttgtagagcttgaagaagaagaagaatagaagggctgaaggaggaagaaaaaaaaaccagcggtaggttctgttggattatattttaccatgatatagatttactaccatgtatgttgtttaactttctaaatatgaatttctaaaacaatgtaatttaaacacatataaagtttaagaaaccttattgtggttgcagcggaattaaatgactccttccgctcagatctctaactcttatatcctttctgtagcagagtatcacaaagatctgagccccattctccttctcttgaatttggattcttcacagtcttacacactatgattgaggaccacttgatgtgtgtgggcacatactctatcaccataggctgagtattagtttgtgaagaagaggctatagtgttttgaattgaagaagaagaagaagaaggaagcggtctcatcaaacctagagagaaaactaggtttttagctttggagacattagtt

SEQ ID NO: 173320 - DNA, 1479 bp, Cannabis sativa
tctcgtccagcaaaagagaagactgctagacaaagaccgggcgcaagcactgaaagaaaagttatagaaattgcgcgagaataagttcatcattgaagctttctacccatcttgggtggttaaccccgtaatggtgcccaagccaaataaaaaatggcgagtatgtattgatttcactgacctcaacaaggagtgccctaaggactgttttccacttctaagaattgatcagctcatgggtgcaacaaccggacatgaaattctgagctttatggatgcctattcggggtataatcaaataagaatgcatccactaaaccaagaacatacaagtttttgaaaagatatgggtctgtacagttataaagtaatgtcgtttggtctgaaaaatgctggagctacctactagaggctagtaaacaaaatgtttaaaaaccagatcagacgaaacatggaactatatgtggatgacatgcttgtcaaaactaggaaggttgggggccatatagaggacctggatgaatgcttcaaaatccttcaaaatacaacatgaaactcaatccctcaaagtgttccttcggggtcagctcaggtaagtttcttgggtttagtgtcaatggtcggggaatagaagctaatccagagaaaatacaagctcctgaatatgaaatcaccaacaaaaacaaagaaagtccaaagcttaactagtcggatagccgcactcagcagattcgcctcaaaatcaatagacaagtgtgtttccttcttcaacatcctctgaggtaataaaaagtttgaatgaaagtaagaatgcgagaacgctttccaagaattcaaaagataacttgcaaagcctcttgtactctcacaccccctagacagagaagaattaggaatatatttagctgtcaccgaatacactgtaagcgccatgatgataagagaagaaaacaacatccaacatctagtctactatatcagcaaacgactcattgaggctgaaggtcggtatccagtctactatattatttcttagctaattaaatctcacctatctcattctcattccattaaatatatatacatgcatatatattacttagaatataaacaatacaattaaaaaatttacataaataatatacacaatgtatttacacacaatacatatatataaacatatattcaacaaaacacaaaatatatacatacatattatatatcaagttaataaatatttaccttataagcacaattcagcgaccaattacgacaaaaatgtggcaactatgcacacacaataacataatgttaataaaattaaaaaaacccaaaaatatttataaaaacaaaaaataaagcaatttaggtggtgtttggtaatacttttttaatcaattttctgttttaaaaatagaaaaagtgaaaacatttttcaaaaacatgttctataaaattgttttcacttttcaatttttt

SEQ ID NO: 173321 - DNA, 602 bp, Cannabis sativa
tatttttcaaatccatatcacacacaaaattaaacaccaaatttaaataaattcaaatccaacaaacaaataaacacacagatatatacacaaaatttcaatcccaaaactcaaatctgaaaaccctaaatttacaacaattatcttttctcatatctgaaaatagtgaacacaatagtacccaataggatatctatgattgcaaaaaaatttatagaaatccctagatctaaagagagagaaagagagagagaggagatcgggcagatagagagagagagagagagataaggatcgggttttacctagtttctgggttcgtggtcctcgacgacggcacctaggtccgtggtcctcgatgacggcaacggcgatagcacctaggatcgagagagatggctgagagagagagagggggatcgagagtgggatgcatgttgcctactgctggtcttgggctgcctggtggtcttggacgcctgctgcctcactgcagccacaatggtggtcttggacttgcgtacctgcgtgagagagaaagagaagagggtatttgcaagaaagaaaataaaaaaaaaaattttttttatttataatttttt

SEQ ID NO: 173322 - DNA, 591 bp, Cannabis sativa
atatatctgttagtgaagccaataaaataaaagaagagaatgactcttttatagtgcatgtaacatctattattgttgtttctttcgccacatgcaacaagagtaaaataaaattgaaagtgaaaaataattacgaaaaaaaatatatgaaatatataattatcattattatttaacaataatttactaattattatattcatgtatacaatttttttttaaggtaatatataagtacctgataaagattatgatatttatttcacataaataattagagatcaatctacatacctctaaccattgaagaatgtatgaaaagacaaatgaatccaccaaaaactaaataggtgaatacaggtatattggatcgattgttgagagataaataaataaataggttcaattaattattattattgttgttgtttatatgtgattttagagtattttataaaaaaatttaatttatattatatagttaggttaaataattaattaattaataaatattatatataataatttttgtttgaaaggttataaacgtgtatatatgagccatcatatatagatgtttttttttttttt

SEQ ID NO: 173323 - DNA, 646 bp, Cannabis sativa
tacgggccgacctgagtggaaaacgagctaggagatccccaatcctacatcacgacaattgaaaactcaatgaatacattaactcaaaattttggattaaaaccctaattcaaaaccgaacataacctatccccaaacaactccaaaatagatcaaatagttcataaacaaccaaaaacaggtaccaggttccaccccaagccaaaatagggttcggagaaaacctgagaatttttctcctgcaagcaaccggttgaccggttctagaacaccagaacaatcggtcgactggtttctggcagaccaaaaaaattctaggttattttccccagctcgaaccaaaaccaacacaaacctaaatagcattttcagaacagtataacataccaaatacaacatatccaacacatcaattaaccacaattcatccaattcataacttcaccaagtttgaaccaaaacttgattctaaaactcaattatctaattcaaaccaagccagccacaatatacatcaattataatctaaacattcccaaatttaacttaagaataaactcaagaattcaagctatcccaaccagccgtgaaactctagaataactaaatcaaaaactcaatcttaactaaaataattcaaaggaaa

SEQ ID NO: 173324 - DNA, 700 bp, Cannabis sativa
gagaaatgagaatcaagctcaaccaccacaggcatatcctacgcctcaatacaatgctcaacaacaaggcaactcccttgaaagcacaattcatgcattcattgaggaacaagctaaaatcaatcgccaattaaaggaagatgtccaagaaataaaaagccaattttcaaaattgactgcatccttggctatttctgagaaaggcagacttccttcccagcctcaatttaatgcacaagggaaagacatggctaaaacctccacctctaatgatcccattattaagggggttaacgccatcacaataagaagtagtaaatcttacgaagatccatctataaaaaccactacttcaaatctaaaagttgtctaacagggaaccgctcaatgctcaagccaaagtatcgtttccccaggctcttagacctgttgggaaaattcctgaaaaattgagctgaactccttgagcacttgacacaagtgaagattaatcatcctttgctccacttcgtaaaacaagttccaacttatgccaaaatcattaaggacttgtgcactgctaagagaaagcaccatgtcaaggagactgctttcctgactgaacaagtgagtgtggtgatcgaacaaaagacactgccaaaatacaaagatcctggttgtcccaccatttcatgccaaattgggactcatgaagtcagcc

SEQ ID NO: 173325 - DNA, 825 bp, Cannabis sativa
aaggaatgtgcattctccacccaacaaaatactctcgtatctttcactttttcatttcatattgggatgtgcaatacaacatacaaccccctaaccctaaatcatgttatatatttacatatatatatatatacaaagtgatgatgatcgagtttatatatgcatggggcattgttgaatctattggacatttttgatgaatctgtaaactaatcaaataacgtacagatgatcaataacagaaaagaacaaaaacagagagtaaagaattgagagaaagattgtattttctgtgtagccctcggttacgatgacccgacgaaaaggtttttcaaaaccagttattttaaaccaattaattattactcaatattatttttgtgcctgattactaattttttttacaaatatgaaagtaaaaatttatatgtaattattacttgttatctaaatatattttgtattgaagtgttttcaccatgaatttttttttttttttttttattgtggactggaatttttcttgaaaaatattgtgtactgtgtttagtttttattgttgttttttagttgttttactgttatttttaattattctgttttgttggtttacggttgttataggttgttttataaaaaaagtatttttgtaaaaaatttccgcgtagcagtaaaattatacatttctgtttaaaattcagtatttttgtaaaaatctcttttataataagagaatttttaaaaatacattttttttatattttatatacaattttacggcttaaattttttattataaaaatactcttataaagttttaaaatt

SEQ ID NO: 173326 - DNA, 689 bp, Cannabis sativa
ggtcgatcatggtccagtagtggcaattaggagttgtatacatttatttaatttttttttgggtttgaaatgttatttttctgggtttgttaagttcaaaatgttcaaatgctagtgtcattttgtttcctctgaatagcaaaaatttgctacaggtgtttggtaaaaaaatgtgtattgtaaaatgtgtgtaattaatgaaaaataataatattttttaatcaaatttaatttatgttgcttaaaaaaatgattttattttattaattgttcattgtaaaatttgttcataccattttttttacaaaaaaaaatatatatatagatattattaatgtattaataatataaaatcggattgaatataaaaattaaatacaataattgtaaattaaaaaaaatatatatatacatatagtgacgcccattatgtgtaggtaatagttctagagtttgacttggagggactctaaaaggctatagtgacacttagtaagaaactctaaaaggctttagtgacacgctgtgatgagtcactaaatattacttttccagtcagctacattagtgacacgcagtggagtgtcactgtaaagttttagagtcattcaacgtgtgtcactgaaactcatttttgtagtagtgtggctgcactttgaatgaagagtacgaaaaaaatcacagcagaa

SEQ ID NO: 173327 - DNA, 845 bp, Cannabis sativa
cacttctccaaaaattactgctccgtccctagagtaatcaccatcccaaatatagacttttcaaccttaatgcaaatttagaaatctgagtcagtgcagcctaaaggtttcgaaatacatcacccttatagactaacatataggtcctccttgatcttaagatttacttgattgtcttccaatgttcccatcctggattaaactgaaacctacttataactcccattcaacagcaagtgtctggtctaatgcataccagagcatacatgagatctctcactgttgatgcttaaggaattctttccttggcatttatcttttttggaatagttgaagttatcccttagataaataaactttatgtctaggagccaaaagacttcctttaaagttagccattaaaaaaatactccagcatcttactaaagtaagttgcttgcaccaaattaagtaaattactaggtataccacaagtcgtaggtttagatggtctcaaacctatgatactaggatcaagaagttttgttaagttcattgaatatttattattaaaatttctcttctttccttgtaatagaaaacttttagttgttcatgtgaatggtcttagccgtagttctcttggctttgattcttagttccttattaggactatctattgcttgtttaaattaacaatgaatttttttatcacaggtgtcttcctagtcataacaaggtggattccttgaaactcttccattacgaaaaaggtatcatgactttctgtctaggaacattagtggtatttacctgattgattgtgtcaatacaacaaaggcaatgtgaccatcttatatagaata

SEQ ID NO: 173328 - DNA, 675 bp, Cannabis sativa
aatataatgttacttaaaataatactttttgtatgcttaagatacgactttgtttctttataattttttttttaaaaaaataattatcaaaatattacacgttaaaataaatttatttagatactatcaagctacttttaaatataaaatgataagatatttatagtaatccaccataaaattaacaatatactaaattgtgtttaagtttaaaatttacttacttgtatgttaataaaatataaacaaaaaattcaaatgttgcttttaaatatggttattttttgatactaacaaaaaaatatatgctttctacacatcttaaaatgaccaccttaaaaagtaacacaattataaactaattagtatctaaatgtctcatttttttattagggttaattgcggaaaaacccccaatagttttattttacttgcaattaaccccccaaacccaaattttggcggtaaaacccccaaaaccagcattcagttagcaaaaacacatttccgttcccttgacttcgttatttgccaaggtggttcagttcaattcagccaacgtggacacagtatacacgtgacacaatattattagtccacgtaaatattttttagaaaataaaataaaatttaaatacaaaattaatttacaattaaaaataaataattttttta

SEQ ID NO: 173329 - DNA, 657 bp, Cannabis sativa
ttcagattagaaaaaagaaagaaagttgtacttttttcattacttagtaaaagaaatttgcatttaataaaataaaatactaaaaaaaaaaagtttcagatataaaaaaaaaatcttaataaatttataatttgagaatttataaaattgggacatttggaatttatatatttagaattagaggataattttagaaattagttgtatttgtaagtttattgtgaaagttattaaaaaaaattattgtgaaagaggactaaaatctattggataactatttctaattaaaatgtgattggagaattaatttggggtctttaattaaaaattatggcatttggggtctttaattatatcatatttttatttattaaaataaaataaataaaatgaattttgtgggtaaaatttgaaaagtataaaaaaaatgataagaaaaaaaccctaagcatgaaaatcccaatccccttctctttcattctcttcccattcccctctctctctgtcttctctttgggtcagcactagtggttcaaatgaaccagaaaatgagtacgtatacaactaaaccattgttaatgctagaaaatactattgattctgtggtagatggagcaaggggttttatcaggtacgtatacaactaaatcatcttct

SEQ ID NO: 173330 - DNA, 1105 bp, Cannabis sativa
attgcgccggcaaagctttgccggcgcagttaattttcttgtagtgaaataatattctttgattttggttaattacattaaactgtttcacatttaatgcttagaagttataattttaaaaataaagaaaaatcaatttttgttagaaaataattagtttgattaccgattaaattatgagaatcaatataaacataaatatttttatacacttaagtggattctagaccttaataatatccccaaatatcattgaaaatatctgttactgtcatttttaccgttaaaatattttattttattttgttaccaaaaatctcacaatttttggaactaagttagagtttgaataacttagattaaataagtatttaatttatttgatctcacgcaattctcatgggtttgacctcgtttttcacaatctccatactacaataaaaatttgccgcttgcgagttgataaatgtaaaacgtaccacttttggtcacaatagaaactctagccaaccaccattaaacccttgtagtttcatcgttactccactacttttacttaatatttttaatcttttattttttttatttaaaaatatattcccggtatttgattgtctttttttagatttgtagtgtagactgagcttagacgtagtggttgtggtggtggtagctccgaccaccgattttggtggagaaatcgttgaatcgcaacgtccattaagatatatataaatctaatctctaataatttagtaatgtacattgttttatttttaattttgtaattttttttttgagtttttctagattgttaaaattgtgttcttgtggttgtgcgtggtggtcaaattttggtcggtattggtggctaaattttaacaataaggtaaaaatctaaactttaatggtatatatgtatgtattttgtgttgtattgaatatttattgtatgtatatgtattttgtaattgaattaaatatgtatgcataaaaatattatgggcctgttcggtaatacttttaaaaatagttttttatttttttaatcaaaaattcagcaattgaaaataaaagcacgttcggttaaaactttctgtttttt

SEQ ID NO: 173331 - DNA, 915 bp, Cannabis sativa
  modified_base (725)..(740): a, c, t, g, unknown or other
actcgcatattttacagacttaattttaatctgtttttccagttgcagcttggtgtaataactaaaaaatgctaagacttgtaaaaaatttgaaatgtcgagaaactaataacttttattatagcaaaaaataaatagtacaaagtagatctgtggtagactataccccctatacttagaacatttatacagataaattgactaagtatatttacactgtgagtactattgataataacacttgagcctttcgccattccaagcccttcgaatcgcagtaccatcgagttctgcaagccgattggtcgcgtggccaatttttcagcgataaggtattgtccttcccaattatcaccaaaaactccatgcactgggtttttcgtgttcgacatgacttttttcaaaacaaaaacccctactcgtagagttcgctctttgaccttcgaattgaaatagcgagcagttcgccgctgataggctgcattcttcagatgagcctggttgcgcttttcctctaaaagatcaagttgaagcagttgattttttgtattttcactaaggttgaacacatctctttgcagggaccttgccccaacctcgactggtaccatggcttcacacccataggagagcgagaagggggtttcaccagtcgtggatcggggagttgtattatacgaccataaaactcgtggaagttcttctattaagtccagaacatatannnnnnnnnnnnnnnnttcatgattatagtgtcgtcaggatagtggaatataatcatgattatatagtcaaaaatttaattctcacgatttgtcagtttactaaatttaaactgacatgataattggcgataaggtatacttactccttggataagggttatgtcttttccagggcattgacaacgtttac

SEQ ID NO: 173332 - DNA, 1029 bp, Cannabis sativa
taaacatttgtacgtaattcataattacctggtaagattcttgcatgagcagaaaaaagtacttcaagacataaaagaactaacaagaggatcgatgtgagaatattcatgattattgcaaaagaaataatgttactgaagtcactatatattaattttatggtgtacttatagacacaaaaaccaaactttatgaatatacaaaaggtgtttatcttattaggttaggtagacggcgcatgtggccatcaaattagaagatgtataatatatagagacagatgtggagtcaattttttttaattacgtacgtacgtccacataagtggtatagtcgttgtactcatcaatattgaataataaaaatgaatcacactactatacaaattgtatttttggtatcggttttaaattataattaaatttttataagtgtcaattatgaaacccatcatttgttatagtgataaaaggtcatattatttcttatgtcagttccaaattaatagggttgagttttggtttcgtttcacaatcgacacttaaagtatacatatatatatatatatatatatttttttagtgtcattttatagctgacacttaaaggttttttagtgtctattacaaaatgacaccaaaaggttttttatcaatttttttttttctgttttataaccgacacttaaagtattttgttgagtttttagtgtcgattttaaaacgatgcaacatgaaaatacagaagtcacccctaatagtaacttttaaataaaataaataaattgataattaattaaaaacaataaaatacaatcaataattttttcattatgactatatattattaaaattaaccgtttattaataacatattatagacagaaaatgaacaccaaatcactaagacagtaggagttcattgaatctctaataaaacaaaattcctattttaataaatatttagggatatgattttgtttcgtgatgtactttcacggaatgtattccgtggtacattagatgggt

SEQ ID NO: 173333 - DNA, 625 bp, Cannabis sativa
gaaaagtttcaaactcgagctttggatgtagctcttttgtgccttgaaccgcaacaatgattaggtaactgcacacaaaaggcaacaagaaaataataaaaaaaatgaaacaatatcgcacaaataaacaatatcgcataatgtcgccaagaaaaagactaaaaaaaacaaaacaaacttgcacaaaaaccgcccataaatcgtccaaaaattttaattttggccggacaaatatatcgcacaaaatcacaatagcatcgttcaaatgtcgcatagattcatccctgttgcccctgatttttcccaaaatacgtggaccaaccggatgatgacacgtggatggaaaggggttagcatttgaataaaatagctaagtctccttaaaatgcaggattaccttagacatgcctctcggagaaggcatgtaagtctcgtatgctcccggagagcaagattgcacaaaagcatctccgggtggtgtcagattctatctgaacggtcatctcgtatttaatgtcccatggggggaggcgtatcgaaactgccatacgtaataaagtgtgatggcacaacccccactctgcacctactaggctatgatcgataaagtctagtgacggctact

SEQ ID NO: 173334 - DNA, 529 bp, Cannabis sativa
aaaaaatgggccgtgtcgtgccacagaaaaatatgggtcatgccatgtcatgccaatatttttaaaaagttggcccgacacgacctgtagacacgatatttttgtgtcgtgctttgctcgtgtcagcctatatttcttaatcaggctaggccgttttattttcgtactttactttttcatattttttttttacaattactaaattgtatgtatattttaaagctttagtcatatttatataacttttaaataatattttatagataataaaaaaaattattaacattattagaatttgaatatttacttataaatactcaatttttttatatcataccctataaataaattaatatataatctaaattttcatattttaatagttttaattataaaattataatattcaacattatatttatattttattattattttttttatttataattgataaatttatatattattattgttattgataaattataagatttttaatatgtctagatgtgttttttgggcttat

SEQ ID NO: 173335 - DNA, 692 bp, Cannabis sativa
gtcatataatatatagaaattattggaaatttttgtagtcaaccattacaggttgttttggtagttttttttgttttgttatcttgatgaatttttagtttgattttttttttttttcatgattacatacgtttttttttatttaagattattagtaaatttgtaaaaacttccaaatatttatagtgccgaaaataaaatttaaacaattatttaccatgcttataagaaaaacaacgagagtacaataaaatatgaaaatttttggtcctaaataactataacgtacacaatcatgaaaaaaattaaactaaaaaattctcctgtatgctaaaacagatagagagtctatcaagatactcatttaaggggtgcaatatagacttatctaaaattatagagaattactaaaagatactactggtgcccaacaccctcttcggtattataccgcactatttgcgtaattaaatatcgggtcctgtataacttaaaaaaataacttttaaatgatatcacttatcaattatggaacgccacttttagaaaatattgagcaccatcaatactcaataacaatgttgaaaattatgtataatatatatatatatatatatatatatataatttgtaaaggagagattggattgcagctttatatagatgaaaagagaaagtgaaagggtaataaa

SEQ ID NO: 173336 - DNA, 562 bp, Cannabis sativa
ggctttagctctaattagtccaagtctaacaaataagggacggacccaatatgaaatttattaaaagtaattataatttttatttaatataggcataaataatattataacaattaagcccctacaaaataaaaattttgagtctatcattattggtgaagcaacataactgtgtttacatagagtaataattcatccaattaatatgcaaacttaatttttatataataaatgaaatctcaaattttgtaataaaattaacagattataatatataaacactaactatttcccccaattattctaagtaaagattttaaggagaagtatatatatattttataattccttaataactaataagataattcaataatctttattcaaaaaaaaaaatcaatctatttaaataaaataaattactatattctataaaaaataaaaataatttgctgcgtaaatatttaaatttaactcttagttgcaaataaatacttaagtttaatttttgacaacaataatacctaaattatatttctgaaatatctgtaggtaccttact

SEQ ID NO: 173337 - DNA, 813 bp, Cannabis sativa
  modified_base (444)..(446): a, c, t, g, unknown or other
tgaagattttgaaaattagagtttgacatggtgttcaattaagttgttgttggtagttttgataattacctaattttttttgggagattttcaatattatacctaaaattgattttatttataaaagtacctttaagaaaattattagcacaaataccgatgtgccacatcagcatacatactgaaattcaaaacaaataccgaaaataataaaagctagaaaaatctcgatttccaaaaattttggctttttgggagttataaaaaaagtaaccatttaattgcctttgatctgaataagatatcaattagtaatttttctagtaaaaaaattattttaaaatttcacacatatataaataataaaataaccatttaatatgtgagaaaaatatattaaccttttagttgcttttgatataaataatatatcaattagttacnnnttattaaaaaaaaaattattttaagataattttttatctcgtacatttctaattacttattttggttagttaactttgaaaatattattttattttttaatttttagactatattatattattttattgtttaagatacattgacattaccttttttttttaacaatttcaatatatattttgaaatatgaaaatatatacatatatttttttttttatataaaaaatgataaccaataaaagtaattttttttaatatcattttttaaaaaaagtaactaaattagtaactacacatcatatataaatatctaaaatatatatatttgaaaaaaaaaaaaagcattaaactagtaatcgccattgc

SEQ ID NO: 173338 - DNA, 618 bp, Cannabis sativa
  modified_base (555)..(592): a, c, t, g, unknown or other
tggcaaaaactgaacatgtaatgatcgttcagttttttttaatcatttagttaattatcatgatgttatggtaataactaatttctgtccctttcatatacagatgtgtgtcctagtcatatgcaaaactaagactccccactggttcatgtgtgacatagacatgttggcgagtaaggcattcatttgggacagcctgaaaacaccacgtgggaaggatgtgaaagattttcgtgtacgagctacttctgaaatggtatttacttttgattgtttcatttaacattctagaatccaagtttttttagatgaaaactagaatccaagttgaataacgaaattaataagtaatttgaagatcttcatctcttataccttgtagctaagaacacttgatgatcttctctaagtggatatggctcttgaattaggagagaaatttaactttgcatcacttcccctagattatgcaaaacgagtgccgcatcaagataatggggtagattgtggagtatatgtaataaaatgttggacattattttaccaggatcttannnnnnnnnnnnnnnnnnnnnnnnnnnnnnnnnnnnnngaacttctaaaacgatgaaataaaca

SEQ ID NO: 173339 - DNA, 601 bp, Cannabis sativa
gtatatttgtcatgtttgatgtgtgtattctatcaaatttttttaacaaaatttataataatctatgtatttaacggcattgattttttaaaactgtaaaagaaatgtgacatttaaaaataaatataaaattatttataaattacagatgtgatttagttaatggcataagtgtaataaaatgacaatattatgattaaatattaagtaaaagtagatattatttaataattgacacttatggtaaaaacaaagagagaatgcaaaagaaaatgtaaaagaaaatctcctttgcactagagtaataaaattattattaacataaacagactacacatctcacctaaaatatatttaaatatatacacatttataaatgagattatttcacaaatacatataaaaatatttaaatatttttacgatttttataattttgtttaaagaaaatacggtttttttatgttgtacttttatttatttgttgttgatttttaattctgtgtatattattttttgttgttgttttgatgttattttcttgttagttttaagtagtttttgtgttatttctatgaaactgtaaaaatatatatataaa

SEQ ID NO: 173340 - DNA, 612 bp, Cannabis sativa
cttcttcagccaaccaggtcgttttgacccatttttctgcacgcgagtccttgtggactcgacccgaacccgatcggaactgtccattctgacgaccaaaaagacctaaatctattccaaatgaatttaaatgtaaaaattaagacatccatatagatttcatgcattgaaaacaagtaaaacaaagactttaaaatcaccaaaaaaatttagggtccgaagaaattttttttagatttctttgtttttttaaatgagttttcatgcttagaacaatctatattactatatgaatgtattgatgtataaaatatttaaaataaaaatcgaaagtgaagacgaaaaatttacaaggcacgaaccgaaaaactaaaattttcatttttatatatatacacatataatgtatatataacataaaaatattataaatatatgaaagagagaattataaatattattatacattaaaatcatatattcaacgtataatatataagaacatgaaatatataaatatacaacaatacatatatataaaccaataatataatattatgggtaaatggcggcaaaactcctaaaacttttattttagtttcacttaacctc

SEQ ID NO: 173341 - DNA, 746 bp, Cannabis sativa
gagtaagtaggccaggtagcctataggctagctttaactcctacgttgtttggagtgtataatgtatttcatatctccatactgagaaagtatgtatcacatctaacccatattttgagttgtgatgattttgagctccagaaagatttattatataaggaacaacatgtccaggttttggactggaaagaaaaagtactttggaataagaaacttcaactggttaaagtgttgtacagaaacaacaaggtggaagaagcaacttgagagttatagtcgtaaatgggggagcaatatcccgagttgttcaggtaaattttaaggacaaaatttctataagaaggggatggttgtaatatctcaaaaacctaattataaataattagggtttattatatattataggattaactagagagtaatgagtatgattatgatcctactaacctaattcagcataaattataaattttgccataagtagataaataagcgtaatttattactgacggagatttatttggaatatgcgggtataatgtgagttatttgtgaggctcgatcgaaggccaaaaaagtcacaatatgtttagttgaaaattttgatgagatcattgagataagttgattatagaataactgaggttttttggggtacttggattgatcaaataccctaaggttagagatttcttaatggctaagaattgataaaataatcttttattattattatttttattgtt

SEQ ID NO: 173342 - DNA, 659 bp, Cannabis sativa
taatgaaaattaatagtaaattaactattttttttacatttatttacttactttattaaaattaaaatatagagagcttgattaaataaggaattaaaaaaaaatacttctccaccaattttttaaggaatgccatatgtaataacttttatttatttttattttattttttaatattaagtatataatgaaaattttgtttttataaaataactaccatatattatagtttaactcaaaaagataatttttaatcaatttaaacgattacgtttcctcataaagtaaataagataaatcattattattttatttccaaacaattttaataaacaacatattacaaatattgattctgattattcttcacttattccgttacatttctcttttagtttattccaattttaaatattgtgtagtaaatagataagagaaattttgtttacactccacaaaatgataagtacaccctaatatcttaaaaaagtaaacttaaaataattttaaaaatcacttaatatattttcttaattttttttctcagtatattgtattaatttcaatacttattttatttttattttcataatttttttctaataaaattttacattattcttttattttaattattttgttataatatttgaaatata

SEQ ID NO: 173343 - DNA, 759 bp, Cannabis sativa
agctagcttcttaaagcatctccagtgagaaaactcaaatttgatgttaaatcaacaccaaaaaactactatttcaatactattttttttttcaattccaagcacaacactaaaaattacatcaaattttatattctttattgttttattattttattaatataataagaatattgtaatactaaatatatatcattatttattttttcttctttaaagtattatttaattatcaatttttttttaaaaaaatagtgtagtctacagtgttccattaaatttggtgggacactgtagacaaaaccatttatgaggatagatttagtgtcccattggagtaaatatagtgtgaaactatactatatttagtgttttagtgttccattggagatgaccttagagcatctctaatgggaaaacttaaatttggtattaaatcaatacaaaaaaactattattttaacactattttttttttaattccaaccacaacactaaaaattataccaaattttatattctttattattttattattttattaatataataagaatattttaatactaaatatatataactatttactttttttattcttcaaagtattatttaatatttaattattaatttttttttaaaaaaaaatagtgtggtctacagtgtcccactaaatttagtgggacactgtagacaaagccatttatgacaataagtttagtatctattggagtaaatatagtgtgaaactttcattaa

SEQ ID NO: 173344 - DNA, 785 bp, Cannabis sativa
aaaagttacttaagaaaaatataaaactattacattaatatgaataaatgtgggaacaaatttaaataaaaattgactaactttgaataattacctaatttatctctcataattattactagaacctttgaaaatgagataatagtaaatttgtaatatatggtaagaatatagtgtcatcaggtaataggttaaaataaaaaatattaatttttgaaaaataattaataactataattatcatccattcgattaaattcaatgatcaatacttaaatacctatttataggtaatacctattaagagcacaaccatatatatatatatatgaaacaaattgaaaagagagcacaagattcaacataggaaaatagattaattagcttagaaatctccactaatttgacatcttctttgaaaataaaaattgactgaaatatcaaatcatttagtcttgtaaacgatcacacacttggattacataagtttatttgaaaaaggataagacttagaaactttttctgaatataaatctgacagtgtcactctcaacaatggtgtatgaaactgttccactggataaatataataataaagtctcatttaacaatacaggacagaaaataaattacgggtcattagaaataaccaatttttgggtttagtggaaccggaaaattacaactttatccttaggtttggctttattaaagttttgttatgaggggcattttggtaatttttgagtaattaatgaaaatagatttcatttattattccttta

SEQ ID NO: 173345 - DNA, 661 bp, Cannabis sativa
  modified_base (599)..(635): a, c, t, g, unknown or other
atcatttgcttatgatgtcatccaattttctttatgaaattaaatggtgcagatgactatattctcgatattctatcccgaaatgatataaatcctcaatcttagagattttctacttgtatatgcttattaaaggcaacctaaacttagaaatagattagtagtagctagaataatttggcataaatttaagtcttagactttaaattttagattccaaatagaattttttttttttcagcttcctagattacattagacaatacattatgactttcacaagttgttaatattcatttttctatcaatggatccgaactgtatgtttatgtatggaatatgagttttaaattttgtgaccaagatccacttggactaatctaagaactttttattgtaactagaaccgattcatcaaaccacaataatatatctatgacatttgcatcttgttgatagtggttttgacaagatcattcgttgcaataagaaaacatgcctattttcacttgatagttagatcattcatatttgaatatagatgtatagtcaggagtggatatgagttattgttagacgatcactctagattttacctnnnnnnnnnnnnnnnnnnnnnnnnnnnnnnnnnnnnnaatttctagcaatgttgaaaaatatt

SEQ ID NO: 173346 - DNA, 863 bp, Cannabis sativa
taataaaatcaataccaaaatatactcattcaagatcgatagagggatgtgatcgatagatcgatgagtctactccggttctggaacacaaccaaattcctctttattgattgagcaagaacatgtaaaatacaatcgtaatatctattctctgaaggattctctcaaagtgtttcaactctcacactcttattcaagaatcttcttcatctacataagattcttcatacaaaactaaactcaatctctctcttttctttatacctctctctctacctctcaatctttttttctttctgtctctcaatctcaatctgaaccatgttctgaaagacaagtgtgggtggtatttatagccttaggatcaggatcctaaagtttgtggctgcaagatatgagattgttaagttagttagacaataactaacttaatcaatcctcatttgagcgagatctccacgttagcataagtcaaaaggcttccgggaacatatatgagcttccaggatcacggaccaaagacactcactaaggagcttacggataggatatagccagctgaagtcgactatctagaactacctttctaagatgaacaactagccatctgaaactccatcctggagaaaggctagcttttcctgaagacccttctcgaaatgataagagagccttttagaattgacttttgtgagtgaacaactttctaggattgacttttgtagaccttttcacttggaagaactataccacaattttaatagaagggatgatggtaacataagttaattattccactatttcactatgaatctttcttggtctcaaattgacaccaaagtattgttatattatttttaata

SEQ ID NO: 173347 - DNA, 708 bp, Cannabis sativa
tgatgggtgaatttattgaactagttactcactaccctagtcagcgaggtggggaataaaatacaacataaattattcgtggcattgctggcccgcattatggtattaaaattgttgagatgagcgaccggatccatagtcccatcgtatggcaagatgagagggtttttaaatacttggtgaaattcagagtccataatgaatgattggatggaaaggttcgagctcttcatctgagtcgtaatcaggcagtttcccgtcttggaatttcttgaatttgttttctagctcactgattcacaattggattggatcctcttggtttcaattggtattgggttgttggcgtaaattaggagcattctgatttaagcacccgcacaaatcacgttgtctccaattcaactgttcacgaagatctggttgtctttgttcatggttgctcatggacctcgtatctgagtaactctcagattgactactccttgtatgactcatactttctcgatcattaccacgtcgatgtctatcccctcctcgtgtagattgactatgatctcgagatcttgaaagtcacgagctagaacttgccccgtcacgcacatgccttctcctttaggaaaggtttgatacatgccctttgctgggttgtgtatacgcctcctccctattagtgcaagaaggacgttgacggtgtctcagtggtaa

SEQ ID NO: 173348 - DNA, 1404 bp, Cannabis sativa
  modified_base (490)..(513): a, c, t, g, unknown or other
gtaaaataatttccaacactagcttgttctttatagtatcctttagggttttattaacggcttccacttgtccgtttgcctgaggcctagatactgacgagaagtttttaattattttattcctctcgcagaatttagtgaacaagtcgccatcaaatttggttccattatcggatactatcttcatggggattccgaacctgcagataatgttctaaacaacaaagtcaatgaatttcttgcaggttatggaaacaaggggctcgacctctatccatttagtgaagaagtcgattgctactaccgcatacttagctcctcctcgcccagtgggtaatgccccaattaggttaatcccccatttagccaatgtgtagggtgaggtcatcattctaagttttgttggcggtacacgaggtatatatgtgaaaaactctgacacttatcacatttcttgaaaaaatcgagtgtgtccttattgatcgttggnnnnnnnnnnnnnnnnnnnnnnnnctttttagacagactttgccaacctgcatgatccccacggaagccttcatgaatttctctaatgatttagtttacttctgtgaggagaacacaccgaagcaggggcattgaatatcctcttctacatagtttgccttcgatcattgtgtagggaggcacgaaatacaatagtttttgcgccttgtttttgtcatttggaagttgtccattgagtaaataattgataataggtgtcatccatgttggagagctatcttcatctcgacctcttcagtttcacatatacttggctcgctcagcatctccactgggactagattcaattcatccaggtcattctgcgagcccagttttgctaaggcattggcgttggagttttgttctcttagaatttttttgattttaaagtaatcaaaccttttcgagttcttttgaactttctctaaatactttgccatacttggcctggtattccccgaggacctagttcacgatcaactgcgaatcactatgacaaatgagatttttgactttcaatgcctctgctatctttaagccgacgatcaaggcttcatattcagtctcgttattagatgcttccaattggaatctcagagcatagtgaaacttaaagcctttggtgatattaatattacccctgcacccaaaccctgttcgttggatgcgccatccacatataacttccaggcttccgcgtctcgctgatcaggtggaatttcttctggagttataccttttatcaagaagtcatctaaagcttggcccttgatggacgaattgccccagttcaatcgaccattttatcaatcttccaaaagcatctgattttgataaaacttgtctcaagggctgatcggttaaaacttttat

SEQ ID NO: 173349 - DNA, 756 bp, Cannabis sativa
tcaccagctaatggcggtcttgatggaagaaagtgagaagaaggatgaagatcttgatcctcagattcaagatgaaagaaacttattgaaaccaattaaagaattggaagaagttgttctggacccaggaaatcccacaaagtgtgtttacattgggaagaacctggacgaacaactgaaatagcagctaataagttttttaagggcgaactaggatcggttcgtctggagccatggagatatgatagggattaaccctaatattatttgccatcacttaaatgtcaatccaaactacccaacaaagagacagaagaggagacctttggatttcgaaagacaaggggcactcaaacaggaagtgaataagttgttcgtcaacgactttatactcgaggtgttttatccctcatggatagccaatcctgttcttgtcccaaaacctaatggaacttagagaacttgtattgacttctctgatctgaacaaggcgtgcccaaaggattactacccaggattgaccagttggtggatgcaactgctgagcacgagcttatgtcatttatggatgcatattctggatataaccagataaaaatgcacatcccaaatcaagaacatacgagctttgtaaccaacatgggactttactgctacaaggtcatgccatttgggctgaagaatgatggggcaacatatcaacgatcggtgaatgaaatgtttgcgaatcagattagatggaacatggaggtttac

SEQ ID NO: 173350 - DNA, 918 bp, Cannabis sativa
  modified_base (880)..(880): a, c, t, g, unknown or other
caacctaacttgttactttgaaaattcgagtagaaaattcaatgggtaagaaaagtcattcataattggataattttaacactaacaacttatcaagtcttatttaaggatagttgctattggatgttgccgaacttgagggtaaagtaaattcctagggctgtttggaatgggttaatgtgaggagagaaaagataatctcaatgattgccctgtttgttatgaggttttaaattttttgagtcatgtaatgcttttacccgtattccaactaccctataaagaaagtaatgttgatcctttaaaaaaggtgggattcaaacattatatcagttatttgaatgtataattaaaaattttattaataaaaagtcaaataataattttaaaaaaattaaacactacacaattgctttaagaaaagatgtttataatatatagtactatttaatctgttattaatattatcctcaccattttcttctatttactccttcaaacaatacaaaattatcacaacttaatcttccatttttattattctcacattctgtttactccttcaaataatacaaaattatcacagctttttcgttaaaattcaacatcgtatcgttctcttgtcgctgcaacttggttgctagctcatcagttggacaaatacattgcaattaaatttatttattaataaatatatttgttttcacaaataataattttattttatttataattatgttgaaagagatataataattattattttattttattttatttcactattccaaaatagtatataacattcctgtgctctaccaaacactataatttaattaacaataatctaattattattaccatgaataaccaaatacantaataagtttacagataatcatattctccttcataata

SEQ ID NO: 173351 - DNA, 596 bp, Cannabis sativa
agattttaaataggaaaatataagattataagttatataagttcatggtatcccttacaatctattttattgtctgttatgtaaaagttatatatttcttgtcaaaatgcatacatgtataaattaaatttataagaagaccagccattttagtcatatataattaattagctaaatataaattacaggtatagtcaagagtaatccatatacttcaaaagtcatatcccataattgggactaattaatttcaactacttacatcaccgcctgattttgtgtatatattattatttacaaatctcaaacaccatatgttcaatcacagtcatgaagttgtgaaattccgtgttaaagggtaaaaacgagggttgaaaagaaaaacaaagaaacaaaaattttctttatgggaacagcaccttaatctaggggctagtatatagtacatcaataatgtatatcaatatcagtatttcttttccttataatgtataaggctaattagaatttcttccccgaactttgacataacttaaatcatgttccttaaattttttttggccgttaaaaattctctctaaactattaaaattgtt

SEQ ID NO: 173352 - DNA, 522 bp, Cannabis sativa
  modified_base (105)..(108): a, c, t, g, unknown or other
  modified_base (480)..(497): a, c, t, g, unknown or other
cctaaagggaaaaattttcaaaagaataaaaaatatattaaaaaaatggaaattttatttacacctcaaaaatttttaaggacatcccattttaataatttttannnnatataaaatttatatttttaattctactaaattttttttttttaacttttttcttctaattcatattcttaaaaaataattatcaaataaaaataaattatattttaaatattataacaaaaaaataaaataaaaaattatatgaaattttcttaaacaaataaaaaatatatatacaagagttagaaaaaattctaaaaatgaaatcaaaataagcattaaaattaattaatataaaataatgtgagatattttttcaaaaaaatgtaatttttaaaaatttaaatttatatttttttttaataataaagtaaataattttatagtgtgctaattaggggtgttcacaaagtatccgatccaatccaatcnnnnnnnnnnnnnnnnnnccaatccgcaaaatgcggatatccg

SEQ ID NO: 173353 - DNA, 907 bp, Cannabis sativa
  modified_base (145)..(146): a, c, t, g, unknown or other
acgaatggtcaatctggtatataaagagaccattaaaattctagaaaaatattaccttattaagcaataatggaaatgtatactcactcagaatggagaaaagcttataaattgagatgcaatttaatggacatgtattcgagtnnttggtgaatgttggatcacaaagtaggttgtttattaaacaacgaactatattattgagtgcaaaataatttttagaaaggttaatcaagtataaagatagtgatgatttcaaggaagcaatagcagcgagcgaatcaggaagtaaaaccttagtgataatgacaagaaaggtatacgagagtcttagatgttgatgaattagcatcatcatcgacggactcactatgagttggcatggtagttcatgctaaaggattgtcagtaaaatagagaatatattaaggtatgtatatttttggatgtgtttgaaagaattttttggacttttaccaaatacagaaacgaaactttgaagtcaagggatgatctctgattaattgttatcagttgaggattcaggaaatggatatttccagtttagtcatgagtgcctagtatgaggaatgttgcctctgtagtataagttatattaattcactttagaacggtggctaactgtaagtgtttaggagatttaaaagttgataatattcaagttgataataaggtcaaaattcctcatagttaagtgaacaaaagcaatgaggaattgtaagaggataatgaagggagtgatagaaaatgaattttattaacgaaaggatgaaagcaaaaattacaattaggaacgacaaagaagtatctacttcctgataacccaccatgagcttaccttggagttaagcatacttaacttgaggtaatctcaagatgggaaatc

SEQ ID NO: 173354 - DNA, 567 bp, Cannabis sativa
aatttaatttaatttttcataaaaatacgaaatgttgtttcaaaagtaatattatttttgttttaaaaaaaaataatattattttttattgttacttcattaaaaatataactaaaaataaagtgccgttaaatttaacttaataggtttgatctcctgttaacaaataaacccaataattaaatcaaaaaattaaacaatcttttaaattcactcagtcatctttcttcagtattgcaattgatattgtcgtattcactcaaatacagtattttgcatagaaagaatggatgccactgtcttccaagtcgatcttttgcttttcaacaagtgtattttgacgagtacaagtgaagccttcattctattatcttctttctcaaggtaattaaattaaccacatctatataccttcttacctttattgtaccaacaatttcttaaattacgaataaaaatttatatgggctgaagaaaaagaagtttcatgaatgatcctattttgtcttaaggttgaaattttatttatttattctcttttaaaactgctgtttaagattgaataat

SEQ ID NO: 173355 - DNA, 562 bp, Cannabis sativa
tcaatatatttatactttctacttgttataagaaattgagatttaacctttgttaaaaactaattgaaagtgcacaaacttttttttttcatcaatattacttaattctaaaataagatgatattttttgaataattaacgatttttattataattattaaactaaaatatgtgtgatgcagtatgacatttaataataacaagaggaaaatttgattttttatgcttacatttggttaaaaaaaaattcctaaacaaataataactaatatttgtaggatatgataacttttatgatatccctaaaatacctcccatttacatcagccccatttacacaatcggaccccacatcgaacacaatcggatcccatatcggaccaccatcagacccatcggaccatatttgctatcattttttttatgcttttatatatatatatacatatataaaaaatagcatcaggtgaccatcggactactatagaaccccatcgaaccagatctgctaccaattttatttatttatttattttttttttatgtttttgtacatacaaaa

SEQ ID NO: 173356 - DNA, 1350 bp, Cannabis sativa
aaagatttgggcctggaagccagccgatctgtgcccgtctccaaacaaagggtcctcgcggcggcggcttgagcttggatgtaagccaactcatgttccctcctaaagaggtacttctggtaccggtcctctgctgaggctatgatgtccacccggagcactttctctgcagccggggtacggatgttggggcagagaaccttcgaatggttaaagtcatccaccgattggctcccagagataaacttggccctccggcagttttctatcgcgaccaagtcccccacgttaagaccttttttgtcataagtggagaaagtcttggcgtgttggagaaacagctaggtaggagcagtgcagagaagcgggggaatcctaacccactccgtgagaagctccgggcggtccacggcttggaagccagaggagaagaaaaagtgatggtggtactcctttacattcttttgatgattaaaagggaccgggccctcatttaaaggattggcccgaagggtgaaaaaattgtctttaaacttgtcccccttcttggggacagatacaagttcgtaaaaatataaaatttcggccgggctaggcgaagcccagcctctggcaacataaaaaataaacaagcctgagagcaggtggtaagcttgtggaattaattgataaggtgcaaggccgacaaagacaacaaagttaatgaagtagtcttgaagagggagcatggccccggacataagatgggtttggctccaagctctgaacccaccatagttgtgattgggtgtttcttcgtctcgaggaaggcggtgaaagacctcggacgtagatggcttgataccagccacggtcaaaatcttctctagttgatgagcaaaaactagggtggaatggagctcgtccgcctcccagccgttggcgcgagaagtgtagttctcctggggcaacagggcccttcattacttcctctagagtggccacggtggccgcccccttcttggaagacttcgtcctggaggtaggagaagacgtttctattctgaaaaaataagaaattcagcagttagcccccaaacaaaaccctaatgttaaaaaagggaatggtggtgtaacgccctgtccaacagggacgacacgtgtgtgcaatttaataatatatttatatagatactatataataataccaaaagtgtggttatttaaattttgataattaaaaatttgacatataaactatataataaaatataagttgtattaaccatggggtcccgctgttttcaaaatattcacaaactggtttaatagtgtttttacaacataaactttgtactcccaaaatacttt

SEQ ID NO: 173357 - DNA, 526 bp, Cannabis sativa
  modified_base (115)..(119): a, c, t, g, unknown or other
  modified_base (483)..(496): a, c, t, g, unknown or other
agtggattcgggaaagatagagtctgtcagggatttgctgagacaaaagacattttcagaagttagaagtttcttgggtctagatagttattactgtcggttcgtagaagggttnnnnnaaatttcaacacccttgagctactaaaaagaatcagtgttttggttacctagaaccacaggtttatttaattcaatttgggttgtggtagattgattcacaaagtctgcacattttctaccagttaagacagcttttacagtggatcaatatgcaaatttgtacgtcaatgaaatagtgagattacatggagtaccaaagtctatagtttcggatagagatctgaagtttacttctaaattttggcagagtttacagtgggctatggggaccaaactaaaattcagtagaactttccatcctcaagctgatggacagtctaaaaggacaattcagatactgaaagatatgttacgagcttgtgnnnnnnnnnnnnnnggctcttggagtaaatatctaccactgata

SEQ ID NO: 173358 - DNA, 1001 bp, Cannabis sativa
aagtcatgccatttggtttaaaaatattggatcaatgtatcgacgactagtgaatggaatgtttgagaaccaaattggatgaaatatggaagtctatgtcgatgatatgctggtgaagttggtagagtaaagatcacacaaaggatctcgtgaaatgctttgatgtacttaaaaagtataatatgaagctcaatcagaagaaatgttcttttggagttttctcgggaaaatttctaggcttgatagtaaatgcgagaggaattgaagccaacccaaaaaaatcaaggccctaatcgagatgccctcaccaatgaagccaaaggaagttcaagctttgacaagaagaatggcagcactaaacagattcatctgaaaatcaacagataaatgctttccatttttttaatgttttacgaggcaataagaggtttgaatggacagaagaatgcgaagaagcttttaaaggcataaagaagcattcatcaacacctccagttttggccaaaccaataaataactgactgaagaagaaactttatacctttatttagtcgtctcaaagcatgccattagtgcagccttagtgcgagaagagggaaaacaccaccaacctatttactatgttagtaaaaggttactgggggcagaatcaagatatccccctcttgaaaaacttgcattatgcctgattcacgcatctcgcaaattacgaccatatttccaagcacatccaattaaagtcctaacagatcaaccactaagacaagttttatcaaaacctgatgcttcagaaagattgatgaaatggtcaatcgagtttggaaaatttgatgtaacctaccacccgagagcatcaatcaaaggtcaagctttggccgactttctaattgaagggataaactcaaaagaagacccaactattgaaaatgatgcataaacttggaagttatatgtagatggggcttcaaatgagaatggctcgggggcaggagtcataataa

SEQ ID NO: 173359 - DNA, 564 bp, Cannabis sativa
cccattgaaaagtgttccatatatgtatattatctaaatacaagttaggtagcctgtgtttttcaataatgtttattcggtaacctgtattttaaaatcatacatctttagtgccctaaattcaaatttttttgataaaattttatcaatacaatcaaattgtttaaattttatgaattctgaattcaaatttaattatttgattacataaagctaaaaactgtttggttaaattgataaaattgtattgattaaattttattttaaggtactaaatatgcataatttaaaaatatgaggtactaattaaatattattaaaaatacaaaatactaaatatgtttttcataaaaacagaaaatactaaataagtatatatatttctaacaaaacatatgtacaaaattatcgaataagttcggattgattgggtgagttggtattatttttaatcaggccaatataaagatggctaattagtaatttttccccccaaactttaacacgtactaaatcgtgtctcctgaacttttttggccgttagaaattcccccaaactattaa

SEQ ID NO: 173360 - DNA, 585 bp, Cannabis sativa
  modified_base (545)..(555): a, c, t, g, unknown or other
taagtttagatccaataatttttttagcagcattattacttgatatttagtaaaattataattttcatcaagtttcgttaatacgattccgttaatattttaaatttgtaactagacttattagtttagacttattagtttactgcatccatccagagccaataatatagaacctaagcctatgcaaagacctatttaaaacaataatagaatttgtattgacgaaattatataaaaattacaattttactaatatattattatggatacttatgttgttaaaaataattattagctttatataattacaaactaaaaatgttaattaggtatgccgcaattattctaaataataacaataatagtcatatttgagttatttacaataaaagcatcgtcatgaaaataaatttattagccatgtgacacaatcatcgatatataaaatgttaggtaggatttttaccttccaaattttgagatactaaatcacgctccttgaacttttaaggtcattaaaattcccctctgaactattgagattnnnnnnnnnnnggacttttgtctaattttagtaaggaaagt

SEQ ID NO: 173361 - DNA, 561 bp, Cannabis sativa
tttgtaaaatatattataactttagaaaatgaatcccagattatgtaaactatttatttattcaagtttaaagtttaattaagaaattttaattattcatgattttccataaaccctttgattagcaaatgagtgcaaatgagtgtactatattcataaatcacgattagattgtcacgatgtgtacaatcatcatcaaagttatgctcaactcgcggtttagtaagccattttatgctttagtagtttatttcattagtatattatgagaaaagcttaataggaagcatgttagtagcctgatagctgaataggcgcatgttttattttctcaagtaagcagttattagaatttaatcttggccgtgatctaactaggctagctcactgtttcgcaggctattctaatagaatggacgccaagtggaacataagaagccagggtagttcatttagatctggtggcaatcagagagtccagtttcccccaaatatttgtggtcaaggtggaggcctaagaggtagggcatgcaatcagggagatgttaacccaccgcaggc

SEQ ID NO: 173362 - DNA, 1225 bp, Cannabis sativa
aaatttgaccctagactcgagacaggaccaaaccttagacttggaacccaggacctctctaccacgacacaaccccaaactcggacccaaactaaaacttaggactcggccctagacccgggacccgaactagaacaagactgagatccaagaccgagatctgaatctgaacttgaggcttcaacatgacccataatcagtgtttgaatccagaacccagacctatacccgaaccgggatccaagtccaagtttgggttcgggattgagaccgggtgcgattctaggtccccagccccaattgtgtgtctcgagtctggttccatgttttggtctgggttcgggtcccgagtccaggtctgggtggggatccgggtcagggtcccggtttggttacggttatagttttgggtctaggtccaggttcggttacggttctaggtccaagtcctggttctggtccatttttgggtcaaggtcaacttccgatttcagttccgatttcgggtcacaaggtacggtttcgggtctaggtttgggtctatgtttgggttcaggtctgagttttggttcgggtgctggtttgggttcgggtcaaggctgtgtcccagatccatacactgactatgggttcgatccaagccctggctctagatctagatcacgatcttgggtcctggtctggttccattttgggtgccatgttatgagctgggtcctaggttcaagtccaggtctggggtcggctactaggtttcggtcctagttccgttgcccaggtccctatcctaattctgggtccaggtcccaattctggtttgggattgggtcctagtctaagttcgggtttgagtcctagtctcgattgtagtttgggtctttgtcatgattttatcttggtcgggttcgagtttaggtcctagtcatgtcggggttcgagtcatgatctgagtttgggttcgggttcggatttcggtctaggtccgaatcaagcttcgggtgtatgttcgggtcctggttcaagtctgggtccgagtcccaagttccattctcgatctgagtttgggttcatttctggtcaaggtctaggtttggtgcccaagtcccctatctaggttcggatcctaggtcccggcctatgtccaagttcaggttcgggttttgatcccgagtttgggtctaagtctagttcccagtacgtgtttaggtttgagtttgggcccagg

SEQ ID NO: 173363 - DNA, 516 bp, Cannabis sativa
aaaaccaatcacactagataaattgaaacataaaattagtttttttaaaaaaaatgcaggaaccaattacattagatagctaattaaacaaaactaacaattaatattgaaaaaaaatataagaagcctaaaataataaaatgatatattgaaacatgaaatagctagttaattaaaaaaaataaagcatatcagaaaagaattatgaacatataaataaatttaaattattgaaacaaattatgttaacaaccaattaacaagtgatatagaaaaactagttacgttaaacaagcaaattatataaatctgatacagtaaaactaatttcctaaaataacaaaagaaagaatgaaaattaaacctcaattacgtaaaataacataccaataattaaacacggaaaccagttatctagtacaaccaattaaaaaattgaacatacataagaaaataaattaaaataaattaatatacttcaaaaaaaaaaatacataccaaatatgaatccttaaa

SEQ ID NO: 173364 - DNA, 505 bp, Cannabis sativa
tgaagaatagaaccaaggtaggttttatttgtgctagtttaggctactcgtgcgggctaggggctgaaggagactacattggaagggcccgggcctttgttacctattgcttggaccataaaaactagaaactattattctgttgataggcttcgagaggtaaattatcttttcgtgtatttacttttagatttaatatatatacatatggtgatcttgaggatgtggtacgaagataataaaaaaattattcttctgttgcgtacctaatttagtaccacaaaatcaacacatgggtagtagtgtcattcttggtaatcatcatatcgtacttgatttttgcattcaaacaagccaagtacttttctatcctactaaaatcagtaagtacaattcttgaggccaatctagaaagtttgtcaaactgagttgtatactcagttaccaacatcgattctccttgaaccaactgagtaaattctcttctcttggtgctatgcacaac

SEQ ID NO: 173365 - DNA, 552 bp, Cannabis sativa
aagacttctaaggacattttagtcataaaaatattacggtgaaactccgatactatcaaacctaacaatgatgcccggaaaataataaaatgctataacatacaaaatacgactctctaacagcccaacgtcgctttccacaacttccgaacacaacacagaaatagagcaatttacataaatatcataataaacatacatgaacttaaatatatttccacaatatgtattttattaataagaattaaatctcatgcttaaatcctaattatttaataatccaaaatattaaccttaggcggtctttacagttaatttacttttcaatcgacatgatatcgacaacatgtcgataatcgtcatccatgacctttcttaagaggatatcgacatagcatcaatattctatcgataaactgtcgataacatctggaaaacccagatttcgacagaaaacttgatctacaagatctcaaccatttcaaaccaaaaaataccagtttcaacaaatacgacacatataacgaaagcaaactacataaagtctaacaa

SEQ ID NO: 173366 - DNA, 598 bp, Cannabis sativa
tttacactcataatttacgggctagtaaccagtctttgggtgttggggggttttgaattttaaaattatagtttacctacactataaatagagacatgttcatatgagatgatttagtgtgtttctatcaagaaaacgcattgttaaaaactctatagacttgataaacccataaaattatttttattcttcccttgccctaaatgtctgtggtagtaaaaaataagtttttggacaaagatataaaatattatttaagtttactgattttcatattatgtacttgtagtgttaagattactctcacatatctttttacatatatatctattatttatatgtatattttgagaattgtaactatcattaagaataaaaccaattagtacaagttacaatcttaaaaagtgtgaaatattatcattccacacatatttttatatagccctaacgccttcctagcaacccgatgagcatccacattgaacattgtgacagttagagccccgtgatccgaaggggatcccacatcgtctggggaaggtcatatgtgatgattctgagactgtgtaggtatgggactacatagttgaagagg

SEQ ID NO: 173367 - DNA, 885 bp, Cannabis sativa
aattaatagaatcaaatagatgtggctaatggaggattctagattaatcagttttaaaataaagttttggataaacacatatatttaatattgagaatattaaatgattaatcaaaaaaagtaaacctgaagaaaataaaaggatgaataaactaaatatactagaatctaattctgtatatttatccaatgataatgtggtggtctccgagatctggtgctacattataatgtggatgtctcgttcatatgacttagcctgaatagtcaaatgagatgttgcatctataagagttatagaataagcaacacttatttttagtgcaagtgggagattactgggatttatgtcataaaagtaagtaattaatggataatatcttagagaatatataaattacaattataagataaatgatatattaattataagtgtataattattaaatataaaaaaaaaaatcattattcatatgaagaatgtataatcttgtaaggatgtacaagagaattaagattatacgatatgaataaaataaatcggtagtatattaaagttcagggaatctttaatatggaactactaagtacagtttacaatacactatacttctagtgtgtgtgtgtgtgtgtgtgtgtgatttcaatttggatcacatatgtgaatggacgtgtagtaaaggtactgtgtataattagattatgcatgactagaccgatatgaaataaacatctttcatcaaacttgttgcttaccatgaaaagagtttatcattcacaatgatgatcattagcagatcagcctgaatcttgagtatacatgaactcctgtttgtattcattgagttctttgattcacttgttaaagtttctgagagaagatga

SEQ ID NO: 173368 - DNA, 891 bp, Cannabis sativa
catagtagtagattgggcctcattgattaaagcacttgcaaatcttttcctttttaattctgattgtgccaactcatcagcatcgtcttcttgattaccataaacagcaacctccttatttttggtacgtgaatgagaaaaattaggggaagacaatcccatgaaattagcacggttggggttggcactgctattggctggaccgtttgcgttcacaccaggagagaagttgctaccagctttgcccgatcggaggtaaggagattcggtgaagttctggtgctgccgagaagctgttttcatgtgaagactgtatggttttacgataagatgctcaggagtgtcaaaaagccgtgggcagaagcattctgaatgccccatgagaccacaaataaagcagaacgttgggacgttttcataccgaaaaatggcgtataatgaactgccatcacgcttcttgaacttcatacgtcttttcaagggggaatcaagagaaagagtgacacggatccgcagaaattcacgccaaacgcctgtgaagtttttggggtcggattcgagaaacttaccgacgtaattaccagcatctttggccactttcatagtcgagaaactggcctgaagatcgtgaatctgaacccatagatcaaaagtgttgagcggcacagtcctaggattgccaccttcgttgagacgctcgattatgagttattttttatcgtaagtccacgggctgcctttgataactcgttgaatgtctatctcatgatagaattgaaacaaaaaacgattttgatcaagttgttaagcgtacatacctctgccgggtttccacaagtctgccataatgtttaaaaaaatacgaaaatcagagatctttcccgttaacag

SEQ ID NO: 173369 - DNA, 765 bp, Cannabis sativa
ttatcaatttcttatgttacgggttgtgttcctgtctgtcatctaaaataaatttcaaaattgaacataacaccatgatgacattaaaattaacaatttagtttataacccgccaacacgatatgcaattttaagggttcgacacgacacgaacttattcgagttgtgttcgtgtctgtattttttaattttttcgtgtcacgtgttgtgttcgtgccagcaactttttaataaatttaagacttcagcacaacacgaacacgatacattaatttaaatatgagttacttaattctatgcttatttaaatatgcgttgatatatacatattaatttatattttataatgaattattgtactaattaaatttataaaagaaaataaatttaagaaagacataaaatataatctttagaaaatatattttaaaaacggttaatccttaacaagcatattaaaataaatatattttgaaagtaacatactaagaaaaaaatatttttcgaagaatatgaaaaaataaaaattactaattaagtgtactaaaaaataaaataaaataaccattaaatttagtttcttaggaaaaaaataaaaaataaaaattaaaaagacaatagtgtaaagacaaaaaaaagtgtaaaaatattactaggtagtagggatgtttaacaaaatttacaaaccgcccaacccgaataagccgcccaaaccaaaccgaataaaccgataaaaaatacaacccgaaataatacaatgaaaat

SEQ ID NO: 173370 - DNA, 546 bp, Cannabis sativa
ttatatctcaactttaacatttcatgaaccacccaactattcaaatcaaactgcatacaaatagatttaccaaaaataaaactcgaataactcactgcaaattaaaatatcagtgaggttcgacggtcacaattagtcgacgttggtgcgggtacagttagttttttgaaatctcctatgattgtggaagataacatgggtcaacgtgatatccctattaatgtagagactgattttatggaggttgctactgattaggaatttagtgaaaatattgctaaagataatgattgtttgttggtggtggacacgaagagaagaaaaacggaatcgggcttgtctgatgggctgaatgaattggatgaagatggggagattaacaaagctgtaatgggttcaaaaaatatgagtttggtgggttctagtatccaagcccactgtccattatgaaaatactatcatggaattgtcatgggcttgggaactcatggacttttcaattccttaaggatattgtgatccaaaagcaacccaaaattatattcc

SEQ ID NO: 173371 - DNA, 570 bp, Cannabis sativa
gcgaagctaggccaccagatcagcggtccgacaactcgaattgtagcttttggctgtgcgcgagtgggtttctcaagcaaaattctgatcctttcttttattttctcaaatattatttttactccacttcttcactttaaaataccacaataatttcaattcctaccaaaaaaagacaataaattaaatctaaattaaaatttttaacataaaaatatatctcattattttcatgaaaatattaacttatttttaatttatcttatactttaagcttactaaatgtatatatttcaccattaatcagcaaccgaactatatcgctctattacaccctaaagtttactttgagaaaaatcgtaaggaagaaagaaaaaaactttttatgttggaaaatatgttttcttccattgttctgatacgacttatacaagaaagtcgatccaagaataaacggtacaaaaacggtaatattatcgtggaggaagagttggatcatgggcagtaaaaagcggatcattgactgatcgcgtcttactacttctaataacgttacaattaattaataaa

SEQ ID NO: 173372 - DNA, 568 bp, Cannabis sativa
gggtctcgagtcctggtttgggtcctgggtcctggtctgggtccgaatcttgggtccaagtttggtcatacatttgggtccgggtctaggctcgggtcgggtttgggtatgggtcttgggtctagtacccaagttcaggttcaggtccgagtttgaattctgggcgggttcggctcgagttcaagttcgaggtttgagtcttgaattaaattttttttgttaatacattaaaattgggtcagatcggattcgaaccggaaaaaaattaggtggagtggaacgaatttgatgcgatatctaataagtagtcgaatattttggatcagaaatgattcatcggattggagctccgacccactccaactaaatggatctttttgacatccctagtgcaattcaatatcatctcacatattttgatttaataaataatataaataatcgctaatcacttctcatgccctatattaatgtggtgttagacaattaagagcatgtttggtattgttttctgttttttgttttaaaaaattatttttagaaatgagaacaaaaaatagattttgaa

SEQ ID NO: 173373 - DNA, 508 bp, Cannabis sativa
atattataactaaatgcaaattaggtagtagttttatgagttttaattttcttttgagcaaaaataaaataattttaattattttttaaaatagtcctaccatatacatataaaattaccaaactatctaaatagataattattaaaagacttggtgccaacccacccagttaacaaaatcgactatactagataaattttattttttcaacaattgatgtgtacttttggcttaggtgtcaaaacttttgtcagtaaaaattaacatgtttcaaaatattatttaattttagttaattaatattatatatgagctattttagtgaatggacacgtaaattactatttgtgtgactaaatcgttaccttggatgaatatatataaaagaaagactaattaggtttttttttcctaaattttgacatgtatcaaattatgttctttgaatttttttgtccgttaaaaattctccctgaactattaagatttttaaatttaaggactttt

SEQ ID NO: 173374 - DNA, 1026 bp, Cannabis sativa
aacaagacctctcccatggataccagagagacaatgaagaccttcaaaatttaaactatggagaagacagagacgacacctaaagccacttgaaggtgcacccaagatggggacgacattgaccttcattttggggaaatcgactctagagttggtctgatcaaggaacttagagaaattccccttaacacaatgcacccaaccaaggttattcagattgtaacaaacctcatggaggtcttgagtgagatgctcatggcttgccttaggagacatcaagacattttttcttggtcgcatgaggacatgattgggatcgaccccgaagtcatctttcatgccctcaacatagacaaagtaaacttttggcctatacaatagaaacacaggctccttaacaatgagtactctaaagctcttaaggaagaaattgaaagactacacgagaacaacttcattagggaagctttctacccattttgggtatccaacattgttttggtgcctaaaccaaatggtaagtggagaacttgcatcgacttcattaattgataactctttttgtatatgaaattaattttgttctcaagtatttttagcttattataataatttttacttaattttatttaattttacataaatattaatttagtataatttgtttagttttagttaaatttcttaatttttgaatttattttatttagttttccaatgatttatttgtctcaacaatgtagttgtccattgagtatggtaaggcccaatcttcttagccattattgagtatggagtaatatatgaaaggaaagcaaaagaaatgggctgaatgattaatgggccacaagctagactttggaaagaaaattaagggcaagatgtcatatttgatataaaaaagagaaggagagggcgtgaaacaatattggaggcggctgggttttggtgctgctccaaggacgccgacagcaaagaaaaaaatcaagaaaaaaaaaagaaaaaaaaagagagagtttatgtgag

SEQ ID NO: 173375 - DNA, 620 bp, Cannabis sativa
gaacacgtctctaataagataccagtccaagactcaatcttgctcatcaaaaagtcaaacattacacatcctaaagctatcaagcagattattatgtgagaagactactttaaaatgtgagaatttaaaagtttctaaaagctttaaaaagcttgaaacttatcaatggtaaatttaaagaagagatgtcgaagaagtgaagatgatgcatatatggagagagaagatcaaaagtttaaaaagcacaaccagatacttggccagacaagactgctcgatagaggctactatagttaagacaagagttgaaaagttcctatctgaacagacattcaaacatggacttaaggggcaaatattatcgcaaattttgtccacttaacgtggcatgtccacatggtcaagactgaggacacgtggaatacaaatcctcaacaatgggacaaagtcaccttacacaacatgtcaattgtcaagggttctaaagcaatcaagcaaaactatcgagcaataagcaagaggagttaaacagaccaccaaggccttaaccaaccatgtctagttggccaaggagagtgtataggtcggccagaagaagcttgtatggccggctagggttt

SEQ ID NO: 173376 - DNA, 575 bp, Cannabis sativa
atcacttctgattttgatagaaaataattatatcttaaagactaatcatagtgatataaaaagccacgtaaataccatttttatttaagttttagtagttttttaatacattttagtaactaattttaaattattattcgaacgatttgttttataaaactaaatttggtgagtgtaccattgttgtgtatataaacttatatgcacaattaaatagtaaattaatcttaatatattcatactcatatagtaattgtccttaatgatgaaataatttataataagtcataacaacatatgactttaatatttattctttgtttcgggaaagttaaaagcattaatatgtgttttgcaaaatttaaaagaaatataatataacgaaaatgaatgaaaaagtgtcatcttgaaattgaagaatataattattaattaaagtgttaatatagaaaagcttatgaaaaataaaactaagcataattacatattatcttaatcttccatcaactcaacaatttgtatggtgaattaattgtgctttgggctcatccgttattttagatctacatacaatt

SEQ ID NO: 173377 - DNA, 652 bp, Cannabis sativa
tttatatatttttttaagatatccacatagatgatgttctcatttaccccttagagtaatataaattagagatttttacaccacatactgaaatttttaacttttttatttttttactattggacgattttttttttcaaaaatactatacatttttttttcagaaaatactgtgtaagttttatattgcgtactgtgttaagttttcattgttgtttcacatttatttttttagttgttccactattgttttaattgttctgttttgttgttttacagttgttttataaaaaatagtatttttgtacaaaatttcgtgtgacagtaaaattgtaaaattttatctaaaatctaatatttttgtaaaaatctttataaattatatgttagacttaaataaagagtaatattgtattgggtaacctactcacagaaataactactttttaataaaatataatataaacatatttttaattaatgaataaaaaaaaatgtatttctcaacttattaataataaaataaacccaagaaaacatataattcaattattacaaatactgcctagtcaataaacaaaattaggctaattaggatttttttctcccgaactttgacatgtaccaaatcatgcccactgaacttttaagg

SEQ ID NO: 173378 - DNA, 1039 bp, Cannabis sativa
tggttgtcaaagtatttcctagacaagtttcagatgcatccaaacatggactttaaatccttcaaggagatgacaaaagacagtaagttctcaaaggtaactgagtctcaattttatagggctaagaattatgcaagggctcagttagagggattggtagctcaataatatgctatgttggaggattattgcaatcaggttttagctacaaatcctggtaacacagctaagattcagactgacctagttgatggaaaaagaatattcaagagagtatacatatgcttgaaggcctacaaggatggatttttaagagggtgcagaccactgataggtttagaccggtgtttccttaaaggttattgcaaaggaatgatgttggcagcagttggcatagacgggctaactacatatttccaatagcatatgcagttatagaaaaagagacaactagtagttggacatggttcttagagttgttgaaggatgatttgacaccgacaactagtcgcttttgtgtgagagacatgtatggaaactttaaaaaggactatccgggactcaagttgaaacagatgctttgggcagcagctagagccatagcaccagcagagtttgaccccagaatggaagagttaaagaatcaaaatgagagtgtttacaactggttggctgctaaaccaccaacagaatggacaaaagcacattttaaagaggaagttaaatgtgacatgttactaaacaacgtatgttaaagttttgcccacgctatcatggatgcaaggaacaagccaataattactcttctggagagtataaggttctggttgatgtgtcgattttacaagagaagaatttgtatcgaggtggacaggaactgtccacaacaatattgtgaagattgtcagacaacggcagaacgtttcacgacactgtttaattacgcgtgccaatgcaacaatgttttaagttaggatgaacattggaggtgcatttacggttgatttggataaatgaacttgcacttgcagagtattcc

SEQ ID NO: 173379 - DNA, 560 bp, Cannabis sativa
gtttgagaatatctggttcgagtttgagtttacacttcgctaaatatgttattacaacatttgttagttaaatttggttgtcgagttattctaattgtatttaaaatttgattctaatcgaagctattgattatgggtggcaaaactagaacataaattttacaggttagggtcgtaacaattagacgtagattaaaaacggatcaacacgacttgacatgaaataaaaatagactaaacactattataagaagctctcaaaatacactccttagctaaaataaggagcgagatttgaaaaaataaacttcaaccatagaaaaaatagctctataatagaaaatgaagaagctcactatatattgtaaggacctccttatttatttttttgttaaactttattaatagtattttaatcaaaaacactattatttttttattattttataaaattaatttatacttgaaaaatttaaataatcaaatattaagtaaattagggaaaataattggagattaataacaataaaaataactttttattttaattttttttaact

SEQ ID NO: 173380 - DNA, 766 bp, Cannabis sativa
  modified_base (500)..(519): a, c, t, g, unknown or other
actcacttatagtaaaatttaaatgttatactaaaatagtttagtaagatcataatcccacttattacctgattaacacataatattaatataaaccctaattattcaccattagacttatcgggatattacaaataaattattattttcgaaaataataaaattaaattaaataattaatttaaaattaaacctataaatttgaaaaattaggtttttaataaacctaaatatctattcaaaaatgcgaactaatttttcaaaatttatgttattttaaaaaatataattaaatatctaataaaataaaatgataaataaatattatttatctgattttataatttaatttaaataaaataacaaaaatttgaaagttgacaaaatatctggttagatttttaaaattttctagattaagataaatcttattttaaatttcaaataaggtcattttataaaattaattaaataatgtaaaatataaaatatctgacctnnnnnnnnnnnnnnnnnnnnaataatcaaattttaaaaaataaggtaactaattaagcaaaatatcaaattttatccatttttaggttcaaaatctactaatctctaaaattaattaaaataaaatcaattaattttattctaataattccagaacaaaattccaattattttatgtaaaaaaacttgcaaacatcaatcaatcatcaataaacacatagatcaatatgaatcacatccaaacaacacttacatcgttttaaatcta

SEQ ID NO: 173381 - DNA, 997 bp, Cannabis sativa
ttcctttgctaataatggttttcaccaaaatattttatgtgtgatctattataacgatgagatgatgtagtaataatagagttaaagtaatagcctatatgtttctcttttattttttcttatgtggcaaagtatacattcttataccttagtgtatcttttgtaaagttgctctttagaatattttcatagttaatattatttatctcaaattttgaatgttgaggtagaataatatcactatgtgtttttagagatattttaaatttgtgttatatgattattaattttttttttttaaaaaataaataactcttaatcatgaatagtatttgtgttctgaattatcaaattttcattgaagggatttatcaaataatttattaaagtgaattataaaattgtcttacacataatttttcgtagctgtttttttttttttttttgtcatttttatcttaattttattaatttgtatgttttttatcaaattgtcactttgaatgtagtgacgactacaagtgagatacagtgatgagagcggttttgtaatcatatgatgatatctctttcaatttcaatttttaatcttttatttactataatatttgaagatagctattttattaaatgattataaaaaaaattaaaattaaataagttaattaaaatatttaaagcatactacttaaatttaaattttattattagatataattttatctattttttcattattaattgataaattttatttggtatttttattttattttatttttttaaaaaaagaaatctattctagattcactttatatataaaagtgatcaatagtaaatttattgtttgtgttatactcgaaattcggctggtacttcagaggagcacacatgtcaacctaggagaacacgaatcaacgaatataatgactattatattagaagatattaaaatggaataactcattaaatacggagttgatagagtatatctata

SEQ ID NO: 173382 - DNA, 879 bp, Cannabis sativa
  modified_base (261)..(262): a, c, t, g, unknown or other
aaccctgatccctgaccccaaacccgtacccatacccctaccttctaatcgtaacatctaaaccctaaaccttaaaccccaaacctcaaaacccaaatcccagcccattcccatttccattcccttccccattctcattcccattccctgacatattcccattcccatttgcattcacattcctattctcattcccattccccaacccattaccattcctattcccattcccattcccaatctcattcccattcccattcnnattcccattcccatccccattcccattccctggcccattcccattcccattcccattcgcattccaattcccaatccctgagccattgtctgagccattcccattcccattcccattctcattcccattcccaatctcattgcaattcccatcccattcctattctcattcccattcccattccatggcccattcccattcccattctcaatccccatgcccattcccattcctcgacccatgcccattcccattcccagcccgttcccaatcccgttccccaaaccgtaaaaccccaaacgccaaaatcataaaaccctaatggcatgtttactaatgagtaatgggaagcaatggtaaggtaatcattccctcacatttatttagttacattattaaaattaggaaagggagaacttgataaaaaagggagaaaagaaaggcagaactttcacaaccaattttgtaaggaatgccattaatggcacgtttactatacaatattcaaaatcataataaattatggcacgtttactatacagtattcagaatcggaataaattaatgaagaaatgtaatagaataaatggaatacaatcggaatcaatatttgtaat

SEQ ID NO: 173383 - DNA, 692 bp, Cannabis sativa
  modified_base (637)..(667): a, c, t, g, unknown or other
ctactactggtaacgaatgtccaatcttatatgaggagtgctactgtcaaccccctattacaatctcttagtcaatttctacgccggaaaacatatgtcggaatattttttttcaatttttttttcacatgggtgttcgttatgcttacaacattatctctgtaaatttttgaaaaatttcgaatagtttaccgtccggaaaatatatttgatgttttttgaacgcgtatggtaaattgaaatatcagaaactctgttttcggttctgtaaactattcggaaatttttaaaaatttacagtgatgatactgtaactatttcggcatataatttcggacgtagaggttgattaagaggttgtaattagcgctcctcatcttatatacatttttaatattgttcataaagtaatatcacttgtctagtactataaatagatgatatatatctcgatggtagataattaataaaattagtataaatttcgtgtactgatcgtattttaagaataaggtttatttgaacagacaatcatgattctaattaggatttttgtcttctcaattttaacatgtactaaatcatgccccttgagttttttcgaccgttaaaaatttcctctgaactattgagattnnnnnnnnnnnnnnnnnnnnnnnnnnnnnnntcaattttactaattcagtgattgt

SEQ ID NO: 173384 - DNA, 1137 bp, Cannabis sativa
acattgtcgttagaaggagagcagagctacatttataaattttcataacaaagaggtatgaagagttccattgtaatttagaatgatgtgattccttttgtaatgtttttaactattgtctataaacaaacaataatagtatcaccactaacctatctttctttccatcaaaattcattttattttctctctctatactaaagttttctatgtacaaaagaaaaagaattaaaatattactgcaaactacatatttttctaaatgcttgagctccttaaatttctcaaaagttgatccaatatacaacttttaaaaggtaatttttttttatcaattagatatctcaaagataatgaagtcttttttttttttttcatttataattcttctattttttgtagggctattaatttatgcaatccttcgacactaaaagaaatgttgtgtatgcaatttctttttgctagatgaagattgatcctccagtaaaaagcgaaagtgagtttcacggcaagatccacccgtcaagcatagacaaaagttggccttagtgatccaataatgtcactggagatttaggacttgagccaagtccatatgtctatatatttttgtcattaattaagaattttatataggtattcttctcgaaatgaaaaaatatattgatattcattcattaattttattttaatatttttattaattatttgttatttttctttataatggataagagatattcaaactttagatatttttctttttctaaatatttgttgtaataatacttaattattatatattttctaattgattcaaaatttatatatagatatatatatatatttagtttgaattttaattatttataacattaataaaaataataatataatgtacattgttagccaagaaacagttcacaaattatatttttatgtttattaaatttaaatatttatatgtggattataattcaaatattaattgtacactattacatttaatttgtccggttacttcacatacatagtaaaataagaaaatggtataaaaatcattatcaagtgaaaaaaaaaaaattattactttgaatacatgtaataatgtttatagggctttcttattgtttg

SEQ ID NO: 173385 - DNA, 619 bp, Cannabis sativa
ttgatcctcaagattaatgagccctaagctatatgtcttgattcagtcattcctcaactgactgttacagtcgatgtctctcgaccactgagactaactattgactaatctaaaaaatctactttgtcaatttttagggttaacacacaggttatgttatagtatacgagagtcatatgttacacgagcattcaaatttttttgcacatatgtgtaagtactcttatagtaaagataactttaaaaagcagtgacattactcccagtaatcgagtttcttaagacatggtgtattgtgcaagtgttaaacggtcaagaggtaacgaataaagtaatataaaaaagcaaaaattggaataaaagttttattaagttagaaataatttctaatataactaaataaattctgataacattttaccaaggcttatccacattgaaaggctgcccgagaacgaccaactaacacactaaagttaaatactaaaaacaaaaagaagagtggaccaagggaacacccttaaagcttatcacatcaacaatagcttcatccttgcccttactttctacaactggcacatcaacatcagaaggaggaaagtcgggatgcttagggttg

SEQ ID NO: 173386 - DNA, 731 bp, Cannabis sativa
gtcttgataataatcaaggccattaccattcaaccattaatgttcaaccacatacggtgcttaccacttttcttaccttaattcagaactcaagtgtacgagccgatctgagtggaaaacaagctaggcgatcccggtcctatgtcacgacaattaaactcaatgaataccttaaatcaaaattccagaataaaaaccctaactcaaaatcaagcataacctaactcccaacaacttcaaaataggccaagcaacccataagcaacctaaaacagctacaacgcaacaccccgagccaaaacacaaccggaagaaaacccagaagttcccccttgcatggcaaccggtcgatcggttctagcagaccaggaacttaaggttctctactccaaaatcgacccaaaactcctccaaacctaaccaaactttccagaacagtatattatggcaattataacataaccaaacaactaattcattgcaatatattaatttgcttaaagtcacacttcaaagtgaagaaaactcaactttggtttcaataaaccaaaaccaatccaagcagccatggagaccacttaaaaccattcccaacatgctcaaaaacctaccctaagcacaccccaaacccagtttaagtcctacagcaacaaagaagtaaaaccctacttcaaaactaactcaaaactaggattttcaatccaaaaattgttgagaacttaccttgattg

SEQ ID NO: 173387 - DNA, 518 bp, Cannabis sativa
ttgttaattaaattatggtgtggtatagtctcgtggatctcttctgcaaagcttcttgcagtttttttttttaataatcttttaaattttaatttagatgcttccctctaagaaaaagtaggacaaaaatacttggacaaggaattagttaaaagagattccatatacactcagaactcgtttagtacgttatattgtattatattaaattggattatatatcatattttcatataataatatgttaaattgtaatttatactaaaatattatatatttatgtactcatacaggtcaataccacatatatagttttacataaaaatattacatgaaatacaattcaagataatactatataatacaatacgatctaatatggcgtaccaaatgaaccctcaatgtttagaatctttattacacaacaatctatatatatatatatatataaaaaaaaagatatatgagcagtctaaaatctctctaattatcattagttgttctctccttaattcttt

SEQ ID NO: 173388 - DNA, 918 bp, Cannabis sativa
attatgattaaaatttgtgctaattacatataaaaatatatatgtagaaaatatacaatataattttatattattattattaaaaattagaaaaaataaacctgaaattttatttgtaattaataaataaattttaaaaaaatattaaaactgcatattaattacctaatataatataaatgagagcacacaaaaaatctagaggcattctatatttttttattgtttttaaaattttgtgatattttctacttttttagaaagaaactactacacatataaactaaaagtctcacatggtttagaaactactaaggtgatactcatatagattataaatattacttttgttatgttactttctttagtctatgaaacatatattttttataggtgataaatttatttcttttctaataaattttaagtttttatttaatatgtactaataaataatctattgtatatatttagaagtatggctactgtacatataaactaaaagtcctacatggtttaaaaactactaaggttggttataaaaaatacttttgttatgttactttctttagtctatgaaacatatattatttttcatgtatgattgatttatttcttatccaataaattttaaatttttatttatatatactaatgaataatctattttatatatatttagaagtaatatttttgtttctaataactacttaaattaaatttatgtttaaattaataaatattaattatcattcatatatttatggattaaatttattttaaaaaattatttttactattctacatttttatgtctttataatttagaaaaaaattcatacatgatatagaaaccactaagatattattcatgctggttataaataatatttttattatgttactttctttgtctat

SEQ ID NO: 173389 - DNA, 684 bp, Cannabis sativa
ctgcttattatgctcaaaaactaacttgttggacatggtttacttttattgttcaagcttgtaatctatgctggatttttttttttggaggccttaatgttatactggacagttctgaaaaaatatgtgggccaaaagttttgcttcaaagaaggttaactctggggttttttcataaatatgagaaaattaaatagaatttacttttatatgacataaataaataatgtaaaaagatatgagattaaaaaataatcatagattaaaatatgggaaataaaaaaacaataaataaatttgataaaaaatctaataataaattttgctggaaaaatcattatcgccaaaaaagtcgtcaaaaaaatcacaagtgccggaaagtcaccgaaaaaattattgtcgctggaaaagtcatcgtcactgaaaaagttatcgtctctagaaaagtcatcgaaaaagtcaacgtcgctagaaagtcactgaaaaagtcaccagaagtagatgtcacaaatataaattaatataaaaccgtttctataaaataatgaataaaaacaaaaacacagaataacgcaaatcgattataaattaaaatagaactagttctataacataatgaataaaaacaagtaacacgcaataattcaaaccagttataattaaaaatagaaccagctctataac

SEQ ID NO: 173390 - DNA, 623 bp, Cannabis sativa
tatggggtccttttaataccttaatcataaatggctgcaaatactttataaccattattgatgatcatagtagatacatttggacacattttatcaagaataaatttgaagtacaaacagttctacctaatttttttaacatgatcaaactcaatttggtgccaaaatcaaaagggtaagatctaataatgctaaagaattagattttaaagtactttttgcttctttaggtgtggttcactatcattcatgtgtccaaaggccccaacaaaactctgttgttgaaagaaaatattaacttcttttaaatgttgctagagccttattgtttcaatcttacatacctttgctttattgggatgagtgcattgctactgccacttatctcattaatcgaacaccaacccccaatttgaagttcagaacaccttttgaaaaaatttattcaaaaccaccagcttatgaacaccttagagcctttggatgtcttgcttatacttgcacattatcacaaggcagatccaagttctcacctagggatgccttgtgatagttagtagtccgtgatctgtaagggaaaataccgagtaggctgtgcaatcccacatcgcctggggaaggtc

SEQ ID NO: 173391 - DNA, 616 bp, Cannabis sativa
  modified_base (574)..(579): a, c, t, g, unknown or other
ggttaggtttcttccaaatattatatatgtattaagagctcttttggtactggtattatattgtattgtattgtggtagattagattgtgttgtattgtattgtatttatttaatataataccatgtttgatattgacttgtataaatagattgtgtaaaattataatatagtttctatatacttaaccacaacaccaactacaggtcgcgggtcacaggtcctgggtcctagatttgggttcgagtcctgggtctaggtcctaaatttgggtcccaacactactacaaaataagtctttagatgtgtttttttttttttcagcataataataaataatcgacagcgtagggttgaaattttttagacgggaattttacgccacttatggcgtcggttattaggaaataactgacgcaaaaagggtttataaccctagcctagccctttgtcttcctcactcgatcaaccaacccccaaaccagagaaaccccaaactctctccactaaccaccacgaaaaattacccccatttcattatttttttgacaattttagctcatttttgtttctannnnnnctatttttcatacttaaaactatatacctaaaaagat

SEQ ID NO: 173392 - DNA, 591 bp, Cannabis sativa
atttgtgttttgtaaaactatctgtaaataagttagtttattgcttggcaagagattcttgtttctctacaggtctgtgcttcagctggaggactgttcttctgaagtgcgctctattactatgaaaaaatttattaattaataaatctaatgatttttattaaaaaaaaaatattctaaatgctatatctaacatgagcggtgtacgattaattagtaatatttttttaaaaaattattattttaaattatatgagatttgaatcttaatacttaattgatatgatattgaatagggtgctaaacatcattaatgacatttagtatttctaaaaaaaacattattatttggtgttaatacatggtatcttggcatctgataattagttagtaattttttttattatttattaaattttaaggagagtgctaccgtgaattttttattacaatttttagtctaccgtatttaaaatattgtgttcaaagtttttttaatgacggtgtttattatagttacaacatcatccttataattttttaaaaaaatttgaatagtttacaatgttgaaaataagtttgaaatttttt

SEQ ID NO: 173393 - DNA, 808 bp, Cannabis sativa
tacaccaactgaggagacattagtttgacttgaagttggtgcattttgtaacaattcttcattgatagcagcaactgaagtagtgcaaggagaatcggcagatgcagcagtagcaggtgcttgtgcagaatcatgagtgcaagggacagcagaggatgcattagtggtgtgattattaatagcagtagagaaggtagcagtaggcaaaataagaggctcagtaggagatacctgagaagagttgttgctgtgaagagcagggaaatgagactcattgaacaccacattgcgagccacaaaaattcgaccatcatggttttcacatagataacctttgtgcttgggagaatagccaagaaatagacactcttcagatctgtactccatcttatgatgattgtatggcctcaagtgagggaagcaagcacaaccaaatggtttttgaatagtgtaatcgggctgttggtgaaacaagcactcatagggacttatattgccaattactagtgtgggcattctattaatagaatagacagcacattgaaaggcatgccaccaatagctcatgtcaagaccggagtgagcaagcaaagtgagtccagtttctgtaacatgacgatgtttcctttctactcggccattttgctcatgtgtatgtggacaggaaagttgaaatttaattccttgatcagacaagaatctctcaaaggatctatattcacccccttcatcagcttgaatagctttaattggtaagttaaattgcttttccactaagcttttaaatcgaatgaacacctcaaaagct

SEQ ID NO: 173394 - DNA, 845 bp, Cannabis sativa
ttttttttttttttttgtactttacggaattccacatagagactcctatagcacctaacgaaacaacctaaatcgcaaccaaaatccatataacaacctacatagaaaccaccgaagaaactaccggaacaacccataccgtaaatttttttaaaaaaagttaaaaaatagtatgtgggggtaatttcccttttctatattattaagattgtgttaatttggttgtgcgtggtggccaaattttggtcagcattgatggtaggattgtagtaataaggtaaaaatttaaacattaatagtatatatgtatgtattttgtgttgtattgaatatgtattgtgtgtacatgtattgtgaatgagaatgtgatataggagagtattttatattgtatatgtatatatttaatattttaaactaatagttttgttaagtattgtgaatgagaatgagataagagagtagtattaaaacaaaagtttaaaaattaatttctaaaaaattagtttagaaattaattctattttttattaaattttttctatttctaattttattcatgtgtttttaatttttttagtagcttgtaaatagttagttacattacttaattaaatttaattaaaaaaaactaattatacttgctatatctataaatatagattgattgatatattgatagtaggaataagaatatctatattgcttctttgtctatactatcttcagcggtatatttatcagtatgatgacaatgacctatgttgttctctcaggacatctccaatggagaaactcaaatttagtgttaaatcaacaccaaaaaactattatttcaacactaa

SEQ ID NO: 173395 - DNA, 809 bp, Cannabis sativa
cgtgactcgtaaactagggggcaggagacaacctgaaggtatccctagaactctcaagaaaggacacttgaggaaactgagggataccttgaaggtgagatgccctataatcaaccaggaaccaagaaaccagaaattccccataggaataagggaaatctggggacacagcctaggatatatggatcatcagtcggggatagccagctttctcttaaagctcataggaaaggagctcgcacaaatcccaataggggaatgagacgaatcaaaccttaggaagaagagcaggacgttaagagtcgagggctaccgcgaggtacacggtaactcataatcgattaatgcgaggggaagagaacgcttgttacaacaatgaccaaaaggcaaaatacggtctacgggtggaacgagattagccagtcgtcatggccaattggacctacgagaacgcttgaactggaaaaaatcctgatcttcatcaacaacttggtccaaagaaaagagattcaatccatttgcgaataaacgagttggagaacaagttcaggaggcatcaagtcaaggaaccaggaaaacaattgggatgcgagtctgttgaagaattcgagtcggaggcttccggatcaaaagaaaagatgactctaaaaatttgtccaaagataagaaacagaagaaatacgacaaatatgtacccatttatactgactataccgagcttaatgaaactcgggaaagtatcaacctcgcacttgaaccggaagtcgtttttagcgaaccaaaacctatgaaacacgcgagacgtaaaa

SEQ ID NO: 173396 - DNA, 568 bp, Cannabis sativa
  modified_base (469)..(474): a, c, t, g, unknown or other
gttcgggttcaaggttaaggtccgagatcggggtctgaggtgggggtctaaggtcggggtccggggcctaggtctgggtttgggtccatggtcaaggtatgagtttgaggttcaaggctgagttcaatcctagggttgaccatagaccctttgtaaatattacaatacaagctaatacatgtcatttgttatgtattaaataatacgactcacattatgttaaaatttatggccgtaataattaatactatacaatattttatccaaacatggtattatttgttatttaatacaatacgatccttatacgtacgacgtacctaccaaacgatccctaaaaataaaatattctacgctaaattggtataaccattgaagatggttttaggggtaaaattaatatttttttatatataaaagtcaacaaatgtattattttttaagagtttttatttttacactttaaaannnnnntttgtgcatttttacgaaattctacatagaaacccctattacaactagcggtgcaacttaaattgcaacaaaaaatcgtatagaaacccgtatt

SEQ ID NO: 173397 - DNA, 924 bp, Cannabis sativa
aattcatatttgaaactaaaaaatgatagtaaattttttaaatataattaactaatgattataaaatattaataataaatctaaatctattatttatcacctatcacgtttttaaaaaaaaaaaaaaattaaaaaaaaaattaacaaagaaattaacaaagcactaacaaagcactaacaaagcactaatataagaaatacctctaaagaaacctaatagaagtctaaaatattaaaatttttatttttttttaaataattaatccaaatctatcacatatcacctagctatcacgttttgttttttgtttaaaaaaaaaaattaacaaaacactaatataatataagaaagatctctaaataaacttaatagaagtctaaaaagattaataaaaacctaagaataacttaatagcttcttaaacttagaaactaaattttttcttattgttgcatgcattagattttcttataggataaatggtaaacacgttgagtatttaataattgataaatgataaaaaaaaaaaaaaaaaatatcaatagagggaaaatatgaataaataataatcaccttagtattaagagactccaacattctacaaacttataaaaaaaaaaaaacaatagaggaaaaatatgaataaataataatcaccttagtattaagagactcccacattctacaaattctaatctttatactccatcatgagagaagaagaaagaaagtaagtggtaaactaaattatgaatttaagagatatagtttaggatatatataaaatctagtaagtgataaaaaaaaatagaaaaaaaaaagccatagaatatatcattttaaatttttttagcaaaacatgagattttttaagaaaatatcaaaaaaaaaaaaaaagtaaaagaaaaaaccaaaaaaaaaaa

SEQ ID NO: 173398 - DNA, 697 bp, Cannabis sativa
  modified_base (547)..(553): a, c, t, g, unknown or other
aaaaaacaaacaatttttatttcataccatgtgtgtatttgcattggcaagtcaaattcttgtgcaacctccaaactttgtgtgaagatatagtcgatgaagtttttatttgtcacccaaaaacaggtttactagctggaaaaataaaacaataatagtaaagaatctgttagcataaaagagatgatcactgagaaaagcttaatccatcagctatacttacctaataaagtttcagtaagaccttcctcggcctctattttgaaacattcgggttgatttttaggccactgcggtatgcaacgcttttcaaacgagtaatctcaccagcaactgtaataataaattagctaaggaaatcacaagcaaaattgacttcttatgttatcttattatcagcccggccctgggcatacgcgaattaggtccgcgcttagggccactcattttaagggcctaaataaaaaattatctaaaaatattattatttattatttatagtaagagtctaaaatttttttttaagggcattttacaaaaatattgnnnnnnnggtaatacttttcaattttactgcacacggcagaatttacatttaaactgtcctccttttttttttttcttttataccgtcaataccaaaacaaaagtatgaggcctccatctttgacaatcacagacataaccaccacaacaa

SEQ ID NO: 173399 - DNA, 507 bp, Cannabis sativa
ctcgatttctaactcaaaatcatcgtaaattcaacaagaaaacatcacaactagtcccatgactacccgagaacaattcttaaaggtcacaatcttcataactattctaattcacaatactcctatacgaaaccaattgttctaaacttttaaaccttaccttaagctttctcgctctgagaatttgctatcccgctactattgaagcttagatcattaggttttggattgaaaatcgaagaaaattaatataagaggaagagggttttgtcaaagtagaaggacgagagttcgttcgtttcgttttactgttataaacttataacatagtatatatataatatactgatacgttaaaattaataataataatattaataaaaattttattattcataattatcttatcatttcttagccactaagaaatctatacctctagaacgctaagtcaaatcccacatactcctaattaccccaatacttatattaccaacttatcacaat

SEQ ID NO: 173400 - DNA, 677 bp, Cannabis sativa
ttcaaaagattacacagatttgtcgtacttatctttgaaatggagtggacatgagcaatggtaatgggaaggttgcctgagatgatctttgtaaacctaagaaagatggtggcttgtgtttcaaagatatagctttatggaatctttgtactattggtaaacatgtgtgggcttttactaccaagaagtacaacctttgggtaaaatgggttaacgaggtgtatctcaaaaatcaagattggtgggactgccaagtccctttggaggctagttggtattggaaaagaatagttcaaactaaggaaaggataaaacaagtcttctccaaaaatgactatagcaattatcagttttccatagctaatttgtacgccaagatgtcttatatggaagtaatattagatgacgttatgatggcatttgggatagattttgcagtcctaaacacatgttcataagttggctagccttgaagagtcgtttgtctatcttggacagacttagtcgatttaatcataccaactcttccttgtgtttgttgtgtggaagtggagtggagagtcattcttacctcttttttaattgtattcacagtagttttggtgattcatcaagtgtggatttggattggtattactagtcggaaaaaagagctccatgatgtcctaaagtggatt

SEQ ID NO: 173401 - DNA, 577 bp, Cannabis sativa
tgttcctgatttgtacagtaatgaataggggtcattgtgcaggaagctgatcgaagctgcatcttcttcagtgagggagatcgtgagctctatgggcttttattgcttaaagctcctgtctttgacagctaggatattgcctttgggctcatgacagagtgtcagagcatagtgctccctagctttgctagtttcgcctgcaatgtggggtccaccaatgatgaccctaggtgtcctaccataggcggtgggactggatctccattctgggcaccttgtgccaaagtttggtcatcttatacacaacaatgcaggtggggattgttatgccttatcaggtactcaagctccctcttcaaattttgacactcattggtgtcatggccaaagtcgttgtgatatctgcagaattttgacatgtcccctcttgcctatatcccttctgataggaaaggactttcggtatgggactgttctctaagtgaccatgaagatggcctcatgcttctctgttaggagggtgaagcaggtgtacttctccttattcttctgtggcgtgggagaagtgttaaacttc

SEQ ID NO: 173402 - DNA, 649 bp, Cannabis sativa
  modified_base (590)..(596): a, c, t, g, unknown or other
accccaaagaatactacgccaacaaaaagagggggaatggccaatggccgcatgtaagaaatcgtttcgcttaaaatatttggcttttaaaagttggccaaccaaagaatccggagaggttagtaaacgccaagcttgcttagctagcatagcttggttgtggtgcacaatgttgcaaaaacccagccctccgaaaaattttgaagagcaaaggttgtcccactttttccaatgaattttgtggttttggccaagagctccccaccagaatttagacataagacggctgtagtgtttgcaaagagaaatagggaggcggaaacaagacatagcataagaaggaatagcctggatgacggactttaggagaacctctttaccggctctggaaaaaagattttggttccaaacagacaacttggagctcgctttttgcaaaaggaaaaggaaagaggaattcttcgatcttgagaaacattgagggacaccgaggtatttatctatgaacggtttgtcatccatgttaatggaatccctgaacatttgacgatcagaggagggggtatttgatgggttttatgccctaaatnnnnnnnatttcaatataatcaaatttatttattaatatatatcagaaataacatttaat

SEQ ID NO: 173403 - DNA, 1231 bp, Cannabis sativa
  modified_base (656)..(658): a, c, t, g, unknown or other
aaaaaaagttactataaaactaattacttttataattctgtgttatcaaaaaaacttttataattctaagtattgttcaaattgttgcccatgtgtgtgtgcaagatttataatactagatttttctctataatttagttggaagatttggtttgttataaatattgtaacctctaatggttatatttctttttcccatacattgttctacatgaggagattgaaattgatgagaatgatcccgttgaactcttatttcttaatatagacactgataaaagtaatcaaggaaaggcagtttcttatccaattggaaaggcacaatctccaatagaaagtcttttttttttttttttataaaatctccaatagaaatttgaaattcaaatatttgaatataggtttggaattcacataattacatatttagctgttttttattcttcggcaatacaatgcaattattggaacttgagagtcaaataaaagagaaaattccaccatcttaaaatctttagaggatctaaattttgtatgcaaataacactagtgtaggcttatgttttctttatagttaacttcaattatgttatctcttatttatgatttttgagatgtggcttagtttaaatcattttatggttctacaacttatnnngttcaaagtcattattatatccccgatatattggtacgtttaatatttattaattgtaataaaaataatcgtaactaaaaatgattgagaaagagtaaacaaggaatcaaggattttgtttccttcttctaatttttttatacatatgaatggatggagaatgcaagaactctccttgagtcctttcctattttatcccattatggaacatggtctatgtgtgagagcctacactgttgtctttattaccatgtcatctcaatatttcaatgcaattttgttatttttttgaaaaggcaagtcttaattgatacataatttacaaatagtgtgatatacacggtataatattgcattcaatttacttttaatttgcaatactattattgacattaattgaatatacattaaaaataatttcaaacaataactaataatattttttgttcaattatttattatattattttttgaataaagtagaaagcatctaacataaaactaattatatgtgcctcgcacgtagctttcttctaatatatatatatatattagcaaaaagctacgtgcgag

SEQ ID NO: 173404 - DNA, 555 bp, Cannabis sativa
aattggaatcatgatcacattttctaaattgctgatgtccaggtcacctcctatgttcaagtgtttcaattcatccaactgacaaccttttctcttatccacaatgtaatctgtcaaagtctttaagcaacttagcttcccaatgtttggaggtaagtgtgataatttgtcacagcgtttaatgtaaagatggcgaagacgtttcaagccaatcatgtgtttgggtagcttacgaagaaaactacaatagcttaggtttaaagtcaacaaatggtgtagcaaacaaatggaatcgggaaggactttaatattactatctgagagattcaaatagcgaagatgtttggaattattgaccaatgatgacatggatattctacaaataacttccctattgaattcaaaagctcgcaatgagcgaaaattaaatttaatatcactaggatctgaatctatatcaatatatatatataaaggaatgcacaagaagagtttaggtggcattttactattttttcttcctatttttcctattttttagtatattctcttatt

SEQ ID NO: 173405 - DNA, 749 bp, Cannabis sativa
ctttttatattaaaaatttgtaacggttccatcttaaaattaattaggataagtttataaattcctcttttttgtatctactaattaaaaatagcctcatattatatttcattaaaatttactcacttttgtgagtgggttgcctaatatattcttgtcctagcacataattaacattaacctaaagggtataatagggacatcatctataaaagtgggtataatttaaagaatatggaaatgaaggtaaaaataaaaataaataaagtaaagtaagtatacaatgtaatttcctcaaactaattagtgataaatcgagtagcttatattcttacatattactcaatactctactatttattttatgtgggactttgtccactataatgaagatggggacggggagccctccctatacattctttgttccgtgtgcattcctactcgatagtattatcattaggagctattctttgatggcatgtttactaataagtaatgagaatcaatagtaagataatcattctcttacatttgtttacttgcattattaaaattaggaaagggagaaaagaaagggagaaaagaagaaaagaaagggagaacttcccccaccaattttgtaaggaatgtcattaagggcattggattttattattttattttatttttaaaattaaatatataatgacaattttgtcttttaaaatatgtcttacaaaatattgaccgaggtttcggcaactaat

SEQ ID NO: 173406 - DNA, 663 bp, Cannabis sativa
ctctctctctctctctcgtgaaccttaggaaccagctaggaattcaattctttttcagcatttcaagcaaagtaaagaaaatttatgtgaatccaagctctaggtaaggtcttaagcaatttccctttagtttcttgattttaaagaaaaggaatcatgcatgtttttgatgttttgtttgttgttcttgtggttgggtttgattatgttttcagtagttaaattatgtttatatagggttatttgagcaggttttgataggtagtttgttggatgagcaagctttgagtttttgaactcaagcttggctcatcaatggtgattttgaattttgtgtatgggtagttattgtaacacttgggaaatgtttattgtgtatattatgcaggtctggaaattttggttgggtttggaaacgatttggttagggctttgaattttttggttattgtgggaaaaaccagttacccagatttggcagcagggaaacccaaaaattcagcttgtcgttttgcgtcagtttcaggtttctagttggctgatgccctgctagtttggggtattgccatattaagctgtagtagataggtttttggtttaaaacctaagtcccagttgtgatttagcgagtcacttatgcgtgttattatcgatgtgatttag

SEQ ID NO: 173407 - DNA, 564 bp, Cannabis sativa
ttcttattctcaccttgacctctatcttgaccaccctggaaacttttatcctgtcgcataattggtggttcatttagttttcacttcctgatctactagtaattagttgacttcatatattccacaacttctagtggcacaaaaataagtgtcggtagtacaacaacagacacaagatgagcctattattctttcatatctcggatctgttttctcttgttgtctaatcatatcctgcataatagaatttacatgttcccagcattatggcaataaagaattctctttcataccgttttccccgagcatagatagctcgctaatcagactattcgattgcccttaccacataacttctcacacatttagtctatatcttctaataatttaaaacttagacggatatcatatcaatatgaatataccatacacatattgttatcaaaattaatgctatgctacttttcccaacatactttataatagcttagggaaataatccaatagcaaataatataaatacttactataccatgagtggacctgtcctcgcagcaaatgtac

SEQ ID NO: 173408 - DNA, 515 bp, Cannabis sativa
ataatactttttctactcctttattttcacataattaacacaatcatttgatgaaaattattattatgaatagtagtaattaaatttaatatttcaaattgtaaatggagtagtctattttaaattcaactactactcatcatcatcatatataatatgtcacctaataatggtattatgcatgcattcttagatataatataaagtaaaattttgatatgtatagttcaaattatacaaatttatggatttttatacaagtttttcaaaatatgtttttttttttgtcaaaaatattattttattagaaaaattcaaaaagactaggattcgtttggcacattttttggaaaagctaaaaactgttttttaaaaaactgtgacaaaaatgtgtttggcaagcagttaaaaacttattgaaaaatttatgaaaaaggtacagttaaaagttaaaggtggtacaatctaatttttaaaaaaagatgtttgattaaaagactctataataaattatt

SEQ ID NO: 173409 - DNA, 551 bp, Cannabis sativa
tcacatgcaaaactatatatttaaagagtttgagattatccaaaaataaacttaaaagtttaatcatgggaaatttacatacattactaaatttaatttattacttttctactgtcacacgcttattgttacatttatactgttttttttttctactgtgtcaattatttttcccaaaacattttatcataataataataaataaaataaaataatgaatagtagtgtccccccacatcaaaatttaattttttttgttttattagagagattgattggacgtgagatgtgacaaaaatgaaatcttctttattatttaatatttaataataaagaaacaagtgtgaagagttagctttcttgagaacacatcaccatgtaatagtaattgctcctcttctgttcttcttcttctgctgggtctctttcttttgttttttttttttattcaaaatccatacatttattatattttatcttcctccttaagttctcttactctctccattaacatataaattttttattttatttcttgttcagttcttctt

SEQ ID NO: 173410 - DNA, 614 bp, Cannabis sativa
ctgttacaataaaatggcactttttcgagttaagtaccaagtttgactcctcacaactgattagaactttctccaagtcctccaaacagtgatcaaatgaagaaccaaaaattgagaaatcatccataaagatctatacatgttgtaatcaagtctgaaaagattgccatcatacacctttgaaatgttgctggagcattacatagtccaaagggcattctcctgaaagcaaaagtgccatatggacatgtaaatgtcatcttctcctgatcctcatgtactatggctatttgatggtacccagagtagccatctaagaaaccgtaatactcttacccagccaaccggtctaacatctgatcaataaagagcaaaggaaaatggtccttcctggtttccttgttgagcttcctgtaatcaatgtagattctccaaccgataaccgttcttatggagattaattcgttcttctcattctttatcactgtcatcccccctttgtttggtactacttttactgggctaacctatttgctatttgaaattgggtaagccactccagcatctaaccacttgaccacctcgtttctgacaacctctttcattggtggatt

SEQ ID NO: 173411 - DNA, 518 bp, Cannabis sativa
taagcaatgaaaatatatacaaaatgataagttcattgaaataatatttgaatgtgcttaaagtaagatcatttctgatgatcgcgaggtggaatcaataatgtcttgcaggttgagggacgggcagataagttgctcgcgcgtaagtaggaaattaaactacttaacgatggaggaaaatgcaagcgatggaaactcctagtaaactttatgcatgtaggtgtttatattgtgaataaaacgtaagcaaatatctgcatattaaagtatgaggtattataaagcaaagttggtcgtccaaccttgcaaatatgtctttcttaaaaaaaaaaaaaaaaagagaaagtgccaccaggggcaaaccattattttggcaaaagggccattttccaaaagagaatggggagataaataaaaaccaagtctacatgatgggtgtaatatcccaataagcctaataattaataattaaggtttatatttaatttatgagttaaccaggtaataagtgagattat

SEQ ID NO: 173412 - DNA, 663 bp, Cannabis sativa
ctgaactaaattaaaactaatcgcctgtcaatttttctttctttttacatagtgcaataaaaatgggataatgttgtaataaagttgctaatagtttagctaagtggagtcgtatgactcaaaagtctgaagtttggactgatagtgtaccttcttgtgctgctgcttttttaatagcagatgtgtctagtgttgcttagtaataaaaaatctatttcaaaaaaaaaaaatagaaaaattataaaaattattagaattttaaatatttttaaattttatttacaaaatatactaattttttatgtttttatgttatttttatagtgtgctcttattattattgtgttgttgtttttattaatttattgttatttgtatatcatttatacattattttgatattatttttctattacttttatagttttcatgttgttttcatgttatttttatataaaccgtaaaaatgtgacaattgtaccaaaaataatacttttgagtaaattttccaatgaaattgtacaatcaccactactcatatttgaaaaacaattggctaatttttgctattagacaaaagaaaaaatgttatttttcaaaaaaaaaaaaaaaaaaaagtcaataagtgccctcccaacagttctttaaaattttaaagaatca

SEQ ID NO: 173413 - DNA, 531 bp, Cannabis sativa
ggttaatttagcactggaaaaactagaaaatgcatttcaatttttctgccaaaattcattttgttgaaattaaatcaaatggccaaatgaaaaaatgccttaagggccaatatatcacataagcatgcattcaagggaaaaattgtcattcatcacattccacacataaataaactttttgattattcaattattaataaaattcaaaaaatgtatttcggccctgaacccggttcgacccaaaatacccagttgtgactatatcgtgccgacttgtcgagaacacctacggaaggacaaaacaaatatactatataataatatagtccataagcacgctataatattaaaattacagttttacccttctcgggtcaaaattacaaaaaatgcccctagctcaccaacggggtcttaacatgtcatttatcagtataattcatacatattaaattatataataatataactctacattaatacacattaaactagttagggtttgctaatctgattccttaaatcttaggg

SEQ ID NO: 173414 - DNA, 630 bp, Cannabis sativa
tagggttttgtgttgctattattgtaactttatgcatgttcacctactgaaagtagggtccatagttgaccaaaaaaaaatttacttaattttgtgtttggaatgtttgagagatgctaatttgttgcttcccctgtgatttgcctgtttttttttttgttgaaattgaattttacaggtgataatttagactacttgacacttgcaatccaccatgggggcatgttcttcacaccctttggtaataggagatatgagggtgggagggttaattactttgatagaattgataaggagaaaatgagtagggtgttcatagaaggttttgtgttgtctctaggttacaaattgccttttggtatgttgtataaggccaaagatagagctctgaaaaatggtaccatgattctgggagatagagatgtccaatctatcctatacaaaatggaaaggaggaagtggacagagatggatgtttatttagtgatgcttgagatgacattggaattggaatggaaagaagacctaactgctgtgcctcatgttccagagctaccaaccaagcttcaacactgtgtgattgaggaattgccaccagatgctgatgtggtggctgatgtagtgggcata

SEQ ID NO: 173415 - DNA, 679 bp, Cannabis sativa
atgcaccttaccgtattgacaaccgacacatatagtctttgttctgacctcaagttgaggaagacccttcaacatagacttcttcattatcaccttgagtttataataactgacatgtcctagccttgcgcgccacaaatctgttgttttgttcttccgagtcttgtctacataagtggactctagttacatttcatagatagactctaagcatcgtcctttcatcatcagtgttccagagatttcaagatcttggtagatcttgacatcttgagggtcaaatatgacatggtggcctgtcgtcgtaagttgcaccactaatagtaagtttttcttcatgccaggtacatagtagacatcctaaagtgaaactttttttgggctgaatcttggtatgattgttgttttaccattgtgagtgattggtaattttgagttgttggttgtcatcactacgcgaccacatctgtattctgtcatgttttgcagcttctcatcatctcctgtcatatgatttgagcagtcaaagtcgactatccaatcattattatcgtcgatctttcccagaacagaagttgccaaagctaattcttcttcctccactacgaatgatgcttttgcgtcccattcttcatcgcttgtcttttctgcatttgacgtggctacattgccttctaca

SEQ ID NO: 173416 - DNA, 655 bp, Cannabis sativa
tttattttttattataaataatgtctttcatcctaattaacttactttattgtggataaaagttgtaatatatatctatattttttttatatattttattatatttgttttttgcttttaaatgagcattgaacatataataataataataataataataataaatattttatatgagagttatcgaatgaaaagatactattatttttctattggattagtattattattagtagtagtatataataataataaatttagattattggattggtgttgaattgtttttgttcctcaaatcttaaattgttaaaggccatattaaaacatactaaaaatatataaaatttcacttgaaaaagaaaataataaataaagtaaattctaaatttcaaagtctccgagaaagaaagtgataaaagaaaaagactatttgaaaatgaaaatttgaaccaaaatttaaaactctaatttggggtcttattccaaaattgataataattaaaattgtttatagaacactatatttcaacataaaatttaaaaataaaattggcaacttcatttgcttacattttctttccttacatatttttgtgaaccaacaattaatttatttaatatatgaataacttacacaaatatatgttctgct

SEQ ID NO: 173417 - DNA, 789 bp, Cannabis sativa
ttattaaagcaattaatttcttctcaagggttataaaaatgaaaaaaagtataattagtaattttgtccaaaaatttttgataccatttcttgtccttagaatctacaacagtaccacttattaaaaattctatttgaacttttatatttactgagatttagtcattttattagttttcgtcgagtattttgtttaaatgatgatgtgtctttgtaaattagtatttttgtcccataaactttggcaactatcaattgtaccacattcaaataataaaaaatgagaaagattcaacattttgtttaataaatcttaagaaattaatttagatccatcttaaaaaaatcattttgaatgattaaaaaattaaaaaagaaattaaaatttaaaactaattaagtgatttaaaaaattaattactttttattaaaaaaaatatctttagatataaaaaatatattaaaaatttaatttttgtaaaagcccacaataagaaataatattttttataataccaaaaaagtattataaaaatctttccataataccaaaaaatcagtttatgtggttaagtgtcactaatcatagagattaggtagttttgctgctaatatctcttactgtattaactttgaagttttattttcttgtatacagatgtgtacacagtggttatttatttagtatttaacaatgatatttaactgatgcttcaaatttacaaaaaaataaataaataaacttaaggagattttgccaaaaagaaaaaataaaaatattaagtgtat

SEQ ID NO: 173418 - DNA, 587 bp, Cannabis sativa
aactgtgattgcaatttctattggcgaatgtctaaggcctgtgtagcaaacaattttcttaaaatgaatttttcttctctcgttttcaaaagcgtctgtcttccaagatataactgaaaagtaataaggcacaccaccttttactttggcgaactaatcttctctcgttttcaaaagcgtctgtcttccaagatacaactaaaaatgtaataaggtacactaacttttactttactttggaaactaaatatgtctgaattctatgacactgtgataaccaagaaattttataacattaataacttatctttaaaaaaatacttaattgattaatgatataaacttgttcatgagtaagtttcggtgtaaattatagtgaaagtcttaaactatatttataacatttgaagtttatcatttttactttaaaaatgatgtgggattgaaaccccttcaattttattcaaaaataatgttaataaagtcaactttttccaacagagtatatatggtatttttatatagagcattgctattaggcaccacttgtctcgttgcgattggctagcgatactccctaaaagcta

SEQ ID NO: 173419 - DNA, 600 bp, Cannabis sativa
atcccttcttgggagtggctgggcaaggccaacaacacagcacagggttggccgacctccaccatacattctcccaaagtatggccggtcacaccctggcatatttgagcctatagcccctccaaggagggccactcagttaagtctctacagcaatggatccttctatgcaagcacaattggacaaaatgagagacatgatcaagggcctagctggttaaaaaccttcaaaacttgagctagacaagtcagggggatcaccattcttggaatacataaatgccttgcccttgcccaaattaaagatgtcaatgtggaagtgtatacagggcaagaagacctgctgacacacatcaaatactttgagatgcagctcgatctccaaaggattactagtgatgtgcgatgtcgcatattcccaataactttgtcagaaacatctcatcaatggtacttcaaactttccccacgaagagtcagtttcaggaatgacttttcttgagaattctacacataattctcatcttcaaggcttataccatcacagctagaagaccttgtcgaagtcaaacaacgataaggagaacctttgaaagatta

SEQ ID NO: 173420 - DNA, 501 bp, Cannabis sativa
tgttaacttgatatataatacatatttagatattttgtgttttattaaatatgtgtttatatatattgtgtgtgtatatatgttgtgtatatattatttgtggatgttgtataattgtattgtgtatatatttgttgtgaatgagaatgaggtagtagggaatttaattagtttagaaaaaaagtttttaaaattatgttagtgtgatatataattgattatatatgtaaatatatatgtatatatatatgtatatgttatttttttaaaaaattaatctatagaatttagtaacttgtaacttgttacattttttaataactagcaattaattaaataattaaaattctaatttcgttgtgttgcattatattgtaggttgttagctaatttttgaggttcaataaatttcgatattgatcggattttaacttgctataggtatatacattcactaaccttttgttattataattagttatcaatgcatgcttagtggag

SEQ ID NO: 173421 - DNA, 891 bp, Cannabis sativa
ttggcaaagaaactactgtttaatatatatttttttggaaacttgccttttgaattaatataatttttgtctatatctctatagcttagtttatatgtgtatacatatacatatttatatattaaatagatattacgtatatcttaattttattttagtttttaattttttatattataattttaaaattaataatattcagaaaaaatttgaaaccataataaattattattcgtcctaaatttatctttgctcatatagttaaataatcaaaacattcaaaattaatttaaaaaaaagtcacccaataatttttcaaattctgttatgtaggcacattttatatagaatagatatagatagattctctcaattttttaatattttattaaagcataaattttcaaatttatattttattattattttaataaattttctataaaaatatatgtcttaaattaattattttttaaaaaacacataataatctatataaattaaattaaataattattcaattatttatatatatatattcataattatatatatgtgaattttttttacagtatttttttatagaaaaaatttattatgaaatgaacaaaaaaaaaaagcagcattatttttatattccaattaaataaagttgatgtcatcattgtagttcctattgatattctcaaatttctaaacttaacactcaatttatccttctgttagttgatcaataaagtgcaacatataaatatagcattgaccaaactaataattattttggaaaaaataatttttaaaaacaaataataattaaaatatacatattaaaatattcaaaaaaaacattatatacatattaaatgaaaaataaaaattaatttttccatc

SEQ ID NO: 173422 - DNA, 619 bp, Cannabis sativa
aaacagctaaatcaacgaagaaccccagccaccacactcggacctcatctaaatctaatgttcgttttgctaaagaatgagcaacatagttttttgaccgattacaatgcgacagaaatatgctactgaaagaattcctaatatgattaatatcattgataacaatgattaaatttatcattttagtagattttttatctctattgatatttgtaagagtttttcaatctaaatattttctataatgcgtacattgcagatcacttttataaatttttaaaatatttgaaatagctgatcgtgtcaaaaaaaaatatttaaatgttatgttgcacatttagctattttttcttatacctatgataagtaacttttaaagtttatttttagtaatgtaaattatttataatttttttaaaaatttataaataattatacataataaaaattaaaaaactctattttcaaatgagaaagaaagtgtaccaaaataattctttaggaatgtattactcatatttcttatatatttcacattaacaaaggaaaatttgatattatatgcttaaaattaatttatccaccaaaaatatggtagcatattttgcattatgcaaaa

SEQ ID NO: 173423 - DNA, 1614 bp, Cannabis sativa
gcttgattctcgcaggtgtaagccgccgtgcaagaagattgtccttgattttttttttctagatcttaaaaggcttgagtgtttttattcattttatttgtttattttatttcttttaaataaaatatgatatatatttatttgttgatattaattttttagaggtactctttatatttgatattaatttattgtgtaataattatattattaacaattcatttatatttatatttattaatttatatataattctttctagtaaatttataattaaaattttaatataaataatatatcaattgtttaacattattttaaaaaaattaaatttttaatatttcaagtccagtaaaattggactagatacatatattttaatcgagtctcacttttacgtccagtctagtgggactagaaatatttttctagtccaacaatgttagtctagaaaaatactttttttatgtcccttgatattatgtccaacacaaaatagactagtaatacttataaagtccaactttggacttaaaatgggatttttatagtagtgggtgctatgcggtgcaggtaataggtagaaatgttcggacaaccatgagtcaagaatcttctccaacaagcgtacatatcagcttattcaacaggtggttctgagttgtcaagaattgtatttcaaatgttttaaacttttaaatgtattttattatactattgtaatgtcatgtcttgtaatatttcgaataggggatccccaattgtaaaaggggactatgccctaattttataatttagattagttagtaaaattttattaatcacattttatctaaactggtagtttattatcatatattagtttataaatgcacacacgttacatccttaagggttaatgcgttatataaacggtaagtttgataaagacaactttatgcatatcggttcttattatatataatctctattatatacaacaccttcacttagatgtcatgctacatcagtaatcagaattgagattacttgcaccaaataacaggcatcaatgaaccacactagcaaccattgattaaagattcctaaactttaatatgctgccaactattttattcatgactaagtgatcttgattcttcatacaatacaagtcacaacctcatgtatgaataaagaattttttaatatttgtatataacttattcaatatttaatattaataatttaacatttatatatatatatatcaaaatattcaactcttattaataattagaaatatcttataaatttttcaggatataaaccctaacactaggcatattcatcgttatcatctaagtcaattttagccagtagatcatcatcaatggtcaggattagcccaaaatagttttttcatattttttttttgtattactttattattattttaatggagctcattacttataaaaagagaactccactagttcattttttatattctgataaatctccataaggtcaaagcaaattactttgggaaatttgaaattatatgcatattagggactaaaattggtatcttaatctaaaactatacataatttgtaaaatgggataactttt

SEQ ID NO: 173424 - DNA, 934 bp, Cannabis sativa
  modified_base (474)..(474): a, c, t, g, unknown or other
tttaggtggtcgttttgatatacactgcccctattttcggcgacgtttctggtacaccaatttttaccgccaccgattgttaatgtgcatcacttaggtgaggctgcataaccccaaattttaaatatagtcatattatatgtcgttcgactcgatttttaatctaggaattatttaaccatttgatggtataggtgagagtaatatgtaagattagtcaacttggaggctcgagacttgagagcttaagattgtcttttggataaagtttaatgacttgggagaggtagggactaaatttaattattggtcttgatttttatatgtgttgtataacattagacatattctaaatttttatgatttgcaaattgtttgaaaaattgaaaacttaatctgcatatttttctagagtgttctatggtactgagtgctaaatatatttttgtacaaatatttatgcaggttatgatntttgggtttattcaaaatacaactgttatgctatcgaattttctagaaaataaaaataaatatgttcttttgttatgcttattatttgcctgctttggttattctgatgagagccatgttgatcatgttcagtgcatattgttgtttcatgacctagtctccgtgacatcataggtagatcaggtgtgcactcacctataggtgaaagacctagaatctgtacaaggagtaaattaaatctaagccctggtatttatggtgggtaacagatgcgactacccggttttggatgtcattttctatgattggtattgaaagctaggggtctagtggacggtgtgatatgcatttgacacttgattttgttattctttgttgtctctctactttgtttatacattttgatactggtgatgagatattttatttttacaaagctaaccatgcaggaattttatta

SEQ ID NO: 173425 - DNA, 503 bp, Cannabis sativa
atagcatatacattatacatatatccccacaaataggattttaatccaacaatctcccacttaggcaacaaatgttaccttataaatgtatatccttatgagctcaaaactcctattatgtaactgtattcacaacaatcttgtccatcaaccatatctatatagcatcaaagtaatttttattatatcaatcatgactaaactcatcaatgatcacatatacaaatatggccaaatgactagatcaatcataaatgcgtagtgtcacgggctcaccttttttcaggcagcggaacacttgtgttgcaccttgactcctctaagccatggtcagccttccaaccatccgagtaacgatggctcatttttcacacgactgtgtgcctcatgcacacttctgtcactcaaacaactcttatcgagtcatgctcccaagcatttatgagtgcagccaaacatcgaggttctctagccaagatactcgcactgtccataggttccca

SEQ ID NO: 173426 - DNA, 614 bp, Cannabis sativa
acaaaaatatgattgtacgaaattaatatttttacgattttatttgtagaaaatacaataattttaattgatgtatttttatgttgtactcttgtcaatttatatgttttttttttattgttgtcatgatattgtttggatattattttcctattacttttatgttatttcgtgttatttttataaaataccataaaaatataaaaatataatttttttttttaaaaatagtatcccatgtaattattctaattaataataataatgtgattatttattttaggtaaataaattcttattcatggttatatattattattattattattattattattattattgtgatgatgatgacgtattaggtgtaatagctctaccacaaaaactttttataattaaatcattgtatagtaataacaagtgtatattaaattattaataacatttatttttatttatacatttcaaatcttgctctataataatcaattactttgattccttacttgtacatatgtttccaactagtttcatatagaacaacttaggtggcgtttggttggaagtaataaaatgaaatggaatggaaatgaaataattttcattctatt

SEQ ID NO: 173427 - DNA, 547 bp, Cannabis sativa
aactttttagtccgtattataaatgggttattttattaaattttattatacatagtaaataaaatgatgatataaatacttatctcacaacaacacacatgtataatttaccattaaaaaataaaaattattaaattaaaaatcgattaacgtaaaattaaattaaaaaaatattttttaatattaattatgcacgtgactttgacataacaatgacgtgacaaatgactaaatatttatgtcattattttgtttgccaaatataacaaaatttgacaaaaagactaacgtacaacattacaccatcaatttgtaaggaattgaaaaactcaaggcaagaaataatgcatatgacatagcttgagaatagaaatcctaaatagccattcttttaattgctccattttttttttcttctaatttttgctctcttctctttatgcttatgaatgtattattagtttttgatttttcaattttttttttgtttttttttttttgatttaagcgtttatatattacaaccatgttttatttgggactcgaa

SEQ ID NO: 173428 - DNA, 744 bp, Cannabis sativa
  modified_base (306)..(307): a, c, t, g, unknown or other
  modified_base (680)..(688): a, c, t, g, unknown or other
taagaacaaaaggttacgaaggtttttcgatttgttgcactaacatatgggctcgtcgcttggcaaatggacacaagatgtgttatatgggtcacagacggtacttgcctacaaataatcctgttagacgaaagaagaaagcatttgatggtactaaagaagaaaatacggctccttttccactatcagggcaacaaattctccaacaagtagaacttgtagattttaagtatggaaagacgcaaaaaaaaaaaaaaaaacaacaacaacaaatgtttgttttcaaagaaagtcaatctttttccnnttccatattggaaaagtttacttgttcgacattgtttggatgtcatgcatattgaaaaaaatgtgtgtgaaagtattatcgataccttacatgatattccaggcaaaacttaggatggtctaaataatcgtttagatctcgttaaaatggttaaatgacaatctctggcacctgagaagaaaggtgaacgattatatttgcctctgcgtgtttcactttatccaaaaaggaaaaacaaatagtttgcaaatcaattacaaatatgaaagtccctgatggttactcatctaacctcaaaaacttggtaaatgaggctgaattgaaactaatgggtttgaaattacatgattgctgtaacaccctaactaacttnnnnnnnnnacgtgatttttaaacgtattgtgcagctcgttgctaatcaacgaggtttatggtaa

SEQ ID NO: 173429 - DNA, 579 bp, Cannabis sativa
tattatataaatgaatgtatgttttacaattatactaaagtaattattgtaaagtaatagttgtattatccttttattacacttaattttatttgttttaatttaaaaatatatttagtaaattatttgattaatagtagtataactaaccaattatactatttttaaaatcaatataagtttttttctctaagaaactacatattaatattaatttggtaatattaaattgaatcttgtcaaattttaaaagtatcactcgcattttacttttattttaggataaaaacttacattttgtttttaattcaattacttaatttattattttttaaaatattgtataaaatatatttataaagtttaaaaaataataatatttttcacaattgaaacatacccttaaaagatattttaattactaaatttaaatttgttatatattacgttgtttgacattggccccctaactatttagctctagctccgcccctattcatgatggtttgtgtgcttatgtgatgatagtttagaaatattttttatttcgatcttgaattatttttactagaaagtaga

SEQ ID NO: 173430 - DNA, 600 bp, Cannabis sativa
taatgtccattctggatattcatctctgcccagatgcaaggaatgcaggacacatatcacttgtgtattctgccacctcattatgcaaaaattaggataacatttgcccctaagtctgcgcggaaccttcttggtcgcatgtggacttcactcggtttggattcttgtctgaatgggtggcaagtattcgaagtgtcgattgatgacccgatgtgactctgaccaacggtctcttcagtttttggctcattagtgctaactaacatgtacctcgatccaagcctttgaattagcatgttttgacggttattcttcagataactgagtgcataatgtacacttttggggggagcttaaggtatttaaaatttgaaatgattattttgctccgttaatttgcttataaatagggctgaaaaccttaatcaaccacttttagccattttcacttttaaagaatcagagtaagaaaccttttttcttttaatttcttcaaggaatcctcaggaaacaccgatcagcattgttctagcaaatccaaagcttcaaatcattgagtaaattctagtaagccaagctcgaaggaaatcatcatttcac

SEQ ID NO: 173431 - DNA, 791 bp, Cannabis sativa
agcattatcaaaaagtcatacatgtaggaataatgtaataaaactaatcctactctggtgatctaattctatcctagcaaaagtatgtattaaaaggctggagttgtcgtcccctagaaagctgtatgaggggaggaacaacctggaagataaataggtagaatgatcaaaagggataggtacgggaggatccgaccgcatttttgaccgacctaaaaaacggctaaggtttgaaaaataaaaactctaggcatgatcgccccatcgaaaaggggccatcctaaacctatgaagccggtcatcaaattccaccggcctacaggtggagtaatcctaaatagacggaacatgatgaacaatcagcggagacttaccagctccggaggtactggcatcacgagccccagtatttgggatcgagaacgggagcttaggccgagaggtcacttgctcttttctagcctcgatctgaaggacactccctgcagcggcttggaccttgatgtaggccaattcttgttccctcttgatgagggacttcttataccgattctccgcggaggcaatgatgtccggccagatcgccttctcggagtcaggattgcaaacattggggcaaagaaccttggataagttaaagtcatccacttactggctctttgaaatcaacttggccgtcctccagtttgcagttgtgaccaagtccccaacattcaacccgtccttatcatatgtggagaagaccttggcgtgttgaaggaaaagttgagtgggggtagtgcgatgcatcg

SEQ ID NO: 173432 - DNA, 973 bp, Cannabis sativa
  modified_base (733)..(733): a, c, t, g, unknown or other
  modified_base (791)..(794): a, c, t, g, unknown or other
attaggaatatacttggttgtcacagaatatgatgtaagcgtcgtgctgataagagaagagaacaacgtccagcatccagtctattatatcagcaaaaggcttgttgaagctgaggaactgtatcctctaatagagaagctcacttactgcctaatcttagcaacgggaaagttaaggccttatttccaggctcatcccgtttgggtatacaccgactaaccattacgccaagtattgcaaaaacccgacgcctctggacggttactaaaatgggcaatatagttggatcagtataaaataatcttccaaccccgaacagcagtcaagagacaagtcttagcaaactttgtagttgagtgcacaggcaaagaataaactaacataaaaatcaatcgcgaaggctttttcaacggggttttcagcattcttttcttctctattttcttctcttttttataattaatatgtgtgaatttactacaatgaacatgagtagctaaatagttcattagggtttagatggatattgtttgacattgattattggttttaatatgatttaattccctctcaatttctatgtattctattttattcgtacttaattacttttaattgcctgatcaccaattaaatgtctatgattttgacgcgagatctgattaagtgagtgttgattatgctatagtaaaatagaactgaattttgatataggacgagagtacatatatngtttagatagcttatagggtttctgtgtttaatgcctgttacatgtttaatttatcannnnagtagaaaatttgcatgtaatttagatttatatatctgagaagactataaattaccttagtaattctggtattgcatagaaattggtaataggaagataatcatattaggccataattaatagatacaattaaaatcgaaagccctaacttttactcattgttaatttgtctattaatt

SEQ ID NO: 173433 - DNA, 693 bp, Cannabis sativa
tagcctctttcgcactcgcagaggctgcattgcagcctcaggcttcggacaacacgacgccaaggggacaaaacttccttcaaacacaggcgaacaccatcacgcgcgcgtgcacatgcctccttgtctgaagcctggtacgtgcgtcgtgcaccaactcgatactgaatgcaccaaattttcaaactgacatatttttatcgtttttaatcggaatcaagttccgtaaaaatcaaaattgcttaatttttcacaaggaatccaaatatattatttcaaagcgaaaaaaaattattttcatggaaaaaatttttaaatcatatacattaatcaaataacagataaaccaacttgaactcatccaaatcaacacaataaacaaattcatcattttaaatccatattacatgaaagtaaatgattaccatggctctgaggctagttgttgggaatattttaccaagatctcgatttactaacaagtatattgattaacatcctaaatatgaatatttctaaaataataaaattcaacacataagagtttaagtaaaccttatattggttacagcggaatataatgactccttccactcagatctctggcccttgattcttttgagtcgcagagcagtatcaagatctgaacttggatctctttctctctttcgggtttggttaccaccgtcttac

SEQ ID NO: 173434 - DNA, 984 bp, Cannabis sativa
ccaagtgttgattgatgtaagttatatcgtataaaaataagaggatatgagggataaataaaaaggatacgagggatttatagtagttcaccccatgtcgcgatggtaatggaactacgtttactttagttttattaattgaatctgatacaccaaagttatattctcaagagtgtgtagaaaatagtacaaaaaataatttttaagtgaaatctgtatcgagacttatgaacacaagacttatgggagacccaatatttacaaatttgataaagatagtaattgtaaggtccttaagagcaacaaaccaataagatactactacaaaaatggattttcctaactttttaaacattcgtttaaagtatttcgtcggtttctataatcattgcctatacgaccgtcgtaaaacgggcagaataggcaacggttcaaaaccgtcgctaatgtaagtttcccgacggtttaaaatcgtcgcttataactgggtataggcaacggtttataatcgtgccttatactataggcgacggttttaaaataattaagaggagtgttgttgtcaacttcctattacaacttcttagtcaacctccgtgcccaaaaatacataccaaaatatttttttccaaattttttttcatggctgtgtttgttatacttacaacatcatccctgtaaatttttaaaattttttgaataatttacaatgccaaaaatacgtttgaagtttttgaacgcacgtggtaaactcgaacatcaagaactatgttctcggcattcttaaactattcaaaaaatttcaaaaataaatagactaaaaattagaatatctttcttggaacttaaattagaattaataattaagttgattttattcaagataattgattatttatttctatttaaataaatttaattaaatagtaatatatatttaagttgaaaattaattttaataaattttagaccaatttaaattat

SEQ ID NO: 173435 - DNA, 531 bp, Cannabis sativa
  modified_base (463)..(467): a, c, t, g, unknown or other
gtaactcatcctcatcatctacacctatgacctctgagtctgaggctcctgccacattcggacctccttaagtcactatgaccctcaaaaaattagcatgaggagtggtgttaccttctgtgggactcaaagcatccatagaggcaaagagaacatccattgatctagctagaaaaagaaatgaaagaaacgtaagacatattcacaaaggaatcataaagataagacatgtaggaaaaactaatacccaaatggcctaattcttccctagcaaactcataaataatgttgttggtatcgtcatctcctaagaaactatctgaatgaaggaagcagcttgaggtgaggtaatatgagtggtccaggagtatcggtactggaggactagatcccctcggggacctacccaaaaggtctctaatgatggagaagtaccactctattgttggaaatattttaccannnnntagatttactaacaagtatgcttcattaacatcctaatatgaatttctaaaacaatgaaattaa

SEQ ID NO: 173436 - DNA, 564 bp, Cannabis sativa
cctttttttttaataatgggccttaggctattgcccctcttgtccatagcttgagccggtactgggctggacagacgacaccttaaaaatgtaaacggaacagaactttggaggattttcccaccaaaatatgaggttggatggttttttgcaagtaaattgatagttgaggagcttttgccgcaaattactcttttattaaactatgttttttatttgttattttgaattattttttttcattaaaataagtaatataaataatttatttagttgttgtttatatattaggtctttagctttgaaataattttcactttttaaaaaaaaaatttaaaaacagctaattaataaaaaataccataaaatattttttaaaaaatattacgcaagcgcgatcttaggcataggtgggttaggcatatacttaattagagcccacccatcccatgcaccaaaaaaaaattcttctaaaaatgcacatatataaatatatactagcaaaaaattacgtgcgaggcacgtatactaaattttattctaattttttttctatattatttg

SEQ ID NO: 173437 - DNA, 566 bp, Cannabis sativa
gtcatgtaactagtagcgtttttctctagatcatatattagggcttcaagtcatagttaatgattaaataaattatttaggtggcaagtgagttgattatttacttcctttgtttatgtgttgtataactccatttaaaaatcaaggttggtagtcaaattctagtactatgagtcaaattctagcactatgaaaaactatctcgtaatattagtctcccgttagtttcggtcctctgaaactacctgagaagaaacagtcccttcatgggaagggttgagttcgtgcttttcttctctgtttgtctggtgtgcgatttgattctcagtgttagggatatggatatggaattggtgaatcggctagctgaagttttgattcttgatgatggagatggccctgttcttcctcttaataaggtcggggttgaagaaggtaaaaagaggttagatttgtgtttgattgggaaagttattggccctagacctgccaataaagatgggattgagagagcaatgaaaggggtttggaaaattaaccatagattccaggttgaagagttgagt

SEQ ID NO: 173438 - DNA, 884 bp, Cannabis sativa
  modified_base (60)..(62): a, c, t, g, unknown or other
agataaaatatgtccattaaatagcgctccaatttgttttatctttttttttttaaaaannnaaaatatatatttatatatattttccttgtatatgatttttatcccctaactaaactattactactatctcattgtgccatccaaattttttatgttgttttaagttcctcttgaaccattgtcactactaaattatacttgtctatccaaaaatatttacctgacaagcttaaaagttgacaaatagtatctcacatctccaaagtatgatcattgtatatttgtgtctattatatttacaccatagctagatataacaatttaatttaatttaatttaatcataatatattgttataattttgtacacttaagaaaaattattattttattagtgttttaaaaagtgtgttaaatttaacaaatgctaaaaattatgctaaacttagtacaaaatatagtggaaattgcattgtatacccatattattttatttatttcaaatttttactttcatttcaatattctttaagatatacttacttttatagatgatgtcttcattataccctttatataaatataaatcatttgctacacttaaatggaaggcaaaggtatattaggcaactcactcataaaagtgggtagatttttatgaaatataatatgagagtatttttgattaatggatacaaaaatgtggtattcttcaacttattcccaaaatataaactaattattatgtcaaatttagcacaaattttaaatcttccattaaacatagcctagtattaaggaaaattatagcaaatggccccaaatcatatgactatgttagtatatgtcctcatttcgaaaaatatagtaaatggtcctaaa

SEQ ID NO: 173439 - DNA, 675 bp, Cannabis sativa
cctcaagtttagaagccttggaaatatcaaaaacaaaatctgggagctcagagtaagtacccaacgcctaagttgacaaaaggtctggtatgctgggttctgattatccgaatctgatgtcattttgaccgtccatctagtttttcacaatgacaataatttatgaagttagagaaatcaaattcacaactttgcatttctcatttctagctcacccagaaatgtagagtttcaagtctcccatttttgcaaaacagcaacatctttgagaactggtgaccagctttgtcagaacacataaataggttaagtgatatcaaaatatcacttaggcatcttatagtacatctcttggacgtttttacacttatccaatgtgcaggttgacgtcatatgtcaacatgtacgctggaatgtcattttgggcgctgggtcatgaactatttttagtaaaacaaccataactcactcaattttgatctgattgatgcgattcaacttctgtttggaagttaattcaatgctctatcaattcatatctcacactcctgatgtagttctaaagttatcatcatcaaaatttaccttaagagaatttcgaaaacaagcttcgagtaacctccagtgggacacgtcaggctctgaaaaatggccatcactaccaaaagctaattt

SEQ ID NO: 173440 - DNA, 747 bp, Cannabis sativa
  modified_base (515)..(515): a, c, t, g, unknown or other
ttcaaatattttggtaaaatttgttaaactacccatttcaaatactaaaatttgtaaaataatctcacttaatttactctatgcgaccatcattatggttgttttgcaaccataatgatcgtttatagtcgcacagtgtaattcataattgattttgcgaccataaaacgttattatgctaataaaaaaatttactaagttattttgttaataaattttttctatttttacaaaacactcaatattttgtttatgttttttttttattaaatatttaatgtgtttttttattctaaaaaattattgatttttttagaaaaaatctataataataatgaataaagacaattaattacaatttaagtcatgaaatttaatatttacgttagtgtcttttattaatcaataaaaaatgcacattaaataaaaaaatatatcatcaaattatttattaaagatcaatgtcttttcattttttataactctcaccaccaccactaataataataataatnataataataataataatataagctgccccttcatattttattttcttatattttgttttatgtaatatatagatatagattaatataaatattgatattagttaaaaaaagttaaataattaatattataaaaataaaaatataattaattataaagtacttataataatattataaatattgattagtttttattgttattattatcatgtatatgttacaaataatatca

SEQ ID NO: 173441 - DNA, 577 bp, Cannabis sativa
aactaattgttaagtaatctaatatggatcgatggttgtcgtcaacaaatgatttaaattttaatttaacatatataaaaatcttattaaatatataaataaaatgtaaaaagttattaaaagtattaatgagtggcaacaaaattaaataaaaaagtaatatttattgtagtgtaacatttaactcatgttatattttatgttaaatttaacataatttttaatatatattaaatttaaaccacaatacatactattattagaattcaattttataaacatagctaaaatttgcaccatatttttgctttcatatctcctttagtaaattagcaacataaactgttgacagtatttggctttaattcttttgattttcttattttaaaatttgaaattaaatttaatcgtaaaattttattaatacactcaagtctcaactatacaattttgtccataccaaatatgaattttatttaattattattattattagggtaaattacggcataaatacttaatgtttctgattttatatacttaaatacctaatgtttattttttgtggcaaaaatac

SEQ ID NO: 173442 - DNA, 664 bp, Cannabis sativa
  modified_base (247)..(248): a, c, t, g, unknown or other
gccttatgacatggctttggtaagctcttcttgattctcatattattttttgttttcactacaataaattttatttttagttacaataaaatttgtgattaaaagtaaaaaaaataaaattaattataaaatatcattcatatgtaatgactaaaaggtctgtgactaaaggtattagtcacaaaaatttcaatttgttgtaattaaatatacttttagtcactatatttgttgtgactaaaactannttagtgacaacttgtaactaaatgttatattttagtcacaagtaacattttattatgacttaaagtcacatttagtcataaaaaattgatgttatgactaaaaggttgtgagtaaaaatagttgttttcttatatagtgttttgccaaaattgttgatatccttctgtctgggtgttctttattttcttcttatcttcttccttcaaaggagtttttgtcttatttctttttgggacattagaaacatctcaattggcttaaactgcttttgtgtttgtaacatgactatgcttatccatgttcaaatttagggattctcaaatttttgttggcctcatagtttatgatgcgattgttgtcgttatggttggtcgtttgattatttttttttttttttatagattgaataacaggg

SEQ ID NO: 173443 - DNA, 529 bp, Cannabis sativa
ggtttggtcattttctgcataaacgaaggatttccagcaagctctttatgatttcaagctcaaggtaatgttctagctcacctcttatttatttcttaaagttcgagctaggtatcttatggtttttctttgagattaggtgttgtagttgttgttagtgtttgttcttgtttctaaagttaattcgaggttatttacgttgaattgaggtagatttaagggttgttgtggtgtttgagcaagctttgagtttaagaactcaagcttggctctttaatggtggattttaattttgagcatgttagcttgttctgttgcttggattatgttctttggggtatattaagcaggtctagaaggtctggtatggtttagattcgaattggtttaggttttgaatttttttgggttacctggtgtaaaccggttaatcagttttacaggccttataaaaccggttaactagatcagcagctaggttcccaaatttttcatgttgtcgattcgtgttagtttcaaagctttggtt

SEQ ID NO: 173444 - DNA, 525 bp, Cannabis sativa
gataccatgttagggagctcaattataaagattttacttttagttctcaattatatagattcaaattttgtcattttaaatcgtgactggattttttttatttctcaattgtacactttgtatttatttatatgtaatgtatatattggtgcagacagtattcttacattgtactcgacgatggaactgagttgctagatgctgtgatattcggagatgttgcagaaaacatattcttatgtactgaagttcaattagagtcaatattcggatgaggtaaatataaaaaaaataaatatataaaatttataccttttcataaatagaagtatattaaatcttattactaattatttttacagaaacataggttgtttgtccaaaaaaatatggataaattatcggccaaaaaatggagagttcagttgtatgtagatccaaaacgaacgatgagttcaaagtaaaatcaatacaccattcaagcagctaaaccaatggaagagtagggagaagtttcactatata

SEQ ID NO: 173445 - DNA, 1078 bp, Cannabis sativa
tccaaagttcactttaaagttttgaaaaagtctctagtgagtcatgggtacaaagctaaagtttagtatagatttccatccttagacaaatggtcagtccaagaggacaattcagattttagaggatatattgcgagcctatgtaatgaccgcttagcctattatagtgggggaataattgtaatgaccgcttagctttattttgagaattaatagataattagggtttatttttagaattatatttttaattatttttataattatggagatatatttgaattctaggtgtattaattttgatattgtaaaattttatatttttcatatgcatggcaatagtggaatgtaacgtttggcctatagagtcacttagacaaggtatagtatcttggttttagcagggcaatatagttagatattagaaatatcgagagtatttggggttatgtgtttggaccatagtaccctaggcttcaagattacttcatgatgaagaaaggggtaaattaataattttactctagttttgtcttatgttatgtggtgagtggattttttagtaatcctatgtttaattaagtattttcaacctcaaatgattccatcatttattccttaaagcattaacatagaaatcaaactcccaaaaacatataactatttctttctctctctttggtttgttcggccaaacttaggacccaagaacatcaaaattttcctatcatttcagacaaaaattaagaaggttagcaagaattacttggtaccaaacctaaagtatgctctccttctctcttttctttaattttcataagaacttaattaggtgttcataattattttgtgagtttagcttctgtatattttgggttgaatggaaatgttttctgaggttgttttgaggacattcaagttgttttaagtatgtttagttggttgtgggtattaagttgtttttagtattattttaaagttaatttagttctactcttgtttgaagcaattttatgtttttgtcttctatttttgcagatttaaaatagaagaagattagaaaaatatcagagaaaaa

SEQ ID NO: 173446 - DNA, 507 bp, Cannabis sativa
gaaaaaacttattttcattttggaggaaattaaagaaaataccaaaaattgggaaaagctctctcttcccttcctttctcttcgaaccagcctagaacaaaggaagttgctactgatttttggtgttttcagcaaggattcagagggaaccaagccaaggtaaaccctagatactttctagatatgttttctcaagattttaattagtttcaagtagtgattttgtaaattaatggctgttaggtttaggttgtttgttagttcgaattctagggttcatttgagttggtttcagcttctagcagctggtttagtgtataaaattagtttttctcaagtttgagcttggaactaaaagcttcggtctttaatggcataaattgatttaatgtgtttttaatgtgaattactggttggagtatgttgcttataccctaattaggtactctggaaggtttggttgcatttggtggagttttgagcaagaaatggaaattttggggtgaa

SEQ ID NO: 173447 - DNA, 540 bp, Cannabis sativa
ccttggttattttcttgtctcctggtcttggaaccctgagtttttcgtcgcagtctccttatagttagacaatgttggttttgaggaactgtcccctgtgcagccctggctgctgcgactttttactccaactcagtgtttcgtcagtttgattcagccaatcgttgtcgaagttgcctattctctaattctactagtggtacgtatctggtaggatcataggcgtcctcactccttctttctgggatttaatcaccagcaacattgaaattaccatcatttctttctgaacgtggtgttttagacgtgttggttctctgggaccccataggttctttactagtacgatgggttgtttcctctggacgattaccatcgtgtaggttgttatcatccatttaatacgggtttgtatttgtgttcataaggatcgatttttttgagtttttatgaccaaggctctcaatgaaagcaccaaactgttaacgcatattttcgttaaccaaatgaatagcctttttgcaataaatacactacaga

SEQ ID NO: 173448 - DNA, 588 bp, Cannabis sativa
gaattcaaattctatagataggctcttaatttttcagttgtctaacaaagtagaaaagtagattatcaggttatcaaaataagagtctatcattatctatttaaaggattcctctagggttagggtttaaattatatggaattaaaaaagataaaataatagcttaaaactcccttaagtgtccgaccatactggtgggccccatagttttaattttgccatttatttaacaatttatctttttctttcataaatgtcatattttcattttaactgtcaactgctcgactatcccatagtacgagtcagtacagctaatttggacatggaactttgggtaccagctatcaaacctatgtgcaatgcgatttatgaggaggggattccaggtgtagaaattataacgactatctcaaaacgacactaaagtgttacgctcggccctaagcactgtgggtgacaagccacattgattacctcaggatgctccttcttcggcttctcgagggacgacgttctggaggtaatgtgcccgagccacataatcctaatctttctcgtcgactgggacaggaacctgctgccaag

SEQ ID NO: 173449 - DNA, 602 bp, Cannabis sativa
aaaaatcaaaacacaaagaaaaaagcaaaaaattaaagtaaagaacaaaagatttttatacaggttcgaccaaaccaaagggcctactttttgttactcccatagttattgacttatcttctccattaaaatgatgaattacaagcttgatttgttgagcgcacccagagaacaattatagatgaataccattgaaactcaacttcagtttcaactccaagaacagtagtcttggtctagtttcccaactttcttcacttagttttttttctctctctttctatgtctctctccgactcgatttcactctctcacaattctatatgaattgtgttacaataacagaatgattaaaggcctttaaataggcaaaacaaagactaaactagctatcgagtgcactaactaacataacaaaatgctacaacatttaagacaaaacttaatgaaccaacgttgtagcatttgaactcgataacagttttttgtcaaactgttataatccaatttttttgctctatgaattaccaaacaataaattgggggtgtttgcggtgctggtggtgcggtttttgataattttttcaaattaacccgcacat

SEQ ID NO: 173450 - DNA, 704 bp, Cannabis sativa
acttacaatttatactttaggtcaatcacaataggaacaatctcactattttattaataatacccaaacgataaaccttaaaatctttctctgtgtttaagacttctcggaatccaatcattaacttaccaatttttgttgttataagaatcctaaatttcggcggcaagtgagaagaagagaagagaggaaaaacctatagaaccctagctttgtttcgagtcagaaggaggaagaagaagaagagagaaaatattgtatctaaaacaattaatattaaatgagtataattttcatgttaattttttttattttaaccacaatattaaaatttacactaaaaaaatacttcttattattatattattttattaaactatctcacactatacgagcatctccaaggagcacatcaaatttggtgtcctagtatcaccaaatttgatgtcaaaaactatttttactctaaccacaacaccgaaaattacaccaaaaaaatattcctcattattataatatttttttaataaaataaaaaaataatattatattaattaactaaaattaccacaattaactaaatgcacccttccaaataaaagagtcacacattcaatagacagtttgaattttatttttggcgggttaaatttttttgaatttttcaaaaatatacaggttgtcttaaataattataatgtaca

SEQ ID NO: 173451 - DNA, 693 bp, Cannabis sativa
ggatttggactcttgaaaaggatgagaggttctcttgtagatctgcttatcttactcaggccttggaaagagctcccttttgtgaggttgctccctcactttggaataagctttggaatagtaaagttttagagcgccataaggttctttggtggtgcattctctccaatgccctccctgtcaggtctgtaattaggaaaagatttcatatcgaggaggcgagatgccctttgtgtgggagggaagaggaaactatgaaacatttatttcttacttgtgatgtggctttccatgtctgacgatcttcttcttggggtatttatccaatctgtgacactggtatccggatgtgggactgagtcaaattcatttgggacttgaaacataaggggattgatgtggaggaggttttcctgtatgcctcacttgtggtcgacagcatttggcgcactcgaaatgaaaaggttcataataatctcactttagatgtgaagaagtgcattgactctattcaattttcttttgcagaattacatgctactattttcccttcccctgtcccttgcctgaaggagtgctagtctcccccctcatgattagatcaaactgaattgcgatgttaaagtggggcttgatagcatgtgtatagcagttgttgtcaggaaccacttaggcgaggtggttcgagttcat

SEQ ID NO: 173452 - DNA, 513 bp, Cannabis sativa
taacacaatcttttttaaagttgagttgtactaacttttagttgtatcttatttataaactaggaaatatgtcgcgcttcgtgagcaattatttaaattgtgccaaaaatattaataaaagataataagtgaaagttgacaatatatataaataataaatatatatatttaataagattataactttaataggagtgtttattggaccacatccaatgtttttaggcctatctagattcgatccaattatatattggatgttagattttaccatccgatttgatccaattaattttagtcatccaatcgatccaacatccattgaatgagttctatctgttggatgtattttatatatatttatttgtttaatttgggtttattcaatactttagatctagtattttttagatcagatcatatccatctattttaggtccagtattgaattggattcatccaatctaagaaaaaaagagtaaaattttaatgttaattttacatatatgtata

SEQ ID NO: 173453 - DNA, 537 bp, Cannabis sativa
ctcacttagtgaccaaacacaacattatataattaggtatttattggtatccaaaataatttgttgtattatacttgatggtatcatagtcactgatatgaaaaaaaaactaattggtatgtaaccattaagtttaagtactactaactattattaaaaaaaactactaattagtatctaaacaattagtaattattacaaattgttatatatattactagtaacaactctacgtgtaatgcacgtaaaacacatattatataattaaatttatggtgaaataaagaaagattttttttttatattagtttcgaagtaagtaaaacgtaattttccaaaaaaaaaaaaaagagaagaaaaaatatagaactcaaacatgccacttataaatctaacaaaaagtgattattagttttgtgaggaataacagagagagaatttgagctgaatgatattcagtatattgagatgagtaataattcaatgtatatatacaagcctaatacagttacaaagctaacaaataataacagaaaa

SEQ ID NO: 173454 - DNA, 638 bp, Cannabis sativa
tttttgagagagaaacttagaagagggattcatggatataaattataccaaaaaggaaatgcacaaaaataaacttaaattaaatattgtttccttttaagtacaaaggattattaaagtgccgaataaagaaaagtttgaggacattgtaattgtagtattagtatcttctaaaaacttattattttgtcagtgtaacttcaaatgttgtgacaagctaggaattcggggataagttaatttaagtggtgtttggcttaaaagaataaaaatgtgtttggattaaaagaataaaaatataagaatagaaatgagaataagaataataataagaatatgaatagaattaaattaaatttaaaatgcatgaaaaaaattaatagaaaaattattgatttttttcttatatagcattaaaatagtcttttttttttttatttttaatttcaaaataaaataatcattttactattttaatacttaaaatacaactaaacaaaagaataaaataaaaattatttcattttcattctatttatttcattacttctaattaaatactgttaagtttggtagttgctaataacttagtagttattatatatataaggatatgattttgtcccgttattgtactt

SEQ ID NO: 173455 - DNA, 857 bp, Cannabis sativa
gtcagatttaccaccataaaattgttttttttcttcttctattatctcataatagttctttcaaaaaaaaattatctcataatagagtaagagttaattggatgataatatacatagtttaaaatgtaaaagtaaaataaaataacaattaacatttacttttgtgtattaagatttgggtaaataaaagaaaagattatgactatgcattaaagtttttataacatatcaaaactagttaaaaagaaaaaaaagaataacaatcttaactaatgtcagatttttatataggggaaccattactttttagtggaagataattttttattttttattttttattttataatgttgaagatacccaaaagttacattttaacatttttaaatgagtggtgcaaatcttaattgtttctagtgtatatatttttgtttaaggcgtgctgagatgtttcaactgatgagcacaacaaagtttaatggcacttgacagggggtgatgcatatgctaattcttcataattttacaaaattatattatatattttgtgtagaatatgttcactcatttagatgtatatattaaatgaatgtatgtataatgtgttaaatgagttgtaataaattttaatacttcaattattgcccgaatatattgactatagagctagacttcttcaatacatggcttattttcttatcatgcataaaaaatatagatttagggttagattcacttttattttttttaaaacggggttattagttaggtacattttttttttcaaatgtttttttaaaaataattaacaactttttaaatagtaacaaaacataatctgatttcatttgaaaaa

SEQ ID NO: 173456 - DNA, 663 bp, Cannabis sativa
tggacaaagttagaagaacaattttataagaaatcattgatcaacaagatttacttgaaggaaaggatctttggatttaaaatgagtcaatctaaatctctggaacagaactcgaatgagttcttgagattgcatattgagttagcaaactcagggaagaatgaggccttaagtgatgagaatcaagcaattataattctcaattcactgccagaatcctacagggaagtcaaaacaaaaattaaatatggaagaactgatattactcttgaagaagtaatctcacctctgaaatccaaagatttggagctaaaggttgaaagacctggacattctaatggggatgtcaacctgagtaggggaaggcctacacaaaagaaaccatggcaaagcaggggcagaagcactagtagaggttctcagaagggaaataatcaccacaacaaagggagatcaaatttaaaaggcactaaggatcctaatgggtgttatcactgtggaaagctagggtgtttcaagagagaatgctacttcgacaagagaagtaatggaaaattaagtatagatcatcaagaggaatcaaacaagcaaaataagactaagaatgactatcaaaatgcaaacctaagtgatggctatgatagtggggatgtctatgtggct

SEQ ID NO: 173457 - DNA, 543 bp, Cannabis sativa
  modified_base (496)..(498): a, c, t, g, unknown or other
acaaagatacgagcatttgaatattgcgtttgaatctgcccaaaaacaaaggggcgggccgcgacactccccacacagggccgcggcacctgggttggaaacccaggctttcagcgagggcgggctgcggttcccaatgagtggggccacagcacttgggtttcaaacccaagaaaccccaattttcaaactcgaacataagcacaaaacacacataaaccacccaaaacatgcatagaactcaaaatcgtaatccatggattaataggtaccatagtcgagcattaaattacataatacaagcttattctcatccacacaagcatcataaaatcagattagccatagtccataaaaagctccaaactttgagctaaaaaataacacaattccatcttcaaaaacttgcacaaccaagccataaactcatgcttcaaataaataatttcagagctacgaaccataatactgttcagttttatgccctaaataaaannnatttcaatataatcagatttacctattaataaagatcagaaataa

SEQ ID NO: 173458 - DNA, 856 bp, Cannabis sativa
  modified_base (644)..(645): a, c, t, g, unknown or other
gccatcctctgtacttcatggtgacattccacttaaaattctttttcctaataagtcattgtttccaattgctccttcggtatttggcagtatttgttttgcttgcgatgtttgtccatttgtcaccaaattcaatcctaaggcataaaaattgtgtctttcttggttattctcgtcttcagaaaaggtataggtattattgtcctaatctcaacaaatatcttgtttctattgatgttacctttgtggaaaatacaccttatttttcatcttcaactagtcctactcgtcaggggaaggataatgatttgttggtatattctgtcacatgctctacgcttgatacatgttctgacgagtgtcttgttccttcacttgcctcagtcataactcccacaatgcctacacctccaccacatccaccactccttcagcctcctatagtgtacaccaggtgtgcccctcctccacctcctgtttcatgtcctgcacctgcattttcgtcatcatatctagaactcaaagatgatcctctcattgcactacgtaaaggtaaacatcaatgtaattttcctatttattcttttgtttcttataatcatctctcctcttcttctttctcttttattgcttctcttgattcnntcactattcctaaaactgttcatgaagcaatgtctcatcctggttggcttgctgcaatgattaaagagatgaatgctttagttgcaaatggtacttgggtcttggttaatttaacttcagaaaaatgtgccacagggtgcaaatgggtgtttatggttaaattcaatcaagatggaacaattgctcacttaaaggctcgtcttgttgccaa

SEQ ID NO: 173459 - DNA, 638 bp, Cannabis sativa
cctaatttttatcaagtggtacaacaatagtgataagattattaattttaagtatatatttttaattattataaataatttcacgtgatgagatttaattttatatttattgtattatgatttatcattgtatttatgacacatgatatacatttattttttgtattgtataatccatcatattattcctaagaaaagaaaatcataagaaaaaaaaatattaaaaagagtaatttgcggcaaaaatacctaaattttatcctgagtagcagataaatacctaagttatatttttgacggtaaaaatacctttcgtcacacttctggaacttccgtaggtacctctccgttttcttccaagtaagtgtccaggtgtcacccttttattagcccacatcattaatttttattttttattttaaaattcattaaaacttatttaaaaattatttaaaaataaaaaatatgtatttaaaatgtataaaaaaaataaaaataaaaatatattctgaaacctaaaaattattctaaacttatataattaattttttttctttcatttttttaaatgaatttttcttttatttcttgttccattcttttctctttgaattaaaaaggaattccaacataaatta

SEQ ID NO: 173460 - DNA, 832 bp, Cannabis sativa
gagtctaaaacctgatctttggtcttgctttgtgcgagctatagggatgcgactagactctgtcaaggtcacatcatctcgctgtgagttgttcaggcgagaggtttacacttaagaggtctcttgctgacatctcatccctccttcgaggatagtgagtccatgtgtcatttttatgggagcctggtctcgagtttctaggtggaaaattctaactatatcaggtttgaaaaatcaaattgtgggtgacaaagagagaaataaaaatgaactgaaaagagaaaaaaaaacaacaaagaaatagagggagagaattaacgtgtaacaaaaatgggaggaaagcatgatatcagcaaaaaggtaaaattgtaattaatgaactttttgaaatttaaaaataaaaaacaaagagtgcgtttggtaacaagtttttaatttgttttttgttttttaattaaaaaagtgaaaatattttccataaaatatattctataaaactattttcaatttttcaattgagaattaaaaatttaaaaattttgaaaacaaaaaaatcactttcaaaatttttgaaaatattttttatttcttaattaatattttggactccgactccaactccaacctaaaccttatgacccagactccgaccccgactctactcggaccacagccctagacccgaacgtggactcgacttaaataaaatcataaaataaaaatgaaaatgaaagttttttttttctttgagaaaataattgttattataaattagagagcatcatttacatcaacagagaaaatggtagagggaatttcctcaaaccacata

SEQ ID NO: 173461 - DNA, 737 bp, Cannabis sativa
ttttgtagtaaattttaaaaatcaatttattagatctttaaaaaagtcattttcaatgattaaaaaattaaaaacgaaattaaaattttaagactaattaagtaattttaaaaaaattattatttttattaaaagatacatttagatataaaaaagtatattaaacattcaatttttgtaaagaaaaaaaaaactatattttgccgaagaacaagtttaagtctattttttaggagtgcgagcagcacatgcaattttacaatttcttaaattgcaactgcagtgcaaaatctcaaaatcgcaaaaatacagtgcggtgcgggtgatctatactatcatcaaataaataaataaacaatatattaaaatttaaccaacaaaataaaaatacacatgttaaaattttaataacgcgccaatttaaaatacaacaaaattcaaactaaaatatatacaatcttttaccacatgaaaaaaaaatgaaatataatattgggtgattctacaatgcacccccttaaaatgaatgtattgatgcaccgttaacttgtttcagcatctagaagaattttttagtctactttttcatattcatgtacgttatatctatttaagatatcttacaaaattttgaaagtttcggaatagtttacaatgtagaaaacaatgttcaaacagtctattttacacgcgtataaaataaaatagtcacgtgtgcaacacattgtttgaacgta

SEQ ID NO: 173462 - DNA, 650 bp, Cannabis sativa
gagttcaattttatcatcctcatcgtctagattgggatacaatatacgagaagtttcaaggataccctgatagtcttcaatgggtatatgttctagacttattattttatgttttgatttaatgtaaacacatatggagatccattgggctatggtaaaatgataatcagataatacaaaactctttcgctacgtacctgatttagtaccataaaacccacacttgagtttatctttggacacttgctttggaaacttcggtattgaagcgctggatgtagcttcacaaactttcttgtcctacttacttcacattggtgatacttgtgacaggcataatgttatcacatccagtttgatgttgttggaggaattcgtctgacagttgtttccaagatgtgatcgtcctcggtcctagctgcttgaaccatttatacgcagatccttttaatgtgatcatgaaacattgacacctttccttacatgacaccttttcatcttcgttaacttataaaatgtgccaagatggtactttagattagtggtaccatcatatggtgtaattcgtgactctttgaagttttgtggaagtggttccattttaatctccctcgagggaggggagtcttcatcaaactcctcatcatcat

SEQ ID NO: 173463 - DNA, 661 bp, Cannabis sativa
ccaccagtttgctcctttcatctcttgtccatccttattcaaatctgaagcttcttttaattttaggctccaaaccactcgagagaagacaaagaggtctatggtcagaagtctgggaagagcaaaggatagctttaggaaacagattcaaccaagctccattaatcaatcctttatcgagagccgatttcacatggcacctaccagaacggtgattatcccaagtcatcttatcaccttgaatgggcatattaataaggcctcaagaatccacaagggtaaaaataaaggggataaaggggtccctaccggaaaacccttcttgttccgagtcacttaaaacaaaattagtatcacccaatatcaactagggcctgtcaaacctatccataatgtccatcaactcagtccaaaacttcttcttagcattttggtaaggagggccatacacacacgagaggagccaagggtgtgacggaggatccgaataaacaaaaccagtgatatggttatgagaacaagagatacactcaaaatcaaaaccaaacttccaagccaagataattcctccagctataccaataggcggcacattaatattaaaataaaagtggagggattttagcatacgtaccagaggtgtagcatccactttaagctc

SEQ ID NO: 173464 - DNA, 555 bp, Cannabis sativa
gctcactcttaagtcgattactgataagtcgatacttctcaaacaacagttttcttgatgccccttatgggcactcaccatcacttacctggcagggaattctccatggtcgcgatcttttacgagctggtctacggtggaaaataggagagggacgacacatcaaatgtgctactgacccgtggataccaaaccatcagagtttcttaccaatttattaccatggacctcctgaagctcttgtttccagtttgatcactgaggatcgacaatgggactacaatatgttgcagcagcttttttcaagtgttgatgttgaccgtattctcacaatcccactaagttttttctccacagaagacaaactcatatggcatcctcacatttcaggtatctacaatgtacattcaggatatcattttgctgccacacttgaagaaacaaaccactcctccctatcaacctctcccacggcctggtggaactattttggaaattacagctgccacaaaaaatcaaaatatttgtttcgagagtattgcatgaagcactacc

SEQ ID NO: 173465 - DNA, 565 bp, Cannabis sativa
  modified_base (85)..(121): a, c, t, g, unknown or other
ttttttataaaatatacaagatttggattttagtcaaactactactactgtgagatattctctattattattattattatcattnnnnnnnnnnnnnnnnnnnnnnnnnnnnnnnnnnnnnttattattattattattatcctcaaaaatatcttcatatacttttataaaaatatctgagatatactaattccgagattttaaccaagtaggaggacactaaaaaatcaaaatataaaaaaaaatattaaatataacaataataataaataatttttaatattatattataataaattattttgaataaatataatatttatacatatatatattacaatttagaatttatatataaataaatttataaattatgtatatattttgactataatataattatttttatataaaaatatacttacttattaaaaaatgtataactaattacaatttaaaaattattcttatatataattagaaatttaatatttttataataaattaaagtttttttttaaaaaaaaaatagagtatttttatggggttttttcattaatgtaca

SEQ ID NO: 173466 - DNA, 595 bp, Cannabis sativa
  modified_base (286)..(297): a, c, t, g, unknown or other
atttggatgaaaatatctgaaatcgggttgcacacacgcgcgcgcacgaggtcctacacttggcatccacgcagttttagacaacctgaccgcggaaactcggacacgggctgtctgaaaccgtgtcacgccaagttttctcggccatagaggctgcacgcagcctcctctctcggtcaggtgctcactttcgcgcgtgcaggggtatgcaatgcatacccctgtgcaccaaacttgttttcatcataacttttgaatcaagaatcgtttttcattgaaacaaaannnnnnnnnnnntagaattttgtgtagaatctaaaaattttaattaaaaatctaattatcagaataaaattaattttaattaatttttaattaattaaaactagttttagatattagcagcctttgaatttgaaaatttgatttttccacaaaaatagtctaatgattaatttgaattttgattattttatttattttaattataagatcagaaattacttattttattattaaaattttaaatgatcttattttgatattaaaatattaataaaatttagaatactctagtttaaatttcaaaattttc

SEQ ID NO: 173467 - DNA, 545 bp, Cannabis sativa
cattttgagtttcattagctttattcaaggtgttctagcaagcttttagtgattccaatccaaggtaaaacccctaagccgttctcttattgatttcttaagttctaagttaagtttcatgcatgtttttgggatttaaggttattgtagatgttgttttgtattgtttaagtttttgaaatgttattgatgttgcttgagcagaattagagttaactggtggtttggttatttagataaggtttgagctttagagctcaactttggtctttaatggtgatttgtgtatctgtgggtatttattgattttaatgcatgggctttgtttattgtgagctacttagcaggtttggaaggtttggtaacatttgagattaaattgaattgtttagagtgagtttggtgtttcctgcactgaactgaaattccagttcaaggggacctgtaggaattggaattccggttgaagccacaaaaccccacagaattggaatttcaattggggaacaggtctattggttggggcattttagggaaccctagtt

SEQ ID NO: 173468 - DNA, 746 bp, Cannabis sativa
agaatgctgaggtggattgtactcttctattttttttataaggtgtcatgtttatatctcatttgaatttttaatttataactttattaattttagttaagtttaatgtatttttatcttttataattttacacatcacgtgtcaatccaatctattttctcctcaccgattgttatcatccatccatagctttctttttaatgttatttaccttaacagtaaataaaattaataaaaaaataaatatgtagacttcaattttccttatttcctttaactgctctctcaatctaaattgctactcgtcgacaaagattatccaagatcaatgcccacaacaatgctagatcactgagatcaggaaggaatagatccatatattaattctactttatcacatacgatatacatattgttgccctgattttttcccaaaatatgtggccgctgctatgtatgacacgtggacaaagaagacacctcaccttgagatcagttaagggttgtatagaagaggcaataagtatggttcgaagagttagctcccggacaagtgcaaaaggcacgccttcttctccgggagttaagatatagtaaggcacctccgcgacgagagggacccattcgaacagtcacttcgcattaaatgtagcatggggaaaacgtctggaaacacccataagaggacatgtcagacatcgtaagcctgatttaaggtgattacacgataatcaaaggggctagt

SEQ ID NO: 173469 - DNA, 548 bp, Cannabis sativa
cttgtaatcactctgttttagatcttgtacttttgtttttcttttcagtagatatagcaatagcaggtgtggtcactttgagcttttcctcatattatgttttgtaatttcctcttgtgtaaatgaaataattaaaaatttcatgtttataatgtagtgcttactactaatacaatggcaatattgatctttagaaaataacccaaaactacaaagataacagaagagaatgaccagaggcatgataaaagaaagagtgcaatataatttttagcagtatccttgcatttctaattgtcatgtaatatttatttcctctcctagataatttcctgaatttcatcttgaggttttcagtttcgatccatgtccttgattagttaattttctttcttttgactacgtctcactacttttatgcaccatctttctaaatgtctacaaacttgtaaaaccacataatgatactttcagctatcatatctacatggtaacaactatcaagtcaagtcatgcactttgaactagctgcattagaagtcaataat

SEQ ID NO: 173470 - DNA, 743 bp, Cannabis sativa
  modified_base (622)..(623): a, c, t, g, unknown or other
  modified_base (718)..(718): a, c, t, g, unknown or other
ctcgctaataaaagaattactgaacgtggaacatttatgaccatactaccaataaataaaggatataactcgcattactgatgtaaaatttaaacttcagttatgaataaaatagaatcatttatattaagtaattacaaagatttaatttttaaaaattacttaaggggcatttatgtatgattaaccagaattcatctggaaatacatggtataatgcaaacccgccatttcaatttttttttttaaaattcaaatgttctcgactaaacctctttgacgaaagaggagtcgaactgttataactccctgaccaaaactttttgatgagagaggggtcgaattgttataacatcttgattaaaccttttttgacgaagaagggatcaaacaactataatttttgattaaaaacctatctgacgggaaaggaaaatcaaaagttataactcgtgtataaaactgaatactaacggttctcgtgagctaggaaagtgcaaaatgaggcatcacaacaccttgaaaaaagtacttgagcctataaaatggatagataatctaactattcatatgagcaaattaaaaatatacaaagtgacaaaatctttaaagtatatttaannttgcttaaggcagattataactactatagtgaggcagaatcgacaaactgctcaaaaataaaaataaaaagaagtttgtgttgggttttatgccntaaataaaactctgtttcaatgtaa

SEQ ID NO: 173471 - DNA, 627 bp, Cannabis sativa
taaacaaaataatttggaaggctatttactagtaatatatctattttttatgtaattaatatatataaaaatatagaaaaaatttagaatgcacatctttaaaagaaatgtaccgattcacttatatctgttttggtatttgaataattttttagtcaattttttttctcatgatcatgtacatcataattatttaggacatcctgtaaaattttaaaaaattcaaaaaaaaaatttaacacagcgaatgtagggttcaaacagtgtgtgtgcactcgtgtgtattttattttatacacatgtgaaatagattgtttgaacactactttctatattataaattatttcaaatttcttaaaattttgtagaatatcttaaataactataacatacacaaatatgaagaaaaaaaaatggactaataaattattctcagtgctgaaacaagtaaatgatgtatcagtacatccatttaagaaagtgtattgtagaagcacctaaaaatatatagataactttttaatgattacaactccctacgtttaggggtgagcataaaatccaaaaaatcgaaaaagccgttcaaaccgacctactgaacaccgttggaaccgaaaccgacgaaa

SEQ ID NO: 173472 - DNA, 1051 bp, Cannabis sativa
cgttatatataaatagagttaatataggatcaagcattaggggtagggatggagtacatattcaaaaaaaattaaaaacaaaaattatttagtatttataatttggctatcctcattttatttattatatttatttttattttttatttttgacgaccaccttcaagttaattatttatatatatatatatattaggttgatgttacgtacaatgcacgtataattagttttttctttaatttagttcaattaggtgatgttaattattagtgcaatacatgcctgcttaatttttttaattatgtattgtattttttttttaatttttgaaatggcatgaagtttgagattttgatctttaagaaaaaaaatttagctattgttacattggtgtgtcatttgaatgtgattatatatgtacgtacgtatttttaatttttttttaattagataacgtatgatgcatatattgtaatttattatattcttaaccaaaactcacataaccaaaattgagtgtgtctatatataggttgaattcgtaaatttgatgtaaaagttttttattcccaaattttacgaaaaatatggtgtatgaatcgatttaccataactaaaacagaaagtaatcaattccttattacaactattttaatttaaaatataaaataaataataataaagtttaaaatatggttaaaaatatttgtaatattttaaatttaaatttttgtatataaaatatcaacataatttttctttttattttaactttttttttaaccaaaaaattaacctttattaaatcaaatcagctaccaagatagcttccaaaccagcagggacaacacccccgcaggaaacacaaccaggaataaaaccagtagaacgagctaaaaagttaactgcctggttcccagaccgcttaacaaatctaattgaaatggaaaacaaaagagaggattgcataagagcaacacaatccgaaattaaaagccccaccggagacaacaaacgcttcttctattgcacggctcgcaccagcagcag

SEQ ID NO: 173473 - DNA, 528 bp, Cannabis sativa
tccctatcgacccgagtagagcgacagccaatagaggtaacctctgacaagtagtttgagtagaattcaatcgtcccttcaacgatgtatgattcaataatacaaccctcatgcctacttctatttctgacataacccttcaagattttcatgtattgttcgaatgggcacatctatctcaattacacaggtctaaataacttcacctctctcaccaaatgcactgttaggtgaaccattatgtcgaaaaatgaaggcgggaaaaattgttccaaataaaacaaaacttatataatttctaacttgagattctgtaacttagtcacatcaaccactttacagcaaagagatttgaagaacaaacacaatctcgtaattgcatatctaactttctttggcaatacagaatggatactcactggtagaatatgttgaatcaatatatgatgatcgtgagatttcagaccactcaaaattaatttgttcatatctacccaatcagaaacatttgaggagtacccttcaggt

SEQ ID NO: 173474 - DNA, 588 bp, Cannabis sativa
acgtgagggccttggacaaggctgaatatctggacagacgtgagtgttacgtcccttcttcgaaacacagagcaagtaacccacaaaaagggttctgtgcctggtcgggtgctcacactaagcaacgggaaatgatgcctttgcactcatacttcaagaaggtggcggattatttttgcctttgtccgacctacttcactcccaagggaattaaggacttattttccctgttcgccctctacgacatttaagtcgcacgaggtcttgaagtctacccccaagcaaagcaggtaggggtacttctacttctcttagctagatttctagtggtttacaggcactgtggacaaggtcgttcgcaaggtcgggggttttgttgacgagtattacttcgtggaaggcatggacaccacctatactcagtttcagtagatcccaatatattaccgtccaccccttacactaactcttaggtatagagctcagaggattctccaactgccgaatgatgctcggaatatcactttgttgacctcggaggccaactttatggagtacgggctctatccgacagactttataccccag

SEQ ID NO: 173475 - DNA, 655 bp, Cannabis sativa
ttactgaaatgttaataaatttaaagtgtgatttaatcaactattaagatagactgtttttatgtgcatttttgtatgcgtttatattaggtgtatcaatataaacatgtcaggtataataatcttatgataaaaattgttgtgttgttgaatttccccctagatggcatgaaattttgtcctatagtcgtgtagttggagttggagatgccaaaggccagtttttatttttgtaggaaccaaggaaatgtcgccgaaattctacacaaactagaaacatacaataacaagtaaacctttgtggacgtaatgaaataaggcagtaagaattaatttttttcttgacaattgagtcatatacaataatttaaaagttatactccattagaaagaatctttgtaaggtggaaaacttcatacatattactccagtgaatgtttgatgtatttacagaacttcacaactgttgacacagatatttggccacccccatttgttagattggcgagaaggtattaagagttaactataaataagagagacacaacaatttatagtagttcactctctgtgtcgtgactataatggagctacgtcaactttgagttttatttctcacaagttgaattatagaaaaatagttattgactgtga

SEQ ID NO: 173476 - DNA, 709 bp, Cannabis sativa
atgagcattgctagtgctattggacactagtttgttcaacactttctgtaattatcgttttatgattagttagcgatacttttttaattttttttttttaagttatatgtgacttgatactaatagtagtagtatgataataaggaagatgttagacactaataatatcttttagcatcgagcattattattagacactaatagtacccaagtcattctataattagttattgatattttttaaaagttattttttaaaatctgctacttgagcattgctattaggcatcagtattgtctagcactttctcgacatgtcgcgttacgattgactaacgatacttcctaaaagctattatattaaatcatgtgggacttactatttgttagagagtctcacattgctaatgtgtggaaagataatagaatatataagaagagccaccaaaaatccaaaaataccgatccaaaaagtagagtaaaaagagcaaattgtgatcagggatagtgagctaaaaaaaaaaagcaaaccaattggttttgggatgaaatctcattcaccttattcacaaattctaacactatttagttaaaccaataacgatactgacacataaaagagtggtaaggcactactaatctcttttaacatttctcttaattaaactctatgacatcaaagaaggtagtagcaattctcgagaggaat

SEQ ID NO: 173477 - DNA, 508 bp, Cannabis sativa
  modified_base (88)..(94): a, c, t, g, unknown or other
ttttttttttaaaaaaatgattaaattttttaatattgttactataactttagctaacttttttttttctcaaaataataataataannnnnnnaataataataataataaatctacatataagattcaattaaaaaaaattaaacaattacttactgattttttttttttttttttttttaaagttagaagaggaaaaatatttatatacacttataaaagatataaaaaaaaggtttgtgtggaagattttcttttttagttctcagttgaggactccaaatttaaaaaatcacacctcccttatatgtttgagtgcctatgtttcaattttttgtcaagttttaaaatttaagacaagttttgaattttaagaaaaataactattcaatatgaattgtatggtatgttctctatagatgttttattttatgatcagttgtttacaaagttttaaatttttatttaattgtatcacttatttatctttcgtttttaaatttgatat

SEQ ID NO: 173478 - DNA, 799 bp, Cannabis sativa
aagtttgagttctaaacctcaaacattgtcaaacaaccaagccaagccacaaactaacttcaaatcagctcaaaaaaccataatatatcatcaaaacacagaatccaacaattttaaaatcacagaaccctattacaaaaaatcaagcaaaaccttaactttgagcttaagaaaatataaaagaaaaggttaggaagttttaccttggattgaaaccattaaaagcttgctaaaatttttgaattatgcagaaaaattcccaatcctagttggttcagggaaatcgagagagagaggtttgaagaaagagaaaaagtttgtgttttttctttctaatttttgaataaaagataaataaaaaggtattatctaactaaatgaatagaaaaattagattatcaatctaattaaaccattaaagacaaatgacaaaaatacccttcaagtcaagcttaactagaaaatggtcatttcaaacacctcgactattcccaacattcccaatgtctaactatattgcctcacttaaactaaaaatactaaaatgtaattctaatggccatgactcattttaatgttgctgggcacaaaacatgcaaaaatataaaatttcataaataacataaatattataccctaaattcaaataaatcttcattaaatgataaatcataatattctaatttcataattaaacctaattgtctgctaatatctaaaacaaagttaaacggtcattacaattatcttctttacatttttttagtcaactttggctgactctctctctctctctctc

SEQ ID NO: 173479 - DNA, 681 bp, Cannabis sativa
tagccagtgattcagctatcaaagcagacacccctccatgcagcaccttgaatggctgttttcatttcattgcaccccaaatgaaaacatatgttaccaattagagaaatgttaggggcactacaacatgtgacatattgttattggtataatttatggggttttacacattttgatttaataaataatataagaaactgctaactactcacagcgcgtcacatttagggatggaaattaaatggataataaacgggaaatgcttccattgtccccattctcgtaactattttaatacccaccattcctgtctcttttactacatatacccgatcggagatagggtagagaattctcgttggaataggtaatacttaggacctatttattttaaagtaaatgaaattatgaataaaaaaggtaaattgtataaagtttaaaatattatatgtgttaataatttaaaacagacaatgttatttaaaataaaatagaaatatttaaaaatttactaataataagttacaaaacacatgtagataatgtatagtaattaaaataatattatacaataaataaaataaataaaaagagtccccttagagaatagaaaggcctgtttgattaagttactttttagcttttagaattaaaaaaaataaaaaatcattttttaattta

SEQ ID NO: 173480 - DNA, 832 bp, Cannabis sativa
ctgccttgactttatggccgcggcacaggggtatctggccgtggcgactgggacaaccaaaatcatcagttctgtctttgagttatggccgcagcgacaatgatctatccgtggccagaagtgcgtcaagctgaaaaatggcgtttttcttggctccgctcatcttttattgaacttttacatcccgaggcctccattgctccgaagaacctgaaaacatagaaaacacgcataattccgtcctaaaacaacgaaaagcgaacgtaaagttgatccaaaatataggctaaaaatagcctaacagctattcaatcaatcttactacatagtaaaacaattataacatatttcacagatcgtcaaattggattcatacactggttttacaagcatccaaactaatccaaagagttaacagaattaagcacacagtttcaaaatttcagaacatgtcacaattaacagcagcacacaactatcttcagtttatttaatcgactaacacccaaatgaaaagactaaactaaagcaaaataactaaaaagaacagaataactaaaacaattaatttatttttataagtcccctcccccaaacttacaatacacattttccctaatgtgtcatgcaaaacaaggaaagggagacttactagcacccccatcagaaggggttgaacctcaatactgtttcaaattggatcaagtccacccctttcatccaaaagagccctcgtaccaaatgaagaaaattgacctgcaatattgttaatttaagagttttgcacaagagtaagttcaccttcagaactaccacacatcaatcttttcca

SEQ ID NO: 173481 - DNA, 509 bp, Cannabis sativa
taaacaaaaagaaagtaatgtttagtgttaaaaacgaatagtttagtgtgtgtccaagcagtccaaagtaatatttttatgtcctcgtaatttggttttattattcaagatgttaggaatttacttttagctttatcttttgttgagttatgttttgttaaacgatatgcaaataagttggttcattgcttgaaaagagattcttgtttctctataggttctgtacttcaattggaggattgttcttctaaagtgtgttctattgttttgaatgagttcattatttaataaattccctgatttattaaaaaaaaataataaacaaaaaaaaaatagatgtagaaagtataaatgtaaaaataaagtttggagaaattttggtgtaaatatctccaaaaaaaaaatagcctaaattaactaaatgtagagatgatatatattagagttagtctcacactattaatgtgtgaaaataaaataccatatataagatgaataagttacttatc

SEQ ID NO: 173482 - DNA, 673 bp, Cannabis sativa
atcaattttattcaatagtccatagaatcaaaaaatctaaatttaatttcataaaaaaaatacataaaccttaaaagtttaatcttaaaattctcctaatttattgaacgagtttagtcatataagataccaatagaaagtgaattttataatgaataaaacccctaaatttttaagattaaacaacgaaaaatttaacaaaaaataataacaaaatttatatgcaatggtaaaaaaataacatatacatattaattatataaattataggttctaaatcatatacaattagcaatctgataccatatgttaggaaaattaataataaactcaagatcaatttgtatataacatagaacacaataataatatacaataattaagtatacgtacacaattaccacataatttgatagtgcaatactatcaaccaagtctttctctctaaatcttaagtagtttatttataggtacataactttaattggattgggtctgctcatcaaaagctcccgttaactagaaagacatactaacaatatggggctaacacaaaaataactatccaatcattctaaattttaataaaaccaataaaatttaatgtaagcccaaataaaagtctaacattctcccacttgggctacattgattttaatacatatatattata

SEQ ID NO: 173483 - DNA, 1030 bp, Cannabis sativa
tcaaaactaagaatgaggcttttagaacttttgttacttggaaaagactcattgaaaaccagacagggaagagaataaagaagcttaggacagataatggattagagttctgctcagatgcgttcactaggttctgccaacttgaaggaattgacagacacaagacagttgtgaatgaagaagaatccatccacaacagaatgaatggacttgcagagaggatgaacagaactctattggaaagagtaagatgcatgctcaagggtgctggacttgacaagaagttctggggtgaagcattgaagactgcatgctacttgataaataggtgtccttcaacaactctaaagttcaaaacaccttaagaatactagacaggacatgtccctacagttgaacacctcaaggtgtttggttgcacagcttttgctcacaccagacaagacaaactagagccaagagctataagtgtttgttccttggttaccctgaatgggttaaaggatacaaactgtggtgcttagaagaatgctatagaaagtgcataattagtagagatgttgtattcaaggagcatgagatggctatgaaaataggtgctacaaacaacaggcaaactgacaaagaagtgactggtttagaaatacaaagcagcagggaagaagaaggtactacagatcaggtagttactcaagagcactcacactcagagatagatgaacaagctactgaagaagagagttcaccagttgattcacaagactgccaactggttagagacagagaaagaaggcagattaagccatctgaaaggtttggctttgctgattgcacagcttttgctcttgcatcagcagaagagattgacaccatagtacctactacatatcaggaagcaatcaactcaagaagcaagaagaaatgacttgctggaattgatgaagaaatgagttctctacacaagaacaagacttggaaaactgtgacaagaccaccagggcagaaattgataggctgcaaatggattttt

SEQ ID NO: 173484 - DNA, 550 bp, Cannabis sativa
tttatgggatcgaatcagatcattaaattgatcagacggttattaatcatttaaagcaaaaagacaaatcttttattttaattttatgaatgaattgaaatagagatagtgtatagtagagtaattaacataagaaatattggtgggtcgactcaactgtgaacaggtaatttatgtgaaacctggatgcgaagcagagcttgatgccttcatacaagacaccatacggattaccacctctacaaaagtatgtttattatctctttcttaattataatttattacaacttcaataactatataactaattagtatccaaaaaaatatttatttattttagggtgcgtttggaagtaactgtgtaattattaggtagggtaattactagggtggtaattacacagtgtagtaattacactatattttaaaatgcaaagtgtgtttgaatatgaggtggtaattatatatgaaaacctaatatcttgtttggcaaaaatagttagtaattacatgagaaaataatatttttttagtagctaatgtttaatat

SEQ ID NO: 173485 - DNA, 616 bp, Cannabis sativa
  modified_base (373)..(376): a, c, t, g, unknown or other
taatctagagtcctattagtgtgttactatatttcatttttatttcgtgtctaatttaagaatttgttgggtggcttttgaaacactaagtttaattttacacgagctatatattttatatttttggacgtatttaaaaagtcacggtttaatcaaatttgtgtgtaattaaaaataattatacaatttaacatatttgtctgactatgtaattacactgtaactgtgcaattgaaaataattgaaggattacaatgttcatgacccttcatggtaattgagtataattacattgtgtaattactaaaaaaatattttcccatataattattaattattttaaataaaatattagtaattcatatataattannnnatatccaaacacaccttatattttaaaataaagtgtaattattaccctagttcttacacaatttcttctaaacacactaatttttcaaaagaaaatatttttagtctttaacacctagccattatttttgtaaaattattgtagttttacaacaatatatttttgagaagttcaaagtctaaaacccaaattcaaagtttaatcaactagactttgaaagttaaaagttgcagtaaaaat

SEQ ID NO: 173486 - DNA, 755 bp, Cannabis sativa
atttacatgcatacaattaaattgcaaaaataactttgctcattattaataccctaatttaccgtttaatttgattatgagtttgtggttttttttccttagtttgactctactgcagcttatgtgttgcattcttattattttttaaattttttttctctttggtctctttctctctctttctttttctttattaatttcactttcttttctataactttaaaaataatttttattacatcattaatttgttttgttgagctcaaaaataatattattgttacctactttttaatataatcattttaaaatgtgaaaagtatatatttttttcacttttttcaaaattaaaataactatttaattgctaaccatatcaattatatacttattagttacatgtcaccattgtataattataaaatttaaacacttacaaataagtaaccaattagtattatgttaatataaatatcattagtcaccaccatatttttttatgggagattttcaattatatacattaatttgtaaataattataaaaatatctttgacctaaataatccttataaaataccgttctcgctcatctgcttataccgaaatcaatgtttgatagtttaacctttaagtttttttgtctttttctatccaatagtttttatttgaggaaattagactctatactctttttatattgttctctttcatttttaccctcttttttaaaacttatcatttttacctcttttt

SEQ ID NO: 173487 - DNA, 712 bp, Cannabis sativa
aattagattggatgactttctgcaagtataatccatgaatatgtatctctattccgaacaatttaaacagtaacaagtacaagccatgttcatgttcaaattaatgtagcatcaaataaacttaaatatgaataagtccaattgatcttaactaaaatttatggaaagtagcattatcttttatccctattttttatacatgaacctgaacgaactaaaatcaatttctatctagaaaacttggcaaagcagtaaataagaaaatttcgcgaaacattatttggacaaaaattacatatagagatatatttaaacaatagatctccataataaaataatgactaacttatgaacaaaatttaagattaaacatgtggaagcaaataggcatggcaaaaagatacatttattcggatcgggtcagtaatctgatccgacggatcattactgatccaaaacattcaaatacttattggatcttggatcagatccgacccgcctcgcataattttttttacggatcggatctgatccgatccattttaaatatatattttttttaaaaaatgtttttacggatcgaataggttttactttatctctctctccatcactctctttcacccacttctccgtttgcttttgccgccactgccgccgagaagctccaaggctttcatcaagttgttgtgctgctccacagttattgcaa

SEQ ID NO: 173488 - DNA, 811 bp, Cannabis sativa
ttgtgctacctactgttattccaacaacaatggtgcatgctgctgagaacattgctgcatcattatatccttctgcaccagtggttaactctgaaacaccaccaataaccactgctcctattacttttgatcaggcacctgcccacgcaacccatgtaatcgacccctcacagcagcctataactgccttacctaccaacaatcaaatgcctgctttccttacccaaatttccaccaccaatacacaccaaatgcagaccagatctaaatcgggtattcaaaagccaaaagcctaccattctactctacatccattacctgaatccaccctacctaaagtccctacaaatttaaaacaaccccttaccaaccctatctggtttgcttcaatgcagaaggaggacacagctcttaagaaaaatcatacatggacattagttccttattcaccaaatatgactcttgtgggaaataagtgggtacacaaaataaaattaaatgttgatggatctattgacaaattcaaatcgagactagtggccaagggatactcataaactccagggattgactatacagagacattcaaccctattgttaagccaacaacagtgcgaaccttgctcaccttggctatttctaacaactgggacatcacacaattagatgtctcgaatgcatttctcaatgggacactcaaagaatcagtttttatgactcagcccctggttttttcgattcaaactatcctaatcatgtatgcaaattgcataaggctatctacgggcttaaacaagctcctagagcttgg

SEQ ID NO: 173489 - DNA, 606 bp, Cannabis sativa
aaatatatttattttatatgtattggatttttaagttactattttctttacattaaaatattaaatgtatatataatttttttaaaaaaattataaatatatgtgtattgaattggattgattatttttacatgtcaatcaatattcaattcgcacaagtgcgacttttgaatttttcaatctaattcaatcagcataagtgtaaataaccgtactttgcgaattagattagatcgagtgcattgattagatcggatattttataaataatcagtggcatcaactagaacaatttgagattttaatctcctccttgaaccaaattatgtccaacccttctaacatttattcacacgaaataaatgagtgttttatcaatttctaatagctgaaaattccatttgattctatgaatctcatatgcaattactcacttaatttgcaccttatcaaatgtgaaatttgattatatatgcatattaatgagagaaattaaatttttaaacttacacatttttttttgatgaatcagccatttcattgcaaaacaatcaactttacaacctataaacacctccaaaaggcctttaatcttatctatacaat

SEQ ID NO: 173490 - DNA, 542 bp, Cannabis sativa
  modified_base (174)..(175): a, c, t, g, unknown or other
ttgtaaatactaacacaatagtaagaccagtaacataattttgagagagagtttctttcaggttgaaccacgtaaaaatttacttcttcgagaaaataaaaactagaaaattaaaaaataaaagtttacataataaactaaaaatttaaaaaaatttacaaaagtttggcaacnngaaatttttttatttttactctttgaactttttcattactaagatacctcttcagtaaaaataataaactgttttttttagttattttatagttgtgttgtagttatcatgagattttttttattgttttatagttgatttataattgtcgtgatgttgatttcacgtttttttttttttgctgaacaaagttttttgctgaacaaagtattttgctgaacaaagtatatttttaagtatatttttgtaattaatttttgtaattaaaaattttaaactgtaaataaaattgtaaataaaacaaaaaagaagagttatttttgaaaattctcaaaaaaaaaaaaaggttttttttttgttttttttt

SEQ ID NO: 173491 - DNA, 851 bp, Cannabis sativa
  modified_base (679)..(680): a, c, t, g, unknown or other
  modified_base (777)..(802): a, c, t, g, unknown or other
tagagaacaatttgaattatatagttgattaatttatcaaagtctaattaaggcccaaatatttttttttttcaaaagtccattgtatttattaatgggttgttatatttttaatgtgataagggtttataacaaaaaagaaaagacaactaaaagatgggctaatcattgttctttcttttgtaattgggccaggtgaatctcaaaagggttgtgagaaaaaattatcatgatatacatgcatatatgtaatggaaaaagaaggcagcaggaggcgtgaaaaacaacttgaagcaggcggcagtggtgcttctagtcgagatgaagagaaaaatgaggaaaaagaagaagaaaaagaaagagaaaaaaaaagagagaaatttttgagtgttatttagggttttagttttgcattttatttacagattggcaataatcaagaggaagaagaagaaaaatttggagaagaaacttagagtgtcgtgacaactttaaaatgggtttttatttttatctctcttttcttttgaactttgtaatttttgcaatatttattatgagttaatttttcttttgctagaattattttgttgacttaaattgtgattggtattttgttgctatgtttagtggattgattttgttcattcaagagtgtttattgtacaattgcttactnntgcttgatcatcattagtaagtagaagctaatatatgttgattttggaaaaaataggtttagtggaatagcttgaatgatgcatgaatatcaacttnnnnnnnnnnnnnnnnnnnnnnnnnntatgttatttaccttgtatgacttcaaggaattgtgcttaaattggtat

SEQ ID NO: 173492 - DNA, 676 bp, Cannabis sativa
atgttgctcgtgctctgcttctgattgagagtatacaggatatcatcgataaatactatgacatagttattgaggaaatccttgaacaccctattcataaggtccataaaggtctccagagcatttgtcaaaccaaatgacattaccaagaactcataatggccatatctagtccaaaatgtagtcttcgaaatgtcttcctcccacattctcaattgatgataacccgaacgtaagttaatcttggagaagacagtcttaccctgaagctgaccgaacaagtcatcgattctgggtaatagatacttgttctttattatcaacttattcaactcccggtagtcaatacacattcgaaggaatccatttttctttttcacgaataaaactagagctccccaaggtgatacactaggtcgggtaaaccctaaatcaagcatggagacgacagggcattggacaaacaggggcgacactgggttgaagggaaaggccgagagaaccttaggacaaagacgtggatttcggggtgatgtgatggtgtggggctggtgagattagggttcaagagagataggaggcgagtggaaagcgtgaagactggtcggagcttcaaaccatggtggctatggaggttttggcacagaatgaagaagacaaaaatgagagagaagag

SEQ ID NO: 173493 - DNA, 546 bp, Cannabis sativa
gtagttgtaaaatcctaaatacctgtataaaaaaagggggggggggcaaaccctttgagtcaagaaaagttgtcagactcagacattatgcaacctacattggttaaaccatttaaattaggccaagtaaggtataacaacatcctcatcacttgagtacactatcaccattttttaggcaataaactattcttaaaggagtttcttataaaatacttttataagaaactggaggagtagtgtttggaggaaatttcagtgggtcaacaagatgcccatggtgttagaaacataagaaaggcccaataaatgaatataggtaaagcccacgaaaaaacttggaaaaatataatatttaaattaggagtcgagatacgggaataaaactaagagggtaacctcattggacgaattgaagtaatatctaagttgaatcgatctaaggtaattcccatctcagattgtgctgagaaacacattatctcagatcggaaggtgttgggttttatgccctaaataaaatgcatttcaatataatcagattta

SEQ ID NO: 173494 - DNA, 590 bp, Cannabis sativa
tggtacttaaataccttttgatgaacttattaaagggagtgatgttttcctttacctaccacaaccactccattatttaatcctatatcaatacatttactaagacccaatatatacccacatatggaattcgtctaatattgtttttgagtccacctaatttgtttattttttcttgttttgtgttttgactaagacgtagtggtagctaatatttttttacgtatcaatatcgctattaatacaattaagtatcaagtcttatatattaataagaataagacaccttgttgtcaaaccgcttaacaaaagaaataacaataaattcaaacaacaaaaaaccaaactaaaaggtgaaaataaagaaagagagataaataaaacttgtttattccagcaatataaaagtaaatattgtaatcaattcatattacaattcttattttattgcattaccattactcttaccattattcatcccattagagtgttgagcttgttaatgaagtcctcaatataagaagattcaaaattgttgcgaagaatgttttgtcgtaacttggcaaggttggccctaacctctttaccaa

SEQ ID NO: 173495 - DNA, 502 bp, Cannabis sativa
ctcacttcgactctttatgttaacaattaagtcattgttggcacactccatactagcctgccaaacgaggtccctcaccttcggaggaacttttaacttccaacattatttctagaagtctaaaagatcggacaccactcactgaccttgtaactattgcagaaaatgataagcactcctcactatgtactaaccagaaacttttctagaccaaactaagtgatcactagttttagtaatatgaagagggatttgtcgaattaaactttgatctttttcattaaataaattagcaataatttccctatccctattacaagagttgacaatcaataagctactcattcttgcattcaagagggcagaatgagatgaactcactataggattgttgtaatcaggcaaccatgattcaccaagaatgtttatactagtgtcatgttggaagttattttaccaggatttagatttatcaacaagtatgttgattatattctataat

SEQ ID NO: 173496 - DNA, 647 bp, Cannabis sativa
gatggcccccataagtcagattgtatgtagttcaattgttccttgctgatgtgtagacgtggagagaatttttccttgcaacacttcccatatacacaatcttcacagaatcctaacttaccatccaatttatccttcaatagtccatatttgtcgagttcttgcatgcccctttcactcacatgaccaagcttaaggtgccaaagcctggtcttgtcaatctcctgatctgttatggcaggtgcatcatttcccacaacagttttcccaattaaagaatatagaccattctttaattctcctttcatcataggttggaattctttgagatcacaagcattccaccttccaccttgatgatgcaaccaatgctgtccaacataccaattgacagcaggttcctcttcaaatcaggtacgtatctgacattcttaactgttcttggtatgccatcaaacatagtgatgaccacagacccaataccaagtacactgcatgctttgttatttcccaaaagcattgttcccactgagatctccttgagatcactgaacatttcagctttgggacacatgtggaaggaacaccccgagtccaagatccactccttttcatatgctctacttgagacaactaaaacatcagca

SEQ ID NO: 173497 - DNA, 546 bp, Cannabis sativa
aaaaaaaaaaaaaccaaaaaaccagttttttaagtatataattttagtggtatttagatgtgatgcatttggaaattaaaaaatgaaaatttgattaaataaagagaaaaaacatgttagaatttaagatcgtatgataagatgtatgaggctttatcttaaaaaattaattatcaatgagtagagtagtagtctagggctggtcataaagtatccaatctgatccaatccataaaatgcggatatccgcacttgtgcggattgaattggattaaaaaaatctgaaattcgcacaagtgcggattgaatgttgtttgacttcaaaaaataactcatctaatccaatccgcatttaactatatatattttttatattaaaaaatatatataatatataatattatatcaatttataataatattaaaaaaaaacacctaaattatagggcattttacataaatgtatacatttttttaaataattacaaaaatgtgcaaaaaaacacaattttaaaaatgtacatatttgaaaacatatttacaaaa

SEQ ID NO: 173498 - DNA, 594 bp, Cannabis sativa
tttcattagaattttcatttaattgaagtattttttttgcaaccgtaaattatatatttaatatctactaattatagtttactagttattagactaattaaaattttttcttgtgaatttttacatgtactaacatttcaatttttatgattgttaaaaattcttgttgaactgaaattattgatttaaagcttttcgtctaaattcaaggtacaatttaatatatattaaatgtttgagacacgaatatttaaaaatttgtcaaaattggtagacatgatttggtacattagtaattaaattgagccgaaacctgaaaaagtttaaaatgtcaaatttagaagaaaaaaaattataattattcaaaaattaattatgaattatatattaaggtatcaaaacaaacaaacccaataaaattgtattcaaaagcagtacaattctaactctcataagtactaaacacaaaccaaaattaagaagcgcacacacatacatatatatatatatatatatataaacacgtacctagctataataatatatatacaagtacaacacctcatacaatatcttccaaataacccaatccat

SEQ ID NO: 173499 - DNA, 567 bp, Cannabis sativa
gtgaacacccctactaataagtagaagaaaattgctaaaaacattattggtgtctaatactctcgttgcggtgtcatcacgctattagtgtaattaagtatcaagtctcatataactttagaaaataatttttaaagaatatcactaattaatcgtaagtcgccacttacagaaggtgttgggtaccacttgtgtctaatagcaataatgagtattgctatgagacacttatgatgcctattaatgaagtgtcattttataattggttagcgattttctataatatttattaaagtaaaataaatagacccaatattaagttgcaccaatagcgatagagaagtgctaattacaatctcatattacaacctcttagtcaacctccacgcccgaaattacatgtcgaaatattttttttttcaaatttttttatagcgatattcgttatatttacattattatttttgtaaattttggaatagtttacaataccgaaaagagagtttctgatatttcaatttaccatgcatgttcaaaaaacttaaaatgtattttcggtattgtaaa

SEQ ID NO: 173500 - DNA, 528 bp, Cannabis sativa
gatcttcatcaccatcgcccaaggaaaatgggtttttttctattttttattttttcgtgcgtctctctcttgctctctcttgtggtgacgacgtttattttttgttgtgcagcgatctcaggtgatagtgtcatgtttgaagctcgccatggatctcagctcgggattcgtttgaatcaagccgtggatctcggctcatggttcgtttgaaatccgcctgtggaccttatttgttttaggttttttttagttctaatgtttaggtaattgtatctgttacattttctgggttatattatctgctctaaatattgtatctgtaaagaggaaattgggttaatgtttaggtactgacctaatttattttagtagtgtttgttgaattagtgagctctataatggaataatgtaaatattgtgtctctaaaaaaaaattgggttaatattttgtttagtaatagatatgtgttttattgaaattaattgtgtaatttatattttttttggttgattaaaattattagtgtt

SEQ ID NO: 173501 - DNA, 797 bp, Cannabis sativa
tactcacttcccaatcctcgaaactcgaattggacagactttcacttgatgaggacagactagcgtagagacaaggttggtcctcatacagaagttggagaatatcctagcccatacgatgttctcctccccaaaactcactagggttcatctacaaaagataggacacaagatgagtatttggctgggatatcgaataaaaacaaacaaagcatactgactaggtccgatcaaaagaataaaagggaaatttcgcatgatttaggttcataacccagaattttaaaacttcaaattaagggttaatcttcactaaaccctgaatgggaaaagtgagaaccaaatatcgtgaaataaagtcagaatgcaattacagtcagatcatatggtcaattactattcaagtttcatatttctaaacctagattctctatggtcagaatcacatcggatcaccaataggcgcatcaaacatgtgccacccattcaaaacatgaattcaaactaagtgaagtctacgcgcgactttggaagtcccgtgcagacttaggggcaaatgttatcccattttttgcactatgacgtggcaatatgtgctggtgacacgtgtttgttattcttcatgcttgataggagaaatgttccgaatagacttcgagtaatacatccgcacacacaaagtctgcctgaccgagcagggcaagagcagatgatctgaacaacaaatgaagtcatttctttgagccgtgcatcaagacttaactacttcaggattgatatcgtgaagctcaagcaca

SEQ ID NO: 173502 - DNA, 792 bp, Cannabis sativa
aaaaataaatgccactaaatataatattttctaaacaatgaaactaaaaatatgatttttttttttaaaaaaatataaaacattaaaaaataacctgaatttaagattcataaaaaataaaaatttaatacagtgatcaccggagttgtcactcgtgccgaaaaagtcactggacttgttgtcggcaccgaaaaagtcatcgaagtagctgttggtgtcggaaaagtagtcgaagttaccgccggtaccgaaaaagtcttcagaattagtattgtcgccgaaaaaatcaccaagaaactggtttcttgatcaagaaaccggtttctgattttttcggtaattttaccgacgacaataccaattcacgatgactattccggagtttgatgttggtgctggaaaagtcaccggagttactgccggcgtcgaaaaagtcgtcataattggcattatcgccagtaaaatcaccgaaaaaatcactaagaaagcagtttcttcatcaagaaatcggtttcttcactaaaaaagtagtttcttcattaaggaactagtttcatcacacaacaataataaatattatgaaaaaaaaaatgatatacaatgaaaataattgaaatcagtttcatcaatcaatcaaatggagaaaaaaacacagaaaaaaatactcataaatataaacaaaacaacacacaatgcacaacaataatccaaaacaaaatataaatgtgaaaaccagtttcaaaccaagaaacaaaacaataaaaagaaacttaaaataaaaaatatacaata

SEQ ID NO: 173503 - DNA, 1258 bp, Cannabis sativa
tgtttcttctacccggactggtaccaattctcacatatattttacttattatcgatcacgtacgtctatactctctttggtctactcctaatattttatatgagtataaaaaatgggtcatattataattaactataactaaaatgttcaatttcagtatacatatgaatgaatttagattatatataactgagacgtttttattggatcacatctaatgtttttaagtttgtccagatccgatccaattatatattagatgttagattttactatccgatcggatctaattaatttcagtcatccaatcgtttcaatatccattggatgttggattggatcagttctatccgttagatgtattttatatatatatttattagtttaatttagatttattcaatattttagacctagtattttttggatccagattggattcatccaatattttaagtccagtatgtattggattggatccatccaatccaagaaaagaagagtaaaattttaatgttaatttttatatatacatatatattttacgtataacgatataatttttaattattcattcaaactaaatgaaaatactaattagttcaattggatattagatgtattggatttttggacaccccatccaacatccaatccgatttaattggatatttaaaaataacatccaatccgattcgatcacaattgaatatccgatatttggcggtcgattataattagatcaatcaaaaataagagaagttaaggtggaaagggaagaagaaataagtaactgtatctttttttagggatatataactctaatattacttcatgatttatctctaaacaaaaataattatttccattaatccaaatcaaacttataagtaaaatttgataaaaaaaattcttcaatttaacaatattatactactacaaatatcagaattcgcgacagtcctaaaaatgatttttttcggggaccgtcgttaaaaaaattaagtaactatttaaaatcgtcaggaaaagtttagtactcccgaaggtttgaaatcgttataaaaaaaataggcgacactttttaataaaatgtgattttttaaatggacccttatacccgacggtttaaaaccgtcgcttatactatacccaacgcttttaaaccgtcgggtataagggtccattaaaaaatcatcaccaacttctcgccacatttcccacgtgcccacttactttttttctatttcccacatgc

SEQ ID NO: 173504 - DNA, 538 bp, Cannabis sativa
tgtcccaaaagggttatttgcagaaagttttaaacaaatttggaatggacagttccaaggttgtttcaacacctctagctcagcattttaaactgttaagcacacaagcaccaacaacagatgctgagaaagagaaaatgaataagattccttatgctagttgtgtaggaagcttgatgtactctatgatctgtactaggcttgatttagcacatgacatgagcatggcaagtaggtttgttgcaaatccagggaatgctcactggacaacattaaaatgggtagtgagatacataaaaggcacattgagcactggtctaacacacgatgatgctagtaaattcaaagaagtggtaactggatatgtggattcagattatgcaggttgtttggacaccaaaaaaccattgacatggtttgtgtttacagcttatggtggctttgttagttagaagtctaatctacaaaaggtagttgtaatacctcggaattaagaaatggattagcaaaactctaattagataattatgaataattg

SEQ ID NO: 173505 - DNA, 785 bp, Cannabis sativa
aaagggcttaaaaaacgcctctaaatggggggtttttgtagtagtgtaatgaggctacgtctactttaaattttatttattagatttgacacaccaaagttatagtgtgtagataaaaatacagcaaagaatttctaggtaaaattttaatcgagatttatgaatataagactcatgggagacttgatattcataaatctgatccaaattggtggttgtaaggttcttgaaaatgataaaccaataaagtataagaaggatgtatcaatagtgttttgaggtcatggtgtcaacttcgtatggtggcctcaagtaaaaagatgaaggaataagtgtggtgttcttggctgccgtcaagtaagtttgaaggagaaggttttgaagagtgaggtcaaaaaaaaaaaaagaagaagagtctaaaagaaggtccaaaaaagtctccttcttagcctcctacttgatctatatataggttgtagggtttgttagagatcccccacatgtcggtgtatctcactaacgaatttcgtataccactctttttaaagaataaaatattacaagaaaataaatatctattaaaatctccttatttctaggcaatatccctgaaaatattgagaaattggttattatcggttgaggatgcaccaatttgaaatggactgatgggatatcacctcttggctagaaatagatgatattggtgataggtgtaataccctagaaataagaaatggattagcaaaaccctaattagataattatgaataattgaggaatta

SEQ ID NO: 173506 - DNA, 562 bp, Cannabis sativa
acaactttaagtgaagtgtttgtgattgtgggtaggggtgggcatccgatctaatttaatctttttctcctaatatttttcttctcttaatttttttcttcttatttaatccaatctaattagtaattagatttggaaaatcattatccgagtcaatctaattagattttaaaatttaatttaattactaattggattggatcggttttttaattgaatatttaattatacacttaaatattaatcttaatatagaaacatgaagaaaaatatgtaaaaattaaatatctttctttatttaagattaatactctataaacattataatgtcatgtaactaaaagtttcaaataattaaaacaataatatttttaaataataaaatcgaacaaaatatcataaaaataaatacacaaaataggggtgagtatcgttcggtttaaccggttttattctatataaaaattcaaaattggttttcggtttgggttggtgcaatccgaaaaccgaccaatccagaacctatcttaaaaccgaccattttgaacctcagtttggtcgg

SEQ ID NO: 173507 - DNA, 509 bp, Cannabis sativa
ttgaaaatggaacaaaacaaaactgtcttttcgatacaggtcgttcctaagtcgtctttaggggtctaggcccaacgcccccatatgggggcccaaaaataaaaaaagtgtgtatgtatgtaaaaacaaacaaaagaaaagggaaaaaaaacataacaccatggaataatcaataatgaaacccttaacaagggttttaaaaatggtacatcatgtgtatttctatctatttcataaaaaattaaactcatctacgtgatagttatttgaaatattctgtaaaattctaaaaaaatttaaaaaatttattgcactaagaggtaaacataggtccaaacttcaaacaatctactgtatgcgtgactcttttatttacactcgtgctaaatagattatttgaataatactttctacatagtaaattatgagaaacttataaaaatactgacttttggctcaatctttacaaaaatacaactacacggcagaaataacttttatactgtctt

SEQ ID NO: 173508 - DNA, 742 bp, Cannabis sativa
tctctctctctctcttccttcattctctcccacacatcaccttaaggctgtcaaacaccctaggccgtctaataccctaatctatccacacttgtgatttgtcaggctttgatagtaatcctaagggtactatagtagatcccacctatagaaatctggatagtaattcccttggtataatacaactaaaaggggagtaggttgattatggctcaaatttgtacattttaagcccttaactatgcatataaaattaatataaattaaatattccgtaattttaatggtaaatttatttttatttgaaatatttaattttctttaattttatgttatttttcaaaaaaaaaatagtaaaaggaaaatacaaaaatccaatttcaaaaggcccataaagacaatacaaattcatcttttaatcatcaacatcaccaacatggcctaaggcccataatttgcttcacgtggcccaagtctccaaagtccaaaccagaatggaccatatatctatacattttactaagagcggatatgcccttctaagaaaatcgtataaccttttattaaaattcaaattatatcctgttgcccttgattttgtccaaaatacgtggaccaatgcgacttcgacacgtggatttgaggagtaaggtttcgagataattcgactaagtcttttaaatcaagaggatcagcaagaaacatacctcccgcagaaggtatgagggatccacgtactccc

SEQ ID NO: 173509 - DNA, 737 bp, Cannabis sativa
  modified_base (73)..(75): a, c, t, g, unknown or other
aaatctctgatatcaagcctacgaaagtcaacaaaaaattgtttaaagttagagtgatgccaaatggttttannnctgggacagtgaagaagagcatgagatcccgactctacacttcccccacaataagaacagcaagagcttgggatagcatgtttgtggaaaaggtttagagcacaagggagaagatggttgaaagccttccaagtgaagtgcttgattttaggaggaattttcaaagtccagagagttttccaccaatccttaaaagggttaggatcagaggtggaaggagaagtagtgaggtcagtggactgggctaggtgataggttgagttgactgtaagaatgccagagtggtgaaagccccaaatgagagaattagtgggtccaagatccaaagaaacattgaggacagcatttgcttgataggtaggaagaaagtggtgaagtttttcattgttccaggttcagtcagggttgacaaagaaggagacagtggcaagagagggttcaatgggttgaagaatggttggatgggaaatttgggggatccaattaggagcagaaatagggatatcacggactgaacagattttctagatgaggccttttttgagaagttgggaaccccaaagaaggcttctccaggtaaaggaaggattgtggccatttggggcatggagaaaatcagtatgcttaaagtatcgagctttaagaagagaatggagcaggga

SEQ ID NO: 173510 - DNA, 571 bp, Cannabis sativa
  modified_base (519)..(526): a, c, t, g, unknown or other
aacgaaagggatcaagaatggcaacgttatgctctttccacaaacaaatttatggtgggcataaaacgaggattcccattgtttatattagaccataactacggttaagattaagaccatatttaatatttaatagaagatgtaaaaattgtgttatatttagcataaaaagtaattttgagttaaatttaaactaaattttatctttgtataattacaaaattttaatgtaaaatttaatatttaattaatattttattttaaaacaataaaatctaataacgttataatcaattttattattattttaatatgtaagataataaaaaataatataaatattttataatttaatgtgatagttaaatatactaataaaataatagaaatgacataaatataaatgaaaaagtagtgtattttttctggtgtaaattttacattatagcaaatattgtgctaaatttaggacaaaatttactatggaggaaattacacttagtatgggattttaaaagnnnnnnnnataaatatggcacatttaagtttggccaatttatatggtattttt

SEQ ID NO: 173511 - DNA, 510 bp, Cannabis sativa
ccatataccaaatcacaaattttctcacatctgattgcaccattgtattcgtagacctaaataaataacgaataccaagtcccatcgcaatctggacaatattgaagatatttacaaaaatgccactaccgtacaaactaagcatcaacatgccaccaacatgcacatcaacatgcgccaccagttgaccaccacttggccaacttgtgggcatcacctagcttgtaacgtgccatattgacacgcacgttacattctccttcacttcaacatgttgatgccctcatcgacggactgcaggccaatcttcttgatctcgactcctaagcttactccaagcttcatacgaatactaagtctacacttatccctctatctccgtagaattaccctcttggtgacgaactccctcgcccactcttggacttgatcaaagaacctatgccactatcgctattcagaaccacccatggagtagtgcctccacactagaatatttcccccaacatg

SEQ ID NO: 173512 - DNA, 540 bp, Cannabis sativa
tgggagctgggttcatggggggatcgaaggtttgaaggtcaatcgagtgggggttgaaccggtttgagctagcagctggattcgtggttgttgaattgggtcgagatactgtggcgaggtcaggtgaaatcgtgggtgggtctggtgctggacgagtggaggaaacagctaagttttgaatgggaattgaaattgacgatgatgatgaatgtgaatggggtagggtttggagttattgggctgatattgaggaagtgggctagtcaataacaacatggggcccagttgaccaaaaccaaaagataaaacccaataattaatctttatatgcttttttttggcatttttgaatggaagggtcaactaaagtacataaatccaaatgattgggctaaggaaaaagagttgtgcctaatgattgcacatcattaacatcattgtcagacgttcctcttgattcagaccatgtacttttttcttcttttttttattcttttttttttcaaaaccccaattctttgatcagcccaaaaccaaaac

SEQ ID NO: 173513 - DNA, 634 bp, Cannabis sativa
aggagatcgcaactaccggaggtacagaattaggctcgatgccttctgcagacattgagaggatggtgtaggagctcgctgaaccaggaaccagtgagctccgagacagcgaatctacagtgtcagtgcgtgattatctcgtccattccagacatgctccggacgtcgaggttgaagagatggacgatgattggacggccccagctcgagagtcaggcgaggaggaagaagatgcaaagggaagtgggactaattcggtggacaacactcagttgaacgagcccttttcgtacgaggacttggtctcgcgggtcaccaaattagatcttaccactttcacgaggttaaaccttctgcgactcgcctccttacgtcctaagactacctagagagcgcacctctcttataccaaccctgcgatcatccccacagaggatgtggtagtctcaatacccattcttcgatgtggagtattgaatccttttcatccctgtattgcggctattctcaagcggtatgacatgtctccctttcaattaacccctaacagttatcgcacagccctagccttctatgcgatgtatatggagtatgtgcatagggcacccacggtagaagagttcagttacttcta

SEQ ID NO: 173514 - DNA, 902 bp, Cannabis sativa
agattaagaaataaacggaactaactaagagagcaaacgtttaaaaaaaagtaagcaaatgatgtggaaaaaaaaaataggtggcagataattattggagggacaggaatgggataggaaattggggacagatgatttcttttcgtagtattagtatccaagtaaccaaacttgtgtaggtactgcttgagttggtggaccccagtgacgttttggcccttgtgacatcccttcaagtggccgatgaattcgaaggctgtgtgttttgattcagctctttctatataagatagcgtaactgctaatactaggaaaatcgctcccaataatgagattttggaagccattatattatcacttaataataatatataatgtattatattgtatatatgatgagtttatttggtgctagctattgctatatataagtttggttatatgataatatatcttcggctttctacctatatatatatatagtgtgtgtgtgtgtgtgtgtataactaattcaacgattgcatgccttgtttgacggaacacaccgtacgtacgtaagaataatgccttagcaatgtcgtgcttttgagtggtaattacttggaatcgatcgtacgtatacaatgctccacgagatcatccctcgcaaaatggctaattatattcctaatatagttattaaattaatagtgagatatgatcatgactactgattaagctgatagttttttaacaattctcaatcattagttaggaaagcattgataacattttaaggagcccgacgtgccattaccctttaattagttaaggattcccaataattgaataaatacaaatttctaataatcaatatatatatataaaagagaggaatgagttaaaactatttttcttctctc

SEQ ID NO: 173515 - DNA, 876 bp, Cannabis sativa
  modified_base (752)..(754): a, c, t, g, unknown or other
agaaggacacgtgtcaatgtgggagaatacaaatcaacaagtataatgataattatattagaatatattaaaaatgaataattcattaaatgctaaactggtagagtatatttataacccgttgattgtaaagtcttgagcgagacatggatgtacaaactattaattcacgtattgacgagaaaaccattttgtatatgaagacatgatcataaggacaacatcagtaatacaaagcgaggtaccaacctcgctacgcatgaagagttgtaaataagacatgttgattgttagaacacttagcgtataatatacattatacaaactaagcataatagttgaatgaacttgaacaacgaatagcgagacatccatctcgctataggagggcatactcatggtaccttcactaatcaacttcaaacttctttcaatgagattcactgctccttcgagtcagctctcttagatagaagttgacattcaaatgatgttgactactgaagttcatcttgtcaccaagaactgagattgtcaaatggagtgttatgtcttcaatcgcagaaatgacgagatttacattatcaacctcaaaaagacatgggaaaagctctagctcgctgccagggttattgttgctatattcccagtgagatgtcccagcacgatacgctttgcagcgtatttaatccacgtgtgcattgacccagtaaaaatggataagtcgtagctgtgtgattttcaaataatannngcatttattttacgtgggacaaaatcaaatcccacaatttcaggggataattattgtgggaaatcaatctgattataattaactaccctcctatgtaactataaataggagcagaatacact

SEQ ID NO: 173516 - DNA, 507 bp, Cannabis sativa
taattatcataataacactcttaattgacatgttgtgtaatcctaacagacacatgctttctatgtaaaggggtgatccaaatctaataaaccaagctgaaaaataaaaagtggactaagcagacaaaggtggcacaatgaaaaacgagtaaatagtgaaggtgtgcttagaaatcttgctgatggagaaagcttggaaagatttcgataaacaattttcagagtttgcaaaagaaccaagaaattttagattggggcttgcaaccgatggatttaatctatttggaaatatgagcactagctataggatatggcatgttgtattagtgccttataacatgccaccttagaaatgtatgaaagaaaataatttcataatgacattattaactcctggaccgcaatctccaagtaaagacattgatgtttacttacgacccttaattgatgagctaaaataattatgggaagaaggggtaacaacatatgatgtatcgaataaaaaaa

SEQ ID NO: 173517 - DNA, 717 bp, Cannabis sativa
ggataaatcataaatgcgtgagaacagagatacactgcgattttaagtaggattagatgtatttatagagtttttcctaaagaattctagaaatcccaaacgtattcactgtctgtgtgtagattgttgttccgtacgaacattgtgaccaaatacttactaccctttggagtgaactgggtcgtacatatcttattgcaatttgtaatcttgttgaagtacggatgcagaggtaggatcgcaccctgtttagcgtgaggtccgaaccacacgcagagtccctctccggggttagtggccagctatttgagggtaggtagaaaggcttccactccgctaagaagacctttgtcataaatatttttaagcctcttgtaggttagactagacggaggagaaacccactggggaacctttttctccttagtccttaggggacaggctttctcgtattccaccttgacgtaatcttagtccagaaccaagacctccccaaacttagaaatgggctcttcagcgtcattataccctctgaacgaaagagcccaaagagcttcttcctcttcttcctccaatacttcatctccatcactattaggagaactggttgcctggacctcaccctggtcctctgttgggttttgtgccctaaataaaaccaattttaatataatcagatttacttattaataaatatcagaaataacattttatgtt

SEQ ID NO: 173518 - DNA, 523 bp, Cannabis sativa
cagcttagctatcaaaaataactatcattaattaattagaagaaaattagagcttactaaataaaaatgagattaatacattcatcactaacactttattttgggctgaaatctcatcattttttttttgtttgtttgagatggctgaaatttcataataattagttaataatttcactaattattattatttttatattgaggagatgaaattcgaacttagagacttattttttgtgagaagataattgttaacaaatattactggtgcttagtactctcctcgttgtcatatcgctaatgatataattaagtatcagacctcatataacttaagaaaatagcttttaggaaatatttgtaaccaatcgtggagtgccacctataaaaaatattagacaccactagtgccggcgataaaatatgaaatcattaacctatccctatatcactacatctcattaattatttggataatgactaattccttatgtatatccatagtgtctaaatcctaatgtgt

SEQ ID NO: 173519 - DNA, 604 bp, Cannabis sativa
caacattcgtcggtcgtatgcccactatccttatggattttacaatacttgttaggatctcttttgctcctcgaattcctcatgggctcgggcttgccgaagggaaccttctgctcatgtgcaaggtatatattctcccgagtttcattaagctcgataaaaaatagcatacactggcatgtacttgtcatgcttcttttgtttctttttatcctttgatggttgcttagtaccgtcctttctttccgaaccagaagccccgagttatcaattctcgtggaaacagtacttgctgaaacattgctgggtttgcttcctgagcttgttttcaacaagttcatttcctttcgggcttcttcctttctcgtggaaacaaatacctaagccctttcgttgaactcagtgatgcttcttactggacgaccttgtaagtcatcccacaactcgcccctgcggtcaatggatcagtagagatccccgcctgaagggctgtaaggtatgtgttgtcattcaaattactaaccctagccacagccgtgctaaaatgacttaattatgccttaagtgtctcaccgggctattgctttatattggttagcgaggc

SEQ ID NO: 173520 - DNA, 544 bp, Cannabis sativa
aggtatgtgaaatggccacatagctatccaggcctaaatggatgggaaaaataagaaataaaataggctgagatgcaaaatacctctaaattttaaactaagttagtaaatgtctcattttttaaaaagcgacatttgtggccgaagttctcaaaaagttcagtctgatacataagtccccaatctcgaaaaatagcggtaatagtcctcaaggtcatattttttatttgtccgttagtcataattttaactgagtcgtttatttttttaaaattgcgacgtgtcgaaatattattagtccaaattattattttaattttaaaaaatgtaaataaataaataatttcttttttctttttctttcttttcttcttcccatcacgctctgggaatttcagatatggtggatcaatgattcaccaccttggaagttcaaccatatataatcaaacaatattcaatcatggaaattccccccatagaataaaactagtaatacccatttagatatataccaaacgttcaaagtattagtaaccgtaag

SEQ ID NO: 173521 - DNA, 1368 bp, Cannabis sativa
tatatataaatatatatttttatgtgtattcaaatgagtgtgtgtggataagggtataactaagagaaatgctaaaaggaactagtggtgcgaaacacctttctacgtgtcaatatagttattggtctaatctagggattttttctattttaagctaaaattacttaaaataaacttttatactactataataaaaaataaacatttataggatttaatgtttactaaaatactattaaaatttttatttacaaaaatacagtagagacaaaaaaaaaattgatagtgattaggcgggcaagtgaaagacacgctcgacttggaaaaagtgctcaaacaaattaatacatgcaagttattaatctgtcacgtgtaaaattaattgacaagatctattatttaatttcattagttttgacaaacactatggagactacttctataaaaaaaaaagaattaattttataaaaatgtacataaaaaatatattttatttaaattgagataaaatgtagtgttagggaccttttttgtttttaagagattggtgtcagaaactttattcaccatagattttattaaatactttttattttataacatgcaaaaaataatattatattcaatttttgttcgataaattagattgaaattacttttcatgtatactattattactattatattattattttgataatgtatttttgtaggataattataattaaataaattaattaaaatagaataaaaaaatattaatcataatatagtcatatatatataatttaagaggattattttagaaatacccaaaaataacaaaaattttacgtttttacaatttttttttttttacattttatcgacttttttttccttacaaactgttgtttttaggttgttctagaaaagaccgttgtttacacattgcaaaaatatagcataattttacggcaacatgaaaacaacgttgttttccctctaaaaaattacaaattcgtaaatatataaaaaaaaatcgtaaaattttttgttgcttttttgtagttgttttattgttgttttatagttattttcatgttgttgtctaggtgttgaataattgttttgtagttgctttagttgttctttttttttttttttactgaacatagtatttattatagttgtcatgaggttatttttttagttcatttttattgttttatagtttatttagttgatttatagttgtcgtgaggttgttttcctattattgttagttgttttcttattttctgttgagaaaagtgtaatttttaactttaaaagtgtatttttgtaaataaaaattttaggtcataaaattgttaataaaatataaaa

SEQ ID NO: 173522 - DNA, 545 bp, Cannabis sativa
cgggtcccaacaaaatataaaaattcaaaattaccatcgggccaacaatcaggccctatgtcgggcctatcagacctaaaattaaaaattatgaaagagaaaacacatcgggcctaaatatcgtaccctatcgggcccacattgggccataacaaaaaacctaaaattctaaataaacatcgggcaccatcgtaccctatatcggccccatcgggccctatattgggcctttatcttcaaccccataaccaacttagcatcacgatacatcgggcctgcctaaaaatgcattttctcgctcaaaaatcacatatacaatatctaaccctaaatctaatccaaaatgcacatatcaaaccttaaatatatcaatagacaataaccctaatcaataagaaaaacatttaaaaataccataggaggaaatcttaccttagccgtcattgtgctcctcttcctggtgggttgagtgggtggtgggttcggtctagttgtgcttagtgttggatatattataccaggatctagatttactaaaaagtatg

SEQ ID NO: 173523 - DNA, 781 bp, Cannabis sativa
ggtcaatttctctctgttctctctattttacttttctcttgttccagctcattcgagctgttatggtatcagagcaggttgctgtgttcatgctattcttcatcttgtttgttcttcgatctgtgttctcttgtgctgtgaatatggttcgaggaggtggagctcaaggtcgtggcaatggagtccatactcgaacgaatcgagaagttgaagacaattctttgaactcgaacactttctcagttcttggagaaaattcgagatcgacaaatgctaatgatttgtcgaatccctactttctttcaaatggcgataatctaggtgccgtgcttgtccctaaaattctcaaaggcagtgagaattacagcacctggagaagatctatgctgattgctttggttgctaggaacaaagtcaaattcgtcaatggaagattaccacagcttatgaagatgacgatgactacgatagctggtgtcgatgtaatagcaccgtgatttcatggattttgcgagctatttctgatgaaattgcagacagtattgtctatcacgataatgcagcagagatctgggctgagctgcatgaacaattcaatgaaagaaacgcacctcagatctttgaagcaaagaagatgatgcaaagtcttgttcaaggatctaatactttcacaacatattacactcgactgaaatctctttgggatcagataagagaacttcgcccaccacctgtttgtttctgtggcgcagtgaaagtgatacaagagtatcaagaagag

SEQ ID NO: 173524 - DNA, 506 bp, Cannabis sativa
caaaggccttgcatcttccttctccagctattccagattaagaggagagtgaaccacttgacaaggatgaggttctttcttagatagtgggtcaaaagatggtgtggcctcaaaattctgttatctcagtcacaaatttaacttacatgtatgtcgtgcttcacatgtttgctacaacaaattggaaacagacttctcacactgcaaccatcttctttgatatggcttctttcttgtacaaggttgaaacttgacatgacgttgatttggccagtttcatctatgaccaaatcattagtttttggaaaggtaacaagaaaaatctaaatcttccttttccttaagttatttacaaagtcttaagtatgcaaaaaagtgatcttaagacagagaaagaagatttggtggctccttccactggtgcatcctacaaggcctctgcaccaattcctgatactgttgaaccttcatcatcaaagaaattcaagcctcaatctatagtgttt

SEQ ID NO: 173525 - DNA, 694 bp, Cannabis sativa
aatcttggaggagcattgggtattggtatttcgtattggttaaatgccgttatactcggtttctacataaagttttctcctttatgtgagaaaactcgagctccaatctctatggagatttttcgtggaatgaagcagttttttcgattggctattccttctgcaattatgatatggtaaaaatataaatacttttatttgttttttgttttttcaataatttatttttaataatttttttctttaattttattaaagccttgaatggtggtcatttgaactgcttattttaatgtctggaatcctaccaaatccacaacttgaaacttcagttctatctatatggtgagttttaaattttagatttttattgtgttattataataatttaacaatttgcttaattatatcaattatactaataatacttttgtaacagcttacaaaccattgcaacattatatgcaattccatatggagttggtgctgcagtaaggtacagatacacatttatatatatatatatatatatttatattggacaaatatattgtgtaattaaccatacaacatgataaaaaaagtttattatctagcttttaaaagcatctttttctcataataataaattaaattcagtcacatattgcttaaagtattcatttttttgtgtatagaaagggaaatttacatg

SEQ ID NO: 173526 - DNA, 985 bp, Cannabis sativa
atcataaagaccctacacgaaccagctcaaatttatttatagtcttattatttttttttacatttttattagttataattttgttgaattgtaataccaggttatcaatatgtaaatttttttttttagaattaaattaattataattaattattttttttaaaataattaatttttaatttaaatattcaataagaccctttttaaaaaattaatattaataattttatttttcagatttaagttttcattatatttttttttaacaattaagccatttaattataatatttacaataaaattctatattttataaaaattaaacttccacctcttcttgttatgtttattaagaacacatgttcaaaatctataaccgataacaattaataactttcaaattttcaataatatatataagatcaataactaataacaattattaatattcaaactattttaaaaatacatatttaagatcaacaaccgataacattaataactttcaaacctttcaataatctatattcaagatcaataaccaataattgattaatattaaattttttgcaatttttttttttatgattttactccgaccaattgatacatatacaatatatttagaactgcaaagaaggaagaataaagcaacttcgtatctatgagaaaatagaattacatgacagatagtggaagtacagatgtgtcgagtacggtaaaaaaattatctttaattttataattgttatttatttttttttttgaaaaaaaactaaattgaaccaatcacaaactaacacacttatttggcatttaaagtattgattataagattgcgtgtagaattacatttaattagaggtcattcttactattttttattaattaaggttatgaatgtaataatttaaattataagaagttttattacaaatctttcaacaatttaagggaaaaaaattaatttctaaaagattctta

SEQ ID NO: 173527 - DNA, 810 bp, Cannabis sativa
ttgaatccattaacggttgacttaaggcacttggccggttgatttacagattatttaaattagaattaaacaaaaattaaagaaatattaaattaattttctattgcatcctctttaggacggtttgaaatgaaagaaataattataatttacagtcttacagactttttttttttttttaatttacttttttacgaaaaacaactaagaacaatatagtgccaatataggaacaactttagctttaaatatgcgtgttgtaatgtgttagtccgactcttattattcgggtcttttaaaatacaagttgtgtcgtgtcggactataaaaaaatatgggtcgtgccgtgcaataggataggtccaatacagtctgcaagtctggtaatttcgtgtcatactttaatttgtgttatgctttattcggctcaacttgttattcttaaataaaccaacatgtttttttatacgtgttcaaattcatactctatatttttgtatttttataacaattaatagtctaaatactaaaatatatgtgcattttatattttttaattatttttatatatgttttcaataataataataatatacaaaataattataattattataatttgaatattattattttaattgataaataaatatttattataattataattattataaaattattaagtattttaatgtgtcatgtttttaagctaatctattcgtgtttatgtgttgtgctttttaggggtaaattgaaaatactttttttatttatcaattaactaaatctatttctaatttatattta

SEQ ID NO: 173528 - DNA, 715 bp, Cannabis sativa
  modified_base (651)..(651): a, c, t, g, unknown or other
aagctctctctcattcgaacccccctaggccagctagggtttgattgttgttcttcaatcttgcaatttttcaacagttctaagtataatccaagctaaggtaacctttgagcaactctctttttagtttccttgagttttaagaaagaaaatttatgcatgcttgtggttttgttgttgtagttgttgttagtgtttaattttgttttctaaagcttaattatgtttagataaatggattagagaaggttttagtggtttttggttggatttaagcaagtttggagttttgaactaaaacttggagctttaatggtggattttgtttctgagtatgttgtgatgttttattgctttagatatgttcattggggtctaaatagcaggtctggaatgtttcttgaagtttggggttgatttgaatgagttatgaatttttgactcattcctgcactaaatcggaattccggttcaaaacggcctgtaggaaccggaatcttctgaaccggaattccggttggctcccaagacaccccacaaaaccggaattcctgttggggaaccggtctaccggttggggaaattttgggaaccttagttttcccatttttgtgtgtttagggtatttccatgttatttatcgataggganacttttagtttcaagtttaagaccccggaaagtgatttagcgtgtcactcacctatgttatgat

SEQ ID NO: 173529 - DNA, 569 bp, Cannabis sativa
ctggtcaggcttgctgaccttttttggacttaggtggagcttggtcggagttttattttactatatactgcaattcgatttttgttactgtgattagtcttatctctatgatatagttttgaatgttttagtcttatttgtatgacatagttttgttttgttgttggttcttttttgttacttattatcaaatcattgttaatggctggaaataacaagttctttgcgactaaaggagttgttagtagtgcagttacgtactttacacaataattaagtgctcaagctacgatgatgaatgaccttattgtaacaatttctattgttatgtcttctaggcggtgaatgaaaaggcataggtgttcttaagattaatagtaatgttataatctttttcatctgattttaatttattttgatcaaacaatctaagaattaggcggctaattatttaactcgtttttttaattttaattttggtcgtgcctttaacgaggagatgtcccgattaaattgcatgctattattttagttgattatcattaataaaatttacttattatttatta

SEQ ID NO: 173530 - DNA, 840 bp, Cannabis sativa
gataaaaacttttaagactaagaaagaaataaagttattttctaggcattcttcatttggaagtagtttaagtatcactaattgggttttttcaaattcaagttaataaatataaatataatatattaatgttagtaattttcaatccacttattaataatatgtttttaatcaatgggtctacttacatggtgttaatactttgaaagactaatttctatacactgatgctctaatgttaagcgtaggttcaattaaagtcatattcagacgagataaatatgaaaaaataaatatataaaatttatacattttcatccatagaagaatattaaatcttattgttaattatttttacagaaaaataggttgtttgtctagaaaactacggtgaaattatcggccaaaaaatggataattcagttgtatgtagatccaaaacgaacgatgagtccgaaatacaatcaattcaccattcaagtaactgaactaatggaagattaggaggaagtttcactatactctttttagtttttctaataatattccacatattacgactttttttattaattttttcttctattttaagatcgcacattttctttaatttttgttttaaaatttgcaaaacttatatcttgttcctttaaattttctataagtaaataataagtattattttgttatggcttatgtatacctaattatattttactaactaaatacaatagcacatattttattttaataaaacaaatcattcgcataattatacctatatagaaaactaaataaaaaaagaactaaactttaaataaaactaatacttacgtgcct

SEQ ID NO: 173531 - DNA, 561 bp, Cannabis sativa
aatcaaatctagaaacctccaaaacatagattaatcacaataagaaacttaaatataacttgctaacccacaaatacatcatcataaataacataataaacacatcaaacactcaaaaaactgaaaaccctaaaactaacaacaccttttacaaccaaaatacaaaattaaacctccattagagagtacacgaaacaaaaaaaaatcatcaatcataaaagtatcaaaatcgaaacaaatcagcaaacaacaaacaaatgataataaaaaacaagaaactaaaaaataattgatcaccagctcgtcataaatgagaaatcctaaattctttagtaacctcaaacaaactctaaaagatgatagatagagagaaaataaaaaatgaaaaaaaaaagtaaagacttaaataatcttgtttggatatacaactagagagagagactaacttctccactaaaggtatggtctatgaaagatgagagagaaatcgtccaaattttttttaaaaaaatagaagtgaaatgattgtgactgatgagtaagctatgagagagagagaga

SEQ ID NO: 173532 - DNA, 528 bp, Cannabis sativa
  modified_base (484)..(487): a, c, t, g, unknown or other
cccaccaaagtaagtcaagattttcatctttataaaaatgaaaaaaaatgatttatgtgatgtcttttactcaatatttttcagtacagactacagagttgttttttgtttttttacttgtaaaacatgaaaagaagaactgtttagagaagagatgtaatagttgccaaattacttggtagttgcagcacaaggtcatagtcttagagttcaaagcaagtttaaaatacatttttggattatttgtaaaaagaaattattgaaatatagaattattgtatcattacattccgaacttgtgaaggtcctattacaaagcattctacctccaagaaaagtgtgcaacaactgatataaaatgaatcgtctaaagttatgttgggaatcacctccttaataaacaagaataagaagcaattaaaaataggctaattagggtttttttctcccgaattttgacatataccaaatcatgccccttgannnnttaaggtcgttaaaaatgtcccctaaactattgagattgtt

SEQ ID NO: 173533 - DNA, 545 bp, Cannabis sativa
  modified_base (428)..(428): a, c, t, g, unknown or other
caaaaatatgatttgaataattagtttaattatggtgtacattattataatttctttaaataggtccctaattataattatgggattaattaattaatgaggaaagttgattgaagcatcacaccgtacaagaaaggagaaagagaaggactattaaggtttgatgccaaaataagcattattgcacgtgggaggagttagcctaaaagggtccaccatcaccacccttgttatttatttatttattatatttaaaaaattgtacaatgtagtcacttaaaaaaatatgtactaatttaatcttatctaatttggtattcgaaataattttagtcaaattttttctcatggtcatgcacgttatagttatttaagacatcttgcaaaattttaagtaatttaaaaaaatttaacatactgaaataganttcaaacagtgtgttgcacgtatgactattttattttatacgcatgtgaaataaattttttaaacactgctttctatattgtaaattattctgaaattcttaaaattttgttgaata

SEQ ID NO: 173534 - DNA, 640 bp, Cannabis sativa
agtaaggatatcaaatgaagaagttattggatcaacgacctcatctctcaaatacctcttaatatcattcattttctcactcaaacacttcatcacttcttgttgcagatatagagataataattttcttttatgaatgtgcttgatctaactctttggtggtgatacactactattgtatttttcaccgtcaatcttaaatttgttctccatactatagcaagtatacaaacgttgaagggtttgctccaccttgagcacaatctttgtaacaatttcagtattataaacactctcaaaacaatatttaagatacttcatcttatacctaggatcaagcacaacagcaacaaacatcataacattgatgttttctacatcccccaatatttgtcatactttcttttcatattggctgccattacagataacaaatgttcatcacttgaggcaaaatcagacaattgagtgtgaatttcacaaatttcatgataaaatgtgtttgatgtaacatgtaaggtaccactaaactttagtgtgacttcataaaaagtgcgtagaaacttgacaaatatcttagcactctcctaatcagtactagtaggcggtccaactctcttcttcccactttcattttcat

SEQ ID NO: 173535 - DNA, 592 bp, Cannabis sativa
tttgatatctaccaaattatacctttcgaatattgacataaattaaattatggcccctgaactttcatctatgttaaacttttttactaaaattaaaaaaaaaatccttaaatccaacaatctcaatagtttaggaaatatttttaacgaccttaaaagttcaggaggcataatttggtatatgtcaaagttcaggagacaaaaattataattagccaataataataataaataaattatgaaataacaaatataagtgagtttaaaaatattattaccattcaaaaaaaaatattattatatatttttttttttgataaatctaaaatttcattgcacaaagtctaaattttttttgacaaactataagcactaaaccatactaggtaaggcctttgatatctatacaaatttacaatgtatgaatccactcttcatttttcttgtttacttttttttggccatataagttgtttgacattttcttttaggctatgatttttttttcctcttgaactttgacatgtaccaaatcatactccctgaacttttttggccgttaaaaattctccctgaactattagaattgttg

SEQ ID NO: 173536 - DNA, 532 bp, Cannabis sativa
cattggatttgcaaacagaagctacgttaagggggttttgccacaaaaaataaagaagagggggttaagtgtatactaattgaaacttagaggggtttggctgcaaatttctcctttttttaaaaaaatataattgaggtttaagttttttttagttattttaagaaattggtttcattgttcagatttctaattagctattaactgtaattgatttctgtgagacaaattccaacgtctaactacggtggcgactctagcatcaaactccggtgacagtgataattctgacgactttttggtaattttttctggggatgatgccaatttcagagaattttccagaaccattagtaacttcattgactttctatgtaacaccctgatacttagtcgcgctatagtgattttctaattaatgtgtcacatttgctaatcaaaggattttctcagaaagtgtatcaaattaaatttgatttaaaactattaaactttataaatatatatatacataattacataaatcggaatc

SEQ ID NO: 173537 - DNA, 657 bp, Cannabis sativa
ccttgcagatccaccaataaccacttgctgaggagtgaaagatgggcatttgactcccgaagccgaggccagccctttcccacgaaccaaagaatcaagttggccagcttcagcctgagtctcaacaacatcaactgggctagcagagacagcctcagtagcaggattagtcgaaatacccgtagcagcagatgccataacattaggacaagcagtggtagcaatcaccaaagaatctgtggagtaggaggtgaatgctgagggcctcatagagtggcatccaaatgggttatgaccagcatggaaagcatgagcactattaggattaacaggagtaggaatcatgacagtagatgaagtataaggacttaaaaagttagacccaaaattaccagtagcagccagaaatgaagggaaagagataatgttatccaagaaattcttagtaggaagattgaggttaacaggagcatgatcaacaacagtaatggcaggagggtgagggtattgaaatggcatagacttatccacaattttttccttaccacgcaggagaatagtgtaagggcagggagggtcagtctgactttcatcatacttttgaaggtaaaaatgacaatacctcttggtatgatcaagtttaccacaaaagaaaca

SEQ ID NO: 173538 - DNA, 549 bp, Cannabis sativa
acccttatgtgtttattttcatttgttatagtgagacttttctcatctagaaactcgagaccggactcctatataaaggacacgtgtactcactttcctcaaagaaagtcgagatgtcaatgagagaccactcgagtacgaacctcgcctgaaacagactcagcaagatgatgcaaacatgaccaagtctaatcgcattcgcagtatgtaggaccaaggaacggtcttagcccgcatatatcaagatatatgcaagtactcccgcgatcctcctacgaaaatatagagattgattctctatgttgcgagctggtcccgatgacccaacagcctcgacaaaccgatatagactcgcatgttttgtttctatcagctcgttatatgatgtccataacgacgacttcacaaagatgcagacatcctagactcatctaatctcgaatgcatctcaaacctgcgagcttatgcaagaatatgaacagccaactcgcactgaagaagtcgcatacgttgctgtatttagtggattaaactggaaactgttcttca

SEQ ID NO: 173539 - DNA, 641 bp, Cannabis sativa
aatccaacaataaacttcataattactgattgtaaaatcaactcaacatcatgcttgaactccaaaacttcaagctcttgaacttgagcttaaattccaacaaacccaaatacttttagcagcaaccaccataaaacatattgaattcaagacataaggaaaaaccctagaattctatcaatagctcaaataactttccccaccaagaattcaaccaaaatataatcaaatcaaccaaagaacattacttcatgcaacatatacttatcatcatcattaccatcatattcatgcattttcaacagtaaaattcgacaagcaaaatgagaatcaaagttataaagactacctcaagttccaattcaaagcttagcacaattaacccttaagcatcaagctccaaaaaagccaagaatcaagcttttcttcccaaaagtcaagtttgaagaagaagagggttagagagggtgagaaggtcgattagagagagaagaaatcccgaatttctaatttcatttcatcaaaaacccatttaatcaaatgtaaaataataaaggtcaaatgatcaaaatgcccttagggccattgcacacacacattcacatatacatgggtaatttagtcatctcatgctcataaat

SEQ ID NO: 173540 - DNA, 505 bp, Cannabis sativa
tgtgacatgactactaccaaaataacatagtgtagaaacgcttttcttgttttttatattagcattcttataagttactggtgtcaattttataatatttattaaattaaattatacagtaattaatgatattttataataattattaaattaaattggtatatgatatttgggtggatttttaacattttatctactattgcgcatgccatgctatgtaaatatatcaaacatatctttaaaataaaagaaactgtacataggaagttaagaataatataaatgaatataaaactatcgcagagccaatcttaagtttaaatagattcttggccaatttttttttaggccttattataaagataaatattaaatagtattttaaaatttttttagaaaaatatgtatattttttaaagagaaaattacacttactatgggatttaaaagttcttatgataaatatggcacatttaagtttgactaatttatatggtattttttt

SEQ ID NO: 173541 - DNA, 719 bp, Cannabis sativa
tcatagtaattagtcgtgaaaaaaagtagctaagatttttccattgggactcagcctcgtgataatcaaatctgacaagtacagaatccaacggttgatagtcctccaactacaatttaattaattaatttaaacggtggattaagtaacttaagggtaacattagtggagtggaccccctcccaattctatgggaacagtctttattttttacaattttatttaatgcacgtgagaggttatgatccaacggtggttatacatccgccacaccggatcatggttgttaggtaacttcatttcacgatttggaggccaataaatgaaatttcttttatgtcaaaactcgtatatctcttaattggaaaaaaaaaataccttttaaattatttacggaaaagctgagcattatattaatattaataatgatgaagctgaaaatgaatctttttaattattttgtacagacatatattcgaaggagtgcataaattaaataataaatattaaatattcaattataattaaattagatgttattttttaatatctaattggataggatatttaatagaatgtccaaaaattaaatacagtctcatatcaattaaactaattagtagaataaataattaaattttagggattttttcaataatatacttaaaatacaaattaatttcaaaaataccttaacaaatctcatttacaataatacc

SEQ ID NO: 173542 - DNA, 902 bp, Cannabis sativa
  modified_base (438)..(438): a, c, t, g, unknown or other
aaacttgtattgtgcttttctatgctacttacttgaatggcaatttttacttgcactatgtgacagtgcaaatgtacccacacgcacacacacaagtttcattttttttttttaatttttgaaaaataacactaaacataaccctggaggttatggcttaatagctaatgaagtgttcaaaataatttgattatagggaatattatgaaggagaatataattgtagaaaaatatataaactgtattttgttgtgtagagtaatatgtaatcatatttccgtgttaattgaattatacattttggttgagtacagaaattttatatattgttttaaaaaattaaaataaaaatatttttttattatatcggtttaatgttaattatatataaaaataaaataattattcattaaaaaatatatttattaattagtaaanattaaattttattgtatttttaataatttaaatgaacatttctatatattttattactatgttatttatttttgttcgttatgtcattatgtacagttgtacaccatccgcataaaatttatgtacaatacatatatatgttattgttaataatatagaaataactcagttaacaataaaaaaattgatcttagagactaaatatatatcataatattatttttttttataataaattaagatattaatggtatttgaatttatttattaattcaaaagtgctattcaaattaatataatggaaaggaataattcaatctcactttttttaattatcaacattgctctatttaagggtagttatattactaagggaataatttattaaggttaaatcttcaaatctaacaagataatgttttacattaccattctcttgttagcattaatccattccaaacacc

SEQ ID NO: 173543 - DNA, 658 bp, Cannabis sativa
gaaaaattcaaaaataggcaatggagctacggaaatcaatgaaagaaaattttggcaaaatcaaatgtgatcattcttataaagaagactaagtgaaaaagctgaagtgtaaacaaaggaattatatcaaacacttcctatgcagttgtattaatataaagtggtaacatgggagaattcactagacccttttttaaacttacattggagaattcagtggagcacaaatttcaaataattaaaataaaaatagtacattcaataccatcaatgaagaagcaattttggataacctgtcactaacaaaagcaatatttttggtactttgttatagatgtctcagaaatgcatcatgagcatagtaggtaaagcttctaaagtagtagtggtatgtatatatattagtaatttaaagagataaaaacagaaagccttgtgatgcacagactataggattaaacataagaatatttcaaattaattattaattgttaaattaattctccaagtgattagcttggatgccactcacacttcaaagtaaacacattccaaacttgccaatcaaatctgtcaaacgctcttctaaaagactagctacaatctaggatcgccatttagatccaagttcatcaaaagtaagataattaaaatatct

SEQ ID NO: 173544 - DNA, 580 bp, Cannabis sativa
  modified_base (72)..(80): a, c, t, g, unknown or other
  modified_base (261)..(266): a, c, t, g, unknown or other
  modified_base (330)..(335): a, c, t, g, unknown or other
atctcactattattgaggcttgtacgtcaagttgcaaggtaggggtgttcgcggtgcaggtggtgcggtttnnnnnnnnnttttcaaaccaacccgcacatacattttttcaatttctcaaaccgcacctgcaccgtgaaactaaaaaaccgcaaaaactgcaccacaaaaaatagtgcggtgcagtgcggtttttacggtttctacagtttggactatcacagatacaacaaaactaagcaacacttgtcaaaaataccnnnnnncttgaaaataaatatgaaaaaaaattaacaaaacttagcaacacttgtcaaaaataccatcagnnnnnnaaataaatatgaaaaaaaaaattatgtttcaataatacaataattagtgggctttggattggacattcactataacgccctaaataattaggcacgctacccaagtcacttattaagccctaatcccctaaacgggattacttataaaaatggcgaggaatttaaactttaataacaataggaatgaaaataaacttgtaatactttaaactttataaacagaaagttacagatgttgggatccc

SEQ ID NO: 173545 - DNA, 686 bp, Cannabis sativa
tcgttgtaccttcccaccttgtaggctctcttactagttatatttgtaacttgataagggccttcctagttaggtccaaacactcctattggtgagtctttagtgttcaagaacactctttggagcaccatgtctcctatgaagaatctttttcccttgacgtgtttgttgaagtccttgatactttttgctgggaggcctatatctttaggatggcttgttatcttctttcttcttattcatcaagggactctgccagtagggtgttgtttgtttgttcatcataggttattcttctatgagatagtggcagtagctctacatgcaacatcccttgtagcggtaagctagagcaaatggagcttgcccagtggccgtcttcttggtagtcctttgcgactataagacctctaggaacaattcaggcaagttgccttttgcttcctcaaggcccttctttaaggtgtccttgagggtttagttgacagcttctaccagctcattttcttgaggatgggccacggcagaaaagctcttgatgatgccatgtctgttacaaaaatagtgaacatatcactctcaaattgcttgttgttgtctgacacaatcttttggtgaaggccaaacttgcatatgatgttcttcactacaaagtcaaggaccttcttggaggtgattgttgccag

SEQ ID NO: 173546 - DNA, 626 bp, Cannabis sativa
gcaaacagcaaaatttgctctattaactcttactgagacattaaaataatgaaggtagtctttcaatctcataactgtataagtagttatggttttatttgttctttatttcaagttttattaccttctgtagcattgttaatggtgttattaatcggccccgtcgttacttctggggatggaggcggcgcgttatttggagatccataaaacaagtttttctcataccttacactacaactcgggccaataactctacctcctactttcccagaacaacaatttggaatttgaccgtaaacgttatccaaacaattgatacactggttttcggacaagtctggggtgcactgtacgagtgcgtaaatggttaaaaactctggagcctttacttgtcccgtggcgtacttacgaagagatcctcctgaagcggcttctcttttcaagccatctaataaagtgctaagatcatcaaaatactccttaacgttagaagacgacacgttttggatgttccacatgtagaatatttgggtagtgtcaggagttcccgacatggacctattggagtagcgtaacatgcagttgtcgtaccatcctactgcctccttctggttcgggcagat

SEQ ID NO: 173547 - DNA, 519 bp, Cannabis sativa
tattaatatagaatacagtttaagctctttaagatcgaaagaataaaattgagctcatgtaaacaatggttataagagagttggtagtggtccctcattttactggaatcatttctcatatttttgagctggtggcttatagatttaactcttagctcttgcagggctatagctccaggagttgttttagattcgtatgaggcttttaaacatggatcatacttttaaagaaaagaattcacaaggaagtgtcttatttatctgtatttgtttaaggcacacaagaattcttaaatatatatatatatatataaattcttaaattcttaaatatatgtatttttgttgcattgcctatgagcaaaaagaaacgtcactttatctctttttgtcttgtttgttgatttgttttgcttaatcaattcttgagaagcgttttttttaattattaaaacaatacatttagaaaattttgtactttatttttttttaattaagaaacttaagacattgatttag

SEQ ID NO: 173548 - DNA, 527 bp, Cannabis sativa
tctacattttcattagatttgaatacaagttttttttagtacgaatactattgacttttcttttctttttaaatctttctctccttcaattttttcacattgaagttttgttttttcctacttttttttagttcctttttttatgggttcattttttggggtttttcaataatatacttaaaattaattttatttacaaaaatatctttaagaaaattatttgcacaaataccgttgtgccatgtcagcatacataccgaaattcaaaataattgctgaaaatagaaaaaaactagaaaaatctcgtttccgaaaaatttcgctttttgggagttttaaaaaaaagtaaccattttagttacttttgttgtgaataagatatatatattttttttgaataaacttgtgaataagatattaattagttatttttttattaaaaattttatttcagaattttatacatttatataataaaatagtcattttttttatttaataaaataatcattttaatatgtgagaaa

SEQ ID NO: 173549 - DNA, 724 bp, Cannabis sativa
ttattttaaggtttaatattagtttcctcatagcaaatataaatgtttcattgcagtttcatgacaattatcccatagttgacttacaatgcttaaattttcaaattgtcaggaaaaagatgccattctatttctcatattttgcaatggaaagtttgatcaagcaatgaataatgtaaattacaagttactggccaatacatttcaacagattggaaatatgaagaactagtagaccagctgaaacgggtgctagaatgcaaccaagaaaatactcaactgcaattgaaatgccaagtgaaagaaggataccaactgatgaagataaatgatgatctaagcctatttttctacatacaatttaaaaaaccttacttcacaagctatccattacgtgtgaacatggttagcaatacaataataaccaacaacacctccttctttgcaatgagcaactcattagttccagaacaactattttaaggttgtatgccacatccaaaatattaacagaaacataaagtattatcaatatcatatttgatacattaatgtgaagtttcaaaacttttcttattacattgactattctgttgaatctttaaaagtttcttattgctaaaatagtgtaatttttaccatggggactcgaactccgaagaacaaccaaatgagaaaccttatgcaaagcattccagccaactacaccacacactcagtggta

SEQ ID NO: 173550 - DNA, 969 bp, Cannabis sativa
  modified_base (913)..(936): a, c, t, g, unknown or other
taatttgaaatactcaacatattaaaaaatacaaataacaataacaaaaatattaatattacatagcaaaacagcataacactaaacagttattggaaatgagttaatgatagtaagaaaatagtaatgtgaaatattatcttgtttgctttgagggtttaaccttacaatgttattcctttagtaatgttgataactaaaaaagagtgggattgaattatttccttccattatattaatttgaatactattattgaattaatgaataaatttaaatgccattaatattttgattattacaaaaaatatattacgatatatatttagtctgtgagattaattttttatttttaactgagttatttttatgttattagcaataatatatatatgttatacacaaattttatgtggatgatgtacataaataacataacgaataaaaataaataacataataataaaatatatataaaaaaaatcattttaattaagaaaaaatatagtaaaatttaatatttacaaattaataaatatatttctttaatgaataattattttatttttatgtataattaacattaaacatatataatataaaaaaaaattatttttattttaattttttaaaataatatataagattcatatgtactcaaccaaatagtgtaatttgattaacgggaatatgattacatattaccctacaaactaaacacagtttacacattttaaaataatatataagattatattaccaatttaatatttactaattaataagtatatttctttaatgaatacttattttatttttatgtataattaacattaaacagatataataaaaaaaatatttttattttaattttttagaaggctaattatgattttttccccctgaactttgacnnnnnnnnnnnnnnnnnnnnnnnncttttaaggtcattaaaaatactccttgaacta

SEQ ID NO: 173551 - DNA, 673 bp, Cannabis sativa
ggccattggaactagagaaacccatgtacatatactccttgaaaggtcgagtcttgcgactagaaggccttacaacagagtgagagtgggtgaaattaggggaaaagatatggttagtgaaattagggtttcaaaatgaagaaggtaatgggtggtggtagtgtggtctggagaaagaaacaaagagagagaggagagagagtgagcgtgaagaaagggaaaaaaggcaggaaagaaaaagaaaaaaatttatttaatgattttttttttttgtgtttaaaaaaaattaattaatttttattttatttttaaaaaatatttacgtggaccaataatattgtctcacgtgtacactgtgtccacgttggctgaactgaactgagccatgttggcaaataacggagtcaagggaacggaagtgtgtttttgctaacagaatgctggttttgggggttttatcgccaaaatttgggttttgggggttaattgcaagtaaaataaaattattggggattttgccgcaattaaccatttttattaacatatgttaattttttttgttaacaacatataaaataaagtaaaagattattttttattttaaatatatattttctacatattaaaataataaaaaaaataataatataattgttattttttatataattat

SEQ ID NO: 173552 - DNA, 508 bp, Cannabis sativa
cttaatccaactcagcgcctccttcacacccaagtcttccaccattttgggctgcagcactcctgaacgacagcaactaaacgcctccaccaacgcaccaatttcgtctctaattacccccgcgaagctataagttctaatctctgaaaaaatggcaacttcgacattaatcttcaaggtgttaacaatttgatccatgtttcagctccatctacatctgtaaggaaagcagcagtaggaatcatagttgtatcttgagcccgagtccaatctgtgaggagggctttagctaaatgaacatcgctctcaaccgtggggattttctcaaccaaattaattcattacgatgcctccatatcgcccaacatgtcattgcagctagccttcgtttttcctcatctacctgctgtagtacagaagcaaaccagttggcaaaagaaccaactgctgtcagattaacaccagtagccaaccgttgccaacacgccttggcaaaagagcaatccac

SEQ ID NO: 173553 - DNA, 511 bp, Cannabis sativa
aaaaattaataaggacggtgatgaaagcagttaaattaatagtgtgattaaaattgtatcaacttccaattaattatgctaaaattgttaatattaagaaataagaataataatctagttaaaaatattggtcttcttgagaattattattattattttcactcagtcatacacgcaaagccttgtatctcacattttcatcaccatgacataccatttcaattcacataatatctatttttattttatataaaatgtggctatataacagaattcttgttttattaaaaattattagatattgtcacgtaaagagtcatagtctatgtagttagttaaacctaaatataattaatgttacaattaataataaatttgttcatattgtttattttttttcttaaaaattattttgaaattttaatatttagaattagttaaattttaaatattattttaaattaaatttgaatgttttaatagtttaaccagatgagcatttttattaatt

SEQ ID NO: 173554 - DNA, 574 bp, Cannabis sativa
aaataatataataatatttatgttaatagtaataataattatataattaatattaataatatttttgttaatagttattttattattttttcgcaactaagaaacgtttacttcacatttttggcctccaatcgggcttttaagatcgtcgaacctggaaatattttttttttcacaaataactcatattatatccacatatttcaaataaatttttgtaattaataaattacacttatttattcacttatcgggttttcagggtcgccgaacctaaaaatatttttatttcacatagctcatattacattcacacatgctatataaatctccgtaattgataaaattatgctaatttactcacttatagaaaatttaaattttatattgaaatagattataggatcataatctcacttattacttgatcaacgcataatataaatataaatgctaattattgaccattaggcttatcgaaatattacagggtggtgttgcgatatttagcacacgcaagtgtacgtatcgtttcaagtagtagactcactaggagtgaggtcgatcccacagg

SEQ ID NO: 173555 - DNA, 539 bp, Cannabis sativa
acagtggtattcattaagataggaaggtttattgatttgtcttcctgttcttgtagaataaggaacattatgagtgggaatagcattagaagaactaggaatattaggttcagaaacaggtgaggatgtacctacatcctgtgaattattaggctcagttgtatgagaaaaatcaaaaaagaaagattcatgtccagagggaaacacatcagtatgaacaaaaggaaagatatgttcatagaagtagacatctctggaaatgaatgtcatgtttgtattcaaatcaagaagtttataagccttcatgccaataggatacccaagaaaaacacaaggaacagacctaggagcaaattttgatctagactggcttagagtggatgcataggcaaggcatccaaaagcttttaaatgctcataggctggtggcttggaatatagtatgtcaaagggtgacttgttctttaggtttggtgtaggagttctgttaatgagatatgctgcagtagcaacacaatctccccaataaaccagtggta

SEQ ID NO: 173556 - DNA, 861 bp, Cannabis sativa
gaagccgccatagttatggtagggcgtctccgcagctcggggcggccggtgatacgtcccggatgttgagggtttgattccagccacctccacaatgttctccagctggtgggggcaggttagggtggagtgaagctctgccgcatcccatcctgtggcccgagacttatacccctcttgggcaacgggacccagcgagacgtcttcaagggtagccagacgcttaccactcttcttggacgactttgaaccagacgcagacatgttttgaattctgaaaaaagagttaagattcaagcagttaggtcccataccaaaccctaaacaaagaaaaagggaatgggggtcccctaaccgctggaaagaggccccctccggacatctgtcaatcagaaaaccctagaaggatttcctggaaaaaagtcgggtgcaaagaactcacagaagacaatatcgcgcgtaaaagaaaaagaaagggcagtacacaggaagcgtatggtcctttgtaaaaataacaacagacacgtgacaagagtaatcctaacaccagaaatggtgaatctagacctgtcacgtgaaaaaccaaaaagaatgccttcccagaaacttcaaataccaaacccagaaaaacaacaaacagataagtaaagcatgccatgtacataaacagtaaagcaagggatgcgagaaacttacaatgaagtgttgaaactgggggttatgttgtcgatcaaacaagggaaggtcgattgatagtagtgagtgaaggttaactgggaaatttgtaaagtgttcgaaggtgttctcttggtctgaggattttttctctctgggaaactcgagcaaagttggcaagaaatg

SEQ ID NO: 173557 - DNA, 1367 bp, Cannabis sativa
tacaaaatccattaaaacaactaaaaaaaaaaataaactttaatatgcacaaaggggttgattttggggataattagataaggtactattttttttgtaaaaaaattacatttttacgtttatttttttttttcacatttttacgtttttttttatagaaataacaagaaaattatataaaaataacatcaaaacaacaacaaaaaataacacatagtaaaaattaataacaaattaacaagaacaagagtaagagtacaatataaaaaagaaagaccgcattttctataaataaattaaaaaaaatcataaaaatattaaaaattctgtgaaatcgtatttttataatttttttttttattgtttttgtgtatttgtgtaggtttgctggtcaaacagagcggcttttgagactttatgcattagtttgcaaaaatatcatttttttaaataaattttacttttgtcctttttaagcaaagaataaacataactattgcaaaaagaaaaggagtcaaagatgtattgcacaaaaatgaattcaacttaaaagaaaaggcaaaactgcctcaaacacgaaatagggaaaaactccaaactaaaacagaaaatagttacaaattagtaactagaaaaagataaattgtaactaataatctattaataaccaaactttcttttataacaaactaaaacccatattcagatatcatctcaactcagttagaatataaatcaaagaatggtccatgattgtaatttttcaggaaaattgtggctaaagaaccaaaatttaaactttgctagtgaataagtaccaaaatatttttttatggcaaaaatactaaaaggttagtttttgacttcagaccaatcaatagcaacatgttagcatattacccaaaaaagtaaagttttgatatttaccacaaatattgttattgagcattaatggtacccagcaccttttatagatagcgctctacgattaattagtgatattcttaaaaattaatttcttaaattatatgagacccaatacttaattacactaatagcactatgacaccgagaagggtgctaggcaccaatattatgttttagcaattctctttcacaaccaaaacatataaaataagagtaactccaaggtaatgtaacactatccaaccaccatatttgagatatatgttatagtggggtgcatatatgcagtactacagtagcaacgacatatccattttttttaagggaaatttgaaattctatgcttaaaataccatttaattttttccctaaataaatagttattaaaattggtcctatatgacaactttcctaattttcctaaactacccctcacattt

SEQ ID NO: 173558 - DNA, 811 bp, Cannabis sativa
gagctggtgaatttagctattacccacctccacgtcttacaggtgagacatctgagggggccagtggcaagaccagtacaagtggctcgactggtataggcgcttggagccttgaacacatcagggcaggggcaataatcccccttcgtgattatttcaaggattttgtaaaccaccttgggcttgccccatttcaactaaatccagtctcctacagaatccacgcaagtttgagggttctatacaaaatcttgaattgggagtgccccaccccatggaaattaagtatctttactccgttaaacccgttctagcgaggaagaatgatgtaggaggcttttattatcttggcactcactccagcgagcccaagatcatcgtggacttgccaaacaaaacacccttcaaagatagcttcttttggatgaccagcctctccctaattggaacaaccaccttccgcataattcgtaagtgattgttctcattaggcgtggttaaattgatccatgtctttttattctaagttatctgactaaagttttgtttttgacagccctcttaaaagacccctactcctgagatggccaaccgcaggctcctgctgactcttccttatggccttaggtcgtgcgacttctttctaagcgaggtcaatatcagacttgtggatctccttactgacaaggagtttacttgtgattacaaatatcccaagtgctcttcttggcagtaggttcccgtcccagatggggataagggctgggatcacgtggctcaggcacagtaccttcaaaacactgcccctcgg

SEQ ID NO: 173559 - DNA, 1145 bp, Cannabis sativa
acaaaaatacattatttaaaattactcatttacccttcaatgtatgttattcttaaaatacttagctctttgtaaataatattttaggaaactaataatataactaccacaataggcgctctatcatttattatatttattcatatgcctaagatcaccatacatatgtacacatattaaactgaaagcaaatagatgagaagaatatttacctcttgaaatctatatatcatcttcgattttttttgtacgttgtatcctcgaaacggtgatgacaaaaatcatatcttgatcttccagactttctaccacacataaggactagtgtgggcactagtaagataatagtgtatataaagtcattgataaagtcttaacacatgaacaagaactatttttttagtgatagagagaaaaaagtttgttggttaattctttttaacctttcagaatagttacggacaaattcttctgtttcaaaatctatataaaatttaatttatacggtatatattaaatcaaccatataaaagttttatttaactaattatttgaattcaaattctttcttaaatcttatataattatttgaataaataatacaattgaattctgttatagatatatatatattctataaccgattgagagaatctctcaaccacttgaaataatatctcaactacttttcaaattcaaatatttatctattgaattaattaactcaaaaaaaaaactaatggggacaccgtatatagtggcacatgcactgtgtctgggcacagtgcatatgacgcctcatttgtcttggttaagacaagatatgtgtcttttttcctgacaacttttgtctttttccaatttaattaatttgaaaaataaattatttcttacaaaataaatcattaattactattttgacaattcaaataatttttttcgaacttccatatacaatttttatcccacccctagacagtgtttcaaggtggcgatccaacgaccatgaaactataattctaagttctaataaactatattatttattgaatctcatcagccaaataatcttatttattaattccatgatttctccactataaatatggaatttcactcttagtaattatggaatggtatttact

SEQ ID NO: 173560 - DNA, 740 bp, Cannabis sativa
caggaggggtaggagccccgccatcaactggagtcctagcagactctgtcatgcatccaactgcaccctgagctcgtagtgccttttccaccattttagcataggtagttttgtcgtctgtagtaatcatcaaatcatgtcgaatcatcgcattcaacccatccaggtatttttcctttttactaaaatcggttggcacaattcccgaggccaaccttgccaacttgtcaaactgcgtcgtgtactcagtaacactcatattttcaaactgggtcaggtgggtgaactcttctctcttgacacttctgactgcctctttatagtatttggcattgaaaagttctcctggaacttttcccaggtcatcgtcgtgacatcatgaatcatggacaccatgtcccaccagaccagtgcgtattcttggaactgaaaagtgtcccaaaccactctatcatttccggtgatgcccatgaaattcaaaattcttgtaatcactgttagccactgcttggctttgataacgtccgaacctcccaaaaaaactggaggtgcttgcttgcagaacccttcatacagaggttccatcggattgttgccacaaccggtttggcctgcaaaacaagggcgggtgccactggtatctctggaacaggcactgcaggagcaccctgcggtctcaattgccgaattacttcttcttgttcattgattttagtttgcatttctgcaaacctgttttc

SEQ ID NO: 173561 - DNA, 700 bp, Cannabis sativa
tgtgaacaagattctcgaggaataggaggccaaaggcttgaaaatggcaaagtatttagagaaggtttgaaagaacttggaaagattcgattactttaaaattgagcaaattctaagagaacaaaactccaatgctgatgccctggcaaaacttgcctcgcagaacgacttggatgaattgaatttagtttcggtggagatgctaagtgagccaagtatatgtgaaatggaaggcatatagatgatagacaactctcctacatggatgactcttataatcaactatctactcgacggccaacttccaattggcaaaaacgaggcacaaaaactcttgtatgcaatgcctcgctacacgataattgaaggccaactatatagaagaggttattcaatgcctctacttcggtgtgttctccctacagaagtgaaagaaatcatcagagaaattcatgaaggcttttgtggggatcatgcaagttggaaaagcctgtctaaaaatatcattagacaaggatattactggccaataattaataaggacacccatgagtttgtcaagaaatgtgataagtgtcagagttttaacatatacctcacgtgtcgccaacagaactaagaatgatgacctcgccctacccatttgctatatgggggattgacctaattggggcactacccactgggcgaggaggagcca

SEQ ID NO: 173562 - DNA, 567 bp, Cannabis sativa
taagcacaacaagcacaaaagtacgacatgtaacacaaatatactaactaaaaaatacaacaagttaaaaattcttataatttaataataataagagtaaatagcgacataagtatctaaaattttaagtttgtaagcgagataaatctaatgtttatttttagcggtataagtactcaatgtttataaaactgtaattttcttccagttttatcagtagagactacagagtttgttttaaatttattaaaagaacatttagaagttttagatactatatgtttctgtctagacccaacgatttaaaatatgggccttatatgtgtcctgtttaagacaataacaaagtttgtactgataaaattataaaaaaattacagttttacaaatattgagtatttatgtcattaaaaataaatattaaatttattcattttataattttaaaattttgagtacttgtaacattatttatatatttatttactattaaacatttagattgtagaaatgataaggaaagatgcaaagtataggttgagcaattttatttttaagaagttgaaa

SEQ ID NO: 173563 - DNA, 592 bp, Cannabis sativa
tagaagtgtattctttgcctctcacttctaattgtctttatgtagtgaccattttgtttttcgacatgggatttgaattttttgaaaatatcgaagacttgcgactttttttttgcataaaataaacccatgtcattctagtaaagtcatcaatgaagagaaaaaagtacccgttttggtcatttgatggagtgcgcattgccccacagacgtcaatatggactagctccagtggctttttggctctccaagttttgccagatgggaaaggtttttcgatgttgatttccaagcatgcatccttctcagactatgttgatctccttaattgttgggaggtctcgcatcatgttcttctgcctgaggatctttagcccatggaagttaaagtgaccaaccttctatgccataaccatgactcatctgtttgtgcttacattgccacattgcttgcatatctccattgtatgggaaagcatttattttctttcattttcacgtttgcaatttgaaatgatttatcttgcttatcatagattgtgcaagattctccttcaaaatgcaaagagtaccctttctcaatcatttgacc

SEQ ID NO: 173564 - DNA, 542 bp, Cannabis sativa
taaatttaccacaagagtataatagttgatttaaagcatgctattttattaaaattataaaatagtaataacaaaattaataatatttaatataataaaaacaacataagactaagttatgaaattaaaaaacaacataaataaaaataaatattaagtaaaataatattttaataaacatttggtgtaattttatttaagtttttttttaaaaaaaaaaatatataatatttaattaatttcataaatattttattttattaaattattttaaaatcttaaattcttactagtagtcatgatacaattatattataaattaattatttttggttattaatggaaataatataaaatgcgaaatttttaaagtaaaatatatttatttagtgtgatatttggtatgaattattggtgttgttgcaccaaaaagtagaagattctataccaaattagtgtagattctacaccaaattaatataacccactacaaaaaactgctacctttagtgacaaatttttagttgcaatataattttttt

SEQ ID NO: 173565 - DNA, 502 bp, Cannabis sativa
taacttccattagctccaaaataatccaaacaatactcagttagactaaaatggatactgggtacaacctcgagcccaaaatcaattttgaggaaaacccaaaaattttcccttgtaggtcgaccggttctgctacaccagaaccaaccggtcgatcggttctggcaggatacgtatcttgggttttcacccccaactcgaaccaaaacgaaaccaaacctatgcaactgctccagatcaataaattatcataatcacaacatatcccaataatcaattaacagcaattcatttattcaatcaaaattgcataatcaagtgaaattagacttaataaacttcaccttaaccaaaccaaagcaagcagccactaactccaactgattcaaacctaatcgtactccaaatccaatctacaaacacattctaaactcaccaaaacatcacagctcagaaattagacttaaccctaagcaacacttaattcaaaccatggaaattc

SEQ ID NO: 173566 - DNA, 618 bp, Cannabis sativa
accatgggagtaatattctccattatagacagagagatttgaggactacaatgattagggtttcttgagagtaaagtgaaagagcctattcacttttcttaggtcgtaagtagagtatacctttgacaaagtttgaccatgaaaaggaaaaaaatgatatttatttaaaaaaaaaattaactttgcaaaatgaaatatacacgaccaaatagactaattttcaccacacgttttggtagaaaaactgaaataaaacatagacatttggtattgtgagcataatgaactaacaactacaaatatgctagcaatatagaccaacaacccaaacttgtcaacagagataagaaatagaaccttagagatactcaagagcttttagtaaagacatgaaagtcaacaactggtcaataacgagaatgaagccactgagcacaaaaaaatggaaaacatgcgcaaaattttttttgaattatataagcacaccaaactccaatgacaaaccaaacaacacaagaccttgtatctccataagtgtgtgtaaagtgtcctcatgtggtccaggaagagaaaagatcttctagaccactccctcaaataagcacaaactattgtgtt

SEQ ID NO: 173567 - DNA, 565 bp, Cannabis sativa
gactatttattatttattatctttcaccacataaaaaaatcaatagttttttttacatatttttttttttaattagaagcaaattatttaaagattatggtatatctatattaattttgttaaaatctcttttatttgaaagttatgtctattttttaaaaaaatttatgagttgttgtgggttgttgatatatagatttggttgtacatcatatttttcttttgttgtaatgtatattattattcttagatgatatttatttttcattttactatgtataatagtggtatataattttaggcagctgattttatgctccatatttgaaatcacggaatgtaattcgttgtacggaatggtgggtctcgcgttctattaaaatttttattatttttgtgaattttttttatttatttgacaaccagttgttgtaggttacttcaccacttgtcaatttgattttttaattaaaaaataaaaaggtacgaaaaggtacaatcaagttactgtttgtggtagttaaggtacgaaaaggtacaactaatttactgtttgtggtagtta

SEQ ID NO: 173568 - DNA, 554 bp, Cannabis sativa
tttactgatggaaaaaccccaatccatataaaaatgagtggtatttttaattaaatagataaattaagtataaaaatttaaattttcttattagtactcattcatgagtaatactcattaaaggtgtatctatatatatagggtcagtcctaaggtatatgaggcctaaaacaaccacagcccatgtacttttaatggtattataaccatattaagaaaatttgaatttttatatttcattttttttatctaataatttttttttattatttttatattatattggctgagattgttatatagaaaaaaaaataaagaaataaaaaaaaaaattgagtttgactttattgttttttatataaatatattttaaaaatcgatatttttttaattaagcatgaaactcaaattgattttatattatttactatcggattaaaatataataatttaatatttttaaaattaataatatctatagttaaatttttagcaactatatatcaatgggtaataataaaaacttaatattcactaattatttaggcttaatt

SEQ ID NO: 173569 - DNA, 599 bp, Cannabis sativa
  modified_base (574)..(574): a, c, t, g, unknown or other
tataaagtaaactaataagtataattataaaaaaatatatagaatcaaactaatgtaataaaattttaaaaagtaaaaattaatatatatatataataagaataagatacagtaaataaacaagatattttctacattttataaaatataaatccttaaaagaggaatgaataaaataaaatatttgattatatataattctatatacctgtgacacagtaaaagtaaaaaaatttatatatatatatgtgtgatttgaatatatagtttatgtgaatattcattttaaagaaaaaaaataaaaatgaaaaaaataaaaaataaagcttacttattttctttaataaaataggagagattcataaaaaaaatctaataaaaaaataaaaaaaatagagcttacttgttttcttctttttaaataaagtaggagaaacccagaaaaaaaaatcgttctattagtaggaagataaaaaaaaatgaaatttgtttgtataaaatattaattactttgaaagatattgatatttgttataaaataatataaaattatataaagtagatgagaagaaanaagaagaagatgaagagagaaagag

SEQ ID NO: 173570 - DNA, 702 bp, Cannabis sativa
gaaagccttaaggccaaatatgaaatcagtttgcatgcatgaggctaaggccctgctagaaccacatagccagaatagaagtggacaaagctcctgtaggggccacgtaccaggcttcaattaaggcagagttccttacaggaaccaagccatgttgagtcgtaagttgaacattcgactataataaactcaccattaagcttgatatagagtttctaaggaaaccgcgtatgaggctaaggttgtacatgcctacagagccaaactcttgccgaagtcacatgaggatagaaaactggctacccacttgaaataaaggcccatgctggccaaggttctcaagccttgaaagggtcggccagggtcccatgactcagccaagaactggctagggtcaccaaagtcaggcatgaacaagcaagctttatagggtaaaaccataaagctagccaactcccatgattaagccttaggttcggccaggtctcagcaagacctcctaggccggccacagtaagttttgaatcccaatgtgtgtttttctttcaaaacttgaatatgtccctcgtattctttatgaatcaaagagtcaagaattatagcgaaggacaaaatcgaatcctttctatcaaaaagtcacacattacaggttggaatatattttaccaagatctagatttaataagtatgtttttaacatcc

SEQ ID NO: 173571 - DNA, 526 bp, Cannabis sativa
gagtttcgttagacattgggttgggttgaactaagttatattaatatggtgtgtgtttagtgtagtatatgattaattaagtgaattatggaatgataattttatcaaataaaatagtattcaatactatattgatagttataatttttttttttaaaaaaaatatttgatagtaaattttttgctataaatttatggaatttttttaaaaatgtatttttttttattttttatttacaattttaatttacaacttaaaatttttatttacaaaaccatatatttcttagaaaaagtaaaaaataattaaaaataacaaaaattatcgataattataaatcaattcataaataatctataaaataactaaacaaataaattcatgacaattataattcaagtataaatgaattataaaataaaataataaaatggtttttttactgaaaatatatttttatatataaagagtttaaagcatcaaaataaattttattgtgtgttaatgtatttttgtatttttttt

SEQ ID NO: 173572 - DNA, 545 bp, Cannabis sativa
  modified_base (77)..(79): a, c, t, g, unknown or other
ccggttctagatcatgcacaagcaactatgctagtcagtaattttaccaaagaagaagttaaaaaggcagtatttgnnntacctggagataaagcccccagactagatggctgttctagtttctttttccaagataactgggaccttgtgggagatgatgtttacaatgcagttacttcattcttggaatcagggaagatcctcaaggagattaattccactatcctgacaatggttcctaaggttaaatgtccttccttggccaaagattatagaccaattgcttgttgcaatgtaatatacaaagttgcaacgaagcttttgtggtctagaatttggcttgttcttcctagtttgatttctcaaaaccaaggagggttcattcaagggcgattcaccggccacaacataatgatttgtcaggatttggtgaagcactatgggaggaaaaccaaaaaggctaattgtttgatcaagctagatctatagaaggcttatgatactattgagtgggactttgtggaagaaatgttgagggcacttaa

SEQ ID NO: 173573 - DNA, 1276 bp, Cannabis sativa
gttggttagttttgttctttttttcactcctcgttcataaaagttttgacatggtttgtgttaacgtagattttcgttaactaattaataaatctttttcgtaataaattaagcgcagagattataagaaatttgataagaataataataataatgacaccaggttttttacgtggttttccagttaactctgcatagtccacgagtctatcttattcaagatattctggacatagaaatatagtattacaattagtgatctctctctctctctctcaaagatttttccgtccctttttctgtataatctgcccctatttataggaatataggttgacagttatttacatttgaatttgaaatacataactgttttcgcaaaacgtgggctttgattacgttccatttaatacgtgtagaattaaaaatctgcataaccatttatcattcttatctttaagatagtggacgttgatgtgggacaggagcgtctcactagaggcatctcgctttgcacatagatgaatgacttggtttattcatatacctttcagcaatggcatgagcaccagtatatagagcaaacttaaaaagtgccctttgactataaggccttgcaaactggacaatgatgtcctacatgctcccaagatattgcacttagttattataataaggattatacgctaagtgtttcaacaactaattcgcctcgtcaatgcttccctacatgtagcgaggtaaatgtctcgctatgcattgtccgtagttccctcgggattacgccttccgaggaaggatgatttctcgtcaatacacgaattgatagtttgtgtatccttgtctcgcctgagaatatatcgtcagtgagttatgaatatactctattaattctatatttaatgagttattccattttgcatttaatgatataatcgttattgtatctattgattcatattccacgagattgacacgtgtcactttctaaagtacagtcaaattttgggtataagaattgccccttaaaaaaattctttttaataaaaagtactttttaaatgattataaagggtattttggtcttaacctaatttgaaaaattgcaggcttttaaatttggcgattcatgctttcgaggtacatcattagcattaatgagccatctttttcaattctttcttgttcctgtccgttggatcttttgttcttttaatctaacggagatcaatctcaaagtataaaactgcacaggaaccatttttttttttgccat

SEQ ID NO: 173574 - DNA, 534 bp, Cannabis sativa
tactgtagaagccatttagagaaagagatgaatgaaaatgtcaaatattaaaattagggaggtatgataacatcagccattagactaagtatgaccatgattgaaatttagagttaataggtgctaactagattaaagtgagcaaatcatacatataaattttttaattttatgatataaattttttaattttatgatggcttgacgattacattgttattatgaatttaataatagtgataataatttatttggctaattagaatttttgctccccgaactttgacatgtatcaaattatgttttctgaatttttctacccgttaaaaaatctcatttaactattgagattgttagatttaaggaattttgtccaattttagtaggaaagtttaacatgaatgaaagttcaagggacattatttgacacatgtcaaagtacgaggggtatattttggtagatattaaagtctgatgagcatgatttagtacataaacaatcactaaataagtaaaattgaatgaaattggaca

SEQ ID NO: 173575 - DNA, 842 bp, Cannabis sativa
caatacattagatgcttggatggtcgaaccaaatgatcatgactcgattgtttggaaaagcattctctctactcgaccaatttgtctaagaggggctgggataatcgtagcaagtggcgattctgacctctggaccaaaccttgggtgccatggaagactaatcaagaagttaaggacagtttcagctacaacagagttcatgcctttcataaggtttctaatctgttcatggaaggcacaaggcaatggaatgatgaacttataagaacatgttttgatcacgatatggcggagactatactcaacattaagccacttggggaaggaaatgacatttttttttggaaagcggctaagtctggaaagttttctgttaaaagcgcctattggttacatcaacatgatagattcttggggaccaatccgatttggatgcaactgtggaaatcgaagattcatacgcgtctcttactactcatatggaaagtgatggcagattgcgttccaacctttggcagactcagatttctcaagaaccataacagagcctgtgttttctgccaggaagaaacggaagatatgatgcatctaattgctaaatgtaacattactcgcggaatttggttcaagagcaaatgggggattcgtatagaccagatgggctggatcagcatcatggactttgtgaaatggtggttggatcttgaggaccatgaattaaaggtgtttgctgtgtgcatcgtggaagtgctgtggttttggcgcaacaagattgtacatgaatacactccctgggatattcctctgctggcaaaggagtgtcactacagatcgcaagagt

SEQ ID NO: 173576 - DNA, 537 bp, Cannabis sativa
  modified_base (184)..(185): a, c, t, g, unknown or other
tagtttcttggttactttttttttaattaaagattttcattaataaaaaatataaattgacactttatttataataatactttcataaagtgtggacaacatttatactctttatgtgattttaattactaaaatacatcttacacgatcacttatacaatcaatcagacgatggttgcagggnngttgctgcgtggttgcgcgatggttgcatcggatgaagatttcaatcagacgatggttgcatggtggttggacgaagattgcatcaaatgaagatttaatcagacgaaggttgttaagtggttggttaaaggttacatcagacgaagattttaatcagactaaataactgttagcaaaatgtttatgcaactcttatgaaacatgaaaaatctgaacagtgtttccacgtttgtaactctatcgacatgtctcttcatgatttaatatgaacaaattcaccattagaaatttaaaaaataacgaaaatacatcaggataaatattttactatagtactgatgtaattttttt

SEQ ID NO: 173577 - DNA, 512 bp, Cannabis sativa
cttccctaaactcaatcataatccgcagggggagcctgagcttgtgtcagaattacttcttccggatgggaactggggcattcgaaaactgaatgacctctttgacaaggaaacagttgctagtatcttaaagggtggtagacctaaccgccagggtaaggatagatgggtttggacaaaagattcaaagggagtgttctcaactaagtcggcttacctggtccaagcattggaaagggctcccttggggaatgttgctcctgctatgtggaacaagttgtggaattcaaaagttctagagcgccacaaagtcctttggtggagcattctctctaatgctctacccttgagggtcctgcttgctaagagaatgaccattgatgagatctcttgccccatttgtggggatagagatgagactatggagcacctatttctctattgcaattttgcttcccacctctggcggtcttccccgtggggtatcatgtcgattagggattcgggagctc

SEQ ID NO: 173578 - DNA, 545 bp, Cannabis sativa
aaaatcgattctatagattctggtacgctttcgctaatatatatattctattgtttaattctctaaaattaattagggctatattcagaatttacagtgttctaacagcctcaaccacaggatccaattgagcaacgtcctgctccgatcactactccttcgcaagactttattttcggcaataatggccaaactaatggttcacaacctattcatcgatccacattaggattcgatgcaaacaatttaaactatgctcgcattgagcgatcttaactcgttgctcacaaaatcccctatcatctcaataatggtgatcactctagttatcttcttgtttcaactcctctcactggccaataaaacttcttttcttggaagtatgctgtctcaatctccattgtagtaaagagcaagactcagttcatagacgtgttagaattttatgctttaaataaaatctatttcaacataatcagatttactaattaataaaacatcagaaattattttatgttgcatggttcacatgattactttcatga

SEQ ID NO: 173579 - DNA, 673 bp, Cannabis sativa
ttaataacataaatataattacaatatatatcgtactagtttaagcttacacaattttatactcaattcccaattctatcatcatcaactataaaacacaaaagtgttaacaaaataaaatatactgtttaaattctaagatctcaacttcaaatatcatctagtattgctctaaagaaagacttaacaatatacctgcacattctagataaattattaataaataagtatgtaagtcttgtaaggagtaacctaccatattgcaaacccatgaacacaaaaaattcaaaaaattttaattatttcaatatcaaataaactttgtaaaaataaaatttaaaattaaacattacctaaactatactaaaattacaataaactatattaaactttttttcctaaactattaaacttacactaaaaattttctttacataagctagtaaattacacattacatatatttttcctagtaacaaattaaatattaacattgttatcctaacttttacactctgacgtggcatcacacgatagtgacacgtggaatcaactttatatacctgctcgcaagagatatgccgaacaaagcaccatatatattcactcggacgaagccttcttaaccgggccgtgagcaatccgaacagcacgccaacacttagcagtttca

SEQ ID NO: 173580 - DNA, 680 bp, Cannabis sativa
agttataattctctaatttatgtagataccttattaccgtgctaatctcttattggtacatgtcattaaattttaattttttatttaaatataataataagaaaatgagacaatcaaatacttacgaaagtttcataaatacagcttaagaattattacagttaaaaattaaatttaaatatttatctacaatctaaaattaaacttaaatatttacacaataaattactctattttgtaaaaatactttttagttattataaattttctttatcaatttacaaaacctcttgtactgtaaattattaacattatatagtactattattatttttatataatctatgttttttatttataatgtttattatccttaaagtagataaaatctccaagaaaattggttgcccaaataggaatttccacactttattagttccgattgagacaagagagaagagacagggaacattctccgctcattattcacctgttttcatcctaaatagaaattaatcaatatgatgattaatttcattaataactattgagatatgcaactaaaatctcactttaatttccttaaaaggaaaatcccacattaattaaaaattgaaaagatcatgcatgtataattataaataatattttatgaggatttgtgggtaaaatcgaaaagt

SEQ ID NO: 173581 - DNA, 585 bp, Cannabis sativa
gttataaaaaaaagtaactagttacaagttagaaaattatatacatttttgaaaaatttacatatacatacatgtataataaatatatctcatactaacaaaattttaaaatttttatttctaaacttattaaatctctcatatctcattctcattagcaatacatatatattacttagaatatatacaatacaatacaattacaataatatatttacataactaaaatacacaatatatatacacacatatttaataaaacacaaaatacatataaatatatatactatatattaagtttaaatttaaccgcaatccggtgaccaattccgtaaaaattctgactaccatgcacatacacaacaacaatgttaataatataaaaaattccaaaaaattttataaaaataaaaaataaagcaacgtacattacaaaaatgaaaagaaatcatatttatacgttaatggacattgatattcaatattttctcaacaaaaatcgttattcggagttatacccaccacaattttctaataggttcggttgacactgaaataggaaaaaaatcgtaacttttttggtgt

SEQ ID NO: 173582 - DNA, 551 bp, Cannabis sativa
ttggaaggcctcttgactgaagtgaagaaccttggacaacagctctgatgtgcaacattataaattacattttataatatgggagacttttatgaatttggtatcacataacctatcccactatttctcttctcattcaagggtcaaggaacatgttttgttttgtgttgttaatttttgttgataattttgttgaaaatttatatggtgctcccctagaatcattttttgacttcacaccaaattgttttcgagataatttcaagtctttgtattgcccaaaagcaaatgttaaagctcacatagaaatttgtagcactgctacattcactaaggttttttttaaaagtgaggtatgatatatctattctatataaaatgtggctatatagcagaattcttgatttatgagaaattattgagtgatttttttttaaagaaaaaaaataacaaattattagatgttgccattgccaccgtaaaaggtcagcacccatgtagttagttaaacccaaatataattaatccacctaaagtgttgcaattaataa

SEQ ID NO: 173583 - DNA, 642 bp, Cannabis sativa
ggaaccagacccggaatccctccgacaatcctcggccttggaacaatgctgcgatgttagacttatgagaaaaagtaaaagcaatttgcaacccacatataataaacagttttgaaaaatgattataaatgagaagcgactcaaagcaatcaaaaacacaaatttacaatccagtaaggggaaggcagtaaagttgatcaatttgacaatgaactaaaaaaaggacaatagaaaaattcttaaaacaacaaactcgcacagagtgataaaaatatattaaggtttcccaaacaacaaccagtttctacaagtacaatctacacaattcctcaaaacaaaaaaaaaagaacaaaaaagaatgaattttgacgattacccatcaaccattacaccctattgaacctctgaaataataacaacggagaaatcaaatttaattgaaataataacactgtagaaataataacaatggagaaatcaaatttaattgaaataatatcatagtgtctcaattcttgtggaaatccctgaaacacacaaaaaatagatacatgaagttgtattggattctaacaataaggcaaaaatctaccaaaatcaatattacgtctaaatgaaaagacagattcaatgctccaaaat

SEQ ID NO: 173584 - DNA, 511 bp, Cannabis sativa
tttttttttttttgaatttatgttagttaagaatcttttaggtttattttcttatgttttgtttgttttattgattttggttagctagtattaatttgttattttggtaggaaaattttattaaaaaataaagttaaaacttcaagatttaattcattcatgttctgttctgattagattttgaaaaaattttaaaacataaaagttttagatttttttctcagcttttaaacccatcttaaatcaattcatttaaagtttgtatgtaaaagttatacatattttactaaaaaatatcgaagcagaaaaatacatggacaacaagcaattggtgtattgggcctttaattacaactttaaagttacttaggttgagtttgagaggatttttgaagcaattaagaatagagaacatagagaagagattgagaggattggaaataaagattagagcaagacaactctaatctagtttagtttttttttttttttttttttttctccttttttt

SEQ ID NO: 173585 - DNA, 537 bp, Cannabis sativa
taggccaaactcgatccacgccccgaacctggacctggccccagtcccagacccaaactgaaataaaataaaaaaataaaaataaacattacagagcacactttaattttttatttttgaaattgaataacaaaagtagttatagaacgcatttttattttcaaaaacaaaatttataaaaataaaaattctacttttatttttgtgattaaataattaaaaaataaaaatattaccaattattgggctcccacattagtatgatattttctgcttttgggattaagtcctcacaatttttttggacacttttttagaaaactttatactaataaaataggtaaaacatttatattcaatacaattcttatttattgttaaaaagaaaatacaacacttatttattcttcccatgcgtaataatagggctcgtttagaacgccgtattaggttgtattgtattgtattgtattatattgaattgtcttttatgcaatatttttatgtaaaattaactatatatggtattaactttta

SEQ ID NO: 173586 - DNA, 681 bp, Cannabis sativa
aagcactttaggtgatcaggccttatggtggaccaagtacttcgatgggagtaagttctagtctgttgaactcgtttataagagcattttcaatagtaacatcttggagaatgcttgatgaagtagaaagtttaggtggcaaaatataaggatgctacattgatgccacacaatgatatttgatgctatgttttttttttacaataaaaaattaaaagtacaatatatatatataataatttaataaaaaaaattatatatataataatgtgtgagatcataataataatagtatttttaaaagatattctactattggagtattttttaaaaagtaaatatataaaaataatgtggaagaaaaataaaataaaatattatatctttaaattgtgtggagatatatagcacctttaaaaaatgttaccgtagattctctaatgtttcgttcacggatataggaattatagcctctagatccctaaggaacgaatcttatttttctattgggaaattaaaaaacaaattatgcttcgcatgcggttatattttaaagaactttatagttttgtatgcattatataattatattacactatataatacaaaataatttatttacatttaattatacattctatattacatacataaacataattttaattttctatacaatct

SEQ ID NO: 173587 - DNA, 843 bp, Cannabis sativa
taatgtttgtgtgatatgattttaatttattgtgtattttatttgaaactagtaaacattctgcgcttcgcgacgagtgtataaaatattttaaattatatataaaaaataaattatatattttaataaataataattacttagtaaaattatattaaaattttaactttattaatataaaaaaatttacgatgtaaatacttaaaatatttcatttattaataaatatcagaatttgaaaaataatagcataaatcttcaaatttctaaatttaacagttttattggtacctataatttaatggtcttgaacgaagaccaagccaaagaataagaagaagagagatttgagtttggatttgattcattgatggtataatttttattctgatggatgtgttaagatttgggttcgacttttattgtgtgtgtttttaatgtttgagttttagtgttttactggggttctactatttgactttgtgtttatgagatctgttttttttttttatttatttattttcataaattttgagaacttgaaatttgatgttgtttctattgattattgggattgatagtttaatttttcatacgggaattaaagtttgcatttttgtttcattgattgaaaaatattaatagaatgtttatgaaatgagaattttgaatatatgaaaatagaattaaaaaataatatctgaatcgaaaatcaaaatttattgttaatctccttacaaaaaaaaaattattgttaatttgtaaagatttcattgaaagaagatggaaaataataaataattgaattttatttatataaatatgtatataatgttttttttt

SEQ ID NO: 173588 - DNA, 615 bp, Cannabis sativa
actatttgagtaggttttttttttaatcaagtgtgctaaattatgactgtttactaagattttcgaaaattgattcaaataagagcttatgaaattaaataagtatagaatggagatgataatttttacgtggttcggatgttaattaatcttagtctacgagtcaatgtattagatcgtatggctttaatatattacaattggatcttacaagttcaagaaagggcttctggaggcgcctcttggaataccctctctggatgagtcctagtgctcatttggagggcttagtttactatgtccccggaaggcttaggctagagacctttcggatctggacaagcttcgtctcgaaggtgagacttttggacttcggatatctttgggcccgccatcgtggaagggttttagtcttggtcatttcagattaatcttattttgaagacgctacgtgttacccttttaaaaataggaataataataatacaactgttatattattttataatataataagtgtagattaaaatgtagtaatatatattattatgtgaataatatgtattaggtgtttggtaaataaattgtgtgacatataatttatttaacctaaaa

SEQ ID NO: 173589 - DNA, 563 bp, Cannabis sativa
agataaagaaaagtgaattaaccccctatcaatgatattaaatactaataaaagaaattctcaattttagcagataatcactctcaaataaattatatttaaaataaacttatcgacaaagtctctgtaatagtaactagtaagtcctctacaaaatcctcctacaaaataacaataaataaaattctattaccacacattttaataaaaaaaaatatgtaatatgaatggtaaataatccatattataatatcaagacttaaaatatttatttatcaaatttgattgaccatttgtatttagaagagtgttgattacaacctcttagttaatcttcatgttcgaaattgcttcttagaatattttcataatagtattcgttataacttagagttacaatatcatccttgtaaatttttgaaattttttgaatagtttataatattaaaaaattcaaacctatatattttcgacattgtaaactattcaaaatattttaaaaatttatagggatgatgctgtaactataacgaacaccggcataattttatttatttattttt

SEQ ID NO: 173590 - DNA, 554 bp, Cannabis sativa
  modified_base (153)..(171): a, c, t, g, unknown or other
gtctctcttgctgacatctttttttgtgggtgcggacttcttgtacggggctaatgactgagtagccatattaacactttccatggcttctgccaggacaataaatgcagtatactttgcaggattctcccggggagcttgttcggtcttgcnnnnnnnnnnnnnnnnnnncccattcccttgcctattattgttgctggaccgtttaccatttgagctttaatttcttggataatgggggagctagacggatgtcccaatagaaggagcttttgacttgccaggttttttttcaccttgtgctctctgaatggcctcttcaactttgataaaaccttttgcacggtcaagaaaatcactcatcgagtctattggtctgctcttccttaggtccttccaaatctcaccaaggagttcaatgccccaagtattgcggacaactttctgtcgtcggttacccgtgcaaccttagtagcctccgtcatgaatctgctgagactctcctggtctttgctttactttgaccagatctcctaggtgcaacagaagttggc

SEQ ID NO: 173591 - DNA, 533 bp, Cannabis sativa
agtaattatgttagtttagtgaaatatcttttataggtaactatgtgttttacggataaaatacgttgaagggtagaacggtaattttatccctatccgatcatttgtagaggatctttgactatttggatcagaaagatggatatttcatagccaatcaatagcttggtacatatagagcgttccatataattaagagtacaattccaaatctatagaggcagaaggatgaattaataagttagataatttacttcgtaataaattattgatcttcttattggaagcttgattatataggtccatggtccccactctagttaacataatactgcttgcagagtaagttgatttgttttaattaatcaattataatttttaaattagagtatgtcttatttatgaattttcactaagcaatgtcttagttatgaagaaaagtggttctggggtatatttgttaattaagaaattttgtatggtgttattaataaataaaataaatggaaattttatttgatacttaattataa

SEQ ID NO: 173592 - DNA, 529 bp, Cannabis sativa
cattatagttttgatttttgtactgttataaccgaaaatatatgttaattttttttcggtggcaaactgaaaaagtactgatgagaaatgttatttgaatgctataacttttttacattatttttcagttgcagtttaaaataataaaaaaaataaaactttgtttagttgtttaaataaattgtcactttttcttttaatagtaacgttaaaataataattttttcaaaaataacaaaaaaacagcccttcttatttaaaaaaaaaaaatcgtaaaaatataaaacttttatcatttttgtatatttttgaaataattccaaaacttaagtatatatttataattatatgtggtaaactttagttgtttttttttttttaatgtaagataattattattaggctagcgctaaaataagtttaaaaattagaataattacgtaaggcaccattttttataaaatatttacatttttacgttcaaataatatttttttacattttaacgatttttcaaaaaataacacga

SEQ ID NO: 173593 - DNA, 541 bp, Cannabis sativa
atatatttggataaatattatttttgaccacgtgttttgcaaaaattattaatttgaccctctattttatattttttgcaaaaaataaaatttgtaaaataaaatttaataataacccgatataaaggtgttatgataaaaatgattacgttttttttacatctattcgtgctagaaattattttcaagttggttatattaaataaattttctccctgaactttcgataatactgattgcgctccctaaaatatacgacttattaaaaatctttcctgaacttttacatttatagaaatttagtcattaatctattaggttctatcccattattctgacttttaaacattgacaactatcaaatcgtacccactcaaattaaaaatgagaaagatttaatattttttaataaatattaaaaaattaatttgatcttaaaagaattcagtatgaataattaagaaaattaaaatattaaaactaattaagcgatttaaaaaactatttatttttattaaaaaatcaatttacatataaaaaa

SEQ ID NO: 173594 - DNA, 587 bp, Cannabis sativa
tttgctgatgatgtgttgcttttctacaatggagactttaaaagtgtgtattacttattgcaggggcttacaatgttctcattaacatctggtttacaaccaaatgctgcaaagtcagccatttattccagcaacatgcctgaagaacatctagaaaaaatactggcaatctttgatttcaaaacccagtctcttcctcttacttattggggggttccaataggtgcaaaaagaatctcaggtaaagattgtgaagtattgactgagaaaatgacaactagaatcaaaatgtggagttcaaggaatctttcttttgctggtagagttgtacttatcaagtcagttttgatggctattcatgcctattggtgccaagtattaattttgccaaaaaaaagtagtgaatgccattgaagccatatgtagaaattttttatggaatggtaaagctgagtatcaagggcctggagctatgtcttgggagttcatttgccaaccaaagttagctggtggcatttgtgacagtcaatagtcccgtgatccgtaaggggaaataccaagtaagctgtacaatcccacaccacctg

SEQ ID NO: 173595 - DNA, 616 bp, Cannabis sativa
  modified_base (271)..(274): a, c, t, g, unknown or other
atataccctttgtaatccttaaaagtacttttattaaaaagaacttcttaaggggcaattgttatacccaaaattcggctaacacatcagaggaaaacacgtgtcaagctaggaagaatacgaaccaaggcatgcaattataattacatttgaggtggaataactcgttaaaagcataattgacaaatcagtatatttataactcggctaactgaatagtcttatgcgagataaaaatatacaaattgttaccttgtgcatcaacgagaannnntgtaacttcaggtgtacaagacgaggcactaacctcgttacgtgaatgagatataatgactgtgaagacacttggcatataatttacagtatacaaactaagtataacagacaagtgaaccaaaataagtgatagcgaggcatccacctcaccataagaagacatacttgcggtatcctcacttttcaataagattcacagctccaacgagccagttctgttagataaagattgacattcaaataatattgacaattgaagatcacctcgtcaccaaaaactgcgattgtcagatagggtgttatgttttcagagtaaaagcgacgagatttacattatcaa

SEQ ID NO: 173596 - DNA, 625 bp, Cannabis sativa
tcctctgaaaaaccaaacaatcaagaccaaaaataagagggggaaagtttcagaaaattgaaaaaagaccagctttacacacaaaacaaaaaaaaaaaccacagatttcaaccttaaggaaaaacccctcagcctgccagaatttttaggaaaagagaacataccttatggattgggcagcacttgaacattctaccaggattctttattgtcctagaggtgcgaatcgcaacttccaatggtggtttacaatcgcaaaaccaccgtcccattgtgtcactgtcaccttcgagctttcaacaatggtggaaaagttttgcctcagactatttaggtttgagttatataacatatttatttatttattatttttttttccaagtatttttatttttattttaagagggtttaattatttttagggtattattataagttttaggatgtatgttgtggcatgggttagttttaagtggtgtgagtgatgtggcatatatattaatgacatggtacgacacctggcacattacaatgcaaaaaacggagaggtacctacggaagttccagagtagtgacggaaggtatttttaccgccaaaaaaaggacttaggtatttatctgctac

SEQ ID NO: 173597 - DNA, 527 bp, Cannabis sativa
gcgggttggggtctaccattgttgtgtttttgagtctctgttttgccgcttaggccggctgaaagaaaatgacttgtaataatattttctaaatattttttttgggatcccaactactgtaacttttagattataaagtttaaagtattacaagtttattttcattcctattgttattaaattttaaattctgcgctaattttattagtcatcccggttaggggattagggcttcataagtattttgggtagcgtgcctaattctttaggacattaaaattttgtatcagagcgccaaagtttttaaacatcccctaaaccctaaacatgtacattcatcgtcagagataagctctactcatggtgcagtaagtattgagagttaatactttactgtttgtgtgatcacctgtttatcgctttccttttaggcagtatgcaagcatctagagtatgtatgagttatgtgatgccatgctttaaatgctatttatttaagtgaatattatatgaggtaaatagatgag

SEQ ID NO: 173598 - DNA, 530 bp, Cannabis sativa
  modified_base (344)..(364): a, c, t, g, unknown or other
atatatatatattagtattaatacaatgagatttttacatttcagtgatgctattgaacaatttattttattgtgctaattgtatcttaattgtttccaatataataatttatagagagaagttgttaactattacaagaggtgagcaaatgaaagaagtttgatagtaaaagaagttgttgtgtgcttgaatctaaatgaaaaaaatctcaaacatcatatactaatttaaatgatgatcagttctgcttctaataaataataacaacaataattaatcattacttaaataattgcaatgataaaaacattagtttgaatccatataataataataataatannnnnnnnnnnnnnnnnnnnnataataataataataggaaaatttaaaaaactatactttaaaaaccctaattttttatttttaaaccgatacatttcaaattaaaaaatatatgacacttttatcaaaaactcaaaaataaccctcacataactcaaccccatttttcccaacccacacatgcatc

SEQ ID NO: 173599 - DNA, 506 bp, Cannabis sativa
gaagagaaagaaaaaaaaaagggttagctgatatacgtaaaaaaaaagagataaaaaaatcaactaagaaaaaaaatcaataaaaaaatacaaagagatataagaaagaaatttttttttatataagctttaataaataaaaaagagtaaaaaaaataagtaggaaaagtatatatgtaaattttttttatgagagtataaataaaaaaaaaatttaatatacggtgtaaatataaaaaataaattcttttaagaaagtaaactttaaaaaaatcagagctttatgtaatggctaaattgttgaatatttggccagtcttgagcggactcatataattacagtgaacttaaaatcgaaatcaggataaatcttttgtgttattgtgtctgacaactatctagattcatctatcttatatttttctaatttaatatgtttgctaatttttattcttgagttatttatttttgtaaagtccttttttttcgcaagttagttgacaaaa

SEQ ID NO: 173600 - DNA, 529 bp, Cannabis sativa
aagcaaaatactatcctcgcactgttttcctaaatgctgaattgagcaataatcttagtttcgtctggcgtagtatttggagtgcacaacatttggtttgtattggggctagaataactatcggtgctgggctttcaacacacattctcaaacaaccttggcttcctgatcctatcaacccctacgtctctactacaggatcgggtcttgatgagtacatggttagttctctccttgatgttctactcgaagctgggatgtctctcttgtcaaagatatgtttaacactcgggatgcggatttaattcttggaatcccttaattctgctgttgtcgaagattgttggtcatggactggtgatagaacaggcggctacaccgtaaaatctgcttattccatgatgcaacttcaaaaaaatactcagcctggtgtgaacaattcgggattctggcacaaactttggcaccttaaaataccacctaaagtgaagaacttcatgtggaaagcagtatctgatgctcttctaac

SEQ ID NO: 173601 - DNA, 553 bp, Cannabis sativa
ggtaaaataatttccaacattagattcaaatttgactacatcgtgcaggtgttgcccccaggtgtgacaagggtgatccctgcttcggatagttgatctgtagccgacctgtccacgtgtagcttccaagtcggcttatcttcactgttacctggatgaggtatttgtactggctcagggttgttttttggaacactctcttctttacccgtacatcaactacaaaatccgctaagacctgacccttaattgttgtttggggttgaaagataatctcatactgacccaactctactgcccacttgagtaaccatccagagatgtccggtttttgcaatatttggtgcaagggttggtcagtgtagccccaaacaggatgagcttgaaagtagggccttagctttcttgttgctagaatcaggcagtaagtgagcttttctatcaatagatatctgccttcagcctcaatgagtcttttactgatgtaatagaccgggtgttggatgttgttttcttctttgatcagtacgacacttacaacatgctccgtgac

SEQ ID NO: 173602 - DNA, 651 bp, Cannabis sativa
aaaatcaaggtccaatttttttttttttactgttttcctaatgtagtacaaaatctgttaattatgatataataactaataatttacaccaaaaaaaaatattttacttaaaaagtcttataatttatattatttatattaatagctaataataactattttataatataattatgtatatttgtcaacagattaagcaatatatatggctactagtgtgaatattttaaaatcctaaaatgtgtcataaaataatattaaatataaagagaagataaaaagaaaaagagaataagaatttctgagtggtttatctaatgaggtgaactgctatttatacaaaaattaggactagaataatataaaactaaataaagagaaataaatttatgctataattaatttgggtgatttggacctccacatatatatttatataatatttcataactctctcttgaatgtctataataactgccttattaaaaactttgttagaaaccttaatatgacaaaaactcggccaaaaaaaaagagtacagtatgaattaactccccttcatttaagcaattgtggatatattctaatcgacgaattccaattttatatgtcgtcttcttaaatgttgatgttggtaataactttgtgaa

SEQ ID NO: 173603 - DNA, 520 bp, Cannabis sativa
  modified_base (249)..(257): a, c, t, g, unknown or other
agaaggcgttgactatgatgaaaccttttttcatgtggcaatgcttaaactcattcacattattctttatataactgctacttatgactatgagatatggaaaatagacgtcaaaactgcttttctaaatggtgatcttgataaaattatttatatgaaacaaccagaagggtatgtgctacaagggaaagatcgaaaggtgtgcaagtttcttaaatccatttatggattgaagcaagcctctagatnnnnnnnnntcacctttaataagactattaaagggtatggctttgaacaaaatgaagatgaagcctatgtatacaaatacatcaaaggtagtgtagtgatttatgttgatgacattctacttattagaaacaatgtagaaaaattatcaaatgtaaagaagtggttggccaataaattcaaaaaaaaaaaaaaagatttggcagaagcaagctatgttctcgagatcaaaatctatagagatagaaagcagagaacattaacactttctcaa

SEQ ID NO: 173604 - DNA, 674 bp, Cannabis sativa
ggcagaatttggggtccgtttttaaaaaggattgtactttttgagacttgtcctgggaccctaattgagtgttttctcaatacttagggtattgccattctatctatcgatagggaaacttttagttgtgaatttaagtccctcaaagtgttagggcaccacttagaggtagtggttgaccgacacacctgaaataagaattgaggtaagactagtataacacacatacatatgtacatatttatgtttgctagatgtatgacatatcagttagaacgatagttggtgtatatatgattgcatcttgatattttgaatatatgtgtttggcaattcaaaatgtatgaactaatgctaccaatactagtatgccagagtactgagtgcatgtggtaatatggttggttatacttctaaaaatatgaactagtgctaccaacactagtatgccagagtactgaatgcatgtggtagtatggctagttgtacttatagtatggattgatgctaccaacactagtatgactagagtattgagtgcatgtggtattatgatcaatcgtactatggtcaagaatgcttgagacttagttctacgtgtttgccatgatttatgacttgttgataggtgtatgggcacttagctgcaggtcggttatatgttatgttttatg

SEQ ID NO: 173605 - DNA, 826 bp, Cannabis sativa
ataaaaatattgaatttttggcaacagtttataattttactgcttttacaaaaatattatctttttataaaataaccgtaaaataataaaatagaacaattaaaaataacagtagaacaactaaaaataatagtgaaacaacagtgaaaacttaacacagtacacagtataaaaaatacacaccatttttttttaaaaaaaaatccacccgcaacaaaaaagaaaaaaaaataaaatctatacatataaaagagaagtatgagacggtgatgtgacactctcaaattgctttaagaacttctatctattttctcattaattctcttattttattaattttaattcagtctatataaatttttccatttttcttcaaattttctaatttaataataaaaagaaaactaaaatctatatatctatatattaatataaatatatatataaatgagaagtatgaggcggtgacgtgacggtctaaaatctctccaaagctattatttttttttctccttaattttctcaattttttaatattttattaaagcataaatttacaaattaatattttactattactttaataaattttctataaaaatatttatcttaaattaattattttttaaataatacattattataaatagggatttttttaattttacacttcaaaacaattttatttatttattttttttttgcatttttacaagattctttatagaaatccatattgcaactagcgctgcaacctaaattgcaacaaaaaattgtatagaaactcctattgcaactagcgttgcaaccacttaagaaacccaaa

SEQ ID NO: 173606 - DNA, 856 bp, Cannabis sativa
  modified_base (796)..(800): a, c, t, g, unknown or other
tccaattttcaagattcaaattacggaattgttcatgattagattaattaatttcaactcatgcattcaagaattggattgagaataaagcagtatagcacacaatgatttacaagcttcatctacactgagaacacatctcagcagacaagtgcttgggttccctgaaccagggtaataacatctactaaatccaaaagatctgtattacaatttccagttcactcttaggaatttaatacaatctttacaacaattagtaatgaattaccaacattaatcaagaatcttgattgtatgaacacaatcccttgtgcaacagctgagtttgtcttcgacacttctcttcaatctaaaatccctttagatctgatgacaaagatgacactgaactcccttcagtctgaactcagctacatcaggctctgatctttctgctatagatcaccatcttcaagctatgcaatcagacctgaaaatcaacaatgagcaatacaggatactacaccaactcacacgatataaccgaactaaccaaaaatatcaattcgctagctaaatcatttacagacaaaattagttatttataggtaatacttcaaccgacctaatcaacaaataaaaccatccgttaaaacataacagacccagacggacttttacagaaagctggtatgcagttatattagattagaaacaccagatacgactggacatactattaatataatctgtaaaaataatgacgtttacacatatagttgttccatcttgttgtatgatcttaatttccatnnnnnatgatcatatatctataattttttatgcatgtgaagtacttcaggacttctctact

SEQ ID NO: 173607 - DNA, 510 bp, Cannabis sativa
  modified_base (469)..(484): a, c, t, g, unknown or other
acaacttttctcaagtgacgataataagtctgtgaccaaaaaggtaaaaaaaaaaaaatcatatacttgtaaccgatatccacttttcttaatgtaattggtactgcaaaattttaagattttgagaacaaaaacaaatttagattaaattcaactccggaaattgagatggaaatttttaccacgggaatgggtaacggtggggacccactcttaatggaataagaatttcctatttttgtagttaatggggcggaggtagaagataattttaacacgtagggatagggcgggagcgacgggaataatactattcgtaccctatttgatcttaatataaatatatatagtttttcttttatttttaacatatatatagtatactagtaaaaattacgtgcgaggcacgtatgctaaattttatgttaattatttttctatgttattgaaagtgatacaattaaaaatnnnnnnnnnnnnnnnnttagttattaggtgagattattatta

SEQ ID NO: 173608 - DNA, 513 bp, Cannabis sativa
ggcacaaaattcatgactcataacggcaaaccaagtaggatctttgagagatgcaatggtggattttggttcagtgggcaggaaggattcaagcagtttgtgttttgtggaaagatacgcttttggtttatgaatcccattttgagctcttgtgtgcataggatgcgttctctgaggagcagcatgctcatatgaggcagaaaaggttgagtgaggtttagtagaagaaccattttgatcaccaatggcttctgactcatgaattgggattgcaggtgagctagttgaagtggcttgaattgaactcaagacaagagcttcaagatgaactgcctcagaaccataaactgaattagaaggagcggtatcatcaatgttcaagacaatagcagcaacactcaaattgatagcaacaacaatatttgaataggcattgtagatgctaaaatctacaatgatcagaatgagcgttagtgggcaccgacaacctgcggaacaaagacaaaggatgac

SEQ ID NO: 173609 - DNA, 676 bp, Cannabis sativa
gctcgcattaaaaattggcttgatagcagatggattagctcatccattggttatctactcatgaaataagactatctctaatagatagtgtataaataaaaaataaaaaattagtaattacaaataagtaataaaataataaataaaaaaaataatatttattataaattaaaatataatctttattatattttgtgctaaatttaacataatttttaatacatactaaatttaaactatattagtatattatacatcaccattaaaattcaatttttttgaacatgagctaaaatttttctatatatgtatatatatttataccattaatggagatactttgatcatagaaggagccacttgttaatattaattgactattcatttgtttcatatccacgaatcgtggaccacgattgatttacgaggctacgctctgtctccaactccaacttgatatatatttatgcatattattaattattaattattatatgaatatagtaaggtcgaccaaaccaaaccacacgatttcaaattaacaggtggggattttcccgcattaaataacctcatcaatactagtgggtgggatccgccggtattaataatatgagcattgctattaggtaccagtggtgcctagcacctttgtgacatgtcgcgttgcgattgg

SEQ ID NO: 173610 - DNA, 669 bp, Cannabis sativa
gagatctaaggtggaaattgttaatttagatcctccatgtcacacttattaatacagtttacaagaagaaaagaaaaatacaaataaaaccagaccagatcctatgtggcttcgcctctagtggatcaagatctggtagttagttacaaccgaaattgtaactaactcccagaccttgatcaaccctaatctacatatatataaagggatctagagccttaccaatctctcagttgagagataccagaaatccaacacccagatttccagatctggaagtttcagctccaaaagttgttattccaagttcatgcaaagaaaaataaaagagtcagtgagtgagaaaagaaaataagagagaaataaacacagagaaaggaaaaagagagaacatcagaaataccagtcgagattgtgacttggatttctcaccttttgtatcaatcttcttcaaatagtgcagatctgaagatcgtcttcaaggcgagctcaaaagaggacatacccctgatttagggcgaacctctataacttcctggtgtttgtttttcattctatctctactgtgtttggctagatctgtgtgtgtatgttttatggtgtttctggggttatttccgggtgagatcgatcaagagatcgagaaagatctctggttctagggtttga

SEQ ID NO: 173611 - DNA, 759 bp, Cannabis sativa
gcataacatttctaaacaggattttccaatttttattacatttatttgacagatttggaatactcgaaactctattctctttaacaaatctggtactactaacaatgtggaagaaattgttgttaattatcttcaggaatacagtgctgctcaatgtaagcaccaagatgacaatctgcactcagaggcttcacgcatccctcctgcttctatccagcaactccctccttccctgtcactggaaactccttctctttttgttgatgcagccatcgaccaccagaatggtataactgtaactggtttcatcttcaagcatggtttccagactgtgttagcttctcattaccatcagttgcctggtgctgtgtctcctatttttgctgaaggccaagctcttttgcagagtctcaagtggtgcattgactcacaattttccccacaaatagtattctccgattgtctgaatttagtttcaaaagtgaatggttcctggtaggataattctgcactttctggtcttgtctctcggattcgattgctcttctcaaccttccctggtgcttcgctgcagtttcttcctcgacagtttaatatggacgcccatgtccttgcaagagaagccctcaggtcaagagaagttagctagagggagtgcctcttcttcctctttgctgcttgtggtttttgttttctctttcttcagcagccttcttagtctcaaaaaaaaaaaaaaaaaaaaaaaaaaccttttttaaa

SEQ ID NO: 173612 - DNA, 794 bp, Cannabis sativa
atgaaatgtcttttataattaccactgctataaagaaaattttataattatatatatattaggttgcagcacgtataattagtttttttttaattagatttaattagttgatgttaagtgcaatacatgtatgttaaatttttttaattaggtaatatatttatatttttaaatatatataattaaattaatttttttaatataaatatctgcataatttttatttttaaatatatagaataatattataaaattaataaagaatattcactttaagtaaagttaaataattaagatattttgttaaaattaacttaaatcaaaaattctattacataatcactttataaagaatagatatataaaaacaaaaataactctctcttatctatttttatctatatttagaagttggatcatataatttaaatatcacataaatttgcgttggttatcaaaatgggaaaaataagaggttcattgagacgtaaagacaataagcattaagacagaactacaaacaaacaacaacgggagacaaactaacaaaagcaacaaaacaaaaggaaaaaagcacgcaaagcttactaaccctcctcacgcataaaatcttgaacaaataaattaggctacactttttttttttgttactattattaaaaacaaaaaaacaatataatctgtctagtgctctgtctgtgacactgaggtttgaggctttatttttgtgctccctgtgataactgataaaacgattgataattgccaaaaatgaaaaaataaaataaaataaa

SEQ ID NO: 173613 - DNA, 557 bp, Cannabis sativa
tggtttataaccccgttagcagcactaagatgactgcctttcgccaaaaaatcgtccaccactactacaaaatgggtttttaggttccctgttttcaacccattttataaaaagggaagctaaagggtgtaaaaattctcgattattgaaaattgacctttagaggcggctttttcataaaaaccgtacgtatagaattgcattataccatttagagtcggttggggaataaaataatttgggttttatgaaattaccctatggcgtcagttcctctataagaaccgacgacatagggtacacgtttatttgacacgtgtaccctatgccgtcggttcctataaaagaaccgacgccatagggtcgtccagggtatatgtacaacttcgtcttcttcctcaatctcacttcactcagcaaacccagcaaaccagagagaaagaaccaccaaaaccctcgccgcaagcacctccgccccaccatatttcccccatttctcaacaatttgagcccatttttttaaaaaatcttctattttcgatacttaataacataca

SEQ ID NO: 173614 - DNA, 969 bp, Cannabis sativa
  modified_base (521)..(524): a, c, t, g, unknown or other
aagcctttcggctaaggtcatgggcctgcatcaaaccatgggcctggtgtagcccaacaaataaatagggaaaagatttagaggaaattagactacaaactttttttaactcgatgcttttaatttttaccttcattttcaaaatttattatgtttacctcttcttttaattattttatcaattttaccctaattacttcacgatagttttcactcttctctaatcaaatttactctaattttcccacaaacttacacatccatctacaaagaacacaaatttattatatttgaaattatgtcttagttatgtaagtgtgtgaggataatttgggtacaatactcataaaaagaggtatattatttaattaaattttatttaaaggtaattttaattaatgtataaaaaaaaggtattcttaaacttctcccaaagatttaagggtttttacactacatattgaaatttctaatttttttttacttttttacggtgaacggaatttttttcaaaaatactnnnnttttttttaaaaaaaaatcgtgtaatgtttatactgtgtactgtgttaagttttcactgttgttccacagttggtttttagttgttccactgttattttaattgttctgttttgttgttttacgattgttttataaaaaaaatggtatttttataaaaaattctgtgtgacagtaaaattgtaaatttttgtccgaaatttaatatttttataaaaacccaaaaaaaaaatgctcattgattaaaaaaaaaatgaaattgtattaaattatccttctgaataataaaataaaatttgactttcatttatttttcttagaaataaattggactttgtttttgtagtctataataactacatatatcagatataatttgaaagaagggttatttgcggcaaaaccccctaaagtagggaggtttttgcaactaacccccaattttaa

SEQ ID NO: 173615 - DNA, 539 bp, Cannabis sativa
cagcctagaaacatgacatatccacctattgatctcctatatcattaacacaactggcccaatcagcatcactaaaaccttgtaggcatatagaatctattagatgaagccacaaaccatcatggatagtgcccttgagatacctaagtaatttcttgcaagcctcccaatgtgtaatagtaggagcatgaatacactgacatagtttgtttaaaatgaataccacatcaggtcttgttaaactgagatattgaagagcacctaaggtgcttaatgttatatcttcaaaaggctccatatttgtaagactcaattttgatgtagagcttgtaggattaggacaactctttgcaccttccatatgtagccttgttaatagatcagtgatatacttattttgagttaggtatagatgcctgcagtatctttgtaaatttccacacctaggaaataatgaatgggtaaataccattttggaccttgtattttgcaaatgttatcaatgaaaccttcgatcctgttttgttaaatgataaaat

SEQ ID NO: 173616 - DNA, 539 bp, Cannabis sativa
atctgtttttgaagttgaaggtaactcaacaatttgcttttttatttttcttctacgaattctcttctacttctttagtatctagtaatgtttccttttacggtgaccaccatgacgaagcttactgaataccatatttcttgagatataatactttacagttgtaaggtcgcaccaattttaccctttccgttggatgtcgtaactcacaaagatacactatatctccttatcgaatttgctacgtggatgatttggcacgaatacgcaacacgcacatagccatattctcaaaagtggcttactgtaggtttatagcccacagtttctcaaagggtgaagcaaaccctaatttttcttgggggaagtatagatcacatgagttgctgtcttcataccttcggctcaaaatcttcctggaatattctccacatgtggcaggcttcgacatgtctttgcaagatgtcaattctttcaggtgtcaattctttctctcggctactccattctgttgtggcgtatttgcacatgtgaattga

SEQ ID NO: 173617 - DNA, 793 bp, Cannabis sativa
tccgtcaaactagtaagtggttttcccctatttaatctctttatttttttccatttgtgtaacgccttgaatcttaggaacgccacgtgtgtgctcttacaaatttattatcactaatcttctagcttaggaaaaagtgtggtttaattaaaatttgataacttaagatatacataatttttctttttagaataccactaagtatggggatcccctgtttataaaaatttccttaacaaatttcaaaaccattattaccaaaaaataaagttacattttcaaacataaagaaaagaagttgatcctgcttcccagaagccaatacaccacgattaatatgtacattgttgggaaacctccaactcatggccgaacacaacttctaacttccttacctgcaccacgaagcacctgtgagtcatagtgactcagcaagaaaagctcctaaataaagaaaattatggaaagtgatggcagatttcattacaacagattatgcataccaatagatcatactctttcaatgtacacttacaattcaatgtctatacaagcaaacttattacaaaattaagagtatttatagctatacataatcaacaaccttagtgtttcataaaacaccctaatcatacattattataaacacttatcttcagtggttcataaagcactctagttcacacattagcatatccacacaatttcagtgcatcataaagcactctaatcattcatcattataaacatgtgtttcttacatccctaggccactgagactgcaagaaaagtg

SEQ ID NO: 173618 - DNA, 1206 bp, Cannabis sativa
  modified_base (116)..(120): a, c, t, g, unknown or other
tgcccaacagtgaggggtacgcgaatttgccctagaggtggaacactctggccggagaaaccatacacgggttgaggacagggggttaagtctttgagttggagccccattttttnnnnnggtgttttgaacaagatatttgtagaggctccattatctatcatagttcaggccaccattttttttggctatctggacttccacgaccaacgaatcgttgtgtgggaaattaatcttgacagcatcttcatcattaaacgttatggtgggttaccctgcccgttgtatatttggcttcctttcttcgacggccaggaccacttcttcttgctcgtgctgtaatgttcgagcatacctctcccgggctttgcctgaatctctagctatgtgtgggcctccaataatgacttgtaaatgcccatctactggtgatggcagtaaatcttgattattttttgtctgggcggccctctgatttcgatcggtcttgacatatttttgcacgtgcaggttgttctttcttattaagaattcaattttccgcttcaaattgttgcattcgttggtgtcatggccatgatctccatgaaaacgacaaaacttggacatgtccctcttacttacgtcctttttcataggagaaggtttcttgtacggagctactaactgagtagccatgtagatagtctccaaatcctcaattaagacaaaaaaagcagtgaacttggaaggattctctctaggggtctgtttggctttgccaacaaactttccctttttcccattgccttgcctgttgttgttagaccttttatcgcccgaacttgaattgcttgggtactgagggagctgaacggatgtttagccagagggagcttgtggctgactaggcttaagctcgacttctgctcgctgaatggcctcctcaagcttgataaaaccatctgcacgatcgaggaagtcactcatggaatctactggtctgtctctcttgttttccttccaaagctctccgagaacttcgatggcccccagtattgcggtttgttttccttcttcagttaatcgtgccactttcgtcgcctctatcatgaacctactaatataagctcacagaggttctcctggcctttgcttcacttcgactaggtcctctaaatgcaatgggagttggcgagaagaagagaattgcgcatggaattctga

SEQ ID NO: 173619 - DNA, 631 bp, Cannabis sativa
  modified_base (556)..(582): a, c, t, g, unknown or other
atcttgatatactgaaagatcttaattatttatctgattgggttattttatttcaacctgcagggttgagggttattggagaaactgtagtatctgccttagtccttgatgattcttggctctggcatcctgacttttccattgcggcaaagtaataagctggacattatctcattattttatcatcactgatagttccttctatcattactgttggttatgattcgtaaaccatgtcaaacttcccatgtttcaggtatgtaatgagtcttccctgttagaaaaataattacaataataaaaatgataacacctgaggcgtgcaaacaagacactgtctttaaggatttacaaagtaatcccccaaaattcaacaagtcttttgattacaataaaagaaccaagaaaataaaaacagcaaaaacaatataatacccagccaagaacaattatatatatataagtaatagatatatctattctatataaagtgtgcctatataactaaattcttggcttatgaaaaattgggtgtgactttttatttatatttaannnnnnnnnnnnnnnnnnnnnnnnnnnaataaaataataaaataaaaatttaaactgatatttgatatttgaactg

SEQ ID NO: 173620 - DNA, 1054 bp, Cannabis sativa
  modified_base (999)..(1025): a, c, t, g, unknown or other
cccaagcaatgcaaattttgttcaaaatgtggcaaacctcaccaaaacttccagaacacctataacaacatcacccaacataatccaagcaataaaacccaaaaattcacacaaaaccaaaaagagcgatggatgaacaaagcttgagttttcaaactcaaacttgtgcatccaccacaccacaaccctaaaccagctgcaacaactcaattctaacttaaattaaacttagaaactgaatcatcaacaaattgaaccataacaaccacaaattcagaaatttgcatattcaaatcaaaatcaaagcttcaataacacaaggattagagttctagggttacctttgcttaaaacaacttgaattcagctaacacttcttcaattacaccaggaaaatttaaggtcttggatggttcttctggtggtcgagcaaggaagaaagagaaaggggaaaatcttgatttttttctttatttttctaaaatgaaaaaggttaactaaatattaagctaaggaataacatgggcaactatcaagcaccaaaacagccacctatacccacattttaaaagggcaaaatactcttgatgcctaaacttaaactaatacaagcctaggggtaaaatagtcaaaaaccataaccccgctcaacctcggtattctacatattccaatattcatcccactaagaaaaaggttctagacttacccatgtgactcaaatggccatccatcacattttctgtcgtcgccgagcaaaaatcataaaaattgcatatttcatatataatacaatcaatacctatagagtttaataaaatctccagaattgagaaattataactctagtgccctcttttaataatgggacccacaatttaaataaatttatacataattctaaaaatattaataattaacgctaatttcctttactaactcatattctcaaaacatggtcattacaaacataaagttcctcttcttgatcttaagatnnnnnnnnnnnnnnnnnnnnnnnnnnntcctcaattaatctgatacctactcatta

SEQ ID NO: 173621 - DNA, 548 bp, Cannabis sativa
caagcatagaagtaggaaaaaaaaggtaaaatgaaattggatggcaaatgtatgatatatattacatagagaggaatgtattattgttgtaaacatacaagactcagatcaatctaaagttaaataatcaagaagaattaaagcaacaaaaccagaattataaacaagataattaaaacaataaaaaaaaaacagagagaataacacaagaagtttatcctggttcggatctcatactttgagtcctactccagctctcccccaaggagatttctccactatgaattagccattacaaataccaatttcagtacatgatcatcaagaacaatcacaatcaatctaggctcttcaacactcaaaactagagcaatttagccaatgtagacttgattttattctgcatgatcactctcgaaatctctctctcttttttttttgccttactctgattacaaacaagagtttaatatatagttgttagtagctgacatgtccagcacttaacaacttgagacaagttagttatttaactaactaaccaactt

SEQ ID NO: 173622 - DNA, 532 bp, Cannabis sativa
atatttaacggtaatatctaactggcactttaaatttgaaaaaaaataaagataaaaaagttttgtttaaaaaaaataaggaagttaaatgtataaaatcaaaatataagaaatttttctataaataaacttttatttattatatattgagtaatttgcagtataaatacttaagtttaactcctagttacaaataaatacttaaaattaatttttgacattaatagtacctaagttatatttttgaaactctgtaggtacctaaccgttaaatatttaatcattatccatgtatcattttcttaatggtatatttaaattattttttttaaaaaaattaaaagttttgatgacttggaccaatcagaaattgtcacttggcaatttacttaacacttaacagccatgtacttataaaagttcaagaactgccaaaaattaaatttagttatttatttgtaactattgtggacattgtcccacatagaataaatagtagagtattgagctatatataagaacatgaactact

SEQ ID NO: 173623 - DNA, 914 bp, Cannabis sativa
tctaattggattggatggttattgaatgtgaatattaaaatttaataaaaaaactgatctaatccaattatatttatatatattaaaaaaattatttatattaaaaaataaaaacatatgtattaattatatttttagtggctagttttttaaaaaaaattgtaacaatcagttgttttgtgtattagtttttatgatattttattctattttattacttaaaaatactattattttagttattttaaacttttagttgtattacacttataaagatgatatttttataaagtattaaacttaaataaatagtaatattttgattttacgtatttttccttatttttttaagctaatataaaaaattaggtgtgtaagtagatatctaattaaaaaacctaattggattggattttgaggtctaattggattagatcggatgataattttccaaatccaattactaattagattgtattggaagaaaaatgttagataggattggatacccagtatacaagctgggctttggtatacaggattggattggactagactaattatttgttaggggatttttcataaatatgggaaaagaatttaaagtttacttttatggatatcggaatattgtggatatcggaggcttacttcaggcagtacaggtggacaaatggaggctaaatgtggaacctttacaaattccaaataattttggtagatggaagacaactttctattttttgaatttaaggctatacgtggtattgttgttgatgcgattttttgtcaacttaatctaagaatattattaattgaagaaatgaagagacaaaaataataaatgaacaccaaatatttttatgtggttttgtagttaaaatctacatactccacgagtccatcttatttct

SEQ ID NO: 173624 - DNA, 902 bp, Cannabis sativa
atcttcaaaatctcatatctcacttgtttttaattggaatcaagtttcgtaaaagctaaacttgattaattttgcacaaggaattcaaatacattattttcagaatgaagataaaattatttttcataaaaaattcataattaacattcaatcatcaattaagcatataaaccaacatgaacacatccaaatcatacaaatatcattttaaattcatatttcatgaaaataatttattaccatagctctgaggctagttgttggaacttattttagtaggatctagatttactaacatgtatgttgattataattatataatctaacatcttaagtatgaatttcataaaacaatgaaataaatacataataagagattaagcaatcattatattaatgacagctgaataataatgactcattccattcagatctctagcctttgattcttttatgtagcagagcattatcaagatctaaatatggatcttctctccttcaatttggttagacacagtcttcctcactatgctaggtattgctttgacatgagtgggcatactctcaattcaccacaagcttcgaaatttatttggaagaagaaggatttcaaattaatagaagaaagactctttttctattttttgtctgacgaaggaaaactagagtcttcttaaaataagagttatacttttttagttatagagagatactaggattaggtttagaatttaaatagaatttaaaaaaaaataaaataatggctttattggacttaggtggccggccatattatgggccccatatgtttcaattttttcatttatttaactcatctttcttttaacaaatatcatattttaattctaactctataaatattaattctatctatttaataa

SEQ ID NO: 173625 - DNA, 721 bp, Cannabis sativa
atctttcatccaacttgtcatttaatatgaaaagtgtttatcatatcacaatgatgatcattagtagattaacttgaatcgtgagtatacatgaatgatgagtccataattgtcttataaatattatcaatttatgtattgatattcttaaattgattctttaaattattgattagtgtgattttaattgttttggatattttaaagaataaccatacatttagagtcatttggagggatgttagcatattttggtagaaaatagtggaagtcggccggtgagctcagttttacaaggcagaacttaattgcaaattttaatgatcttagaagtagaactggagttggagctcaacataaaagttttagatctcgttcttagcttttctaaacatcttgaatcgtctaattctgatgtatattgaagaagttatggccaaaatactagtcaggtgttagaaacaaggagcaaccgagtcaagaaacaagctggagtatgaaaaatggtgttgggcgcaatagcgtaggtattgagcgctatagcacaagttttaaaaaaaaaaagataatttcagcatgtgggttatttgggaaatatctcatgggaactatagcgcaagtcttaggcgctatagcgctgtacttatctttttttaaaaaagaaaatcctaattctaagaggattcatctttcttttcaagcactataaatagaacctttt

SEQ ID NO: 173626 - DNA, 564 bp, Cannabis sativa
tacactaatgatagtaattaaaaaatgatttccttaaatttttattcatttttttttcttttttgttttctgaatttgtattttttaaattaatcaattattattatattattatgaataagagatatttgcggcgaaacccctttaacatttacaattgttacacatatgaccttaagtaaaaaaaatagcagcgagttgacacttaaaaatagtatcaaatatttctacattttatttcaattttttttttcttttatggatttcttattatttaccaaagagtagctaaggaatacaacaaaaaatgtcacttttaccagcgcaatttgttactgcattggtaaaactggtaaaaattacttttaccagcacatctcgcaaattgcactagcaaaaatattaaagttttaccagtgcacatttgtagtgaaaaatttctaacttttaccaacacatttacgtgctgaggaaagtcatttttgccaacacttttcattttgcccggaccggccctcggcataggcgagctaggcccgagtctagggcccactcattttaggg

SEQ ID NO: 173627 - DNA, 631 bp, Cannabis sativa
tgttcactattaatgaatggtgaaaatttatatctttatttatacaatgtaacaacaaatacaaataaaatatagttttctacacatcttttataagattagttaaactgtttatatatatatattatgttaatattacggtccaatatacgtatatttaattatattattagtttgagtatttttttttttaatttatattagagttgatacttaattacacccataacagtatgacatagataacttaattataattttattttaactttaatatttttcattttttataaataaaaaaataatatatatttttttgataaccacaataaataatgtcataatagtaataaatccttaagaaatatttttttttattttattattttaaaaaaatataatagaaatatattttatagatacatgaattgagtaaaaaaaataatattttattatttaaaaaaaaatagtaatataaatatatttttataaatacatgaattgaacaaaaaataataataataataaaaatatattttttaaattaatatgcacgtagaataaatttaaatttaaattgtaatattaaaaaaaaaatacaatttatattatacaactatatttatatata

SEQ ID NO: 173628 - DNA, 542 bp, Cannabis sativa
tacatgatataaaactaccaaggtcggcccaaacaatttgggagccttgggcgaagtaatagtttctttctaaaaaaaagttgatcacattctcaccactaactacgtaatttgacaattaacgaatattagctataattattctccttatgttatatatatttgtttttttatttataatcaattagttgtcagattaaattaatttatattacttaaccacatttttaatagctttgttcattttatattcggtgttatttaatttaatatcttaatgtaagatgtactaaccaaaataactgtatcccaagttaatgaatttgattctttttaaagaaaatttgtgccttttctatgcttgggccctgtgtagtggaactgcttgcacactattaagaccggctgtgcttttagccacatactttttagtacgaatgactatttataattagtcacaattttttgttttaatttttattcacaagttttgttatgactaaaagtaagattttttatagtgtggtttttttttttttttt

SEQ ID NO: 173629 - DNA, 685 bp, Cannabis sativa
ttaccttccaaatcgaccaacataacatcacaacacgacaagagatgtcttcatcaaagccatggaacacatcatgaagaaagtgtccaatggttccaacaaagttagcatgggtaacaatatcagccttttgccagcaactgattgcaaagggacagctcagtaatatatgcgaagcagattcaacagcatgattgcatacagggtacataaaagagacacttacccccttagagatgagctgaagacaggtaggaagcacattagagactgctcgccacataaagttcttcactttaggaggtattttgagatgcctcagtttatgccaaaagcctgaattgttttccccagaacgactgttcttctaattttgcaacagattgtaggctgatttgacagagtaatgacctgatttctcaccaacccaggcccaatgatcatgagtagcagagaaactgaggggaactataaattacttaatcttaagattttttgtaataatgtaagtaacttagataatttttaatatatctcgaaataaaaagataatttttagtattcatatcatattagaaaatataggatgtaatatattatttaacaaaataaaaaatggggtcttttcaatattatacctaaaattgattttatttataaaaatacctttaagaaaattatttgc

SEQ ID NO: 173630 - DNA, 926 bp, Cannabis sativa
aaaacacaataaatcaaaacatgccattaaaaagtttaggtttctaagctcaaacttgcaaaaaaccaatcccatacaccaaaaccagctgctagaagctaaatctaactcaaataaaccttacaattgaagtacacaaggactaaaccctaacagcccctaattttcaaaatcaaatgctcaaaccaactcaaagctttaaatacacataatgaaagattctagggtttacctttgcttcaaactcacaaagatcttgctgaatttcaagaaaataaactgaaattgttgagcctcctctggttttttgggttggccgaacaaagagagagtgtgaaaggatgagttctttcactttttgccttttctccttattttctctaaatgatttaatgattttcctaattaatcctttgctaaaaaaggaaagggcaggtgtgaagctctagggcagccaccaagacactcccttggaaaagactaaaatacccttgatgcctaattttagcctatttcaaacctaggggtaaaatggtcaaaaaccataaccccgcacaacctcagtattttattttctccagaatatatcccactaagaaataaggttctaaacttacccatgttatcaaactagtcatccatcgcattttccgttgtcaccgagcaaaaattacaaaaattacacaattcacagataagtcaaataatacccctagagtttgataaaatcccagaacttgagaaattataactctaatgtccatttctacaaatgggcccacaattaattaaatccataaaaaatttataaaaatattagaaattagtgctaattgcctttactaatccaaattactaacgcagtcattacataaagcatgccatgcaaaaagcaaacacttggcttgtaacaccctaactacctt

SEQ ID NO: 173631 - DNA, 918 bp, Cannabis sativa
atatataattaaattaaattgttttatataaaatgtgtacataatttttattatatatagatataatatttatttttaaatgtatataattaaattaaattttttaatataaaatatgtaaataatttttatttttaaatacatataataatattataaaattaataaagaatattctgttaagtaattgggatattcagttaaagttaacgtagaaacttaaaaacttgggatattctgttaagttaaagtagaaaccaaaaactttgttaaaccaaaaattttgttacatagtcatattttatatagaatagaaatatttttatatgaaatgttgttatgtaattatgttttttattttttatactatcactcaacaaaatattttttattagttttataatattattatatatatttaaaattaaaattatgtatgttgatctcaaaaagtgatcaactgatagttggtccgtacagatttgatgcttgctacatgttacacaaacaaaatgaaaaaaacaataaacaacaagatttgttatacaagttcagcccccttgtgatagcgagtaatgacctactccctacttggttgtattgatacctaaagataacagtattcaaatcactataagtgggatctgatatagctctctataaggatataaaacatgaatcagtaggcagatatctaatgagagagtgagattgccttagtggcatgtgagagagatgaagagaggaaaggagagcccttgggggcgtgtagcagagagagagagagagagaaagagagactagagttttgatttagaacaatttggaggtttagtaacttaggtttctaggctagggttaatgcttttatataggaggcctaaaccctagattacaagtttaaatcctagatattta

SEQ ID NO: 173632 - DNA, 704 bp, Cannabis sativa
gtacaatttaaaagattttgtaggttaattgatcagggcttaacagaagaactttataagtttccaaaatggaagatgcagaccaagaaattgaattccaattatttgtggaaacatatgtcgacgttgattcatcagttttaatttcacatctctaattcaaaactgaacgtgaaactttgatttcattcggctcctttatggaatatgaataaattttcaatcaaatatatctaaactggctaacaatctcaccggtgaagttatagctctcgaacaagcgatgaggggcgaggttgaccgaatggatcgaaggtagtatattatttaacgtttgtttccacctgcatatgcctaaccgctagggcccatcctaatacattccttctaaatgtatctttctcattccccactatccttgcttggctagcttgcttcgaaagctgtcatgttagaaagcaaagaggattgtaactctttctttccacttctgacatccgctctgaaaaaagcttggtgtatggcgcatcgcaatcaacaataccgggaagggtaaaacaaattaaggaatccaaaatattaaaaaattagatctatgtccaatggatcacacctaccaagaaaaaatattttgttttggttcgacccgtaatcatatatgaaatagcggacggtataaatttagaaacactttttccacagga

SEQ ID NO: 173633 - DNA, 570 bp, Cannabis sativa
  modified_base (512)..(521): a, c, t, g, unknown or other
gtaatttttttcactaaattttgaattgtgataaatcgtgtctcctcaatttttttcgcctaagtccttaaatttaatatctgaatagtttaagggaaatttgtaacggacaaaaaaaagttcagggacacaatttagtacatatcaaaattaaaggaaaaaaattactaattaaccatatatttaacaaaacagaaccaacacttatttacatgttcaaaaataaataacatggtaattctacaattttaatttcataaatatttttgaaattttttgtaatgcatcccttttaagggaatatacctatatatttttatttattttagtattcgaaataatttttcagtcaaatttattctcatagtgatatatatattatagttatttatacatcttgtaaatttttaaaaattttgaaatagtttaacacgtcgaaaattacattcaaatagtattttgcatgtttaaatattattttttataggagaattacctcatatattattttnnnnnnnnnntttttttcaaatttacaatttaagcttttaaagtggttgcagcgctagt

SEQ ID NO: 173634 - DNA, 563 bp, Cannabis sativa
  modified_base (64)..(64): a, c, t, g, unknown or other
ttcttcattaaattttgaatccctagtgaagagtacatgctcactcatatcaagtcaagtactnaatcatagtgtggaagattgtgaagaatccaacacttaaaggaaatccaagttcagatcttgttattactttgcgaaaaaaaagaaaaagggttaggggtctaaatggaaggatctataacattccgctgccaataatgtaaagttttttaaactttatatgtgtttatttttattgctttagaaacgacgcaaataaaatactatttgcgtctacggtttatacgtcggttttataaaccgacgcaaaatctttatatgtcactaaaaaaaccgacgaaaatactcctttttgtaaacatgcatgtttagggtgttagattatagaacataatccaacacttgtcagtaaactcagatctttgtaaaataatttctaacaactggtcccaaagccaaaataatattttactttcatgaaatatagatttaaaatgataattttaattatttagatgtgttcatgttgatttatatgtttaattgatgattgtatgtta

SEQ ID NO: 173635 - DNA, 651 bp, Cannabis sativa
attgtttaatatatgaaaaaaatagtattatatataaaatatatgaattatttctttaattgtcaattaattttgagataaaatcttataaatcttattatacacttccactattgtacgttgtctacgacatttctacattcttaacacaagggaactaattaacataatatagttaagttagtatcttgggaggattaactaccatatcatttttcttaaatggtcgattaagtcatttttttttttttataaattattcaatattattatcactacaaaaagttagctttagtgacaatatattttaatcacaacataatttttttttgtaattaaatgtgactttttatcactacaaaaagttacttatcactaaaatatattatttatatataagttatcaccaattaagaacacatttagtcatcaaaaaattataatttttataactaatccctttattagtcagagacttttaaccacaatataaaaataataatttataattgattacaactttttcaattttaatcataaatttttttgtgactaaaaataatatatacctaccaaaccaaaaaatgctagaaagaattaatgtaatcatatataatatgtgttaagaatcatgaggttccatctcaaaac

SEQ ID NO: 173636 - DNA, 573 bp, Cannabis sativa
ctggtaaaataattccaacagagtcatcatggagagttcgattctgaccatgtctctatgtgaccatgcaaaaagatctgagttttccctcagaaattctaccagtattgatttagttttttgagccaagccttttgcaatcttcaatcttcttattggaaaagtgggatcaacctccacttcttccaactcttttacaagtctgaagctttctgcaggatccctaaagcgaggatctatatctgtgtccctgccttgggctaggcttcattgacccttcccaagcttgtcttttggactttcgacgggaatcttctcctttttggccttggatagggctaggtcataacagtgacggacaaactactggtctcccctcacgcatgccaccccatgccttgttggaaatttgaggtatacgtggtagatagatgttacagccttcaagtcagtgagggtcggccaatcaatcatggcattgaaacttaagtgaacgttaatcacaatgaattgtgccatcagtgttttggtagtctaattttctccaactgtgaggagtaatttgatataccc

SEQ ID NO: 173637 - DNA, 540 bp, Cannabis sativa
aggttgtgattatttaggttgttttaagttgagttggttgagttttgcgatgtttggatgaagttaaagtttgagagctcaagcttagagctctaatggtgttttgatattctgagtttattattgagttttgttgcttgaattggattaattatgatgtctacaagtaatctggagattttggtagagtttgggattgttttgtgattttagggacatttttggtggtttctgctctgaactgaaccggtcgaccggttcaggggaacatgtagtaaacggtcgaccggttggtctccaggaaaccccatcgaaccagaattctagttggggaaccgctctaccagttgggacaattttggaaccctagtttttcccgtttttgtgttatttagggaattgccatgttattcattgatagggatatttctagttttgatttaaaatccccaagaagtgtcttagcgtgtctctcataagaatttcaaatattgtgatttagggccctgtaaagcgtcgagttgcagttccactcaggct

SEQ ID NO: 173638 - DNA, 533 bp, Cannabis sativa
  modified_base (257)..(262): a, c, t, g, unknown or other
ttttttttaaaaaaaaacaaaaatgcgtacggtaaccacttttgtttttcaattttaaaaatagaaaataaaagtgtgttcagtaaagtttattttcaatgtcattttttgattttatttaagtcagatctaggtctggggttggattcgggtttgggtcagaggccaagttcagtgccagggtcgtgggggatttaggtccgggtctaatcggagtccaaaatattgattaagaaaaaaaaactgttttaaaaaannnnnnaaagtaatttttttttttgttttcaaaattttgattctcaattaaaaaattaaaaagtaaaacaattttatagaacatgtttttgaaaaatactttcgcttttctaattttaaaaatggaaaactaattaaaaatgctaccaaacgccatctaaaatttttaaactaattaattgacttagaaaattatttatttttttattaaaaaattcattttgatattaaaaaaatatattaaaattttattttcgtaaaaactaaattttacggga

SEQ ID NO: 173639 - DNA, 539 bp, Cannabis sativa
ttttgatctaatctacctaatacagattttttttagaaatatgtattctttttattttctataaaaataattattttaaaatttaatattaatgtgctaagattttttttttttttaaaaaaaaattcttttacataaattgtgcggctttttttagttttaaccaaaaaaataaaaatattacaaaaatatttccagttggccaaataaataaatatacagcctaaataaaaaaaattacacaaataccacttacacacacgtttaaaccaggatccatgcttcctgggcaactatcgtgcaatcatcgcgcaactatgcaacaatcgaaacgaaaattcaaccgaaaagagaaccaccattaattttggcgacttcacttgagaagacaaccagaatcaatcaaaataggggctgtttcaaattaatgaaaaacagtgtagaaaaactattacgaaactaaaatttataacaaaaaatccagtttaatttacataaaactaatgtactgacttcaatttttagatccatgaaaggca

SEQ ID NO: 173640 - DNA, 523 bp, Cannabis sativa
accactaaggcataaaatcctagccaaccaaggccaaggctccaagtgggcaatcaatttttctccctctttgacctcgactagggtcctgtgatggccttggaggcatatacaactgttgccttatgcgtggtttctcttggaaactatgtataaggctaggtagtgagtccattatagttaactatagaacttaggacttactatacgtcttagtaagtgtacttaatacggtacttggttggtgattgaccttgtacattgtgttttacctggaaggtaccattgggtaattgttgacttgaatgtgtttgtagctttgttaggttactcacctccccttgtttcttccatctaggtagcaccaagtgttgaataagggaggtgacaaccgcgcaggtccctcatttacttcgtatttatggccataatgaaatagaccctccgtagggcacctccatatgatcctcactttgcaagggtggccacaaggggtcaagttagtgttgggaatattttacca

SEQ ID NO: 173641 - DNA, 670 bp, Cannabis sativa
cttctatatgatattgagtagattgcttatggccaatagtagcaagttgatcgactatgcctttaatcttgaggagatagtcattgagagatctagtcattttggtatttcgaagctgagttttgtagaggctgacattagcagcattgagagctgtgtagtattcattgagtgaggtccaaatctgagctattgaatcacatccgatcattcgatttgttgtcttctcagacatagaggataaaagccaggaaacaagaagattgtcttgttgttcccaatcttcaaattcggggttgatgacattggctctatctgctttaacatccagaaattttgggggagcacgagtggaatcaagaaacttttgaaggcgactgcctttgatggatgcaagaacttcatgtttccatggaagaaagttgtgttcttcaagtttaatagacaacgaatgattgaatgaaacaaggtaggactttggtagaggtacatgttgattgttgttcacctgcacattgttcaatcttgatgctccttctgtgttggctgttgaactttccattgttggacgatgagaagctctgataccaagtgacgaaatggacaaagccagaaaacgagaaaacagagaaacaaagaaaaacagaagctgaaagaattgaattgtatt

SEQ ID NO: 173642 - DNA, 875 bp, Cannabis sativa
agctttgtcaaccttccgagttctggaggaatcccacctgagattttattttgactcatctgcaatctagtgagattctgacattgtccccacatactggaaacatggccgatgaattggttgttcaagaaaatcgaatcgagatgtgggtgaacaccaaaagcgttggtaatgttgcttgcaaattgattcccgtcaagccttactctttttaattttgtgcagtttctcaggcactcgggtaatggtcctattaagttgttgttagatacactaaaatattcaagattgaacccactacacaaaccttgtggcagctgtccaaaaaagttgttgtttccaaacataacgaagttcaaatttggattgttcttcccaaagtctctagggattgtcccagtgaaattattgctgagaatggagaacaactccaagttactaagcatggaaatattaactggcaactctcctgatagttgattggtcttgacatcaaaaattgtgaggaattctagatttccaatctctggtgggatggttccacttaaattgttgttgtaaagggttagagagataaggtttttgaggttccacagagtagttggaatcggaccagtgagatggtttctggaaagatacaatcgtttaagtttctttaggtttccaatctctaaaggaatcgaaccagtgagattattgttaaaagcagagaaggcctccaagttactaagactagaaatattaaccggcaactctcctgataatttgttggtgcttacccagaaatttgacagtagttttagatttccaatctctggtgggatggttccaaccaaattatttttgataagttgcacaaaggtgagatttttgag

SEQ ID NO: 173643 - DNA, 724 bp, Cannabis sativa
ctgtaaatcagcaacttcatgctgaacatcagcacctcactactacacatcagcaatttcctgttgtaagtgcgcccaaaaacaatgtagataatcaacatgatgctcatgcaccccagcagcctactgttgtcattcaacaacatcctgctgctataaatcacagcaacaacaataacactactgcatcaacccatcccatcaactcttccaccaatcgcactacttctagtggaagaacaagcaaaaaacaagcacatttattcgattatgtgtgccatacatctaccactgctcatccaattgagccatatctctcttatctaaaacttcactctatttttcgtgctactgttcttgctgcctacactcaaactgagcccaaaaactatgttgaagcttctttatttcagcattggctcgaggctatggacaatgaaacccaagccttataaaaaaagccacacttggattattaccaaactcccagttggcaaaaaagaaattggtttacaaagttaagtacaacgaacatggtgatgttgaaaggtttaaagcccgtcttgttgccaaaaacttcaatcaaaaatagggcatcaatttttctcaaacctttgcccctgtcgccaagtttaacactctaaaaatatttttagctcttgctgccatgtacaattggcatgtccaccaattggacatcaacaatgcctttccacatggggat

SEQ ID NO: 173644 - DNA, 529 bp, Cannabis sativa
gggataagatgaattgaggtttcaactcaaaacagaggagtagctcattcatcttatatatgacaatttattttcacacataagcaatgtgaaactaactaccctccatctaggaggctccatcacgtttaggccaaatatcgaaaaatttgtagattttaaaacaggtcaaaaacttaacattggaaactgacacacattggccgaaaggtcccaaatagaggttaaagtggagatagtgaaagtatctttttagaccggtaacactttagctcacaacagatcacaaacggctttttagaccagtagcactttgggctcacaacagatgactttgatatcatgttagaatttgagataattaagatgaatgaaattttctcaaaactaattggcaattaataatgggagactcattcatcttatttatgataatttatttctaataatataagactaactctaatatttatcaaatattattttaagtaattgatggttgacttaaatatctttatctttatatatt

SEQ ID NO: 173645 - DNA, 591 bp, Cannabis sativa
  modified_base (543)..(550): a, c, t, g, unknown or other
cggtaaatggtaaactatctttatctcgctggcaaaatatggtcaaccaaccgccaaaaggagggaacttctgacagttaaattttaattttactagcgaaggtaagtacatggcaaaagtgaattaatttttgacagtttaatttcacttttcctagcaaataaatgcatcggcaaatgtggtaaaaattttggcgctttatttctcgcgcagtgaaaatgtgtgcaaaaaagtatgtgaaattaggtaaaaacttttaccggtgtacttagttacgccggcaaaagtttctgcaattaatgaaaccctatgtttcattttaggattgattgtgatacttttgtcagtgcacttaagttgaggctgaaaaaatggaaccccgaaccccccacccatttttctctttctctttctttttctctttctctttcttcttctctccgcgattcaccactgcccaccactacttttaccaccctcacaactattttcaccaccataatcacattcaatcatcatctctttctctttctctctctctnnnnnnnnctctctctctctctctctcatctatttcgtctgtttttttc

SEQ ID NO: 173646 - DNA, 524 bp, Cannabis sativa
agtttgtttatgtcacagacagttggagcgtctccatttggctctaagaagagagaagtcgagaaagagatggagagagagtgaagaacgcgagggagaaccaacattggggggttctcagatgctcgcaatactggtagtgattttgagtgagtgggtctctgattgttctttgtgtttgtgtctttttgcccctttttcttttgttgcaactgaataatgaggaaggtgatgatgatgaaatagtgttactctgataaatgtatatgaacaagggtttcatgaatttttttaaaggtatgaataaaagcaaggatacattagaatggttttcaacaagaagaagaagagcaggaagaaaaagaggatgacatttcaatttttttttagcttttatttgttagttttaatttttgggttctaattaatgatttattttattttaatttaattaaaatatgaatattaaatatctattattttattttgattttaaactatttttttgttttatttttaatatt

SEQ ID NO: 173647 - DNA, 1379 bp, Cannabis sativa
aaattatattttaccgtacaaaattaatacattaataattttatacatcatttcacaaatttacaatttttttatataaattaataagataaataattgtatggaactaattatcaggcaaccaagtagaccattttttgtcaactttttgtattaaatcaaaggtttatattatgataatgacataattttctccgaatattaaaaataatataattttaaataattgaaatgtaattttatgatcatttaaataatattatttattttttgaaaacaaatatataaataattaataaaaataaatatttatatttgaccctagagtggaggaaaaatatagtcttccacgtgatattattagatatatcaattgtaaatgataattatattatttactttacttattgttacttttttttaaatgctcaattttatgaattaatgttaaaacagaaagattagatatgtcatgaaaaggaaaaaaaataattaaataatatttcataaaatgaaaggacacaccactcgcagtttaattacaatgtatatgatgcaatttaatttaattttatcaatttactattattataattaatgatcttgtattatcaaacaataataacatataataaaattaaaatattaatcataatataaaagcctattattattattatatattaattaaataggttaatctatttttattgttaattaagaacttctataacaacttgcagacgtttcatattccttctcctaatagcattaattaaaaaaatagaatgaataaagttgctatgtatacaaaagagacactctatgataaactatattctttataataacttttgaaattccataacatatctaaataaatttaaatatataattcataatatttaaataaatcaagagacataattgtattatacacactaaataacaacatgtcttttgaatttcttatgagaagtaaaaatattggtgcaattaatagtgatgataaaaataacaaaaatattaaataaataagaggatgtagaaaaattaaaaaaaaatgaataataattcataatcttattattaaatgaaaaaaaattactattaatattaacaaaaaaaacgtaagcataaatgacaacaaaatgaattaaaaatatgtaccacaaataataatagaataagttaaaaaaatataatgtaatgaataaacaaaatgaagaaaatattaatcttatgatggagaactattattaacaaaaacatattaattaaacatcttatataaattattatatcttcttattatgcccactcatttttaagtgaataattattaatactgataattaataattaaaataaaggcataa

SEQ ID NO: 173648 - DNA, 739 bp, Cannabis sativa
tttatgtttcaaattcgaataaaattggacttgattagatgcagtaagcatatattcttatggtaaatgtcattgttgtttgatttagtatgaaccctatacacctgagcctcattgttatacctgaaattcgtttatgtgccagaagctaacacgtgtcctacagaaggaatatgaatcaactcaaggaatataataatgaaattatatcattaaatacaactcaaataactcgttccaattaaatacaaatttgatagaaatattcaaactcgctgactacttagtcttatggtggacaagaataataactattgaattagaattgacgagacatatgtccacctcgggataataagagaaaatatacgagacgaagatatccaaagatttcgtgaatcatttactctcccacacaaacagggtgaagataatgacactcaaccgcctcacgttttacacaacaaagtagtcatctcgcaacatcaatactgaaacgccataatgctaaggcacgctacagtaatttttcaattacaatgctatctttgctaattaaagaacttactcgaaaatcatgtcaaattaaaacttttatattaaatattaaacattataactttacaaaaccatttacaagtttcagaatcctgtttttaaacttttatacaaactacacaaaatacataatcaggtcgctcagcgactacaagataataaccccagatgtcccgagacc

SEQ ID NO: 173649 - DNA, 1072 bp, Cannabis sativa
ttttttttttttttttatagataagaccatttcatatctcatattgtccatctacattttatccatcaagtttatatatcatatctgttatctcaaatttgtccactgatatggtatgttcacgtaagtcaagataaagtacatgtggaatataattttgccaatagcaagataaagtctccttacaaggtatggcaaaaccgtcaagcaacaagcgaaagaagttaaacgagttgttaaggagctgtaccaccatgtctggctgaccaaggggagtctataggctggccagggtttgagcacaagttggccagtcaaaatgtgactttcagaccaagggagggtccgatcgaccaacgaagcctgacctctgcaaggaaaaggtgtacaaaggttggcctccacctacaaaggctggtctcaactcaccaaggttggccatcacaaaggttggccatcacctactaagactagccaacacatgcaaggacttgaccgactctggacaaagctggcaggaacatgacctgccagaccctaataggagcatggctggtcagaccctagaaggcacatggcccgccagacctcaacctgcagacattgtatggccagccagcctgcatcttgcaggtgcatggctgaccaacttttgcctaggaggacattaatgtgcagccttcattcgtggacagcaagtcaagcaatggactgggccttaacaacctacggaaatagaagaaaaatatatattttcaagaggcaatttagtcatttgtattttattaattaattaattatgtaaataatgctttatttacctatttctaagaatattaggcatgtaatctctactataagaagagcattagcctatctctaaaaccttaagtcattaagcctctaagctccctaagctctcaactctaagtctgaaatcttaatcttcttttctctctctttgctacacgcccaaaaggctctctccctctctctcacatgcctccaaggctttatctctctctcattagagacttgcctattgattcatacattgtaatcttaagagagc

SEQ ID NO: 173650 - DNA, 526 bp, Cannabis sativa
tatcaaattgttaagtaatttagtgaaaataaggtatttttacagtatacatctttaaaattagtatatcgacccacccttttttatttttaacatttgaatagttttaatttcattttttttttttaaatagttatattgtagttacgtaagatattttgtaaattttttaaaaattaaaaataatttacaatataaaaattagagttcaaattgtcaatttcacaaacgtataaaataaaagagccacacatgccatacaaggtactgtttgaactttgttttcagcgcgttaagttattttgatttttaaaaaaaatttaccgtgtatcttagataattacaacgtacactgtcatataaaaaaattaagattaaaactatctagtaggggtgtgcagaaagtcatccgatccaatcccaatcgaccggtccaatcccaactgatccaatagaatcggatatccaatcataattggatcggatcggatgcaaattttaaaaatccaattggatcggatcagat

SEQ ID NO: 173651 - DNA, 549 bp, Cannabis sativa
cacaatgtcagctttgtcttcgttttggacacactacactagtttgccacaatcggtttgataaaaactgggtgcccccaaaagcttcatcaaatgcaaacgtcaataacccctccccaagagcttatgttgctgaaaaagaatttgagtatgatccccaggcctttgctacatcctttttactaggctttagtgatgattcaggatggtttgctgatactggagcaaccaaccttgtgtcccagggcacagaaaatcttgactcctcaaccacctacacaggtgttgaagggcttgttgtaggcaatggtaagaaattacaaatctctaatatttgttcagcaactctaccttcctctaattcttatacaattaagttaaattccatcttacatgtcccctctatcactaaaaatcttgttagcatctctcagttaactaatgacaatcctgtgtatcttgaatttcacaaaacctgctgttttatcaaggacaaagcaacaaggagagtgtcactcaagggaacccttaaagatggcctatacttgc

SEQ ID NO: 173652 - DNA, 528 bp, Cannabis sativa
  modified_base (405)..(409): a, c, t, g, unknown or other
  modified_base (481)..(487): a, c, t, g, unknown or other
gtggcaaacggcctaattctggtctattcattcatgtcttatcgtctatggcccttatcttaggcgttgttttgttctaattatcatttgattcgtttgtatttattaattgatacataattagtgacaggttgtgtataatattaattggttgtggatattcatatttgtgtttctctttctcacactcctttcaatttaataaattgttaaatatataacataacatgtatgtatatatatgagaaatttgattaatgatccttacattaggctaaatataaaaaaatggctaattagcaattttttcttccgaactttgacatataccaatcatgccccatgaattttttggccattaaaaatttcccctgaacaattgaaattgttagatttaaggacttnnnnntaatttcattcaattttactgttcagtgattgtttactaaactatgctcccagattttgatatctaccaaannnnnnncctcaaattttgatatgtactaaatcatgcccactgaactt

SEQ ID NO: 173653 - DNA, 666 bp, Cannabis sativa
tttttttttttttttaaatcagaattgaacataattgagtattaaattatcaaggttatactgtaattaagtagaaaacaatgtacacatgcagctctttacctacctaaaggcaaaaggatagtagagctagagtggatttctattcaaatacgaaagagatttgatttgaacaagaatatgctcatctttactttttactttttacacccacacatattggatgctaagctatcacatttatttctcatcttagtggaatcaaaatcagtgacagatacgtttatcttaattactagaaaaatacatataatctgatatttatactttatataatacatgtatgtaatttcattatttccatttgttattacctgatgaggggatctccataggagatggccatgattggacagcattagttgggttggatgtaattgtcagatttcaattaacatcaattcaaggtagtgcctagttggtttggtatggcattacaaagtttatattggaatgacttggctacaatgaaatgtttggtgaacattatattcaattaaaaaaaaaaaaaagagggtggaattctggcatgcatgaattgtgacttgtgagattcaacttcaaatattggtttcttatttttatttttcacaattatgtcttgct

SEQ ID NO: 173654 - DNA, 871 bp, Cannabis sativa
ttttcatattataagtgtaataattttttatcttgtataattttaatgaattattatatttaaatttaaaaaatatgttaattctatttattttaattaatattaattttttttttctgaaaattaatactattatatatatttaatatttaaaaaatacatattaaaatgtaatctaatttaatttacataatactattaccaacagttataacctgtcatttaaagtgatttttcccaacagttgtaaaccgtcattaaaagtcattttcccaacagttataaaccgtcttttaaagtttcgcatttttatgacgcccacatagccaacggttttaggaaccgttgggaaatcatataaaagacagttataaaccgttgggaatagccctttttgtagtagtgcattcagccgacacccgcaggggatggcagggtagaggcagggagccccaaccggaagagaaggtcgtagggtgtgtcagagcaggagaaagggcaaggtgggaagtcgacggcactctaaggagagaagcaggagtccgagcaggcaaagaggatgaaatccccggattatggcccccgacgagatctcggggagggcactaagtaaggccccaatggcatcgtcagtagctgagtcatgctgagatgacacgccgagatccgatggagcattttcttcaagccttactcccttgcttttcttcgctctgattttttgcttaggggacttcgacataagcctctttcgacaggccacgttttgggcctcaatctcctcaatggtcaactcggacagcctcattttaggaaggtgacgggggtaagtctctgcaaggcgggaatgatcctcagaaaactctatcaa

SEQ ID NO: 173655 - DNA, 794 bp, Cannabis sativa
tgctagttagggtgttacactaccgatgcctctgacaaataagttgttatttttgttgatgaatatgataagttcttgaggtatcaggaatcacttaagtttttatctccttatgtcattgcgatagctaatttatgtaattccaatgcatgacttctttccaaatcctcaaaatatgggtcattgattctggtgtcacgtatcatatgatagctaattctaatatcttttctacttttcagtcacatagtcccacttctattgttactttagctgatggatcatcatcttctgttcttgtgttttacacttttgcgtactctgtcattagtcttatatttacctaatttgtcctttaatttgcattctgttagtcaactcactcgtaatttaaactgttcaatctcattctttcctgatcattgtttgttgtaggatcttatgaagaagaagattattagtaaaggacatgaatctggcggcctgtatgttcttgatccagttccaccatcctttattgcttattcgagtgttgctttcgcttttgaggctcaatgttgtttgggccttccctcccttcctctgctcaagaaactctctccttagtatagtaaggtgtcttcattagattgtgagtcatgtcggttttccaaacatcatcgtgttagtttgagtcctcgagtcaataaatgtgttagtgttctatttgagttagttcattatgatttttagggtcctcctattttgtctcaacctggaatcaggtattttgttacttttgtggatgattattc

SEQ ID NO: 173656 - DNA, 693 bp, Cannabis sativa
aaagttatgtattttgactgaaatgcccctgcagtaacttttaatttacagatcacaaaaattattgaaataattaaataaaatattgatttttgtaaaaattttataattttatattttaagtattttttttttatatatttttatgatattatataaaaatataagaaaataaaaaaaaaatatataaaagtaatacgaaaacaacattaaaataacaacaaaataacagaaaaaataatataaaattaacaacaaaataataatagtacgttataaaaaaaaccgcattttatgtaattaaagtctaaaaaaccgtaaaaatgttaaaaattcagtacaaaccgtattttgtaatttttttttgttatttttatgtttttttttttaattatgccaaagttattctctaaatatatagtctctacttaattttttttaaaataaaataaaataaaataaaatattagagaggaaaactctcattttgaatataattaaacggcagtcaaaatgcttcagtgttattaggtcattaagtttttacaaagtaagagaagttatatgtatacacaaggtataggctcaataaggaagtgggctaaatgagaatgggccaaaatattaattctaataccccctttttgagatgaactgtataaatttttcaggttcatcttggttacaagtgta

SEQ ID NO: 173657 - DNA, 644 bp, Cannabis sativa
tacgtttatgcaatctcgacacccaaaactgccaagataagtagtaatctcgacggttacatagtaaactgccgagataggtaacaatctcgacacttataaatcactaagataggtcaattacaatgttttttcacaactatcgtaattgatttaagtgggcaaaaaataaatttaatattttttttaaaaaaaaaatcatgtgttgatagtgttgattatatggatgtattcgcgatatatacaaagataagttgctgcacaatattatctaataaaatttataatatatcactatatataatagtaaatggtaagtatcacaattacaaaaacaatataaaactataaatctaattaagattatacttgctagcaaaaaaaaatataaaaactatgttagaaaatacttagtatagtaatccatttattcttcccgcacaatgttaattgcatccattgtatactctgccctaccatcacactgcagcataagtataaatcgatttcaaaatgtatatgttcgtttcttgataattcaaaattgatcaaatttaatataatatgttaattacttacgtgttttgaaagatattcttttgaattttttgccataattaagtctctcattaattaggcgcatg

SEQ ID NO: 173658 - DNA, 922 bp, Cannabis sativa
ctggtaaaataattcccaacacgcagaactccattttcaccagagatcaatctcctgccactgcctcacaagttcaaaatgccaacgtggaagatgtatactgggagagaagatccactttcccatctcaagtactttgagatgcaaatggacttacaaggagtagagggggatgtatgctgcagaatcctcctcgccactttgtcggaagccgcacagtaatggtatttcaagttggctccttgaaagtttagttcatggaaaaccctctcttcggaattccatgtgaaattctcctcctcgcgctagctcccattgcttttgggagatttggtcgaagtaaagcaacgactaggcgagccactccgggcatacatcagcagattcatgacagaagcgaccaaagtttcacgggtaaccgaggatggaaagttatccgcgatacttggggcattgaagtccttggtgaactttggaaagatataaagaagaacgggccggtagactcaatgagtgatttccttgaccaagccaaatgcttcatcaagctcgaagaagccattcaacgagcaaaaggtgaacaaaagccgggcaaaatgaaggctccttccattggaacatccgcccaacttcccaactattccaataattcaagctcaagtggcaagcgttcaagcaacaaccacaagcaaggaaataggaagaaaggaaagctcactgataaatccagacagattccccgtgatcattccaaatacactgcattcactattttgactgaagatatagagattatatatatggcaactctgtcgttcatcccgcataagaagcccaggcccatgaagaaagataccagcaaaagggacatgactaagttttgtcggttccacggagactacggccacaacactaatgaatg

SEQ ID NO: 173659 - DNA, 558 bp, Cannabis sativa
atccttagagagatggctctcctaaaggggtcttttcctctaaagtaccttggggttcctttaagactaacaaaatggagagcaaaagattgtgggggaattattaagaaggtcaagcagagattgagcacttggggtagcagacatctgtcttttgcggacagagctcaattaattcactcagtattacttggtcttcgtaattactggatatgcatttttgttcttcctcatagtgtcacaaaggaggttgaaaaactttgtagaggtttcctttggggtctaaatggcaatcgtagcaagattcatgttgtgtcttgagaaaaagtatgcctcccaaaagcctatgggagtttgggatttaaggagggaattaaatggaatcaagctaatcttgctaaatacatttgggccatttcaaccaaaagagatactctttgggtgaaatggatcaatagtgtatatttgaaaaatgattctatttggtcctatgatcttaaacttgatactagctggtattgaaagaagttattgttgaaaattattttaccaggatct

SEQ ID NO: 173660 - DNA, 511 bp, Cannabis sativa
ttttttttttttttaagtttttctaatttttaatcacgcttttggggaataataagagtgtgcttttttattctgattttccagaactgtccttacaaatataaccgttgttgcatttggtgttgaggctgtgcagaagatgattagtttttttagtccttttttcttttatttttttatttgttttagtgttattttacggttgttttgccataatttatttatttgatgccaatttcactattcttgctccatctcgccagaataaatggttgttttccaagtgttcttgtgttgctgtggtggttttatacgtgggtgtgaaagataaatgctataaatacatttcttcttccttctctatgactgtttttgtattttttattctgattctccaataaatatatttgagaagctcattggcaaaaaacatttgaggggtgtggttcttttatatttttttaagtggttatatctgtttcattgttttacatttatttttgtgttgttt

SEQ ID NO: 173661 - DNA, 712 bp, Cannabis sativa
aaatgacaaattccaatttcgccccttactttaaacttaagcaacttataggtctagcggtaaagtggtccaaaactataaccccgcctaaccccaatactccaaatatcaatatatgaataccccgctaaataaaaggttctaaactcacccatgtgactctactagccatttgtcgtattttccaccgttatcgagcaaaaatcataaattttgtaaattttgcatataacataaataataccctcagagtttaataaaatttccgaaattgagaaattataactctaatgtctattttctaaaaataggtcccacaacaaataaaatcatgcataatcataaaacatcaataattaatgttaattgcctttactaatccaaattataatcatgcgatcattacaattatcccttcgctaagaggatttcatcctcaaaatctagcttgaacaactctagatattgagccctcatgctggactttgattcccaagtggcttcctccaccttactgttcctccagagtattttgaccaatgttatggtcttgtttcgaagaaccttttctttcctattgaggatttgaattggttgttcctcataggacaaatctaactatagtgaaaccgtggttgatagagaagtcgttgggttcgcgatggtcattgagtccgtgggtccttgggtctgtggtcatggtggtcgtgga

SEQ ID NO: 173662 - DNA, 733 bp, Cannabis sativa
  modified_base (520)..(528): a, c, t, g, unknown or other
taacttgcactatatataaaatttaaaagattaatcaaattcaataaattataaaataccaactaaaattaactattttgccaaaaaaagtaacaaaactaaattagcttacaagtaaaagataagaaaacaatgaaataaaataatagaaagaaaattcttctaaatttattaatataaaatcaaaaaacaaaatccaaatttatttgtaaaaatctgtaatagcacttttagaagttgtatcaatgaaccatcgagccaataatatgcggcaaaccaaccaaataatatattataaaatagccaaaacaaaatggcacaaactagctaaaaatatggcacaatccaaccaaactcaaaaaaacaaaccaaatatagaactaaataatcaaacaaaaagaatactcacatgttgtaatatataaacgcttaaataaaaaaaaaatatctattctatataaagtgtgcctgtataacagaattcttaatttatgagaaattcatgagtgactttttattnnnnnnnnnaataaaatagtttattattaaaaataaaatgatttatgagaaattcatgggtccctcacttaataattattttcaaaataattagtaattttaccttttaaattttcgacattactaattttacattttaatttagcttttcaatatttttcaattttcctattaaaaacactcattaaaagaaaaagttatattttagcacata

SEQ ID NO: 173663 - DNA, 513 bp, Cannabis sativa
tctatcaaaaactaccaaaaacaattatgtatatataactaccaaaaactgattgtgttagtgtactgtgtgtgtgttacttttattattgtaaatattttttttttattaattttctttttataatgttagattttttttttctcttttaattttttttccacttaaattagtaagtgtagagaatagttgtatacttttctataaattgtagtgtgtgaagataatttcatgagcataattacatggcattgctattagggggtgccttactagttctaagaagttactgatatttcataataataaaattgtgtgaaacttaaaacttaattatatgacactttagatagtcctagactccaatgatgctttataataatatttcttgatagtcattttgccgtcgtgaaggtcttactggttctaataagaaaatatatgtatatataatttatagggtagtggtgttagtattacactgtactgtgtgtgtatatatattgtagctaa

SEQ ID NO: 173664 - DNA, 661 bp, Cannabis sativa
aaaaatctttgttatgataccttttttcatgacacaagtctttgcttcgatcatggattggggtctaggaggaaatagaatcgaggagacaaactcaggatggagcgattttggcaacatggtggttgttccacttcgagccatcaatgcccaagttttgacaaacttcatccatgacaaagcgtccgcaatcttatcagaaaagctgataccaaccgcgattcctccacactcgaacatgttaagttgagccgcaaatagaatttgatgagcgtcatcactttcatcatgacgagaaattagaggacaaaaaatgtcaagttcttgagctattggattggacataacatgggaaagtcgcccattcacttgagtttccacgaagggaacaccctcgtcgttgcaatggatgaattgtccatgcttttcgagtcttccagctaaagggtagtaatgggttaagatggctgataaggatctttttagaatgatggctggattaataatggtagtatttttctttgtgtaataaaacaccaaagggttatagaatttgggagatgattggtctaataatgagagtttgtaacgctcaagattcttaggagttggataagatggcttgataatctcattggagattgcttcaacttcaatattc

SEQ ID NO: 173665 - DNA, 603 bp, Cannabis sativa
ttatattttttaattttattaaatgattgaataaattttatattttttaaaataatacaaatagcaccttaaattaattttttgtcaaaataaaacttaataataatctgatttatagatattatgacgaaactgattatattttctggatctattcgtgttaggaattatagaaaaaaaatatatcaaaaatcgagctttaaggtattatttttactattttagaaaatatagggtacattttatcatttaataaaacagagcatccaattagtaactttttacaaaacacaaaatccaaaataatatttacccattataaaaaaaaatatatattaattttaaaatagtaacaaacaatagttagtttggcaggatttaacaattttattaataattttaaatttcatatttttgttataaatttattatagggctgagatataaatggtcttaaatttaaaaactaatttagtaaatgtctttttttaaaaaaaattaaaaaaaatggcaaatatgatatattagttaataaaaattataaaaatacatttaataatattattttttacaaaatatgtatataataattaaattaagtta

SEQ ID NO: 173666 - DNA, 1082 bp, Cannabis sativa
  modified_base (99)..(99): a, c, t, g, unknown or other
gagttcgggttcgggtttttgatcccagtccttttcaagatctaggttcgagtcctgggtttgagtccagatctaggtccaggtctgagtctcgagttncgatccgggtctgggttctgaggcttgggtctaggtcccccatccaggttcgggtcctaggtcctagtccgagtccatgtttgggttcgagtcctaggtttgagtctagatctaggtccaggtctgagtctcgagttccgatccgggtctggcttccgaggcccgggtccaggtcccccatccaggttcgggtcctagatcctagtccgagtccatgtttgggttcgggtcctagtcccagttctgatttcgattccttgtttgggtttgggttcttgtccaggtctgggtcggggtctgagtccgggtccgagtctagggttgggaatgggtttttgtcgaggtctgagtgcaagtcttgggtacaggtccaggtttgggtttgggtctctgtccgaatccaggtcctacgtttcgatcccggtctgggtgtgggtccgggtctgtgttcgagtccaggttcttattcagatccatgtctaggtttgagtctaggtttgcgatcgggtcccaggttcaggtccgacccgatcctagacccagaactggaattggactaggagtgagactagaacaaagacatgggactgtaacaggaccaaaacctaaacccaaacttagacaagaatccatactgggacttggacccagactgggacctgtgacctgggacctaaaccatcagcgggacctggacccagatcgagacccgaacccagactcagacccaaaaactagggccgaacccaggacccaacaacaagactcgaacctgggacctaaaactcggacacagagttgcacagggactcgaactcggactcgaacccaaaccgggacctaggacctgaacatagatgggggacccagacctaagaattggggcctcgaactaggacaagaacttgggcctcagaacttggatcgggatctgggactcgatcccaaacccaaaccttgacctaggacccacctcgagacct

SEQ ID NO: 173667 - DNA, 538 bp, Cannabis sativa
tattatgggctttttcacttttacttgagaaatcttaaatttaaaaaaaaaaaattaaaaatagtatataggtaatttctcttattattatataggagaaatatgagttaatgatattttactctaaaatttctctaatttacattgttatttattttctttttagttctattatttttttaattttttattagctttataattaaatattagagcaatttttagtaatatacttaaaatgtaacaaaattagcaatataatcttcggtcattaattgtaccaaataccgtttatgtccctaccgaaaacggaaactaatatacgtgattttaggaaatcaccgtcttctctgggtgaagaaacaaccgacatcaacagcccaaatttccctgaaaaaatggaaaaaaaaaaagatgtgcaatacactattagtaactcctatatatactttaaccacaccaggaaaaaatctgaagcaatgtacagaacctccattagagctctgcaactccacaatcgaagctccgatcttgtgaa

SEQ ID NO: 173668 - DNA, 621 bp, Cannabis sativa
gtgaaaattatatgtcaaaaatacttgtagcaatgaaaacccttcatgttcttaacaatatctcaataggtcaataagagcctcacatgacctataccaatcttgtattctcaggacctgatgtcacaggttggttggtatccactgcagtgactatgaatcccagacaacctctgctcatcaagtccttagctttcaacaatgttattcttggtatgcgtgccccctgaaccttacccacgaacactgatgggttaccactatcgggctcaaacactaccatcttccgcttgcagtcgatcattgccccatacttagaaagaaaatccattcccaggattatgtcaaaatcagacagttgcaattcaattagattggcggtcaattcacaaccgtcaatccagaaagataaagaccgaattcacctagtggatacaataaggtctcccgaaggtaacagggtaccaaaccccgaagcatatatatcacatggcttataaaaactttcaataattctactccacacataggagtgagtagctcccgaatcaaacaacacagtatatgaacaaccattaatagacaactgacttgtcacaactgacggactagcatcagcgt

SEQ ID NO: 173669 - DNA, 718 bp, Cannabis sativa
aaataatctattccaaaatatatagaatcctagcaaatcaagcctggataaatactttcccaaaaggtaaatcaatctttttgaatgagggcatgtttgattgtgatagttagtactcccttgattcgtaaggggacatactgggtaagttgtgcaatcccacatcgcctagggaaggtcaagtgattattctgagactgtgtaggtatagaactacacggttgaagaggactaaaatggattgattggtactacctatatcaataaggtacatcttgttttctagtagcccaccacaaaaaaactccatcgttaagcgtgctagacctggggtaatttcacaattggtgacatcctgggaagtttttccaagaagcatgcgtgtgaggacaaagcacattcgaaacactcgtgttggtctgtagggcaagtcgttagtccatgaagcaactagagttatgtactcgtgtataagagtcatcattctgtgggtcttagggtccaatggaggattgaagcaggatcgttacaaaaggtataagagccttaacccagttggaagtatggtcgacgaggacgtcagaccccgtaacgggggtgattgtgacagtcaatagtcctataatttgtaagggaaaatactgggtaagctgtgcaatcccacatcgcctagggaagatcaagtgtgataattctaagactgtgtaggtatgggact

SEQ ID NO: 173670 - DNA, 631 bp, Cannabis sativa
  modified_base (417)..(425): a, c, t, g, unknown or other
tcaccagagggctgtaagtttcacaatgctctgtagtttcagtttgacgcatcaaataacgaggtcgagtatgaagccttgattgctggcctaaagatagtttaagcattgaaagtcaaaaacctcattttccatagtgattcacagctgattgtaaaccaggtcctcggggaataataggccaaaggcttaaaaatggcgaagtatttagagaaagtttggtggaacttggaaagattcgattactttaagatcgaataaattccgagtgaacagaactttaagaccgatgtcttagcaaaactggcctctcagaacgacttggatgaattgaacttggttccagtggaggtactaagtgaggcaagcatatgtgaaacgaaagacgtcgagatgatagacagctctcctacatgnnnnnnnnntattatcaattacttactcgacagaaaacttccaaatgacgaaaacggggcacaaaaactattgtattcagtgcctcgctacacaataattgaaggcaaactgtatagaaaagggtactcgatgtccctacttcggtgtgttctccctacagaagcgaatgaaatcattagagaaattcatgaaggtttttgtagggatcatgcag

SEQ ID NO: 173671 - DNA, 531 bp, Cannabis sativa
gtattggctatacattagattggaatgatattgacagtagaaattataaacttactgttatattttctaagtcaatatcacttagttgatcttaggtcagttgatctcaatcctgagatggtcaagttctaacttaattgtaacatatgagttctttgacttgttcattaccagcttacctgtaggactagctcatacttacatcttgtaagttcggtagtgcaattgagtgggagtgttaatcataaatatggaatcaatagcttctataactatttagaagttaaatgctggttttcttagagcttggctaaaacgatataaataaaagagctcttattttggtaattatataagtttactgaaatatcatttataagtagctaagtattttaaggataaaatatattaaagggtaaatagtaactttatccccactcgatgtaaactatccatagaggattaatgactgttagattgaaataatgaataattagcagataggtatttggtatatagagtattttatgt

SEQ ID NO: 173672 - DNA, 635 bp, Cannabis sativa
  modified_base (576)..(579): a, c, t, g, unknown or other
ttagtcatttcaggaatatgacttgtgtattattttcaaaaaaaaaaataagaatgaatcagtatgatgttgtgtcatcaattctttccgtcgtgaggtatgaatatgaaaataagaatagaaatagaataaaataaattttaaaatatataaaaaaaattgataaaaaaattattatgttttttctcataatgtattggaatggtctttccttacattttaaaatgaaatagtcattccaccaaaatggtggaaaggtcattccattccaatactttaatatacaaccaaacaaagaaatggaatgaaaatttttatttccattccattctatttcattatctccaactaaacgccgcctaaattaaacctcaattctactcaacaataaacattatcaaagggccttggaatttggatcctgggccatctaaaattctggatggtttatgcacaaacaacaggaattccgattagtgtagaaatcaactcagattttcaaaaatgctctttggcctaaatgactttaaatcttttctaatatattatagagggtaaatactattttggactctnnnntttgcaaaagttatcaattgaactctctattatgttaaatgacaaaatagaccttg

SEQ ID NO: 173673 - DNA, 509 bp, Cannabis sativa
tttcttatattaagcaatgtaacactttctaacataaatatataatttctgagtaattactttaaacaaatatattaaacttaatagttactttgaattgataggatgactttcaaaacgaccctaatcaattagtactattataactaatgaaacgtgctttagaaattagtttagttaaaatatgagcccaaattattttaattattttttaaggtttggaaaaactgttataaacatgttgtcaacaaattaattgggttattaatttcaatttaaaattacttttgagaatacaaataagatttagtttataatacttaagggtgttggctagtggtgtgggttgtaatttttgtataatttttcaaaccgcaactgcactgtaagatcttaaaaccacaaaaaccacaccacaaaaatgcagtgcaatttgaacggtttacactatcataattatcaaatattaaaataaaaatttaaaaatcaatttaataaaattttaacaa

SEQ ID NO: 173674 - DNA, 983 bp, Cannabis sativa
aattacgttaaaacatacatataatatttctttgtcgtgtttttttttaagttaatttaaaatacttaaacaaaaagcttaataaaaacgagctagagtctcgtattcttcttatccacaacagttacaaaaaaaaagggtatttgcagtgtttttaaacactattaaaaaaaggaggagaacaaaaataaaaactctatttacaaaaaaaaaaaaaaaatcctaaataggtgtctaccgctcgtgatttattctatggttatagtagaaaacttcgggattaagaagaaagagaggatgagctaagtctctcaacgaccttcgttcaaatgagagaggatgttcctgatttcatcagaaatacgactgtctctctatttttcaacggcgacaagcttaccccgccaacccgaaacatcaccctgaagaagggaaactagagaacataaatattccactgtttctttaggtgaggaaagctcctcaattaaccttaagagctcagcatgaagctcctccatagttttcgtgccagtatcatgaaaacacaaacgttgctttttggtaggaacaggactgatagttgtgcccttcaaagtacatttcccagatgtggaggacaccatatttggaagagaaagaagcagataatagaacacagagtatgataaatgaaccaagcagttagtcttatttatagaaaaaaaaacaggaagctgttaaggagatacaaggaaatatgtcaggaattatgataatgataagtaagctctgaatatagccttatcacaaggagtagcttcttcaatctagcctgacataaaagcagtatacctattttagtaaacaagttaagttatagtatattatattatatataactaatatattactaagatagagtaagttcatgacatctctctgcaaccattaagaatagcagggtgctacaaaactaggctgttgagattttacaacctctt

SEQ ID NO: 173675 - DNA, 604 bp, Cannabis sativa
tgggattcccaaagtgtgatgatggtggagccaaggctaggctctgattatatcctagtattgcggagaattctatgccgctcatttgaggagtggccaggggcagggctcccgagagctaagcttcgggtacgtatcatgatactccgattggatagtatcccccataggccactatctcgacctcttccaaattgatgtatttttggacccccttttggaaatcttggagattggccgctccttcctgttgtaattcgttccagaatggggtccccgtttggatcccagcttggagaagtgcaagctgttgtctgtcatccacctttttggtctttgaagcttcctctttaaaccttttgatgaagttctttaaggtttccgtgggcagttgctttatgttagtcagggcgctgactccgaggttaatcttccttgcagcgacaaactgcctctggaagcttacttgtagtttgttcctgcagtccactaatcgtagttcaaattttttgaaccattcctcatcggaaccgcttaatgttaatggaaagcatagacatttggcattattgctaacccgcataaccgtcattacccggttgaa

SEQ ID NO: 173676 - DNA, 586 bp, Cannabis sativa
  modified_base (533)..(534): a, c, t, g, unknown or other
ggcataaaacccaacagttagtagataaaaagaagcaaaaaacggagatggattcactaatgttaacaacttcaaattcactagtttattaaaaaaaaaatgatgaagaaaaaacatgatatcaatatgaggatggatacagaacattaagtgggtgcaaattaatctgctccaactttgcaagcaattagttttagtatcatttactgacataataacggtgactaatgcacaaattaccttatgataagatgctatttggtgtaatacaaaaaaaatgtaaaactatagtcagtagtaagagaaaagaatcattcctcttttgtcaacaccctcttgcattttaattaataccaaattagttcgtataagtgcaagaatcacaaggaatacacacacaaattcatgtatttgtttctggatgagccactaattccattagttatatgaactcacagtacttctagaaagagcaaattagtgaaattaaaatatagggtaattagtaaattttccccctgaactttgacatnnactaaattgtgccccctgaacttttttgaccgttaaaaattccccccgaact

SEQ ID NO: 173677 - DNA, 847 bp, Cannabis sativa
tggtaaaatatttccaacatacccccgctgctaatgcatgaaattcttgtagtgatgtatatgctattctcattgttaattgattttgagattaaactctatgcatcttaaccaaaacaatcactccgggtattttatcaatctatcccaaattggtgagtggaaaaaaacctttcaaatactttaggatgtggaaatctcatcctaagtatgacacttacttgaaagaagtgtggaagcaacatgaaaggggatccaaaatgtttcaagtagtgactaaattgaagcaatttaaagtgtgactcatggagattaacaaagaaggtttttctgatttgcaaagtgctgtcattcgaattaagcaggatctggatcttcttcagagtcaaatacacaaacagcctcttgatcctaagcttcatctacaagaaaaagaacttagagaaaagctcaccaaggtgcagggagactacatgtccttcttacaacagaaagctgaagcagattggattcagcaaggagattgtaattcaacactttttcatgcttgcattaaaagaagactgaggcaatatcgtatcctatctattgaaaggcaagatggaaggagagtacatgacccagattaggttacagaggccttccttgaattttacaaaggattactgggttccaagttagaaaagagaaggaaagttgaggcaagtgttttggctagaggacctgtactaactccggaacttccaagtgtcctaacacagaagtttacacatgaagaagtgaagaaagctacattcagcattcctggaactaaatcccctggtcctgatggcttctcgagtagctt

SEQ ID NO: 173678 - DNA, 720 bp, Cannabis sativa
aaatgacaatttcttttcaaaaattaactaactaaatattcattcataaagtaactaagcaaattttttattggtaggagaatttatgtttttcaacatctgaagaattaaaacttttattaactttttgttataattttatataatagaatacattatagttataagggtaaatagtgatataagtacttaaagttttaaatttgtaagtggcataaatccaatatttatttttagcggcataagtacctaatatttgtaaaactgtaatttttctctaatttcatcaatacagactctgttattttcttaaacataccacatataatatctaaattttagatcattagatctagacagaaacatatagtatcagttacttctaaatgttcttttaataaattcaaaacgctgtactgataaaattagaggaaagttacagttttacaaacattaggtacttatgccgctataaataaacattgggtctataccacttataaattaaaattttgggtacttatgctcctatttaccctaattataatagacatctcaccctttttaaaaaaaaatctaaatattttatgataccaaaaacaaaatttaaaataatcaaatgcacacatatatacaataataatattctaatttttctaaaagttgttaaatatttataatatataactacaatatatacaattataaaaaaaaaaaaaa

SEQ ID NO: 173679 - DNA, 502 bp, Cannabis sativa
ttgcagccctaaaataacgaaatagccccacttgtttgttaagttgcaatttgcatggttttacccccaactttaattaatctattattttcattatagtttgatgataaagaattaattatataatataatttaaatagcacaatggctgaatattaattaatatatatcattgcttatcaggtgtacttcccatggttttttcttacagatgctagctatattcaaagttcaggcattttaaataggttttttttagtatacactataaaaaaatttatttttactcgtaataaaatttgaaattaaaagtgaactaacactacaaaaaatcttatttttagtcacaataaagtgaaaaaaattgtgactaattataaattattattcttatattgtgactaaaaagtctgtggctaaaggtattagtcacaaaaaattaccataaatttgttttgattaaatgtatttttagtcacaatacttgttgtgactaaaacta

SEQ ID NO: 173680 - DNA, 515 bp, Cannabis sativa
  modified_base (428)..(442): a, c, t, g, unknown or other
ccctattatatatgaatggatccaagttaattgattctggtttgccgtcagaaaatttattagctgctattttagtttttcagccaaattttttcccaataaacacaaatttagtaagattttctagatctaaaaaaacttcctccaattcctcgattggtttcaactggttctttgcgtcttgaatttgaggatttagatcctcatcctgtttctcgccttcctctattatgactaccattaactgatggtcgacttttctattttattgttctatatgatagcattcacgagccagtagttggtcacctcacactacacctacacctgccggtgtctgaaatttcaaagataggtgtttaattaatctaactgcccctagtccaattagtgcaggccgacccaacagttgttggaatttattttannnnnnnnnnnnnnntactcacaagtatgttgattgacatcctaaatatgaactttctaaaacgataaaaagtaaacacatataaagt

SEQ ID NO: 173681 - DNA, 526 bp, Cannabis sativa
  modified_base (478)..(483): a, c, t, g, unknown or other
gagagagagagagagacttttttgtcttgtaaaagtactttttggaggaaaagatattaaaagtatgagtattttatttttagttgggtattatattaaaagaccatgctaaactattttttttgtttttaattgaaatgagcagaatagagaggtgaaataaaaatagacatatattattataaagtattgagaaactaaattttaatattggttaaagtttaagtatttatgaaaatttcctatatgtataatctattggcaaccaaccatctacttaccacctggtggctagcaatactagaagtaggagtgttcataaaatagtccattcaatccaattcgcacaatccaatatgcaaagtatagatatccgtacttctgcggattggatgttgattaacatgtaaaagtaaccgacccaatccaatccacacatatttatttttaaaattataggtggcgtttggtaacactnnnnnnatcagttttctgtttttaaaagtggaaaagtaaaaatattttt

SEQ ID NO: 173682 - DNA, 580 bp, Cannabis sativa
cccagcctctagacacacaaggctaaccagcctgctctctacaggtccctggccggccaggactggacctggcaggatcctttgcacagttttacacgtggactaggagttgggctgggaatttggccttaacaacccaataaagtagctagaaaatatctatgtttaaggccattttagtcttttatatttaatcaatttaatatataaatatctaaggatttcaactgtaaattagagtttaagctctcctgtataaagagccttaactctaacttaaaggagctaagtctaattctagcctttagcctcaagccttaactagtcgtgaatcaaatcctaggtgagtacacaactctatgtgaaaaaatggtggcctacttgagcaaaatcaaagacttactaagtcagctcaaaggctacacaatcaggcagatccccgtagagcagaatgctacaacatatgcacttacccatctagcatgtagctgttggaaaatattttaccaagatctagatttactaccatgtatgtgttgggttttatgccttaaataaaactctttacaatctgattagt

SEQ ID NO: 173683 - DNA, 548 bp, Cannabis sativa
aaaatgaaaccctaacaaaattttatgaaaggatatctgatatagctaatgaatattttgctcttggtgaaaagcttgatgattctatccttgttagaaacattgttagagttcttccagagaggttcgatactaaacttttggcaatggaggaagctaaagaatttagcacaataaaggtggaagacttaatgggttccttgcgtacttttgaattgaatcaacaaatcaaacaaaaggacaaacccaaatccattgctgagaaaggtaaaagtatcactctgaaagttgttgaacatgaaaattttgataatgaatgtgatgatgaaattgctttattaaccaagaattttcaaaaatatatgaaaaatatgggtaataaaaagaataactcgaagttttcaaaaggaaatgcatcttttaaaccctctgtgactaataaaaagggatttcagtgcagggaatgtgaaggatttggtcatattcaatccgactgtacaaacactttgaaaaagaataagaaaagtttcaatgtcacttggagtgat

SEQ ID NO: 173684 - DNA, 937 bp, Cannabis sativa
tggaggggcctgctccttgatccatgagcaaaggatttcccaagttttggttcgagcccagaaatagccttgcagcatcggaataatttgttgggttgttgtggaatgagaaatcttgttgcaggacttgtcctcgaggatgattgactggtatcaaatttgtggtggatgggttaagtggaggggcattggggagggacactatggatgatgagttaaggagaaaaggattggggaggagtccaaaagggccatggttttgacgggttgttcctcgcaggacattttcataggggaggggtggaggttgggtagattcgtcggaggctctcatgtattcaatacaggaggggtaagagtgtcctaggaggccacagtagtaacagtgatcaggtatgtcctcatacttcaattctaaccaggttggagaagctatgccaggaaacataattggtatgccacggggtaagggtttggtaacatcaaacatgatacgaactcgaaggtaagagccccaagttttaagcaaggagggctgatgaacttcaaggagagtgccaggaatttgacccaacaacttggcaagggagatagaccttcgtgagaaagggatattgtggacttggacccaaaaggggatttttttcattgtttctggggatagtgtggagtcggtatcaggaatttccagcaggataggacacttgtcgaagacccatggttggttgaggatggttctacgtctatctccttcacaatgaaaagcagcaagatacaggttgaaattgggtgatctttccttaacactcactgtgaagcgtcccttccagtgtttttccagaaaatttttgagggcattgtggttaaaatttttcgttgtgaagagagttgccaaggtgaaactggggtggggctggtggaagtccctcatttgggt

SEQ ID NO: 173685 - DNA, 506 bp, Cannabis sativa
  modified_base (210)..(213): a, c, t, g, unknown or other
  modified_base (311)..(315): a, c, t, g, unknown or other
aaccacagtcttgtattgtacttttaaatgcatcaataatctaagggaaacttacaaaaatacggaaatttggggtaacttttacaaaaatactgtcatacagaaaagttttcaaaaatactgtgtttttaaaaaccaccagtagaacacaaaacagtacaactcaaaacaacaatagaacaactaaaaaacaccagtagaacaccagtnnnnacttaacacagtatactgcagtataaaacttataaaaaaacacagtaaaaaagtaaaaaataccgtatgacaatatttttgtaaaaaaatagcaaaannnnntataccatgtaaattttcctaatctaatttgaaaagaaaaactccattttttatcctcatgagataaaatattattcaagtctccaatcacacactattggagaatattgtcccacatggattaaatgtgaaagtattgagccatatataagaaacatgggctactccactcattgccaattggttttgag

SEQ ID NO: 173686 - DNA, 508 bp, Cannabis sativa
tttataaaatttccaatagcttattggtggataaattatgttaaaatattttattgtgaccattattatattttcataattcatagtaaccaattgtttaaatttaatttttagtaatgtaaattttacaaaatttatttagaaaagtgctactattaattttttattataattttttacttaattttcgtgcttgaaaaatcatgttagaatttttttttaatttttttttataatggtatttgttatagttaaaatattctttttataaatttttgaataatttatactttatagtaccaaaaattaagtttaaagttttttaaatatgctcggtaaattagaattagaaattttatttttttagtactgtaaactatttagaattttttacaaatttaccaggataatattgtataatcttatgaaaaataattaaaataaatattttagtatgtaattttgaatgcaaaaattaatcaaaaaattataatataaaattatactt

SEQ ID NO: 173687 - DNA, 732 bp, Cannabis sativa
agatgtctgtggccgagtacacccaagagtttgatcagctgtctaagtttgctggtgatctggtgcccatagatttcaccaaaaaacaaaagtatgtgagaggactgaatgccacaatcagtcgggacttgaagattaccacttcacatgacactttgtacaagaaagtggtagagctagccttgattactgaggaggctgagcaacatgttgcaaaagtatagactacaaaggatgccgtcacggcatcgaatcctcctgctagtggtaatgtgagtaaggggaccgacagtggcaaccctgatcataaaaggaaggttgaggcttccggagtatctgggggcaatagaaagtttcgaggaaacagaggtggccgtcaaggtcacaggtcctcatttcgattacatcttgattgtgctaaatgcaagaaacaccatccgggtgaatttcgggccaaggcatgtttccaatgtggcgtggtgggccactttatcacagattgtcctcaggccaagaaagaggagcctaagaagaatactatatagaactcgggacaactttttaccatgactcaggctgacgctgatgctagttcgtcaattgtgacagatcagttgtctaataatggttgttcttatactgtgttgtttgattcgggagctactcactcttatgtgtcgagtagagttattgaaagtttccataaggcatgtgatatctatgcttcggggt

SEQ ID NO: 173688 - DNA, 637 bp, Cannabis sativa
ttcaccaaaaatcaatgctcttgacccaccacctaagttcaaaatgccagtatggaagatgtattcaggaaaagaagatcctttatctcacttgaaatactttgagatgtaaatggacttgcaaggggtgaaaggtaatgtacgatgtaaaattttcccaggtacactagcagaggtcgcctaataatggtacttcaaattagttccacagaagtttagttcatggatttctttctcatctgaattctatgcacaattttcctccgctcgtcagcttccctctcatttagaagatagggtaaaagtgaagcaaatatgagaagaacctttaagagcttacattaataggttcatgactgaagcaacaaaggttaaggggcagactgaagaaggaaggttagatgcaatactgggaggtatcaaacctctaggagagttgtggaaggatataaaaagactaattgtggatcaatgatagaattcttagatcgagcagatagatttatcaagctcgaagaagaagtacggcgagtagatacagttggaaaaaataaatctcaacaacacacacaacattataaactttatcctaatagcacacaccattccttacgtttggtggatcaatttgaaagac

SEQ ID NO: 173689 - DNA, 536 bp, Cannabis sativa
ctggtattgcagtctgcactgcagtattcaagtcagccaaaaaacttttatttatacattcctctaatttatgtcaattcacaatctcacattactatattagtttattaaaaatatacagaaaatagcgaaatataaatgatttgacaaattgagtttttaaaataatattctttttcaaaataatttaattcattatgtatcagagaataaatttattattttataatttttctaagggtattaattattttttaataaagaaatgtttgtattaatttaataagattgattaatgattgtttcaaaaagaatttttaaattttagtattaaatttaatgtttgaaataataaattattgaattggtaaagtaaaaaataacagagtgtagatgtggttaatcaaagtttcgtcttttaatcatcacatgagtttataaaaaaaagcgtaaatagcggcataagtacctaaagttttgagtttgtaagcagtataaatccaatgatttttttagtggcataagtacccaatgtt

SEQ ID NO: 173690 - DNA, 554 bp, Cannabis sativa
aattccactgctaactcctgcatggaataattgactcaatttcaaggaaaaaaataatttcatgaagaaatggtactttttctgtcatttgtcatagttttacaacttgggtctcggggacatgtatgtcttggtctttttcttaattgttttgttaagtgcataataaaagcttagtcttacaacattttataatataaatatgatgagatgtttctactatgcatggggctatagcccccacgaataaaaatattgcattttaaaaaattaaatgtaaattttttaatttaataattataggccaaaatagtagtaaagtccctacaaaaattagatatatttagtaagagtgattataatgtagctataaatatttttttatgataaataagccctcacaaaataaaaatcctgagtccgtcgtttcgatatttttagcctattttttttttcatattcgaacatgttatagttatttaagatattttataaaatttgaaataatttataatataaaaaataatatccaaatagtctatttcacacgcata

SEQ ID NO: 173691 - DNA, 664 bp, Cannabis sativa
taggttctcgaacttttagtgttgttgatttgtgttagtttcggagctttagttggttaattccctattagtttagggtattgccatgttaaattttattaggaaagcttctggttaaaaacctaagtccccagttgtgatttagcatgtcacttacccgtgttatgaacgatgtgatttaggggcctgtaactcgccgagcagttgttccactcaagttggccggcacacatgaatttggaaacaaggtaagattagtataatgttatgcatatgtatttacatgtttagcatacatgttgtttatgcttcttagagtacattgatagcagtatcagtatacatagagttgtactagatactgataaatgtatgtttggctaatatactgatcgatgctatcacatcaatagtgctagagtatgactggcatattaagtagaggctgatattatggtcgatagtattgtcgtatggactaactagacttagtaccatgtgggacacggggatagggttatagttgggtatatgggggcctgattataacccaggatgtaattatgtcttatgttatgcttttcttactgagtcggttgactcatagtttctatttccatgtgtaggtaagggcaaggctaaagctgagcaaccgtgagagcga

SEQ ID NO: 173692 - DNA, 553 bp, Cannabis sativa
cggtcggaatgcgttgctttgggagtttttgtaggagagataagcatgtgcacttctcctccttctcccttagacttcatggcgtaagggaatcgttgaatttcccattttctttccattcttttggccagagccatcattgtttccttcgcctctaatattctcattgttggagaattggtagttattgtttgcgctggctggcatgtcgaacagcacttggggcagtatgatgccctgtgtctttttaacattgaccttccctcttgtctgggcttgtcggacatcttattccaactttatgaatccatcagcttgctcaaggtcgggcctgatgggcccgatacccgtccgatgtcgtccgatgggtccatcgaacacaaccttaaaaacccaaaaatttaagtggtttttgtgtgcaatcgtacaggcatcgggcccatcggacctgaacttgaaattccaaaaatttaagtgtgggggttcgcgagacagagagagaaagagagaaagaggggaaagagagaggggtttgaatgaggggggtaatgtg

SEQ ID NO: 173693 - DNA, 1041 bp, Cannabis sativa
ttgagaaaacatgaaacctaattcacgggatgagggtaccctagaaggattagggggatccctaccatcaccatccccaccgtggtatgtcactagactagctgacattgtactttactttgaagatgaaaaatataaaaatgtaagaattcacaaaatgtgaagcagataaatcaaagttgacacaaatattaatacgaaggaaaaataaaatatcatttaatcattagagtttttcttacaaacaatagtaagattaaagttacaacgaagaatcattatcatttccatcattcaccaagttttcattttcatcctcaacaagttcaactagtaaatcatctatttgttcagcaacattattttcatcaagttcattattttccatctcaggatccactaactgattggttgattcaacaattactggacattcatccgattgcataatcaactctccaagatcaaccgtcaacataaaatttgaagagttagaagcatttacaacatcaacatttgtctcatcttgattgtcattaatgtcccaaatttgtcgatggttaacatcttcaacaacattccaatcgcgacctctgtgttgatcttcaagataaaatacttgcttggcttggttagcaagtatgacttttggcaaggaactttttttccttttccattctcggaagtaacccaatgactacttctacaaactagacaagcctccttagatgcattctccttataaaataagcaacaattacattcacagacatggatagactcataacccaactctaatttcttcaatctctttttcgcctcgtagtacgttgctggaatattattttccttcggaaatgaaaaatttaacaacttcaacaattcatcaaagatgttgttagggatttttcctctaacttttaaatgaaatatctttgctaaaagttgagagacaaaatccaatcacaaccggcatacaattcagcttcaatttcctcaaataagtcatcaaaatattggtttgtggttggttgttcttct

SEQ ID NO: 173694 - DNA, 589 bp, Cannabis sativa
gttagttaatactattgttttactatggtaacaatttgttttggctgttttcttttgctctgtttttccgtttttaccttgtaacaaactttggctctctctataaataacatatctctttcaaggtttgcttaatttttgcaagttttgtgatttctttctgtgattgagtcctgttagattgcataaatgagctcacattctacatagtatcaggaagcttttgaccaacgtcgattatggatccttgccaccccgaacccactgctcagccctctgctgctctgattccagcttcttcaccaactcatcaatggaatccattctagaattctctgaattcctctctcaccgttcgactcgatcgaaccaactttcttgcgtggaaatcgcaagtcaatatccctaccgtcatcggtcacggcctcgatgacattcttcttaccagagttgctccagttcgcactcttgttaatggcaacatcaacccaaaatgcactacatggaaaagaaaagataaattgttacttaggtggctctgatcttccatgtctgaaacgattcttggatcgttagctcaatacaactc

SEQ ID NO: 173695 - DNA, 646 bp, Cannabis sativa
gacatcaaaagatgtggccccgtgcggtctatggtagtatttctagaatgagtagatggatttattaagctcaaagaggcagtttggtgagtggacaccgtaagacataagaagagccagccacatatctcctcgacaggagcagctgcttagagtactcaacaccctagcagctcaactatgaccaaaaaggtccaataacaatggcagacaaggcaatggaaaaaagggaaagttcacaggtcatattgaacatacccttagagagtatgcctcaaagttcaatgccctcaccgtattaactgacgacctagagataatatacacgacaactcattctatggtcccgtatagaaaatctgctcccatgaagaaggacgtatgtaaaagagatacgtctaacttatgtcgttttcacgcagactacagtaacgacatgaatgagtgtaacaatctgaagagggaaaccaaattcttaattagaaagaataacccacactaggcagaaatacgtcaagaccgatcagatgcaacggaccacccaaacaaacaataatcatgatctactaatgccccactagtggatgggcatttacaagttattattgggggcccacaccaagctggagactcaggcaaagctcga

SEQ ID NO: 173696 - DNA, 1160 bp, Cannabis sativa
  modified_base (702)..(704): a, c, t, g, unknown or other
tgaggctgggaaagagatctcagcttcaaaaaatgggatcttctaataatgaggagaatgaggtctgtgcagatatcaaggctctctacatgtagccagtctttctcaagctatgtgtagtcggtctttctccgagctacgtgcagacagtctttcgcaggctatatgaagacggtctttctcgagtttatcggtttcccctctcatcctttgttttaggaagatgacgtaatggtttgcccctagtggcattttgtaaagacaagtttgtaacctgttttaggttttttcttatcttaaatgccttgtactactttcattcgaacttaatacaattgtgtttgcttgcgtttgtattcacaatttaaacaactatattttgatcaaatgtacagtaattttggatttttccattgcttgtactcttcctgcttaagtagttggtaatctaccaaactctttattttcgagcagttgttaattcttcctcgctatagcagttacaatctgccttaagcaaatttaaatatactttaatgattttatcactttgtatattttaatttgctcgtatgaatagttatattatctatccatttttgggttcaagtacttttatcaaggcgtcgtgatgcctcgtttaatactttcctagctagcgagaaccgttagtatttagttttatacgcgagttataacttnnnattttcctttcccgtcagataggttttaaataaaaaattatagttgtttgatccactactagaaaaatggattttagtgacacacatcgagtaactctaaaactatttagtgacacttcaacgcgcgtcactaatgaaggtgactggaaatacagtttttagtgacactccacacatgtcactgaacccttttacattcaatctctgcgcgtcactataggcgtataaagtcagtttttgtcagactgaaaaagtaacagcaatacacagagtgtcactatatccctttcttctttttttttttttattttttattaatattttttcaaaaaaaataattttttattgttttaatttatattttaaatattataaataataatttatattaataatttatgttattaatgtgatatattattttttaaaaatagtaattaacaaaatattttaaca

SEQ ID NO: 173697 - DNA, 730 bp, Cannabis sativa
aagctagtaaatctcacagtgaagtgagttgttttcaggacatctacttttattggtagtaccatcatagatgcacccctttctagtaccttggtaccgacaatggattcaagttgtagtcatagcatcccaactttaaagtactaggttcaagtgctttagtgacgacatcggtccttcccaattcggtcgaattacttctgtcgatgcatctttcgagttcaagaatactcatcgtaacaccatatctctaggcttcaattttctatctttaaccttggagttgtagtgttttgcaaccctttattgatacgccgcctttctaagctcagacctttctctgatctcttcaaatccatctaaagaatcagccagcacctaatgattggtttgcaagtcgtatgttagtcttcaatgtgatggaggtgtaagatctacaggtatcatagcttcataaccgtaggttagagcaaagagagtatgacatgttactgttttttctattgtgtgataggcccataatacttcaggcagttcttaaggccaattcccttttgcttgctctaggcatttctttagtgttttcttaagagtttagttgactacttccactagtccatttgcttgtggataggcaaccactaaaaaaactcttaatgattccatgtctgatgcaaaaattagtaaagagatcattgtcaaactgtgtgatagtggctaagggctctgc

SEQ ID NO: 173698 - DNA, 801 bp, Cannabis sativa
aggaccattttatatgtaaaaaaagattatgataattaaacttaataatatttacaatcagtttttgttttttttacaccattgactatctcagtgtttggtaatactattattttttaattttttaatcagaaaaatacaagtaaaatttgtgttttttaaaaaataaaattgtgttctataactaactttttttttttaattttaaaaacagaaaataaaagtatgttcgataatttttatttttttgattttatttaagtcaggtccaagttcgagtctggggtcgggatcgtggtccatcggagactggagtcgaggctggagtccgagtcccaaggtttacgttggagttagagtccaatatattgattaaaaaaaaattaaaaaaatgtgaaagtgatttttttcttcaaattttttaaaattttgattatctattaaaaaattaaaaagtaaaaacagttttatagaacatattttttggaaaatattttcacttttttaattaaaaaaacagaaaattaataaaaaatgtgttaccaaatgcaccctacctttagtattgaaaaattattttgaagacctttacattgtattattattattatacatataaataaatttaaataattaaatattattacttatatgatattctaataatgatttagggctaaaaaacttttttctataatatttacatgaccattaaataaattataattttttatttattattttattattaatataagtttcaataaaattgtttaaatatattaaatatagtacaaattt

SEQ ID NO: 173699 - DNA, 713 bp, Cannabis sativa
  modified_base (234)..(235): a, c, t, g, unknown or other
atttttccaattgtcaagattagtcttagtcgatcaaatcacaactttggttgatttgttgctccataagagatatggtacccaaataaaaatattatgtcattatccacgtgtcattttcttattgtcattacctaaatgtttgttgatttgttgattagtctaaccgttaaatattatgtcattattcacatgtcattttcctattagaatatttaaattaattttttttannaaaaaataaaaatttaatggcgtggactaataaggaattgtcacgtggcaattttcttaacaattaatagtcaggtacctacaaaagttaggtaatattactgccaaaaattaaacttaggtatttatttgcaactgcgagttaaacttaagtatttatgccgcaaattactctactaaaagtgacacttttttatttaagtttggtttttcatttttcgattaacttaattgaatataagttttttttttaattaatattattttttctcaattctatgcaaatatatttttgactatattatattttaggttgtcatgtacaatttttgattgattgtatttaaatttttataatttttttatttatgatcgttaattttattttcttttttatcacaacttttttgtattattattattttttttttttgaaaaagatcttgcctcattatcatcacaactttttaattgtctta

SEQ ID NO: 173700 - DNA, 630 bp, Cannabis sativa
  modified_base (598)..(598): a, c, t, g, unknown or other
aattctaggtttttccccagaagctgcgacatggcttttaagtgccccagcccgttgcaggttttttcaacgcagatgtgttaaacttgataagcataactttttattttgaaaatcattttgtacgctttatatgttgttggaaagctcattccgagctttatatgcttatctgtaattggaatgcaattgtgtaattatgtgaaagtaaattttgggattaaccctatttgtgaaatcctaggaattttgactaggattatcggcacttgcttaagagcacctgaggatttggaatgttcacatacttaggataccaggcaagacagtagttaacacgtagagttaagcgatgtggcactcctatttgatattatgttgtgaataaatgagaatctgggattagggttattctatatatgttaagataaagaattgggcgggtaagattattactctagtgattaaaggatttgtaggtaatgtcattctatatatgttaagataaagaattgggcgggtaaggcataattagggtagactcgataatcagaattgagataaacaagtctaaggccttattataaatagacgtgtnagcgcaacacgtaggtctatgctaaatagaca

SEQ ID NO: 173701 - DNA, 531 bp, Cannabis sativa
gtcttacagaagccctatttttcgaagtaatctggccgcggcgagggagagtttggccgcggccagaaattctgggcagaaaggcattttttttggtctatatggccgcggcgaggccattcttggccgcgacgaggatggtcagacgggtttaaaaggggcaaaacattacacaagttcaaacacactctcattcaaaatccctaaccaccacctccgaaaatacctctcaaaacactttcttcttcatctaaatccatcctaaatccttttctttcaaatctaaccataaatcttcatcccaaacctttctaaatcatcattcccttcatcaatcactcttttcctctaaaaataaaccccaaatccctaaaatcccacccaaatttcaaaaaaaaaaacattattcatcttcttccttctcaaagacttcaaggttttcttcaatggaggttgaataaagatggattctcattgaggtaacaattttaagactctctatacaatttttattggattatttgtggattg

SEQ ID NO: 173702 - DNA, 807 bp, Cannabis sativa
tcagtttctactttataatatacttctgttggtgtaacatataatgttattagtatactatatatgttttaattgttgttgttatatatatttattgtatgatatataatttttgttgtatatatagtatataaattttattgtatataaatatattattattttaaaacatatctaatttatattttataatatataaaagtatatataattttgtgggtgtggtataattattttaatggtagtatataattttgttagtataatatatacatttaatgataatattttattttatttttattgttgtgtgtatatattttttgttgtatagtatatattttttgttatatatagtatataatttatttaagaagataattagtttcttttttttattatacatattggctataattttttttggcatggtatatatattttaatagtgatatatataattttgttagtattgtatatatttttttgagtattaatatactaattttatttttattaaaaaaaaattgtagtatataattatgttactacggtatattaattttttatactaagatatatcaaaatactattgtatatatataatacatttaacaacataatatatttattcattataattataataaattatatgaaatactaacaaatttatataacataatttatcattatatatatttttttaaaaaaaaaaaattgacatgaaataaagatatttttataattttcattatcttctttattttattcgatcaactcgttaatttttttttaaaaaaaaat

SEQ ID NO: 173703 - DNA, 704 bp, Cannabis sativa
gagtcccgccaaccactggagtcctggcagactcagtcatacacccaactgggccctcagctcgcagtgctttttccaccatttcagcataggttgttttgtcgttggtagtaatcatcaggtcatgtttaatcttcacattcaatccatctagatacgtttcctttttactgaaatcggttggcacaattcccgaggccaacctcaccaaccgatcaaactgcgttgtgtactcaataacgctcatattttatttttgggtcaagtgagtgaactcttttcttttggcacttctgacagcctcattatagtacttggcattgaaaagttcccagaaattttcccaggtcatcgttgtgacatcgtgtatcatggacaccatgtcccaccatactaatgcgtcttcttgaaactgaaatgtggcacagatcactctatcattcccggtgacgcccatgaaattcaaaatcttagtaatcactgttagccactgctcgacttttataacgtccggacctcccagaaagatcgaaggtgcctgcttgtggaacctttcatatagaggttccatctgattcaccgctatcactggttcggcccgaacaactggggcaggtgccactggaatttttggtacaggcactgcaggagcaccctgctgtcttaatcgatggatttcattatcttgttcctcaattctggct

SEQ ID NO: 173704 - DNA, 519 bp, Cannabis sativa
  modified_base (492)..(493): a, c, t, g, unknown or other
aatatagaaataattaattggctgtatataattatgcataaagaaatttattatatgcaattataacaatatactcaaagtcaaagacacattatattttatgtttcaaaaaaaataaacaccttatattttaaaaagtagtgtaattaattactacatacacaataataacttttaaatatactttaagttacagactgaattttactgctggaaatagtatttgtaattacagtttttctttttgttttactacttctcattaatttgtcactacaaattaattttgtttatttaatcataaatattttacctgtatatagtccttttatttcatgggaaattattatctcttgtccttttttattgcagtcaaagaaaaaagtaattgaatataataataagggttaataataaatatagggatatgattttgtcccttgtattcgtgatgtacggcagccgtcagatgaggaagttatttgatctganngctgagattgatctaggggtaatttg

SEQ ID NO: 173705 - DNA, 953 bp, Cannabis sativa
ttagggcataaaacctaacagcaggcaggcaaggtcaatatgtatattgttggagaagactgtcacctcatggttgatctagttttttttgcctttacctgcaccacatagaacccgtgagtcacaaggactaaacaataaaagtaatagtaataatcatatagtttattatttgaatattatcatttatacacaatcagaatcaaacaattacggattgataataaaatgaaatccagatcactacttgcatctaccgtgaataagcatcaatatacaattatttggtaatacaaaattattataccaataataagattcatattcatttaaaaatataaatcatatatatgttacctcagaaagtaaccatcttcattacatcacattgcctaatcaagcaagtcgatactttaatctggtaatcctgtattgcgttgcctaatcaggcaagcccgtgccatagcctggccctgtacatcacataactgcatcaactaatcaggtgagcacgtgccaaaaaattgcactcatatatcatataattgcatcacctaatgaggtgagctagtaccacaacttggcaccaatatattgcatcgcctaatcagacgagcttgtacctacacccggtacttatcatatgtcattgacgcccaaatctacacgtcgccaggagtaatcatctaatcagacgagcccgtacctacgccaggtacttatcatatgtgactgacgttcgtatctactcgtcgccaggatgaaaccctacaactatttcattcattgtcataacctgataatttacgtatcactgacgccgtatctacacgtccccaggagtaattgcctaatcatacgagcttgtacctacgcctggtacttatcatatgtcactgacactcgtatctacacgtcgccaggaagaaaccctacaatggtttcattctatg

SEQ ID NO: 173706 - DNA, 523 bp, Cannabis sativa
gctcatgatcccatttctttgcagcctccttctcatgatcgtccagccaatgaagataatccatacttcgttggctctagtgaccatcccaggttgattcttgtgacaccaccactgtccaaccataattttcagcaatgatgttgggattttcatttatctcccgaagctaagaacaaaaccggtttcattaatggtactcttcctcaacccgatcctactagtcatctcttccattcttggactccctacaaccaaatggtaatgtcttggattattcattgtgtttctttggatattaagagtagtataatatttcttgatactgctcatgagatgtggactgagcttactaaccgttttagtcaaggaaatggacctcgtctttttgaacttcaagaatctcttacaggtttatgccaaggtgatgaatccgtcactgcatatttcaccaagcttcgggctaaatgggatgagatcaatgagcttcgacctcgtctcccttgcacttgttaagcttctg

SEQ ID NO: 173707 - DNA, 506 bp, Cannabis sativa
cctgggcctcaccggttaaagattggcctttgagtgcctctctcctcttaggaagggagtgtactccgctggccagccaaaggtactcctgcaggtggctagctagctaaaggttggtagatggggggctgttgttgaacatgagatccctagtcagcccactagactgctagctgccgcgatctggctattctcgccattagaccttcgtggcaaggcctatcctccttcgggtatgggaaggaatgtcttggttaccgaagaacctggttggtcagcttgctgataaactctccctaatctatcaactagtcttccttggagtggatctctaatgagatcctggcctcttccattgtttctctgattgaactaccttatcaggtcgttgggttctctattgcggcgatccaactctggctggtgagatcgaaagatgtactcttggtcatccaaccatctcaagaatccacatctctactgagcgaatacatcgcaattagcag

SEQ ID NO: 173708 - DNA, 615 bp, Cannabis sativa
aaatatgactataaactgaaaatgatattttttttagaaaataataattcaaatttaaaatcaccgtatatatctatgtattaaatgtggttgttttttaacattgtaatttaaatttaaactcattgcacatatcaaaaaaaaaatatttctattattatttgttttacccaatccatgtatctaaaaaaatatctttctattattgttttcttttttaaagaataaaataaaaaaaatatttatgtttcttaaagaatcactattgtgatgtcattgcctattgtagttactaaaaaaatatatttttatcattattttaaagaataaaagtattataaaattagaaatattagggttaaactaaaattatattaacaacaaattttgaatattattataacattaaattaaacaattttttaataaaaaataatgttgtttattgaataacataaaaaaattaattatacaattaaaaataaacataactaaaataaaaactaagaatataatcaagtgtacatgcattatacataatattaacttagtatgtatatatgtgtgcactcttaatggttactacccatgaatgggtaaaattagaaaattttg

SEQ ID NO: 173709 - DNA, 710 bp, Cannabis sativa
tattagtgttaacagcagttgttgcttttattattatatttagtcttgtttggctcatgtatatatatagttgttactgttacagtttgaactaactttcatatcgtctcttttgaatgtgtggttagattcgagtgtggtatatatcttttgttaactttctgcttttttgcaagtctgaatcttgaacttggaggtgttaatccatagttgcagataagagcttgatagtgttgagttcagactgaagagatttcagttacgcctttatcactagatctaaagggatttcagattgaacgagagtgttgaagaagagctcaacatttgcacaaggggatcttgtgtctagctctaaccaaggaacttggttggaatttgggtatagatttacaagattttgtaaaagattgtattgtttatattgcaaactggtatttataagatatacatctttgaatatagtgaaaattattatcttagttcggagaacccaaacactagtcggttgaaatttattttcagttcagatgaaacttgtgaatcgctgcctcctttgttttaagtcatttacttgatttttgagttgtgttgttgaaattgataatagactctttggtaaatttggtaatttgaatctagtaattaggctaagttattctttcacaacataaattaacataaattctaatgatcataaatattttttt

SEQ ID NO: 173710 - DNA, 876 bp, Cannabis sativa
tcgatcatgtacggattcgtaaaagaaaattccccatattgatcattaattgtttgttagcataattatatggttatgccttgttgttaaactgtagaaagcaatttcaaaataaaaatgcatgcatgatgaatttccatcatgaaactctgaatattctatatatacttacataaatatagtagcggtttctttctttatttctttttttaaaaaatataaccttttatttcttaaaattgttggatgatcctcatttaataatgacttaaaataattgttatttagttatataaaaaaatactcttatgaatattattaattcttattaattgcacaattataaaaatataattggttggcaccttgtttgtatggataattaattaatattttttttctattttaaaattaattattacctataaaaaataataataacaaaaacaaatttcaaaacaaaagatgatgacatgttgtagatatgcagtgttttctgttgatataaaaataattagaatggactaacatacataagataatatttttgttgataagaaaaggataatattttggaattattacataaaaaatataaattgacattttttttataaaaatacctctataaggtaaggacaacatttatacatttttagtaattttaattacaaaaataccacatacactatgatatcacttacacaatcagacgatagttgctgcgtggttgttgcgtggttgctgcgtagttgcatcagacgatagttgcaaggtagttgctggctggttggccgaatgttgcataaaacgaaggtttcaatcagacgaaaatttttgggtggttttgctgggtggttggccgaaagttacatc

SEQ ID NO: 173711 - DNA, 1429 bp, Cannabis sativa
agagtacctacaaacagaaaaaaaactaaaaaatgtcagaaatgaaaatcaaccaagaacaacaaagtttccataaaaactgaccatactttttaaatttagaagccttggaagacttgcttcgcttctcatcctcgctatcaatactttcatcatttttcctttgaccatacgagaagaagagggtagcaagtcgagtgcgataaacttcaatgtcaaaatcaccaggaaaatctttcccatggatgaagaactcggcaaatgtagccacaaatgctctgcaatcactattacccagaaaggaaaacaaaacagttaaacaactattatacaacataaaataaacttaaaagcaacaactcactttttctactgagatggaagaccatcaatctctacaactcctagaggagctttagggtcagaacctaaaccaggaatatgggacctattcttccaaaatccaagcagatcaaaaaacaaaaggagtaaaacagaataagccttcattgcattcctagctgtagaattcatttttgcagtcctcaaagaattataaagaaatataatcccctcattcaaatcaagacggccaaaaacccaatggatttcctttctaagatttatgatgaataggacatgatcgacttcataccaaggctcagaacacggaattcgcaggcctcttatataatacgctattgggtgagcagcatgtatgtgagacatctttgttttcattgccttggctttgcagaacttgtggcataacgattgaatggaatcatcgaaaaggcagtcagttgttacgaaatttagtgtaacagctgaagaatatttctcttttttcctaaggtaatagaagatagtgttcatatgctgaaacaaaacaacaaagaaacataaaataagaagttaaaaaatattacaaaaacttaataacagtaactaaactaaaaaacaatgataaaacaactataaaaagttttaaaaggaaaaagaaattttactgagtcattgataaacttgtcacagcaagccaaatgataaaacgaggttttatcttcagcataatcaacacctaatctaaactcaagggcaaattttttcgcaccatcctcataacaattgtaagccctaaatcaacaaaaaaaacgacaaaaaaaatattgaatttaaataattacaaaaataaaatagaattcaaacaaataaaaaaatacaaaacagaataaagaaaataatcacctagaatattttagtaaaccttcgccaatctaatcatcaaattttacctcaattttaggagagacgagattagcaaatgtatcgttaagagcgtaaaggcccttcacataagtaaccatcttaaaattcctctcatctcctccagattgagaacctcatgacattacctccattggagtgc

SEQ ID NO: 173712 - DNA, 574 bp, Cannabis sativa
atcctgcaattcatccaaaaaaaatcgtatatatataattataaatacaaataaaaataaaaagtgaaacaaaatacccaactttcatattaagaaaataaaattaaagcgtcaaatgacagcaattcccaacaaagtcattagttacccccacctagaattataaaccaaataaatgaaattaaaaatttgatccaaagaaccactacaacggagaacaaaaacactttaatttcaattaatatgtacatataggacactagtagattttaatccataaatattatatctgtataggtatgttttggtgcataacaatataattatattaattgaaaataagaatcgcaaattaaatgtcaataagagttttttttggctgaatattcgaataagaagttaaagtactaaaaaatgttaactcttcagttaaactaaaaagaacaaaaacttaaaccaagaattgttttagataagaacttttaatatataaagatagagaaatgctaaagggcaccactttctatatgtcaacatcgctattggtccaaataagtatcgggtcccatataat

SEQ ID NO: 173713 - DNA, 560 bp, Cannabis sativa
tcaaatattaataaggttagatctttacatatgggtggaacaaaacacatgacaaacttcatcaattaccttgggaagttagtgggtcccatgtggtacgcgtttgtctttaatctaaataacctctaattatgattgttgtggaatgaagtaatgacatgtgggcaagatgtactcgaaacccactggggtccgacaataaagtgaagcacgtgctctacactactgaaccgacgtcaggccaggttggctatgctgcccgacaaatctattcaggtaacagcatagcatctccaatataattaactatcccttcaatgtaaactatttaaaaaacatatgtgaaaattttaggtagcgtttgggctttttaattttaaaaacaaaaaaaataaaaataatttttttgtttttaaaatttgtttttgaaaaataaaaatacattttacaactatttttgttttcaaattttaaaaacagaaaataaaagtgtgttctgtaattatttttgttttttatttttaaaaacaaaaaacaaaagtgtgttctgtaattatttt

SEQ ID NO: 173714 - DNA, 1498 bp, Cannabis sativa
gagagagagagagagagtttgtgtgggtttgaaatggaggttgagctgagaatagcaaatgattaaaaggcgggaaataagaagctgcaataaatttgtgttgctacttactacctttcttcacgcaatcgtaaaatacccttgttgcccctgcgcacttttttttatttctttttttattattattttgtgttgttggtggaaaaatgttatttggttaagtgataatttttaaaggttttttcagttttaactaaaaaaaataataatattacaaaaagaaaaattaaccggctaaataaataaatattcagactaaataaaaaaaaaattacataagtatctactacacacactttcaacttacgatccacacctcctgagattgaaactttcgtgtgatgcaactttcgatcaaccaacccaaaaatccaatacaaccgaaatgaaatccaaccaaaaagagaaccaccattaatttcggcaacttcacatgagaatacgacttgaatcaatcaaaacaggagttgttttgaattcatgaaaaaaagtgcaaaaaaactactacgaaactaaaattcaactagaaattcagtttaattcgtataaaattaatgtcctgacttcaatttttagatccatgaaatgaaaatctcaaaaaggtgaaatggagttctcaaacaatttgcctcaagtataatccaaaaaagaaatacatagatactatagtcaaatgtttatcctagtgtattttcgttgttttccaaatttttaatggtgaatttattcatattaaatcacgaagagacatgtagatagagttacgtacgtggaaacactgttttaatttttaatgtttcataacaattgtattataattgtaacattttgctaacagttatttctccacatattactattaaggtacaagtaattatcgatcagtgacacacaaaaatactcacaaatagtttctaacaaatacacattcacatttaacatttgctatcccattttttgcactatgatgtggcaatatgtactagtgacatgtgtcggttaatctttacactttgctggagaaatgttccgaacaaacttcaagcaacacatctacacgcccaaactctgcttgacccaccagggcaaagggcgaatgatccgagcaaagagtgaagttacctctctgagtcgtgtatcaagacttaactacttcagagctgatatcgtgaagctcaagcacaaaagcaatccctacaatcatgggatcgtgccaaagagatacgcaagctatctcaatcccccatttcatgtattctaaataggtaatatatgttcttaccaattatagatattataagcaaaaaggaaacattttctcatgcatttagccctataaatagttatctaacttcactgtaaaaggggtcgaaagaattgctttagatagagatttgttacgaaaattatgaacaatacgcaagtgcacgtaatcaag

SEQ ID NO: 173715 - DNA, 1115 bp, Cannabis sativa
aatgaaacctaattagaaagagaattgccattaatttcgacgactttacctgagaaggcaactaaaatcaatcaaaacatgggttgtttcgaattcatgaaaaaaaaagtacagagaaactactacaaaactaaatttcaactagaaattcagtttaattcgcataaaactaatatcttgacttcaatatttagatccatgaaatgcagatctcaaaaagttgaattggagttctcaaacaatccaactcaagtataataaaaaaaattacatcaatactgtagttaaatgtttatctcggtatatttttgttgttttctagatttttaatggtgaatttgttcatataaaatcacgaatagacatgtaaataaagttatgtacgtagaaacactgttatgatttttaatatttcataacatttgcattatagttgcataaatatttttctaactctctgaaacttgacatatcaattattataaattgataacgatacaatgaattttatcatatttgcaagtgtttcatatcgtcaatataatacaaagctcttataagaaacttttttaacatatttaattttattaatatattaaattagttgatataaagttagtttacagaggtttaatagttgtttctccacatattactattatcgatcaatgacaaaaaagtacataaatagtttcttatagatacatattcacatttaacatttgtagttgcaattaagttacacgttagttgaatagtagttttgctactataatattatagaattataaaatcagggctcagaattatcaaatacgagacctggatagataaaacacgattgatgtatatttatttgtattaaatatgtggaattattagttgttttgtagttttatgttagttggctcgaaacagatataactgttgtatagttggctcgcaacagatataacagttgcattacagctttatcacagctgtcttaaagttgacttcttcttcccttctcgtcgtcgaagttgaaatttttttaggcaaagacacctttgacttcttcttcactggacgacgaccacctttagccacgagggtagcgaaatcggagtcatcat

SEQ ID NO: 173716 - DNA, 724 bp, Cannabis sativa
gggttagagatctgagtggaggagccattaatattcccttttccggccatttcctcctttttgccatagctccagtgaagacaacgaaaagagagaattttaggaaaaaagagagattgcttagttttagatattagtaggcttaaaatttggaaattttgatttctcacaaaacgagccttatggttaattttgaatttttagattattttatttattttaattataagatcagatattacattttttattaaatttgaatgatcttattttggtattaaaatattattatttaaaataatcttgttcaaatttcaaaatttgctaaccatatcttttttaaaaaatttgttttttttttaaatatattttattaattaaaattataagattaggagtatgttagttttaacttttatcttattagacgtattatttattaaaattaattttgggaaaaataacatgaaatttgaaaaaattggttagtttaagtttgaatagaaattttagggtttcaaaccataaatatttcaaacttattttaatttattatttttaataaaattgaaaatattctaaccataaaatatcttatttttcaaatagtttgtcttagaatatttaaatttttaaaattataagactaagaatataatattaggaatatctaaattttaaaattcaagatattatattatcttattagaaatttaaataattt

SEQ ID NO: 173717 - DNA, 504 bp, Cannabis sativa
aattaggagaagtcatacctgatacttccaaccagataaacggtgccattccacccatcaaccaagcgaatccatcgctgaggcagccagacacttctgtattcgaaaggttggttgggagcgacccatgacctaaggaatgatctaaacagaaggaggggaatagacgatcagaatggtacgacaatcttgcagcccgaaacccgtactcaaattcccgcttagaaagatggttttgtaattcaaattgaccagaatgctgagcaggttagcccagccgtacaggcacagctggacgagctaaaaaatatgtttcacggcatggctggacaaagaaacaatgatcttgagctggaccgagcacgcagaactcttttctcacctgagaccaatctcctttccccacaagtttaaaatgccaacgtggaagatgtacacagggagagaagatcccctttcccatctcaagtacttcgaaaagcaaatggatttgcaaggggtacg

SEQ ID NO: 173718 - DNA, 553 bp, Cannabis sativa
gggctcccaacgcgaaggggcctcgtagaagccgcctgggccttagtataagccttctcctgggccttccggtagaggtactcttattgcttctttttggcagtggcaataatctcatcccggaaggtcttctccgcagccgggaccgttacgttcgggcagataaccttagaaaggttggagtcctccaccgactggtgccccaggatcagcttagcctttcggtaattctctgtcgtcaccaaacctccgacgtcgagatcctgcctatcataagtggcgaaggtcttggcccgttggaggaagagctgagtaggcgcggtccgctcatacggagggatcctaacccactccgatagaagcttcaggtgctccacaactcggaacccggtggagaagaaaaagcgatggcgatactccttgacgtgtttttgctaattaaaacatactgcaccctcgttcaaagggtgcgcccagaagccgtaaaaaccgtccttaagtttgtcccccaggcagaataaaaaataaataagcctgaaagcaggcggtaagc

SEQ ID NO: 173719 - DNA, 535 bp, Cannabis sativa
aataataaataatacccgactaatttaagtttttgtcttgcattattattgataaatatcaaagactcaaagttaaatcagcacgtgtgatggtccaaaatatagaatggtctctatggcctcctcacggtggaagtaggagtgggcataacctatcaaaaaactagaccaaactctcaaaatacaattaatttagatgtccacattttgaaatattaggtagaaccgtagaggtacgttgtatatgttgtaattcacagtaatagaacattttcttcatatgcttttttttttcttgtttggatattttaaatttatagtagcttttttattccttataccattaacaaacaaagacactgaaactgaaagtaaactaataaataaataaatttttgtaatcgatttatgagtgttaagggtattgggttgttagtgtctgttatttcagttggactgttattcaacagtctgttagagtttgttacaaccactgtaactaactctcttccctctcttactttcagtcactata

SEQ ID NO: 173720 - DNA, 867 bp, Cannabis sativa
caacagcctagtcgaaccacttattggagctctattgcacgataaataaccatcgaaataccacacccaacaaaacactacttctcagaatacacattgtatgtaatataatcgtatataattatgtatagatttttctgtaagaaaaagatgtatttctcccgttagttctgatgctttatattaggaatacacagagggcccatttggtacgcggattggactggattggactgaaaaggattggactggactggaatagattggattatgctgaaagtaatcatgtgtttggtttaagaatagactggactattttatatttttccttttaggaaaaacaaattaaattaaaataaaaatatataataagaataataataataaataaaaagaataattcgtaacaaaaaaaaaagtaaaaaataaaaaataattaaactataaaataagataatatatcctatataatcaagtatctttatatattaaaagtgcctatctaagggcatttcttggtttaacagaatatactttaaaaataaaagaatatcctcttaaatttaacgatgttagtaggtttgatcctcccgttaactttcaaaaatatataaataattaaacccaaaaaattaaacaacacaataattaaacccaaaaaatattaatattaatattgttacacgattagcttaacagatttttttaaacgtttaaacccaatcattaaaccaaaaaaatatataaataattaaaccgaaaaaattaaacaaccttacgtttaaacccaataattaaacccaaaaaatattaatattaatattgttacacttaacagattacgcttacacgattttttttttaaac

SEQ ID NO: 173721 - DNA, 733 bp, Cannabis sativa
aaaattaaaattttaattatttaaatacttacttgttatattatttatgagtaactagttagtaataaaaatatatgaatatgaattaaaaaagtaactagttattagttagtaagaaatataaaaatacataaataagaatgaaaaaaataaatttaataagtaaataaaaaaaataaataaaagaattattttttctctatctatttttttttaaaaaaaataacatgtacatatataataaattatatctcatactaacaaaattttaaaaatataatttctaaactaattacaattacaatacaattataatatttttataaatacaatacaaatataaaatacatatacatacaatacatattcaataaaacataaactacatacaaatatactattaaggtttaaatttttatcttattaccgcaatccagtgaccaatgccaacaaaaattcagccgccatgcacaaccacaataacataatcttaataatatagagaaaccctaaaaaaattacaaaatcaaaaataaaaaaaaaatgtaccttactaaaattaatagaaatcatatttatactttaatggacgttgagattcaacgttttctctactaaaattagtggtcaaagttataaccaccacaactacttcttggcttcaacttacacttaaaattgggtaaaaatctaaattttttgggtgtaaaggtttaagtatggaaaatagaag

SEQ ID NO: 173722 - DNA, 806 bp, Cannabis sativa
ttattgtgttagtttacatacggtacattctttaaataggtattttggtaaattttttttatctattttgatacttacaataatttttagtttatttttttttttataatcgtatatgttataattttttaggaccacttgtagatttttgaaaaatttcaagtaatttataatgctaaaaacaaaattcacatatttttttgtacatgtgattactttttttttttataccctaactgtttaaattttatttttgatattataaattatttaaaaaaaataaataattatgacatagtacacgatcatacaaaaattaaaataattttttttaatacaaaatatgtctattgcataaatttcccaagttattatcttaaattgtcttagtcattaaaaaaatgatagaaaaaaaaatgaaaaaggatatgttctagaaagagaaagtaagtatggtgtgggacccatttgagtagaaattggagaagatcatggtgacgtggcgtgtcagtgtgtgaaaccggtaataagagtaactacacactaattattgattttgttgtctaaccccctatcttatcatttcttacaaaataaaagaaaaaaatatatattagtaggaaattctccaatacactcacttaaaatagatatattgatacacccttatctattttagtacccaaaataatttttgtaattaaatttttttcattatcatgtacgttatagttatttaagacatcctacaaatttttaaacaatttgaaaaaatttaacacgccgaaaaatacgttcaaacagtg

SEQ ID NO: 173723 - DNA, 571 bp, Cannabis sativa
tagttttatttatataaaaacgaagaatctaataccatgaaacttaagaaagataattaagatgagattatggaacttacactcgggaaaagccatggagttagttatgtttgattgagttgtctcctacgttttggtctcctgagtgatttgttgaatcaattattatatattttagttgtttatgttttaaagagagtaatctcatacgaccaccagagacagagacacgtaaacattaataatattctttaagtagattctagattgactattttaaaattttaaattgtatatttctttggtagaaattacaaatttaagaataatatttggagttatagaattttatttttgttacttttttatagtatttttatgtcatatttttgttaaaaaaattaaaaataccatatttatgtttttgaattattttcttatattatattaaataaatttataaaatgatgcattattagttaaaaaataaattttggaaaaaaaattataaatttagatataaaataatttttttttttaaaaaaataagttgggtcggatcagattcgat

SEQ ID NO: 173724 - DNA, 550 bp, Cannabis sativa
agtgagagcaaggtggcagcccaaattcatttcaacatcagtttctttcttctctttttatttattttatgttaaattctattttagttttattatagatatgaacgtgaactaaactaaactcccaattagggatatgatgaatgttagttgaagttttctcaatttagttaatgtgattattagtttactttccttgattgtgtgatttgttcttatttgtgttaattacatgttttagactggtcatctttaatatgatttatgattctaatatgaaatctaaaaagtgaatattagaaatgctctaatagaacaaatatagattttgatgtaaaacgagagtatttagatagcttatgtgacaattctgtatttaatgcaagttatatgttaatttatttcagagatgcaagtagataacatataatttaagactttaatgatctgagaagagttaggggtacttttataatctgtcatcagttgaaggaaagaacattaataatttatattaacaattgggtaactgaaataacaggattcatat

SEQ ID NO: 173725 - DNA, 741 bp, Cannabis sativa
tcttgtcaagagctgatcgttgatggcttgccagaatatgaatctatgctttggcatgttgagagaactccaaataaccttgctgaatccgaattgttcttgagcaatactgttgttatacaacagcttagtcttgaaatgattcgcaccagcccctgctttcctgatatctgtcattgagaacttgttgcgaaggtgacaaagcttcctccaataccaacttgtatcattctttaagtcataggtccagaaggaattgttcttgagataaatattattgacccatttcacccaaattatgtcacttttggaagaaatggcccaaatatacttaccaagaatagcttgattccatttgaccccatctttgaaacctaatccaccataagcctttggaagacaaactttctcccaagaagctacatggagcttgcttctattcccattccaatcccaaaaaaaacctctacataatttttcaatctccttggtgatactatgagggaggatgaagatactcatccaataatttcgaaggccaaggagcactgagtgaatgagttgtgcccttcctgcaaaagataaatgtcttgttgcccaagtttggagcctttgcttgatctttttaataatcactccacattcctttgctttccattttgtcggtcttagaggaaccccaaggtatttgagagggaactctccttcaagaagattcatttctgacagcataacctgttt

SEQ ID NO: 173726 - DNA, 601 bp, Cannabis sativa
  modified_base (532)..(554): a, c, t, g, unknown or other
atagggcataaaacccaacaagaagccacatggtcgaccagccagtacaatgccaataagatgaatagagttgaaagtacaacttaccagagaaagatcccgaagaccggtagagtaaagcctaggtccactatcacctagctcctttagatcctcgtccaaggaaggaagagacctctctctatgcactagttggctacctcagcagccctctatctaacaattgatctcgctcctctgctgggcctcttagtaccttggccggtaggccgtatcacatgcagtttaactggtgtaggccctagtagatgaggaggtagtgatggcccgacaacattctcaacatgagaactcttggccaccttgggccttacctgtcctgaaggctcatccaaaggtctcccgataagacctctcaacttggaagacatatctgcaaaaagaaagtagcaaagtcagaaagtaatcataaacatttaatacaagaacgaaagcatgatgttagcaactacctgttggaaatattttaccnnnnnnnnnnnnnnnnnnnnnnnatgtttcattaacatcctaataagaattctaaaacaatgaaataaac

SEQ ID NO: 173727 - DNA, 546 bp, Cannabis sativa
  modified_base (92)..(120): a, c, t, g, unknown or other
aaaaaaaaaaaaaaaaggaatgcactgatgcatctctattagttttggtatccgaaataattttagttaaattttttctcatggtcatgtannnnnnnnnnnnnnnnnnnnnnnnnnnnnattttaaaaaattcagaaaaatttaacactccaaaaacaggattcaaatagtgtattgcacgcgtgactattttattttatacgtgtgtgaaatacactgttcgaatattattttctatattgtaaattatcagaatttcttaaaattttatagaatatctgaaaaaaaaaaaattgaactaaaaaattcttctatatgctaaaacagattgatggtgcatcaatacatcatttttaagaggtgtattgtaaaataatcctatttattttgaaggtttttttttagatacggtttttttataaaaatctatggctaattaggattcccccgaactttgacatgtactaaatcatgccctttgaatttttttagccgttaaaaattctccctgaactattgagattgttagatttaacgacttttgt

SEQ ID NO: 173728 - DNA, 882 bp, Cannabis sativa
ataattttgaagctcatttccattgtcctttttctgtggtaagtttatagatgttgagtttgagagagagagaacgaaagagaagaatgtgtttctgtattattgatttgaatgaattattacacacactcataaataagtcagtgtttatgtacagcagattaaagaagccaataagttacattgttagttggatgatagcagagcaaactaacaaagcaaatatatgaacaataacagtgtgagattttgagtattactgttagtccttgaagcggtagtacggatataaagagtaacaaaaagaacttaatatcacaacaagaaaggatcatttagagaaattttatgattttttttattttcaatgcaaaagtacacaagatcttacttcttactattataaaagtatcttaatcaagtgattgtgagaataacatgttacatcaatttttttcatataattttgactcagccagtaaaacattttaagtattctttcgtttgtccaagacacaacctagaagaaccaccctaattttaatatgtcaataatttctattaaatctaaattggaaaaatgaaaatccaataaaaagaaaaggtacatgtgcatcaacaccaatctatggatagaaagtcaaattttccatttaaaagagaaagaaagaaaaatagaagtagaggtatatatactattttagaatcaaatgtaaataattcatttcttaaaccaaaaatcaagtcatcgaagaaaagtttaaataatatataaaattttaaaattaagccccatgtatcagattcttaaaacacagagttgattattttagtgcaatatatttatttgagtcaaaacaaaagataagattgagttcaaga

SEQ ID NO: 173729 - DNA, 575 bp, Cannabis sativa
  modified_base (167)..(168): a, c, t, g, unknown or other
ttttacaatacaccccattaaaagaaatgtattgataaaccttctatttatctcgcattcaaaaaaaaaattagtctaattttttttcatattcatgtacattattgatacttaaaatatcctacaaaattttaaaaaattcgaaataatctatatatatatatatnnaaaggagaagtatgagacggtgatgtgacgatttaaaaatgttttaaagtactcattcttttttctctattttttctacttttttattaagtactcattcttttttctctattttttatacttttttattaattttttcaatattgattattatatagttaacaatataaattaaattaaaatattataattttattaatttttctctatatcacacgtgttggttttctattttttttattttttattaaactttttttaaaatgatatttaaaaaatatcatcacaacttcaaaaatttatagggcatttttcataaatgtacaacaaaaacaacataattacaaaaaatgtgcaaaaaaaattattttaaaaacttatacatattgaaaacttattacatgaaa

SEQ ID NO: 173730 - DNA, 527 bp, Cannabis sativa
atagagcatcccctgaaaaatgtattttcatctccttgagttctgcgagatccattcaatatggcaccattgaaataggctctactccaggtgccaagtcaatgatgaaatcaatttctcgttacggtggtaattcttgtaactactcaaaaaacacataaaataactcttttaccaccctgacatccttaggcccaaatgtttcaagtctcctggagttaatcacaatcgcttaaaatcctacacatccattgtgtagtacatccttagcatgtaacattaaaatgatagatatctgagaaccctgaacatacccaacaaataaaaatggttcctcgccctccggctatcaccatagaaatactagcgacaccattttcttgggtgatggtaaacatcggagttcgagtgggtttcacctcttatctcagttcatctttcttaaaataagggaaatacttcttaaactgccgcatcaatccacactggaaacattttttttttggttacatttcccaggatgatgc

SEQ ID NO: 173731 - DNA, 521 bp, Cannabis sativa
tattgacatgttgactaaacttatccaacactaatatattgtactaaattggtacaaaaaagaacaaatactatatttaggagaacatttataattatgctccaatgcacaaaaataaatccatctaaaagacaaaatgtcattaataagtatcaatgaattaaatattaaaaaaatattaatggtatattacaaaatagaaagataaaatgaaagaaggagaagaagaagagagagaattcttattatctgaacagttaattacaagcacaatgagtgagctttatatagctcaggctcaagaaaggtacaagacagaagtcgcttttacagttaggacaactaactaatataactaacttcaactaacaaccagacctaaaaccagaaaaaaaaaaggaaaaaaaccaataaaaactagtaaaactaatcagcagtaatcacaacacttaatactccccctcaagatggagagctaatgcttattagtcccatcttgtttttgagagcattaaaagaag

SEQ ID NO: 173732 - DNA, 608 bp, Cannabis sativa
  modified_base (534)..(541): a, c, t, g, unknown or other
atgagtttgtgaacgatgatcaacgatacttataggcaaaacagcaaaaaagagtaatcatttcagaaacatcagattcctcggttcccccaaaagcaaatattggaaatcaaaagcaattaagtgtaattgtcaaacgttggtgagagaaaattggattttgaagcattaattgcgtcagagcatttattagctgaaaaccgaagagacgcctagtcagcctcacatcgaatcgcgaacaaacacacctgacacgtgtcacccatccaaatgcaaagacagttgggatgaagtctacacacaacttcggaagtctcgtacagacttggggggcaaatgttaaccaaatttttgcattctgacgtggcatcacacgatggggacacgtggaatcgactctggatacctgctcgtaaaacataggtcgaacggggcatctcacacacttgctcgaacaagtcctctaaaccgaatagtgagcattccgcgcaaaatgccaatacttagcaaattcaactttcgcatcgtgagtcnnnnnnnnaatccctataactttgggatcagattacagagatatggcaagttgtccgaatcccacgattggtgta

SEQ ID NO: 173733 - DNA, 629 bp, Cannabis sativa
tataatatggagacatagtattttaaaataattctattctattttattttattttatttatcattttttttatatatttttaagtagtattaaatattcattaatttaaaaagggtaaataccattttagatcttatattctgtaaaagttatcaattggactctctattttgttaaatgataaaattgaccttatattttctaaaatggtaaaaataggaccttgagttcaattttcaacaattttattttttaatataactaactttaaaacaatttttaacacgaacatatacagaaaatgtaattagttttgtcataacatttctagattagattattattaagatttattttgacaaaaaatcagttcatggtcctatttgtacaatttaagaaaatacaagatctattttgtcatttaacaaaatagagggtaactttttgcaaaacacaaggtctaaaatagtattcacccttaaaaaacaatatttttaaaaatgataacttctcattcttattttattctcatattatcaattaataaaaagagatataagacggtaacatgacgctctaaaatcactctaattatattatatctctattctctccttaattttttttat

SEQ ID NO: 173734 - DNA, 1103 bp, Cannabis sativa
taaaataatttccaacagttatatgttaaacaaggttacaccaattgtgtttcttcttttgtaaggataatttgacagagttttcccacttagtttccgagaccgaatctttttatagtgggtttattcccgtatttgtagaataaatggatgagctttattggagggggcttcgacccgtttcctgtcctttgtaaagatactttcatcaacaaggttgtatcttctctttgtgggattgtcaagtagacccaaagtaggaattggtgagacaagaccttacaagttcgcggtggatgggattgttgaaggcacgcgccatcaatatgtgccttggaaaggtgcatgtaagaaaatagtaggacaaatctccaagaatatgtggtaaactctttttttcactcgtacgaagtagacaagtaacattactttttctcgaaaagtgttgtactgtgcgacttgcgaccacacataaaagaagtatccggaaggtcctaatcctcccagagactcatgtgttctccgtttgaatcttgataccttataaaagtataatacactttcagatacctactctccttctgaagccatgcgttcctaagcttcatgattgttagtctctaaacctccttgagctaggtcccacccgacacgtggttgttttactaggggccacatgtgctaggaaaaaatttggacaacgggtttcatctcaaaatcaatcaacaatgagagaaatagcatgtatgtcttatatatagtataaattttcacatattatcaatataaaattctctaatatttttgaatggttgtttttcaatattttattttcctttaaacaatactatgttgaatgggtttatgttatccactttgttagtgatgttttgtacctatacataattttttttaggttgattagttcactttgtcatggtgtttttttgcctaaaatataattacattatatatatttatatatataattttatgggtgactattctatatggttacaataaattcaatggttacaattttattgtaaccatatagtgacatttttctttgacctgtaatagcaggttactaataggtagac

SEQ ID NO: 173735 - DNA, 503 bp, Cannabis sativa
gattataactgcgatagtctcgattatgattgaaatcccgtttatggttaatttttgttttcgtaaatttttttaggagtttttcattttattatcattatgtttttgtctgtgcattgtggccaaatttttgtcacaattggttgctggattacgcttataacataaatatttattaacttgatataatatatacatgtatatattttgtgttttattgaatatgtatttatgtatatgtattttgtatattatttttgtaaattgtattgtctatattctaagcaatgtatacgtatgtatatatatttattgtgaatgagaatgagataggaaggatttaattagtttagaaataaagtttttaaaattgtgttagtgtgagatataattgattatatatgtatgcatatgtgattttttcaaaaattaatatttataatttagtaactagcaacttgttactttttttataactagtaagtaattaaataattaaaatt

SEQ ID NO: 173736 - DNA, 585 bp, Cannabis sativa
ttaagttgaaagaataataaaccgtgcaaacatatttcatgagtaagctcacccactaataagagaaccctagtttgagcattactgattctcaataatcacactcaactctattataggctttgctcatatccaacttcattatatcaaaatatctcttccctttattaatagcccttaggttgtgtaataatttataagcaaccattgcattgtctgtaatacatttacctccaataaaaacactttgagggaaatgtatgatatcatttaaccaaagctttaatagttgaaccaacattattaatataatcttataaataacattggcctaaaatcactcactttttttgcaaattttattttagggaggtgaagaattgtggtttggagagctgcaaataattgccattgataagccccgagaactccacactcaagaacacactaaaacagtagcaataataggagtagaacagtaggaatacaataagaaatgtatattgaatgtatgagaaacccaattacaaaggataggagcccttaggcccctttggtgcaaatagagatttactcaaacattgc

SEQ ID NO: 173737 - DNA, 863 bp, Cannabis sativa
  modified_base (465)..(479): a, c, t, g, unknown or other
tttgttttctcaattcatgtccactacagtgccttggttgggtgatttcttatttcctagggtattgtggttccatttagtatttacagaatcttaggttggaggtttgggtttcccagattaggattttggcatgttatttacctggttttaatatgtgattagggtatccatccagcacgagacttttcgttcagttcagtcaactcacttgaattcgaaaaagaggtaagaacaacgtataatatgtgatatgaatatgcgagtgtatgtatgtgttaatgtatatgcatgcttatatggttagtacactaccaacacttgtacggaaaaaatggtgttaacacagattttcgttaaccaaatttgagcctcacgatgataattcaacacagaaaaaataaaagctatagaaaaaaaatatatgaacacagtgttttttacatggttttgcagttaaaattnnnnnnnnnnnnnnngtcaatcttattcaaatttctgagtatttttttagggcctctttcataagagttttttcgtcccttttttgagattgtgttgccactatgtataattgcatagtggcagttaattacaaagttgacaaaaatatgtttatagctattaaaatcgtgggatttgattacatttcacaaaatgtaaatgcggtgtatgattttgaaaattatatagctgtgattttcccgcttttactgggtaaaaaatatcgtgtattaaacacgtctttatttgttgaatccggagatgtctcgacgaaaatttgattgtagtgatcccaatggcgagctggagccattcttctttctaaggtcgacaagatatgtcttacgtcgatcgtgggt

SEQ ID NO: 173738 - DNA, 534 bp, Cannabis sativa
  modified_base (464)..(476): a, c, t, g, unknown or other
aaggaggtttggctagaaaattcatagaatttgaaagatcaaagctcaaggtaagcttgttcttcttcttctctttgaattttaagttttgggataagttttgtcatgcaaaattctaaattgggttactatacgaattacttgggtttagttttttttttttttggttttagtattgagttaattgaactattttatgctagttttggttgttgtggttgagatagaccaaggtttgagcttttaagctcaaacttaggtcattaatggcaaacttgattctaggggtttttcttgcaattttctggttgtattatgttttttgtggcttaattaggtattttgaaaagtttggtgtaatttggggaaaacttgagtgagtttcaaagtttttagggttttctgtagagaactggttaaccggttgagtataaccggttaatcatgttgggttttgtgccctnnnnnnnnnnnnnttcaatataatcaaatttactagttaataaagatcagaaatcgcattttatgttgcat

SEQ ID NO: 173739 - DNA, 780 bp, Cannabis sativa
tagcctatgttggccataggaccagccaggggggttcgcctagaccccttaaggtggccagttcattgtctctttgtcccgcttaagtatttagactttccatcaactaatatgttgtgaatgatgaaatggacttcttattgacaagttgtactccatgtggcgttaatcttgtccacgtggacatgccacatcatgtgtataaaattagggtaatattttccctctaagtccatgtgcggatgtctgtacggataaagactttttaactgagtttggattgatggagccttaactgggaatatctttcaatatattcaaccttgaagtatgtactcttgtttgtttgatcacattccttagcagaaaactgataatatttctgcatgttattttttgcatgttgtagggtaaatgagagagagacccatcaaaagctatataagcttattggtgtaactcattctcattccacacttctaattatctctcttcaaaaaaggaaaccaaagaaagctcttcacttcccattgtggtcgacacaccatagtcttccaacacctgagattcttgctttgtttcgacgatccaatctttcaaccttcttcctcgatgtgttctactagtaggtaagcttttaaatcccattctctacttgtttatttgacattgttgtattcaagatttttcatgctttgaacattctttgattcttacgttagattgtagtcttttggtattttgatccgtatgatagttttagaatgcataatgtgtgat

SEQ ID NO: 173740 - DNA, 501 bp, Cannabis sativa
atataattaagaggttgtaataataagttgactgtaatattttttttattttcataataataatattgatgataaaatattggagtaagtagattggtttaggaattagtacaatataatgtatttaagcaagttataatgatgaaatgaatagagtgagataaggccctctttattgtgatttattgggtgtgtaccgtatatataacctgcattacataattcaatccatcattttcattgattgccccttttgaatttcaaaaaatgaaatttcacttaataaatgctttaagccaacaaatctgccaaacgttttaactttttaatgtacaaagattggtacccgtaatgttaactcattaaacttcaatatattcccattaaaaaaatattgcaatctatataataataatttttttaataataatattactgttataaaataatataaagtaaatgaaaagaaagaagatgaagagagaaagagaaagagaatga

SEQ ID NO: 173741 - DNA, 549 bp, Cannabis sativa
caaaaccctatgatcagaaccatagaaccccaggtggaaaagagtagcatgaggaaataagtctctccaaagctgattagaggtacaccaatccagacgctcaaggatcgaaccatgcctccacgtgaatttaggcccaacgtgaggaagaggaacatgattatatttatcgagaaaagtatggaaagaatgcataacatgagaggggggtaagagaagagttccggtcattgattgaaagatagtcattgaaatcacccataactaaccagggcaaaagaggagcagtgtcaaataaacgattaagcaaagtccaagtaacagatttgagagtaacataaggagaaccataataaccagaaaagtgtcagtctttaccattaaaattatttataatacaatccacatgattaagggagtatgaaattacattaacatcgatatagtctttccaaaaaagtaaaatccctcccccaagaccttgcctaggcacctctaaaacactatcaaaacgaagcttgtgtttcaggtccattccacgtccagccg

SEQ ID NO: 173742 - DNA, 664 bp, Cannabis sativa
tggcacacttgaattcggaatcaattaatgtaatattagtataatagttgcatatatgtatacatatttagcgtgcatgttagttgccatcaggataacatatgaggggatcagtgaggtgtacatagagttgtaccgagatactaacatatatatgttaggaaaataagtaaccatcagattagcatattaggatattggtgaagtgcacatagagttacactgagatatcaacaaatatatgctaggctttcaaaaagtatgaactaattgctaccacattagtacgactagactactgagtacaccataacataacctatgtgccccctaagtgatcaaataagtgtgttcattggtcacttgccttaccaaatccctatgagccttcttgatcataactcttgagtggtgctacacgtgtgagcactctccacttattcgaagattcataggtggcagtacttttgtactaactaaaggaacaatcgaagttatatcaagacgaactcagaagatttactcagcacttgagagtgctttcaggtctatgagctgtaattgattaatttaaatgaagtaccaaaaaaaactttgttcaacactttttctcatcaaattaaatacaattacatccctctgagctaagttgatagaaaaaagt

SEQ ID NO: 173743 - DNA, 713 bp, Cannabis sativa
catgctggattctacttgagatttattaaggacttctcgaaaatctcgaaaccgctgtccaatctgcttgttaacggggttccttttgagttttgggaagaatgcttgaaagctttccgagttcttaaggagaaattgatattggcacctatagtcacttcaccaaattgggaattgccattcgagttgatgtgtgatgcaagtgactacgcaattcgagcagtctttggacgacaagttgacagggtgtttcacaccatctactatgctagtagaaccctgaatgatgctcagctgaactatgccaccacggagaaggagatgttggcaattgtgtttacttgtgataagttttggccatatttaattgggaataagatgatagtttatataaaccattcagcaataaagtacattatgaccaagaaggatgcaaaaccaaggttgattcggtgggtgcttctgctcaaagaattcgacattgaaataaatgacaatgaaaaaccgagtttttgcaagtgtcaataataaatacaaaaatataaaattgtatacgtctgcagaagtagaatgtaattctgttactgcagaaaccagttttgcaacgacaaaacagaacaagcagaaagtaaaaatatttgcagaaaattaaataacttgatataagagatttgtacgtggtatcagtattttttcgaacactcctagtccac

SEQ ID NO: 173744 - DNA, 684 bp, Cannabis sativa
taataataaaatatttttagctcagtaatttcaatatttaactaagtactaattattgaattaaaatatatgtataatagctaagctttagcttacttagtggaagctcaaaattgtacttttttctttataattttaaaattgggctattttagcttatttattaagagtgctcttaagtttagatggaaatatgtagtaatatcagttactttcaaattcttttttaataaatttaaagtagagtttgtatttacgaaactggagaaaaattacagttttacaaattacaaatacttataccgctctaaaagaaaatcattagagttatgtagcttacaaactcaaaaattttaagtacttatgctgctgtttaccatttttataattatacaattgaacctttttttttttgttaagaattactataataagacatatatttatatatttattaggtgttttaatttaaagataattatttgtcattcttaaatgggcacaggttgacgtggcatttatctaagtgacatgtgaataatatatcatgacctgaacaagtagtatgctacatgaagtatcatccaaagtaatttatcatttgtaaacaattgattagaagaataagttggaatattcggacaaggtaaagtttagattttatgtcctaaataaaattcattt

SEQ ID NO: 173745 - DNA, 631 bp, Cannabis sativa
taaaattttactattttttttttacttattttagaaaatatcatatagcctaaaaatattttttgttatgacccattaaatttcagggccaaccctggccctgcctcaagctaattgttggccttggactaaaatttaattgtgcttcttttaatttagtagtaaaaatttaaaatatagtattcaaaaaaaattattttttaaataaaatattaaataaatatatatatatattttaaagttagtcttttatttataaataataatatttgaataaatatcattttagatcttatattttctaaaagttaccgatagaacctctgttttattaataacaatctgaattctgtatttttaaaatggtacaaaataaaccttgagtttaatttttgtcaaattaaaactttataataacctaacctaaaagtattatgacaagaatgatgaaagtattaaaactttatttaagtaaccgttcgtgctagaaactggtttaagttgtttatatcaagaaaataattgatgaaaattgagttcagtacctattttgtactattttcaaaaacacaggatccaaattattatttaacaaaacagaaagtctaatctgtaattttttcaaaacaca

SEQ ID NO: 173746 - DNA, 585 bp, Cannabis sativa
  modified_base (407)..(408): a, c, t, g, unknown or other
ctcacgagtcaaggtgcaggagataacccaaagatatgctcagagctctcaagaaaggcgacctaaggaaactcagaaaagtatgggggtacaacctgggatacgcgaaacatcgaaccaaaatcgccaacccactattcaagctcatgagaatgaaattcgtgcaaacccttgtattaagatgaaagtgagtcaaaccttgagaggaagggcaaggtccgaccacaatcatgacaagagtgatctacgagagtttaagaacctaaaaaagactgacctccatcagggactcggttcaagacaaaaggattcattccatttgcgaatgagcaagttggagaataagtccagagtacatctaatcatgaaaaccaggagacaactggggcacgatactgttggaaaanntgattcggaggcctcgggatcaaagaaaaaggatgattccaaaaggctgcctaatgacaagaaacccaagaagtatatccctttttataccgaatgcaccgagctcaattaaacttgggaaaagatctacctcgcacacgtaacaagaagccatttttggcgagctaagacctatga

SEQ ID NO: 173747 - DNA, 578 bp, Cannabis sativa
  modified_base (210)..(213): a, c, t, g, unknown or other
  modified_base (307)..(310): a, c, t, g, unknown or other
  modified_base (396)..(402): a, c, t, g, unknown or other
tattcagttaaaagtgcatataaactattacagaaaattcatggaaggtggattcggttgataatgcttttactagattctgggacaatttttggaagtttaaaattcctccgaaggtgaagaacttgatatggcgtgctagaagataatgccttattgggatatattttaccaggatgtagatttactaataagtatgttgattaacannnnaaatatgaattctctaaaataatagaatttaaacacatataaagttaagaaaccttacattgattacatcggaataatatgtctcctcccactnnnnctctaacccttgttcctttctctcacagagtattatcaagatttgagcccaattctccttcaagtgttggattcttcacagtcttnnnnnnnatgattgagtactagacttgctatgggtgggcatgtactcattaactaatggctcaaaaagatatgaagaacaatataggagatttcaaaaatagaagaagaagaaggaatagaggctctcaaaaactctagttgtctgacagaatgtaaactaggttatatgagttgttggataa

SEQ ID NO: 173748 - DNA, 664 bp, Cannabis sativa
aactagaggtgttctcccaaactttgttggttgatgaagaattccatcaacactcatcatactccaccatgtcttctaacatccaataggcttcattgatagatagttggtagaaattggttgtaccatttcctccttctacccattctcttgtgcttggatgcaacccatttaggaaaacttcaagtacacactctctagaccaaccatggttaggaaaccatattagcaaatctttgtatctccacaatgctctatgtaaaggctctgagtcatgttgaaattagtgagtacttgttgatgggacatcttaagtaccttgcaagaaaaactcaaacaaaacaagcaaataagaaaaataaaagaccaaattgaaaagcaattgattttaacaagaaaaaaattatctaaatcaatccccggtactaacgccgaaaacttgttgtgctaaaattagatatacgcaagtgcacgtagtcacaaataagtaatataatgataagtaaaagagtatcgtctccatagggattaataaaaattaattaagtaaaaattaatactaatcaatttgggtaaaacaaacaagaagtgatgatgatttgaactaggctaaaaactaaataagaaagtaaataaaatgagaaaggaaaatgagcaaaatgat

SEQ ID NO: 173749 - DNA, 591 bp, Cannabis sativa
aaatgtgggactaaattttccagcccgttaaaattgaattccgaaccattcacattgttataaattagttttcagattttgttatacatgacaaatagaatgagaatgtaattgttttaggaatttttaattaattttaaaaagataatttaaaaatttcatataaatttttttaataatttttagtttaatgatctcttaataatacaaattttaaattataatttgtttgccgcgtaccagaaaaattaacaaaagttccactttataatattgtgaaatattaatagttctggaactattattaacagcctaaaaaaataagagacataatactatagattataatttgaaaggcaaaaattttaaatatataggacattcttattaggcatcagtggtatctagcattttctataggtgacgtctaataattagttagtaatattccacaaaatttattgtattaagttttatgagacttgaatcttaattacattaatagtaatatgacaacgaataaagtactagacaccaataatattagtataccttaaattgaggatgacgagcacaagaggcatcccacca

SEQ ID NO: 173750 - DNA, 737 bp, Cannabis sativa
ctttgggtcagttttgtgcactgtcatgctctcgttgcgtagtattatatattttttttggaatggaaaatcatcatattattaaccattaaattcagctaccaatgaaggtagcaaattaattgggacaaatcccaaattgaaactgcaatcaggataaaataaagtagctctagcaaaattatgagtcaccttattagttgatcgcctataaaaaaaaaaaaagaaatatttttgagttctttcaataaagctttacaatcattaaccacttgaccaaacatggaaatcatttcatttgaaccacttgataaatatttcttttctcagaaagatttgaatatgagacagaggcattggttagagttggttaaggatgacgactgtgacatcctataccatccggggaaagctaatgttgtggtcgatgccctgagcaggaagggtcccatacagataactagtatgattcagatttcacctcagttagccgaggatatggtcaaatcaagcatcgagtttgttgtaggcaaacttcataacttaacgttgcaatctaatttgttagaacgaattaaagctgctcagttaactgatccagaattagtgaaggtcagggaagagattttagctagtcaggccaaagactttgcagtgtcagatagtgggatgttgttgtttaagaccagggtttgtgtttcaagtagtacggaacttagaaattaaattcttgaaga

SEQ ID NO: 173751 - DNA, 666 bp, Cannabis sativa
ccccaatctatgttcaagtcctagcacctggtccgggtccatgttcgtgttccggttcaggtttgggtctcgagtcccgatctgagtcaaggtcccagtttgggttatggtcccagtttgggtcccagtcctagtgcgagtttgaggttcgggtccctggtcggagtctggtacttaggtcctgggtccggccccagtttttggcttgggtctaggtctaggttcgggtcccggtctgggtcaaggtctcggtgttagtttacgtcctaagtcacacgtcctggtctacgtccaagtcccggtattggttttggtctaagtttgggtttaggtttgggtcttgttaccgtcccaggtctgggttctagtcccaggcttggttcgattccaatttcgagtctgggatcgagtttggatcctagtttgggtctggatctaagtcttggtatggatccgggtatgggtaatggattcaaacactgactatgggttaggtcaaagcctcaggtttagatttggatctcaatcttggatctcaatcttgttccaattcggccctaggtctagcgtcgggtcttaagtttatgtttgggtccgtgtttggggttgtgtccccgtagtcaggtcttgggttccgggtccagggtcgggtcctgtgtctcgagt

SEQ ID NO: 173752 - DNA, 819 bp, Cannabis sativa
tgtttttcctgctatggggcttgcggggggcttaattttggcctggaaggaaggatttgtgttcgaaagcatatgtgtgtcgaaaaattagatctctggaatagtttactctgacccagaaaggaatccctggttactctcttgtgtttatggtccgccttactttcacgaaaagagggttttctggtcgtccttgatggatttaggctctaggtttggagggccttggttgatcattggggatgtgaattttgtgttaagcaatgctgagcgtgcaggggccagggggaaggatcagtttctcccctttatctcgaatcttatcaattcgaatgccctggttgacctgcctgtcaaaggggattgtatgacttgggataaccatagagatggagccaatcacgtcaagtccgccttggacaaagctctcgtgaatgaggattggttgcgaatctttccgtcggtggtggttcaatcccttaccacctgtaactctgatcatcgaccgcttgttattaattctgcttcacggacttctaaggcaagggcccctttccgttttgaggcttggtggactagggacccccgtagctctttcgttgtggagcatgcgtggggatcggtatcccatgattgggcccctgctagagtttttaaaaaggttggtgcttcccgtttggctcttgctagatggaatagagaccagtttggtaaattggatacatgcatttccaagcttcaagatcaattacaagctatccaatgtatgcctgtcggctctagatcgtggaatcaggaggtggaagttaggaaagagct

SEQ ID NO: 173753 - DNA, 1310 bp, Cannabis sativa
cgcagagacactgaatgaaggaattctggctgagctagcaatgctgcgcaaagactttgctagggtctcccgaaggcaaaaaggggacaactcagattctgattgtgaggaccgagagccatgcgcccgacacatattggaggcagagctccccaagaattttaagatgtttgagatggtagcgtatatcagagattcggaccccagcgatcatttatcccgtttcaactgggtaatgacggttatgagggttagcaataatgccaaatgtctatgctttccattaacattaagcggtttcgatgaggaatggttcaaaaaatttgaaccaggattagtggactgctggaagaaactacaagtaagcttccagagacagtttgtcgctgcaaggaagattaacctcggagtcagcgccgtgactaacataaagcaactgcccacggaaaccttaaagaacttcataaaaaggtttaaagaggaagcttcaaagaccaagaaggtggatgacagacaacagcttgcacttctccaagctgggatccgaacggggaccccattctggaacgaattacaacaggaaggagcggccaatctccaagatttccaaaagagggtccaaaaatacatcaatttggaagaggcccagatagtggcctatgggggatactatccaaccggagtatcatgatacgtacccgaagcttagctctcgggagccatgcccctggccactcctcaaatgagcggcatagaattcttcgcaacactaagatataatcagaggctagccttggctcccgcatcatcacactttgggaatcccataaacaacccatcggggatgagtggtcaagctccgtctcactccgcacctaccataagtcttacaggacctcctcagagctcccaaagtaagaggtcctcaaaaggtagcaatcagacggaagataaacgacaacgaaggggatacacccctcagtatactcaatacacggagctcacagacacacatgagcgggtatactttgccacaaggaaaaatgcacattaccagaagcctcccccctgtatagggacagttcctgaagggatcccaacaagagatgcgaataccacaacaaaattggccatagtaccaatgaatgcaacaacttgaaggacgagatcgataacttaatccaattgggtcatttatatgaatagattaagaaccgtctaccccatcttaacccgactccagtaggaggcccgttacctcaaggggcaccaaggggtatgcccggagccccaacaaccgttgtaccctc

SEQ ID NO: 173754 - DNA, 775 bp, Cannabis sativa
attaacattcaatacaccatacatttttttaattcataacaatacaactatatacaatactgtcatattcttaatgtattaagtatttcaacatcatactttaactgataacgacaagcaagtaattctacacatgaaaaattaaattacatgcgtccatgctaatccaaaaccataacatcatacgtagagatcataactcttatatcatactcatagaataaccataatactatgaaataaccatatcccaaccatatcataccatttatcataccatgcccattacatacataatctgggcctatattggcctaacaataacatgggcacatttagtcctactattgctatgaaatatggtatctctacattcaataacattgtcgtcgtattataccttaccctatcaatgtcatgcacaaatcaaataattgcagggtagggtaactctacattcaacgaccttatcccgtatcataccccatcatggcccctcatttgtacctgagacgttagcatacaacatataacatataccatattcaagtcataccaaccataatgtacatcaattcacaaactcatatcgtgtccatacaacacattttcaataccatatacacattcataatgatgcatcatattctaatatataaatagttcaaattatgcagttcaaaacatacaaaactacataattttcttacctcaaatctcgctgcttaagacttgttacctcgtcactatgacctataataagaaatgggtcaag

SEQ ID NO: 173755 - DNA, 606 bp, Cannabis sativa
agtttagctacaatgcatttctacgccggactgctggaggtgctgagtcgacattgatggccgtaagaagaagaaaaagaagatgagcttgatgttcatggcaagaggtgcagatgagtctttaaaattttttaagatttattttttactttgagtgtgtgactctgagaaatactctatagagaaacaaagagagtgagagtgtgagacgagagaaaggatattggttctgtaatgggtggaagatcttcaagttcttattatttcccatgaatacttttcaaaggatattggttctgtaatgggtggaaaggcagggaaggttactcaggttgtgttacaagaggataaccctgcctctcggagtagtgtttcttctccgtttacggtggccagtgactatggagtgccgtttccacttttccgatcgtggttttctacgtcctctactttttgtgaggcgtcctcaagtgccggctctttctcgccatttcgagaactcccttgttttgtgttgtttggcccctaccgtcgtcctctcaagccggtggtagctaggaacggggatggtggtgtctcgaggtcgtcctccttggatccccgtgg

SEQ ID NO: 173756 - DNA, 520 bp, Cannabis sativa
tatctctccttgttctttcttcatttatttttctttagcctaagttaggttttatgtgtgaagttgagctttatgttactgtatgaataaagatagtttgatttggtattttggagattgtttgatgttgtttaagctaatttgaactgaaattattggttgaattgaggtttgggcaaaggttgagcttaagaactcaaacctagctctctaatggtggattgagattttgtgtgaattgttgagttctattgcttggaattggtttattatagtgtatacaggtatattggaaggtttaagaaagtttgggattgttttgatttaaggggatcgatttttgggttcccagctcagaaccggtcgaccggttctgggaagccattagaaccggtcgaccggttggtacccaggaaccgggattccggttgggaactgatctgtcggttggggctttttctcgaaccctagtttttcccgtttgtatgtaatttaagatgttagcatcctatttatcgat

SEQ ID NO: 173757 - DNA, 1289 bp, Cannabis sativa
aaagccacgactctcatggcttctatggaggaggtgaatcatcctcctccataagggtatcaggctgagacgacacacgagatccagtatttttaatcgaaaccgatccaacaccattattgttaacaaagcggccacccgagagcaacctaatacccatacatttatcattattcatgttggtgcgccgactaacaacctcctccccttaacttggtacaatattatcttaaggaaagtctcacacgacaccgaggttgagaaagaatgttcaaaggtctagaaatgatgaaaccataaactcatctttatttgaattttgttttgagaatgctgaggataggaaatgggttttggacaatggcctgtgaagtgtgaaaggctataacatgatcctccatgaatgggctcaaagcttaactggtgttgtggtttgtggaaagatttgtttttggatacagattcaccagttaccccatgaatattcttccatttctaatggtaatgatttgggagctcttgctggttctgtcatgagatttgatttgtatgaagagaaagctcccagcttggccaaatggctaagggtgttgatcgatcttgatgttgagaagcctctgttctctggatgttttatcaacttatcgaatggtgctaaaagattgatacaattaaagtatcagaaactgggcatcttctattttcattgtagccatttgggacatcaatgacgtgggcgtaaattctcatctcttgataccgttatgaatgcccgtggagtttcgtttcaactgtacgggccttggctgtcgtccacgtcccaatatgtggactgtttctcaagaaagcttgttactgcagctcaaggtctgtccgtgcaggggaaaatgttctctcttctgtcctgactctggcaaagcctgtggctattcccatcgatgattttactaaggtttagactagtttggtgctgcatgaatcaaggagaaagaagatggtgacctgtggtcctcgtacagtgagacacaatcagagtttggctatttgggttctcaaaaaattagagaccatgcttggaaactaagatttctttaagaaaaaaaaagaaaaagaaaagaagagtggctgagagagtgagaagattaagaaagaataagccgtttataataaatactaataaatttggaaaggcttaaattgtttttgttgaccaaggttttcggcaaccaatataataataatatttatgaaagctataaggaattaatgagagagatttttacgtggtt

SEQ ID NO: 173758 - DNA, 574 bp, Cannabis sativa
tggtatgatcgtatgcagattgtgattgggaaattataatattcacttttaaatttcatatcaatcaattttcatgtatccttaatttaagccatctttttagggatcaccattccgattacttattattttttttttaatttttttttatatataaatataaatatatatatatgggaacgacatctccatatttttagaaacaaacttcatttgtggaaatcttaagttataattgaagatcgacatttcacataggcatatcagccatgcacatgtgcaattaactcttaaatttgaagttggtacttttcaaaataacttgaaaacattatgttgtttttcaaattataccataattgtgtggagctaattaattttctagacaaatccaagttccacacaatcccccaagtgttgtttattttgtaacaaatataaaagcccatctgattagtgggccttagactctattcatgggcccccgtgttgaatgttcttaacgggctttccagagtattgaccgttcctcaatccttttcaaaaaaaaaaaaaatagtcctcaacaaataaa

SEQ ID NO: 173759 - DNA, 891 bp, Cannabis sativa
ggcccattgtcttctgcggatatcaagaggatggtccaggaactcgctgaactaggaactatcgagatttgagacaacgagtctacagtgtcagcgcgtgatcatctcgttcattccaggcacgctccggacgtcgaggtcgaggagatggatgatggctggatggccccagtttgggagtgagacgaggaagaagatgcggacggaagtgggactgaatcggtggacaacactcaattggatgaacccttttcgtgcgaggacttggtctcgcgagttaccaaatcagatcttaccacctttacgaggttaaaccttctgcgtcttagcaccatgcgtcctcgtcctactcaaaggccacacctttcttttaccaatcctgcgatcataccctcagaagatgtcgtagtgtctatccctattctccgatgcggagtatcaatccccttccatccattcatctccgctattctcaaacagtacgatgtgtcccctttccaactaactcctaacagctatcgcatatccttaggcttttatgcgatgtatatggagtacgtacacagggcaccctcgatagaagagttcagctacttctacgacataaagaacgtaagtctccataacggcttctattgcttcagcaagtgggccacttctgagatcaatggggtggaaggcacgatttccaacatgggagattggaaatcgaaatggttttatgtgtttaaggttccagggattaggactgactttaaccgtcgacctaatatgtcacgtatttctttacttcgtcaatttttgagttatcttgtgactttaggctaactcgctctttttattgtcgcaaaatagaccagctcgacctacacttgacgcgactcgcagaga

SEQ ID NO: 173760 - DNA, 813 bp, Cannabis sativa
gttgatgatatatatatttgaaatctttgttgatgatgtagtaaagcgaataatttaaatctaataattaatttggcgttacgcttaatagttaatggattttataaagtataatttcaattattacttcgaaatgcatgttatacattattttaattgatttacttgtgagtcttattaagatttttattcttttacgtatatatattctatatttttgtgtgttgttagacagagtggcggaaccagaatttaattggaggttgggcgtaaaaaaatttcatatataaaaatatttcaaaaaaataagtaaatataaagaaaaacacaattcaatattttaatttccaactataaagatattaaatatcaaacactaaaaatcttctaataaaataaaacaatctaaaacaatatttaaaatatataacatactcaatatcctaaaattttagcaaatatatcaatttttaagctcatatccttagaattgtcctcgacgagttttcatgttttgaaaacgatgaataataagcttgttgtcaatagcattgaatacatcctttttgagatatatagtcaaactatcattcaactattaatctcccattttgttgcacatttgctgtgggcaattaaaataattaaaagacttttttttagttaaaaaagtaaaagaaattttttttttcagcatgggcttaagcccacactggtccttcattgggtcctccagtcactacaagaaatgtcacttttaccagcacagttcattactgcgctggtaaaagtacttttaccagcgcatttcgc

SEQ ID NO: 173761 - DNA, 903 bp, Cannabis sativa
atgtatttgcaggtgggcaatatcgaattcaattgaactgaaccaatcaaattcaatctaattacaaaaaattagatatccaattacaattgaattggattgattattgaatgtcaatcttaaaatttaattaaaaaccgattcaatttatttacatttatatatatatatattaaaaaattatgtatatttatttatataataaaaaataaaatatatgtattaattacatttttagtaaaaatttttatgttgaatatgtaacacttaattattttgtatatttatttttatgatatattgttctattttgttacttagtaatattgttgttttagctattcaaaaaaaaaaaaaaaacttttagctgtcttacacttatatcggtagtatttttataaaatattaaacttatataaagtgtgatatttaatttttacttatttttttatatttttaagttaatattaaaatttaagtgtatgattagatattttcaattaaaaaactaatccaaaatcgaattagtaattgaattttaaattagatgttgagacataattaaattagattagatggcaattttttaaatctaattattaattagattgaattggataaaaaaaaaatattaaaatgaatcggatagccactcctgatctgcaccacgtgatcccgttattttttccactggccattgttaacacttttcctttcaaacacgtaactgacatagacacctaaattaacagaagccttatttgtgtgtgttaattaatttaattatttgtgattaattacatattgatatttattggttggttttgatttgagatctagagctggcttgcataatacataacatcatataattcattcataaatagattttttttttttttt

SEQ ID NO: 173762 - DNA, 513 bp, Cannabis sativa
taccataacttgaaactcttgacttacaaatcagcattaactgtcaattacatttttttacctggttgtcaaaatccttgactgattctccctcaaatattcagtttcttttttttttttatgaaaatgtgcatcaactcaaacttatattactattttggtgcgtgtaatgaatatatgaatttatgttttcaatcaatcaaataatgccgtttcaaaaaaaaaaaaaaaaatcaatcaaataatgcattgtttaaacttttaaatgtaaataagaaaattacctaatatactaattttcaatttattttccttttaaaatttacagtttttaggtggttgattatgttgattctagttgttatttaagttactctattagttagtatgtgagttttgaatttctataaaaataaaaaaaattattttgaagtataaaaataattttttttttaaaaaaatataaatatttagttttgtttaaatttcatattgtactgttatttttggagt

SEQ ID NO: 173763 - DNA, 514 bp, Cannabis sativa
gacctactaaatctaatcccaacgcccttgttttataattttaaagagaattgttaaaagagatatcatatcgccgctattattgacactaaatatcgagtctcatataacttaaaaagttaagaactgagatgtaaaataattttaaatttagaaactaagttagtaaatattcttttttaaaaataaaattaaaaaaatgactaaatataatatttaattttttatatattagtaatggagaagtttgtagtccacgtacgactctagttttatgtctcaagcaatatagaagtttgtaggccacaagaacattattagtctattggagataaaggactttggcatccaaatatgacatgggccaggaacagctttatgcgtaggacgatagccttggagacaagtttgtagagcacattaaacaaattaataggcctaaattgagctaccgttgtaggattcttgacctttagaataaaagtcaactaggtattattgatgccagaagggt

SEQ ID NO: 173764 - DNA, 638 bp, Cannabis sativa
  modified_base (605)..(605): a, c, t, g, unknown or other
ctaagctaaaatatgaaactgttataaattttatatgaatagataaaacatattaaataaatataaataaacataatataattataggatcaaaatacctttagctattgattctttgaacttcaatcccacactagttttggatctgcgaaagaaaagaaaactgattagtgtgggtaattgggtttcaaagctttctctactctctttaggtggatttactatgtttcacagaatgagtagtgagctcgaggatcgagactctatatttatatgggtgaaaccttctatcaaggtttttgccacaattaattgtcagaatatttaacaattaattttgaaaattaaatatggtaactgaaatatttgataattaaatttgaccataattaaaatattttaattaattagtaaataattaattatattttataaataatatcaaatatttgttttgctaccatataaaaattattctaatattctcccacttagtttaatatttaaattaatttaccacttaaaactcaacgtttctcattatataataaatatataaattatagcgataagtctttattatatgtcgagtattatctttcatntattacgatatatttattatataacaatgtact

SEQ ID NO: 173765 - DNA, 651 bp, Cannabis sativa
cacgtcttatacaaagtcaaatcaagtgtgtttttgtagaaatattaaggggtattttattctggaaagctgacatattgtttttaatgtaaattaatattaaattttatataatttaatttaataaataataaaaaaaaattaataattaattgcatcgcgctacagtattgtaacctaaaaacgtgaccccatactaaaatggaggcatcacatctgaagttttatattctttaatatactgtatatatatatatatatagaacacgactatagggatgactaaaatgtttttatggtaaggacactttttgagcttgatgatctatctaatggttatgaagaagtaaggtgtaagataaaagtatagatattagtatattatataatttgctcttaatattttaaaataaaataatatttaaattttaaaagtttattcattttttttgactataatatcattttcttagaataaatgagtatgtatgcttttttgtttgtgagaaaaaaacatgttaaatattttaataatatttttgaaaatatatattaaaagtatttgttaacaacacactcagcttaaaactatttttttaaaaaattaacttaaaactttctattatgttaataactaggcaatatagccgc

SEQ ID NO: 173766 - DNA, 744 bp, Cannabis sativa
tttgcatttttcttgttcgttttttttttatgagtttatctaattacttgtgtaatgtattttctcaattcagtagatgagatttttgtaagtgtaaggttcgacattgttagcaattaataaaagttatattaagttatttgattcatatatcaccactcttattattataaatcaatgtgtgtagtactttttaagagggctaaatttattgattttaattaatcaaacaaattctttatcatagtggtagcttatttctggatcaattgctttgagtgttagtggttcatttgtgccttattttctacaggtagactaaataaatagtcctcataatatccaaatggcttttgggccatttcttcctttaaatctctataattactctttaagatataactattttactttgattgttttctatcaaaatcagaggagatggatggtcttcagttattttattttatttaagaaaagacaaggtttgtaatcgtatttattgttaccagtttataatgtacggtacttattgtttgtaatcatttgacaattcaaaagtaaagagtagtgaggaaagtttctcaatttaaaatgtatatgtgtatcatatattatattataatctcactaatgattaataacattttttttcttcaattattatttttttgaattttttttttcaattattaattgtatcacttttaaataaaatagaaaatacctaatataaaatttagt

SEQ ID NO: 173767 - DNA, 600 bp, Cannabis sativa
ttcttcattacaaaataataaaataagaatatgtccatatccatatcaattgagttggtttccttattattatttattattatttttaaaagaacacgaatgggcattatgcatttttttttttgttccacttacagtagtttaattaattataaattaagttcgagccaacaagacataaactgataacatggactgtacaacaaagaaatagtttattatattcatggagatgatgcttataacaaatagacaattaaacaaaaaccatacatagtcattcactgtaattaaataacatttagctacttgactttgcatcaaataatatatgtttttattacatgaatatttatataaaacaaattttatcatcatttcgtgttgaaacagttttcaatcaatattataaactatataaataaaaacatccttatattatttgtctctcaattatggatgagacatggacattaaatagatagatacacatgcttcccaagacaaaatcgtgatgtaatcgacttggtagactttcttatggtcagaggtttcgccgggccatcaatattataaagagaattgttattgggtactaat

SEQ ID NO: 173768 - DNA, 640 bp, Cannabis sativa
  modified_base (573)..(574): a, c, t, g, unknown or other
ggccatagggaccttttcaggagtctagccagccacggggaattttggaggagtctggctagtcatggggagaggactcatgctggtcatatggactcttgttggtggctggccggccacaggatggatagaggggactgttgttgagcccgagatccctgtctgaccccccatgctgttggttgcttggatcttgcactttttgcaatttgacctttgaggaaaggtttgtcctccctttggcaagggaagatctgtcatagtttttgaggatctaggctgatcaacatgtcgatagaccttccctgatctatcaacaagtctttcttgatgtggatttctgatgagatcctggcctcttctattagctcacttgtggaatcccctaatcaaatcgctggcctctctgttgcggcaacctaaatctacttgatgagattgaaggatgtactcttcgccatccatctatctgaagaatttgtgtctctattgagtgagtacatcgcaatgagtagcgcgtggttcttcaaggaatttgctattgggtcctgtgccctaaataaaacccatttnnatataattagatttactaattataaagatcagaaatcgcattttatgttgcatgtttcacatgatt

SEQ ID NO: 173769 - DNA, 523 bp, Cannabis sativa
  modified_base (174)..(174): a, c, t, g, unknown or other
tttaaaaaaaaaaaaaaaaaattgtgtaaatttttgttaaaacaaaatgagtattattaatattagagattagtggtacttaatacatgagcattgttattaggtaccagtggtgcctagtacacttaagacgtgttgccttacgattggctagcgatactccctaaaagctantatattaaactatatgggacccgatactaaattacaccaatagcaatattgacacgtaggagggtgcttgacaccactgataccttttagcatttctcttaatacatgattaagactattctaagcaaaggcatgtgacaccttttggtctcatctaataattataattttactaatatttttttttttgaaggagaattttactaatatttagtacttgagaattgttaaaagacattactgttatttagtccacttttcgatgtcatattattattagtgtaattaatatcaagtcttatataacttaataaaatagtttttcgagaatatcactaaccaattgtag

SEQ ID NO: 173770 - DNA, 631 bp, Cannabis sativa
tgggagcacacccgaagcagcccttcgtaagaagttactgatcttaggaggtctttgtaatgatcaatacagtgcgcttgatctgatcttatgaagacataatcaaactcattaaggagaaataagattagtcaaagtttccataaaaagaaaactttcaataagagaatttcttctcttacaagaagtttccaaacaaggaaaaatacagttgcatatagaatctttcctatgatagaaaaagagcaataaaaacaactaaataaggtgagaaaattggtttataaaagccaaaaaatcgcaccataaataaaaaatattttggcatctaaattaccaaaaaaagactttacatattttaattatagtatatactttggttggtatagtatatacatatatatatatacatattagtaatatatatttttattgttattattgttagtaatattttggtgaatagtatttatatttgttgttatatggtatattattttattaaataatatttaagttctattttctattgtgacatgacttataattttatttgcatactatatatttttatttttaattgttgttattatatgtatatacatatttttattgtatggtatatattttt

SEQ ID NO: 173771 - DNA, 518 bp, Cannabis sativa
  modified_base (402)..(424): a, c, t, g, unknown or other
  modified_base (470)..(477): a, c, t, g, unknown or other
caggaacgagaagcgtgctttagtccataaatcgacctattagcttgcagactttcccttcctatcttggaaccttgaaccattctagttgctccatatagatggtttcattaagaattccgttaaggaaagttatcttgacgtccatctaccaaatctcataattgagagtaacaactatggattgaagtgtcccaatggatttgaacatgaagactggactaaaagtatcctcatactccacaccttctatttgggtataaccctttactacgagtctagctttataagttcgaattgtccactaactcctctttctttttgtagatccatttgcaccctatggccttaatgccatttggtgcaactacaatgtcctagactgttggaattattttaccnnnnnnnnnnnnnnnnnnnnnnnatgttattaacatcctaaatattaacttctaaaacgatatgaaatnnnnnnnnataaagtatcaggaaccttacagtggttgcagcgggatata

SEQ ID NO: 173772 - DNA, 863 bp, Cannabis sativa
tgatgagagcggcggagaggggttgtatgcaggtagttgagtggtttatgaaaaggggttgtcgagacatggagctatgtcttgccctgacagctgcaacctctagtagccaagttgatgttgctgcatttcttcttccgcatgttcctcaacatgtccttgaagccctgagtactgaaattctcaaggctgctggggaacgaagtggtggctcgctggatggtgtggcatttctcctccgctctgacttcttaggtgatcccacagccacttatgctgttgctgatgccattgctaggtcagacgatgaagctgttgctcccgagttaaagtgttttctgcgggagcactggtctgaggcagccttcgtggatggattgaggctaggacaagaacactacatgaacattgtgaggattttgaagtggagtgggtgtcctatttgcttaagagaccttccacccccgcttagggtcacgattgcttacctgccactgtacagggagtgtgttgaggcaggtggctgtttgttatcacaaaggttaagagggcagcttgttgaagctgtgagaagactcgatggaagggtcttaaaagaggtgggccagggaagagagctcgtggctgctttagagcatcatcttcctccatttttgcttcattcatcctttcagagttgcttattagcaagaaatttagcttgaggtgttttggatttttgcggttacccactgatagtatatgtaagaagagagaataaagttatagggtgggttccggtggtggcaaaagcttaagtttgtcagttttcttcaccaatgttttacatactgcaccttttatatatcatatatatatatata

SEQ ID NO: 173773 - DNA, 554 bp, Cannabis sativa
gtaggtgaaattaccatatcacttaataatgggtctcaccccgtattaggggaaaaggacataaccgttttctcagtgttaaggagctgtcctgaagcacgatggtacacatctaatacacgactgattgccagacaagaagactcattagcttcacaaaataacaaactatcatcggcgaataacagatgagaaactaaaggagcacccctgggtatagataaaccggataaattccccaaacgttcttccagttgcaataaagctgacaaaccctctgaacatatcagaaaaagataaggcaataatggatcacgttggcacaaacctctcattggtgtaaccaagcctctagtagctccgttaatattaaaagagagggatgatgaggtaacacaacgcataacaagcgccacccaagtctcatgaaaacccattttaagcataaccgctttaagaaaaaaccattccaccctgtcaaaagccttactcatgtcaagctttaaagcagcataactgttaggctatttttagcctaagtttcgggtcacatt

SEQ ID NO: 173774 - DNA, 541 bp, Cannabis sativa
ttccttgatgtcttacatattgtcggaaatatccccgcgagatcaggctttctatctcgtccttcagtatgccctatgtctttgtgaaataagcaatattttgttgaatcacgtttatgtcttgcatgcctcatgggttcaggtttgtaaatgcaatcctattatcattagcgagaaatatgatctcacgagtttcattcaactcggtgtatactgaataaatcgaaacatacttgtcgtgctttttctgtttttttattcttagatgattcttttgaatcaacccttcttttcgtgtttcaaccgctaggattgtctactttagtcgagaccatgctcgttgttgccgtatcccgagccagttttcaacagcttcatctcgtttcttgcttccactttttgcataaatacttgtgctctttcattaaactcattaatgtttctcacagggcgacccttgagatcatcccataatttgcctccagccgtggataagtcagttgttatgcctgtgtgaagtgtcgtgagttgtatactgtca

SEQ ID NO: 173775 - DNA, 633 bp, Cannabis sativa
cgataattatctttgttgcattgattggtcgataattaagtacatttaaaatttacaaaatatttctctttgctattttttttttgaaagcctcattgctattataattcatcaaattcttaaaatcacaaatataatatttttttaattaattttctgtttttcaaattgaaaaaaaatatattttttaaaaacatgttttataaaagtgctttcagtttcaattttttaattaaaaatcaaaattttaaaaattttgaaaacaaaaaaaaagtcacttttattatttttttaaatagtttttttaatcaatattttagactccgaccagacttggccccaacccatacccgacttaaataaaataaaaaaaaaatttacaaaacatatttgttttctattttcaaaaaacatatttgaacatatttgaacccgaaccggtgaacccgtaatttttttttaaaaaaaaatatttaggcgggtcgggttcaacccggtacccttcgggcgggttcgcaggttcagtttttaggagtaccaagtttcgggttgaaccgaaccagcccgccaacccgcatatttaatatattatatatatttttatttttttattacattttatatatatattaa

SEQ ID NO: 173776 - DNA, 565 bp, Cannabis sativa
atttgtgcttaggtacaacactgagattttggactcctaatttgaggcccaaagaattaaaaaaaaattctccgaaataacttatttttaatctaattataaaaaataatttggtcaagttttgtttttatttatttggatatattttaatacccttatttatatctttctttctcttttgttttttttttcttacttctttccttcttttatgttactttctttctctccttattctttttctccttcttatttctctctcttatttcaaattttaaaaatcattagactctactcttcaatgtgaatgtttcaaaatgtaagaagcatatattttttcgctatttttaaaaaataaactatttaattactaatatagtgattggttaatattttataatttttcttttaaaaaaaatcttatttaacatccattttagaattttgttattaaaatatattatattatatcataactaattagttttcaaaataacaaaaagctatataaaataatcagtatataaaaatggtagcttattacatgacaactcattagtttcaa

SEQ ID NO: 173777 - DNA, 521 bp, Cannabis sativa
atcacgaaaaaccatatcgagaccacaagaacccccattgaagtcgatggcgactgtgttaacttcgaagaaatcggtggctggaggagaccattgagaaggaggcttgtcttgcctgggagcaggaatactagaaatcaaagatgcaggacagatgtttaattttcatggtgataagattagagaaagtcagtcactcaaggacccaccagttcgagcaaaatggtagagttttcatgcacaaacttgtttcgattttgagtgtaagccctggaacgggttaaattgagtttttttatcgatttactgttattgacatagggcccgggatcgttgagcgttttccacacaagttaatcggcacacttgaatttgtacttgaggtaaaaaaaaagtataattataccacataacatgtcaatatatgattcggtaattaccgtctattagagagaattgttacgttatttggttgtctcattaggcaacaatttaaagaagatttattactctattggctg

SEQ ID NO: 173778 - DNA, 666 bp, Cannabis sativa
ggaaaagaagcaagcagcgtcaccttctttaattatatatcaggttgaataaaatatgtactaattagaactttattaaagtatgttttaagattattgggttagatttaagaatttttatttaatattagtacagaaaatgtaacatgaatcaaagttttaatggatatgatttggtacatgttaaagtttaaaaaacatgatttactagatattaaagtttaagaagcattatttaatgtatagacaatcattaaattaaaagaaattaaataaaaattcttaaatctaactatctcaatagttaaaaaaaattgtaatagttaaaacaataaaagtacaattattaagttaaaaatactaatttacctatatattattactatttaaaattaaagttaattaggatttttgctccctgaactttgacatgtaccaaatcatacccttgaacttttaaggtcgttataaatactctctgaactattgtgattattcgatttaaggatttttttttttattttattaaaaaagtctaacatatataaaaattcaaggggcataatttagtatatgtcaaagtgtaaagggtaagatttgatagatatcaaagtctagggagcatgttatagtacataaacaatcattgaaatagtaaaattaaat

SEQ ID NO: 173779 - DNA, 519 bp, Cannabis sativa
  modified_base (475)..(484): a, c, t, g, unknown or other
cacgggcatgggcggagttggtgcgagcacctgccaaggaatccttctgaccagctcggacccagatgttgggggcccagacggctgaaagctaacacaaggacctggaaaagaagagtcgcagaagtttcaaaccctagggtttcctacaatgttctttctacagcaaagttacattcaaagcacaagcatgcaaaggaaaacataaagggattcaggaacttactcaaagattcaagtgtccgggttcaagcaagccagaaatcgtctgtaaacttttcaacaactttgaagccagaaagctctctctttttgctcaggagtttgcttaacaaagaagggtgatgaaatcaagcaatgtgcaagtactccaagtatttataggcagaagggtaactgtacataaaggaaccctagatgcctcgacttctcgcctagaaagcgaatatgagaaatcaaaataatcgagtgcaannnnnnnnnntggagagagaaattcggattttcaaaatattaatt

SEQ ID NO: 173780 - DNA, 853 bp, Cannabis sativa
gaggccagacttatggcgccggttgtggtgataagattcaccacatctattgtgtttatcgagattctagttatgactggaacccgagtatctggacctacagtctgtgggttttgagggagacctaaagatgcatatggtgcaacaagaattcttctcatgttaacaatggcatttgattagatacgatatccacgttctcaatgaaagcacaaaactatttaccttaaaaatgatcaactaacagctgggttgtatagatcagatgcttgccacgtgttacataaatagaatgaaaaagtaataaacatagattttttatagaagttcggcccccttgtgatagtgggtaatgacttactccctttttggttgtattgatacctagagataatactattcagatcactataagtgagatctgatatagttctctataaggatacaaatcatgaatcagtagggcagatatctaatgagagagtgagattgccttagaggcgtgtgagagagatgaagagaagagagggagagcccttatgggtgtgtagcagagagagagagattagggttttgacttagaacaatttggaggcttaatgacttaaaggcaacttagggaacttaggttttcagtcagaggttaaggcctttatataggaatccttaaaccttaggtttacaattcaaatcccttaaaaatagcatagttagttagatatttacaaaagactgaaatgcccttaattctaaatattcttcagccagtctgttggcttttagggcccaattcgcatcccatatcttgtgtccacgtgtagagttgtacatggagtcttgtcaggtcaatctt

SEQ ID NO: 173781 - DNA, 667 bp, Cannabis sativa
ataaatatatacttatatatattaggtgtacttttaaagagtattattaaaagaaattaatttttatgtttaatttttgtctttaattaatttttatttattttaatattatataggctgtaattattttattgattaaaattaaaaaaaaaaattgtcaaaaaaaatgagtttgagttaaatattttttataaaaatatatttttgatataattttaaaagatatatcttttaacattttttttaattaagtagtaaaattaaatataaaatttaatttttttattattattttttattagatcaaaatataatttaatatttttaaaattaatatatataactaaatttatttcgtaatcatggagtgtaatacttattgatcataagtgttttatatatacatatataattattcttgtagaagaaaaaaaacaaaatcccaagtacttagtcatccttaattgcatctattatattaatattttctttaagataaaattaaataatacaattagttcttgtatgattgtgagattatactaatttttatgtaaattaagaaagaagaaaatggaaaaagacgggttatatttcacggagtttttgtctcatatttgatcaaacaaaattatattttaattaatcatatatatatatatttttt

SEQ ID NO: 173782 - DNA, 537 bp, Cannabis sativa
ttatacatataaaattattaccggcagagacccgccggtactagtgggttccggcggtaatagtataaatagaaaaattattgttctattagcggcgaaatccgctggtaaaagtccaccgctaattattttcaaagtaaaaaaaaaaagcgagaattttcctgcacaaaccacattgcccattaccgacgagacattccgccggtaataattactgtccgccgctattgttcattttaattaaaaaaataataatttgttctactccaccggtaataagcccattaataggggcggacatgctccgccgctaatgtgtccgcctctatttctaataaatgttgtagtgattcatttaaaaactgacgcaaaatatatactcttcttttttatcttctgcgtcaatttgaaaatgacgcaaaatcttttgtggcattttaaaactatcactaaaaatttatagcgtcggttttaaaatgacatataaattgctgaaatacttttatttttaacttattgcgtcagttataaaatgaa

SEQ ID NO: 173783 - DNA, 564 bp, Cannabis sativa
tttataatatatacttttttttttgaaaaaagtttaattaatgtagggtgtgttcttacttggtacctgttttttcaatgatgttttacttatgtttgatgagaaatttatatcaatataatcaaaatatctttcgtttatgagttataaattaaaatttaattagaaaataaattagtcaataaaattttattgtttaaatttacatttagtgtaacaagaatattgtatataattttcagaagaaagtcgttaaaaaataatattagtgtttaattattgatataattaagtattgggtcttatataattttaaaaaaaaacaatttttaaagaatatcgctaaccaatcgtagaacatcacttataaaaggtattaggcactattaatgctcaatagcaatgccaacacttataaaagatgttgggcaccactagtgctcatcaggcccgtccctgggtatagccaggctaggcttatgcctagggcccacctagtccaggggcctaaaaaaaaatattttctttttaaaattatacaatttttttttactgattttgaaa

SEQ ID NO: 173784 - DNA, 525 bp, Cannabis sativa
gagagcttgaaggatcaagagctaggaatgtcaccactaatcagtgcttcaaccataataaggtttttgatacaatgtgggaaattagaccaccaactagtactagtggtagtgtttagagaatatttagctaaagtatgtgctatcacattaattatatggagtaataacaaaaattcaaattttttaaaaatactttattttttgttttatttataattttacgttctaaagttctaaattataaaaatacacttgtaaagttttaaaattacaaaaatacactttactcagtaaaaagtaaaaaaaaaaaaaaaaagactaaaaaataacaagaaatcaacatcactagtaactacaactataaataaactataaaacaacaaaaaataaccagaaaaataatctcatgaaaagtataatatagctataaataaactataaaacaaaacaaaacggttattgttattattgaagatgtattttcgtaaataaaaaaactcaaagagtaaaaatgataatttt

SEQ ID NO: 173785 - DNA, 635 bp, Cannabis sativa
tctcatgtttatagatttgctaatactgctgtccatttactggcaaagtttgctctttcggtggatgctaaatgtacatagttagaggaaatccctctgtctctaatgccctttgtattatgactcttagttttaatataaaggcattcttatctaaaaaaaaaaaagttctaaaattgaaacaatcaaaacttaacaaaatatatatgtaatcaagagtatttaaatagtcatatatgacatggacaatcactttttacaaataaaataagaaataaaattctaacttttgaatcaataaaaatgaagagaatatttttacttgaacaaataataatataagaatactaaatagtacaaataaaaattttaaaataaaattattttcataaatatataaaaacaattattataaaaataattattaaaaataaaatattaataaaatacttattgggtaagacattagtcaattaaccatgaaatatatataaaaaaaatcttagactaaggaaaaagttatttataatttacatagataatacctaaaaactatatgtgagactttagtttgcatgtagattattttacaaacaaaataagaaaaatatattataaaattaaaaaaatatata

SEQ ID NO: 173786 - DNA, 598 bp, Cannabis sativa
ctaatacaccctcttcacgcttgggcttgaaaattgtgggtataacaaacgaccttttaagagactgcaggaccggacgtgccatttgaaagaatcccacaagaccaaatatcgagaaatttgtgggtgtacacgtcgaaaaatttatagattttagaacaagtcaaagaccccaacactgaaaattgacacacattgaccgaaaggtcccaaatggaggttaaaggggacaatagaagtatctttttggactggcagcactttggctcaaaacggatcacaaatggctttaagcccggtggcactttggactcacaacgaacacaagtggctttcataccatgttagaatttgggataagttgaatgagattccatcttaaaactaattggcaatgaaaggggtagtccattcatcttatatatgtcaatttatttccacacattagcaatgtaagactaactcaaataacgtttgacaaagtttgacagaaggaccaatttacaatactgtgaataattcgtggaccattttcaacgtgttaaaaaatttaagagcacaataatacataggtcataatttgaggggtaaaaattct

SEQ ID NO: 173787 - DNA, 510 bp, Cannabis sativa
aaatttacaattttactgccacgcagaatttttttctaaaaatactatctttttatataacaattgtaaacaacaaaaacagaacatttaaataacagttgaacaactaaaaaacaaccgtagaacaacaatgaaaacttaatacagtacactgtataaagcttacacagtatttttgaaaaaaattcaaccccacaataaaaaaaaagttaaaaatttcaatatgtaatgtaaaaacccctaataaaatatgtactactatagtcgacttatatatagtattacctagctatagtgtttaaatatatttaccatcttgatacatatttctatttttttatcttctcattgtttaagaatttgtaatattgtgctatgtttctaattatttttatttataatgaatgggaaattttactatttgaccctaataaaatactccatatcaaaatttattccctccactaatttttacaaaacaattccactattactcatttctacccaaaa

SEQ ID NO: 173788 - DNA, 818 bp, Cannabis sativa
cgagtccaatttttgattcggttttgggttcagttttcgtccttgttcgtgtctaggttcctgtcctagtttgggttcgaggtatgttttgggtccgggtctggagccaacgtcgaattcccaggtccaggtcagatcctggttcgggttcggtctcgaatttttatttgtgtttgggttctcggacgtaggtccgtggtctaggtcccctatctatgtctggttcctaggtcctagtctgggttaaggttcgggtttgggtccccagtcttggtttgagtccaagtcctagtccgggtttttgtccaggtttcggtcccattcttcggccgggttcgggtttcggtccccagtcttggtttgagtccaggtgctagtctgggtttttgtccaggttttgatccaagtcttcggccgggctcaggttcggttccttgttaaggtctggatgctcgtttgggtcccagtgagggttaaggaccacgccaggtccatgtccccatccaggtttgggtcccaggtctcaggtcccgatcctagtcaatgtctcggtccaggttcttgtatgagtttgggttatggtttgggttcggttttggtctcaggtttgggtcctaatcacagttccaattctaattcttggtcatgcatcgactccgagtcagggtcagagtccaggttggggttggggtccgagtcttagtcttagtcggggtacggttttttcgaatcccggactgggtctaactctgagtaaaggtcccatgatcgggtctagatcttcgtctgggtctgggtccgagtctaggtccaggtcc

SEQ ID NO: 173789 - DNA, 626 bp, Cannabis sativa
  modified_base (579)..(580): a, c, t, g, unknown or other
caaaaaattcattcaaagtttgaatctctaaattccgggctaacggcgacaaaggcgcagcgccgcttgggggttgaggtcgtcggcacctgggggttcgaatggtctagcatgtgggatcggacggtgactggagaatggtcgccgaaaagtggtggtggtggtggttatggcttctttgaagctttgaagagagaaaaagagaaagggaaagaaaaagagagaaagatagagtgagtactgatgggagaaatgttataatgatatatttattttattatttttttcctttttgactcggtcaaaaccgagtcgttacataacttttcaaacttaaattttagtggtagaacattctaaacactgttagtaaatttagcacagttaactgacattaataggagtttggtgcggggtgcggtttttgacaatttttttaaaccaacccgcacatgcagtttttctaatttctcaaactgcacccgcaccgcgaaactaaaaaactgcaagaacctcactgtaaaaattagtgcggtgcggtttttgcggttttcacggtttggactatcaccaaataannaaactatcacaaatacaataaagcttgagcaacacttgtcaaaaat

SEQ ID NO: 173790 - DNA, 793 bp, Cannabis sativa
  modified_base (350)..(354): a, c, t, g, unknown or other
tcctaaaatatgactaaacataaaaaaagattcaaaacacaccccaaggggttcgagaacatgcatggccgagagctgccacttggccgtgtcagtgctctggtgcaagtacaatgcaaactaccttacagtaaaacgagcatagctctctcaatttttatccaaatgacctggttcaacttgcattgcaaatatattttcaatgacctagttcaactacaaaaaaagccacctttagagataatattttagtcacaacataatttttttgtgactaaatgtcactgttagtcagaacaaagaattacttgtgactaaaatatagtatttagataaaagttgtcactaannnnnttttagtcacaataagtattgtgaataaaaatacatttagtcacaacaaattgtgatttttgtgactaaaacttttagccacaggctttttaatcacaacgtaagaacgataatatataattagttacagcttttttactttcagtcacaagttttgttgtgactaaaagtaaaaaattttgtagtatggctcatagtcatagctcaattataaagttatcgtgtctaaaattggctcacaagacaagctagtacactttactcagaattgagtagtgtcattaagcgtgtgaggttggtgaacaatgccatagcccatgtggcattatgtgtgaacaatggcaccccaaaatacatgtttccaacacttctcaccaatgttgtgacagtcagtagtcttgtgattcgtaaggggaaatactgggtaagctgtacaatc

SEQ ID NO: 173791 - DNA, 919 bp, Cannabis sativa
aaatctattatgtttactttttttatcaattattctactgattttacccctatgacttcacaataatctccattcttctctaattaaaattttatctgaactttcccacaaacttacacatctatctccaaagaacacaaatctattatgtttgaaattatgtcttagttatgtgagggtataaaaataatttgggtacaatacttataaaaagaggtatatttaaattaaattttatttgaaggtaaatttaattaatgtatataaaaaggtatttttcaacttcttccaaactaaaatgattctaataaaccataatgttactattgattccattttcatgctcatgtattctttcaaatgttagcaataaaccataattttaacacattttgaaaaataccattacatatattatatattttaagggaatttctataaatatccaataagaaacattgaaagaattatcacacaactaatctttgactaaaaaataatcgattgttttgtaaaaaaattattttttatgcaattttttattagcaaaataatttataaatttttattagtaagataatcttgtagcaaaaacgatcataaattatcactacaaaaaatattacttttagttacaacaagatccgtgactaattataaattattattattgtgttgtgactaaaaaatccctaactaaaaatattagtcacaaaaattataatttattatgactaaatgtatttttagtcacaatatttgttgtgattaaaactaaattagtgacaacttgcaactaacataatgtaaccatcatggtcacataaaataaattaagtaagactattttacaaattttaatatttaacgttgaaccacttggggctagctcaagtggccataggtgggtgtgtgagtg

SEQ ID NO: 173792 - DNA, 643 bp, Cannabis sativa
taggtatgtatttgattatattaatatctaattttttttatgtgaaataaggttttcaacccaacccaacccgtaatatttgggttgggtggggttgtgtaataaaaataattttgggttgggtggggttgtgtaataaaaataatgtgaatgggttgaaattttataggctgatctagttgggttgggttgctaaaatagcctcaacccgttctatgggcaatttagtcttttgtatttaatcaatttaatacgtaaaaatctaaagttttagttgtaaattagggtttagggtttcctatataaaggccttaactctaacctagaaaacttaagtctaattctagcctctaaatcactctaagtctgaaacccctaatctctcttctctccctctcttgtacacgcccaatagggccttctctcttcctctctcacatgcctctaaggctataccattctctcaatagagactttcctacttgatccatgctttgtaatcttacagagagctatatcaaatctcatctatagtgatctaaataatatctctaggtatcaatacaatcaaaagaggagtaagtcattacccgctaactaagggaatcgaacctctataaaaatgcgtgccttatttacttta

SEQ ID NO: 173793 - DNA, 568 bp, Cannabis sativa
  modified_base (487)..(487): a, c, t, g, unknown or other
ttaatttaatttttttaatattgcctgcttatataatttttttaaaatataaatgtcgtaaaaagaattcaatatctatgccttgatctaaacaaacaaattaactacttgagattagctcaagtggccatagtagagtgcgtgtgtgttggaggttctaaattagagtctcaagttatgaattgtaatatataaatgttaaaataaaaaaaaaaatctaaacatacaaaatttttttttttttttatagaacaataaatttcatcgacactagaaccatatgacgagagtattcaggagaaggtccccctttacccctttgacaaataccaacacaattataacattgcctcctatttaatattaaaaaaagcaaaagcattagcaaaacaagctaataaaccaataagcagtcttaaaaaaaaagctaattaggatttttgcctcctgaacttaaacgtgtacaaaatcatgccccctgaacttntaaggtcgttaaaaatgccccctgaactattgaaactgttggatttaagaacttttttctaattccattcaattttattat

SEQ ID NO: 173794 - DNA, 667 bp, Cannabis sativa
gcagaagctttaacttttaaaaatactgccatccaatgtcgtttattgggttttcggaatatgatttgtgaatctaattatttgaatatggttttgaagtttaataaccatgtttttttggctacttctttgggtttagtcatagtagattttagacataatttttttgaatttcactatgctagtctctcttttggctaaatatgtcttgtctgaagttattagcaaggtttggttatgattcttgtattcatgatctcattttacatgagatgaattaatttaattagtatcccctttctttttatgttcattgcttgaaagatgatctttggagttcttcttctaaaaataatgtgatgaagcatttactatttaattacatggatttttttttgaaagaattacataaatattttaataatgtatagagcagatatatatatatatatgagtattaattatcctatttagtggtaagagtaaaaatgtaaataaaaactattaaatttacatcctacaaaattttaactatacctcaatactaaatttactacatttatgtaattaaaacattactttttataattgcaccccatttgatttacaaaacgggtatgtttttggctaattaggatttttaccccctgaactttaacatgtacca

SEQ ID NO: 173795 - DNA, 684 bp, Cannabis sativa
aaaatattaaacgggttctcatcgtggcagaaagtactatcctcatccccgccccgttccacatttagatggggaatttttctcccattaggggtgggtcctcgcaaggtctcattcccataggaaaaatgtgcatttctagttttaattcattaatttctaaaatatattacaaaaattctactttatctattttacattatatttttactttagagcatctccaatagagatataaattagtgatctattactaaaatatagctcatcttgtaaaaaatttactcagatagtgtgtcaaaaattaatctaaatttaaatcacaatatgacatgatgcagaatttatatcacaataagtacattacttttatatttacttttagaacaattagtgaatttgcccctaacttttatcactagtattagtttatctgctcacttttgacataatattacagtattactttgaccttatgtggaaaaatgagtattgtttcatccctactgttaacattattaaaattaaacttcaaactaacatttattatgaacataagtcttttactatagttattatcttaaccattttgtaaacttataaccaaaagaaaattgagattactgttataaaataatataaagtagataagaagaaagaagaagaagatgaagagagaaagag

SEQ ID NO: 173796 - DNA, 558 bp, Cannabis sativa
gtaaaataaatttccaacagaaatcattgccttctgtgagaagactaaaaaggaggaagaggatgccgaggcagcaacagaagaagaactatccaagtctcctatgtaggcttggtttttattaatttttactttatttaggcaaatggccttaaggccgagacaatggtttgcctcttgtggcacttttgtaaagacaactttgcaaggttggaaggccaactttgcttttattttatctttattgaatgcttcatactttaataattgaacttaatatatgtttgtttgcttgcattttcagtcacaacttaaacaactacattttgatcaagtgtaaaatactttaggaattcccattgctcatatttttctttgatattatttaactagttagtgatctactatgtgtgtgagcagttattatctactattcttttgatctgctagcagttttcaattctgctttgcacaaaacatttataatctgtttttaagcaaacttgaatatactgttaatgatttatcactttgtatatttttgattgcttgtatgaa

SEQ ID NO: 173797 - DNA, 650 bp, Cannabis sativa
gacttcgtggttcagagaataattatcttaagttttttggatctcgcagtgtatttcaaccacaactcttaatgtttgtctgaatgggggtcaggtggggaaaatccaaccctcttgtggacttcgtcaaggagaccccctatccccttacttgttcatctgggctgctgaagttctctcaagactgatttcgaacaccctggaccagggggctatcaaaggaattaaactcagcaggggcggtccggtcttatctcatatcttcttcgcggatgacttaatactggtgggcagagctaacttatctgaggcagagggtttctggagctgcttggaaaagttttgttcttggtctggccaacaggttaacaagctcaagacgacaattttctttagtaataacactccaatggacatacgtcgtcatatcaagcaagtgctggggattgatcatcctgaaggatgcgtaaagtatttgggtctccctcttttcagatcaaggcaaaaggatgctgatttcaattttatccttgacaaccttacggctaagcttcagggctggaaggcgaaaactttgtctaaggcagggcgggctactcttataaaatctgtggggttgtctctgcctatgtatgccatgcaaaccacaa

SEQ ID NO: 173798 - DNA, 597 bp, Cannabis sativa
tatagtgatggtcttactttttgatctgatacgaaactagcatgaatttggaaagcacaaataaataggatttagacataacatgatacgatatcacaaattagtacaatacaattcgaaaaatatgttcttaagtacgacacgacacaagaagctaaaaacatgcgtaagtacaaataaactaacccaaaaaatataacacgcaataaacttgaaaaatacattacgacatatgaacaaacctaatagtttataaataataataggatgtgaattatatcaatattatatataagttaaaataataataaaacttaaatataatcatgaatattataattctataattaaaacttctataaaaaaaactaagattgtaaattaatttatatatagggtatgatatagaaatttaagtattgatagttgtaatgatactatcaataattttttttatataattatctataaaatattgttaaaaagttatataaatataactaaagctataaaatatatatatgctatagtaattgtaaaaaatataaaaagtaaagtacgaatttaagctcagatatgaaaacgagctggcctatt

SEQ ID NO: 173799 - DNA, 650 bp, Cannabis sativa
ttttgttcttcaaacactattgggcatctattgagaatgacttctgcgaagcggttttggatttcttccactctggacgtatgcacaaaggggtcaatgctaccaacatagtccttatccctaaggttcagaaccctaagagaccgagtcagtatcgacctatctcactctgcaatgtggtttataaggtaatatccaagattattgctaacagaatcaagccagtgttacctagactcatctgccctactcaggccgcctttgtgcctggaaggaatattcaagataataatgtgattgcccaggaaattatccactcgtttaataggaagagaggaagagaaggcctgtttgctattaagattgacctcatgaaagcttatgataagatgagttggcgatttattgagcatgttattgatagctttaaggtgccagtggaatttcggaattgggtttgccagtgtatttctaccaccaccctcaacatttgcattaatggcggcccctttggaaagattatcccctcctgtggtcttcgccaagggaaccccctttccccctacctttttatttgggcggcggacatcttgtctaggcttctggaagatgcccaagctaagaattctattagtggtatcaggctgagt

SEQ ID NO: 173800 - DNA, 909 bp, Cannabis sativa
gtacttggaagagaggagaattaatgacctcgtgaagaagcatttagaattcatcagctatccaatttacctttggactaagaagaccaccgagaaggagattagtgatgatgagggtgatattgaggaagttgacgaagagaaagaaaaggattcgaattaaaagaagaagaaagttaaggaggttagccatgagtggcaactcatcaataagcaaaaaccaatttagttgagaaagcctgagggaatcactaaggatgagtaagaaatttgaagcaccacattgcaccaatcacattaataataaagagatgaaagagaaaacttgcttggatgatagaaaacttaagaggcaaggatcatcactggcaggtgtgatattatttgtatttgctttttcttcttcctcttcacaatttatattttagaaacatgtttatgtatgtttatattttaattgttatattaaatcattagaactatcatattagaatcaatatctacatttataacaatattattttaattactttaatttacataaaaataactccacacaataataaaaattagttttcttgaataaatcacttcataaaaacaattcaattagactatgattataaattaaattatataattatttattaaattattctcttttttgaaagagagaggacatcgatgtgcaaaattatcagttttgtatgcaattaaggtgaacaggtagccattcttcaaagaacaaccctacccgaatcgacttgagagcaaaatctctttcttaaactaagggtgcgcttggaaagccacaatgtaattggatttgtgtgtaatttgaggtaattacacaatttggcatgtttgtctgaccatgtaattacactgtaactgtgtaattagaagtaa

SEQ ID NO: 173801 - DNA, 557 bp, Cannabis sativa
  modified_base (355)..(355): a, c, t, g, unknown or other
atattaattatgtgcatacatacaatattaattacgttttttcatatatttatttatcatctttgtttcatatatttataagactaattaggatttacgttggaactttaactaaataatgacacttgaacttttttggtcattaataattctccccgaactattgagattattagatttaaagatttttatctaattttatttaattttaccctctcagtggttatttatgtaccaaatcatgctcaccacactttgatatctactaaatcatatccctcgaactttgacatgtactaaattatacccctgaactttcattcatattagacttttttttttactaaaattgganaaaagtccttaaattcaacaatctaaatagttcagggggtatttttaacgatcttaaaaatttagggacataatttagtacatgtcaaagttcaaggggcccgtaaaaatcataacattaaaaattatatttaaattaaaatttatttaaaaataaatttagttaatatataaaaaatatatatatattcttcgacttcttt

SEQ ID NO: 173802 - DNA, 821 bp, Cannabis sativa
caattgaacccaaatcggcacagttcgaatatcctccttcctaaaattcacattcggatcccaagccttcatgatgacaggccttttgttaaagaatgtataccccctgtaaggacattatctctaatctcaattgaagtaaatctaatcagaaatattccaaaagaaagcataccaaccttatcaattttgtcttgccaaattctccttgcaaatccatcaatgactgataaagggggattggcacctaacacatagcatacaatcgatgaattccagtaggctacctcttcttcaatgtcctcttgggttattttgattcgtgcagcaggctttgagttgtcgaaactcgcttccaggttcctcactacgcctccagatcgaagaacagggggggtcgtttttattccttgctgaacagcagtcgaacatctgtgattcctttccaaaaacatggaaaaatccgttctgatctcctcctgcctttgaatttccttcaatgatgacctaggtgatagaggttgaaaactggaatttgatcgatcatctccgtgcaaattcctttccagatctgtttcctcctccgaaaactctagcggttctacacccaaaatttcctccattgatcgtgttttctttgcatctgcagtagaatttgggcctttcttcttcttcttcttccttaaaaccagagatttagcttgcactttttcccttgttttcgccatggcaccagctctagagagctgcaaaagcaaaagtttccattatttattattcaatatactaattattatataaaacataacttaaaaaattat

SEQ ID NO: 173803 - DNA, 658 bp, Cannabis sativa
ttcatattttatcttagagtttttttttttttttgtaatatgtttttttcaaggttttttattcaatctattttggaatttttttttttacccttgtcttttctagattgtgattgttttcatataattttgttatttttttgttcaattcgatttttttgattgttttctgttttttaggtttttctgcttttactttgtacatttgttgttaatttcatgttacaggttccatttccatttccattttttttaaaattaatgtatatcctctgttattgtgtgtccttttatatatatattgttgttttcttgatttcataatttgtttattttttttgtgttagttattttttttttatttatgcattgtttatttatgtttatttttatagttgttgtagtttatatgtttaattgattttactattttgtttttttagttacgggataataaatttggtaatgaagattttcataccacacgggtgacttctacttgctcgttcaaagtcattgaaactatcatttccattttgacccccaaacagaaggaattgtttgggcaaactgtttttggagtctttttaagaactccttcttatgttatgcaacaccagttgttccatagtttgtttttgagggaggttgtccagcc

SEQ ID NO: 173804 - DNA, 517 bp, Cannabis sativa
aaatgttattcaaaataatataatggaaggtaataatccaatcctacctttttttttaaagtatgaacattactctcctcaagggtagttatattactaggggaataacattccaagactaaccctccaaacaaacaaggtaatgtttcacattaccattcccttactagtattaacctatttcaaacagcccttttgtgtccaaactctactatttttaagattttagtatcccattagagaagtcctgatacttgatgtattatagatttgcgctcaaacaaaaaatttgtttacacattagtacaggttgttcaatttaatatctaattttacatattttaataactataaaaaatcgcaaccactcataaagtgccaaagtgccacttataagtacatgacaatgctattttagttatacgtttgattacttcattttcctaatgcaaaaacaaaaaatcatgagaataggaactgttgttaaaaaattaaaaataaataaataaaaacttta

SEQ ID NO: 173805 - DNA, 931 bp, Cannabis sativa
  modified_base (486)..(490): a, c, t, g, unknown or other
  modified_base (728)..(744): a, c, t, g, unknown or other
gaagagagaaaaggttaagaagtgagtagaaaggttggccaaatgaggtttttatatctgaaaaatatttataaataatattaattaaattaggttacaccaataaagtgatgggtttaggcatggattttgttgcgcctatttagcctttggctttttcttttttttagttaaataattaaaaattaatatttttatttttatttcattttttaataaaagaggaaaaaataaaaacagttggctttttccccaagtatgtcactgttcaccgacgttggagacacgagtggttttatactcatgattttactattttgccccttatcaagtatttactgtgataaaatattaattagattttaggcgatttttgcccttgaactttgacatgtactaaatattgccccctgaacttttaaggtcgttataaatgcccataaactattgagtgagattgttaggtttaaggacttttgtctaatnnnnntcaattttactatttcaatgattgcttatgtactaaatcatgctccctagactttgatatctaccaaatcatgcctatcgaactttgacatgtactaaattatgtcccctgaattttcatgcatgttagacttttttactaaaattgaaaaaaagtccttaaatccaacaatctctatagttcagggagcatttttaatgatcttaaaagttcagaggtatgatttggtacatgtcannnnnnnnnnnnnnnnnatcctaattagcctaaattttattatcactacaaaaattataaaaacctctttaattaattttaaataagtaaaaattagaataaatatatgtatttttttaatgaaataaaaattattgaaattaggaaaaagaaaatgaaaatgatttaaagaaagttttttttattaatgggtgcgtatataaa

SEQ ID NO: 173806 - DNA, 850 bp, Cannabis sativa
  modified_base (216)..(218): a, c, t, g, unknown or other
tatactatcttgactataaatttagattctgattcggatttaggtctcagtttgtttctgttggaacttaatctaggtcccagtttctgttgaaatttattttaccaggatctagatttattaacatgtatattagattagcactctaaatataaattttctaaaataatgaagtaaacacacataaagtttagaaaaccttacattaatggcagnnnaattaaatgactcattccgctcacatctctaacccttgttcctttctgttgcagagtaataactagatttgagcatggatctccttctctccttcgggttggttaccaccgtctttcgcactatgattgagtacttgacttgctatgtatgggtatagtactgtatcactacgactcgaattgatgaagtacaatgaataaggtgcgaaatcactatagaaaatgagtctctcatctactagttgacagagaataaaaactaagtttaatttggttgaagtgagttgatgagaatgagagcatcatgttccttttatagtatttaaactagagtttatgatttaattatatggattaaaaatgaataaaataatggacaaaattcactggtcggccacactaatgggtctcactagttacaatgttgtcattttatttcaaccatttatccttctttcaataatactatattttccaatttaaacctataaatatcaaaactattcatttaatacttaccattctacccttcaatgtattttattcgtaaaatacttagttacacataaatgatatttcaataaactaatataattactgaaatgaggcctcaatcatttatctttattcag

SEQ ID NO: 173807 - DNA, 533 bp, Cannabis sativa
catttaattggcattttatttaattaaacttttcccataccataccgttttatcaggatttctattgcctatttattttacaaaaccattcccttaccattttctcaagttctctaactaaactctttgttgctctaccttcatctctttacacacggcgaattgcgatgtaggcattggaatcatcacctggtctaataatctttttcttttttttttttattttagatttttattttatgcacgtttatccaaaaaattaactttagaattgaaaaaaaaaggaactatttctaaatgagagatattctactcaatccatctatataaaaggcgtttcttctatgagtatgtatatttttctgttgcatacaattatctatttcttttttttttttttagattttctcttaattggattacaaatcatggtttaaattttattaatctctcttccttccttttcctggcttttgtgttaatttaattattaaatgtgatttcaattaaataaaaataagtctccatgaatg

SEQ ID NO: 173808 - DNA, 508 bp, Cannabis sativa
atcaaagagtttattgaaaattgttaagaattaaaactttatttaattacttatatactaaaataatgacatatatataacagagatcccatttacaaaaaaatttacaaatgttttatagtgcataatacaaaagttatcgcctagcgactagacaatatacaaccagctgccccaaagactgtacgctccaagcctaaccgtctcgacatgtaaaatcttcattcgctcgctctcatgactgcttaaccttagccttgtccatacctacacatgcaaaatatatttgtgagttgacagactcagtaagaaaagcataataaaaaacataactataacccagattataatcgggtgcccatacacccaaccattaacctatccccgtgtccgacactgtattgagtaaagaacattcaaagtactattgaccataatatcagcctatactcggttcgctagtcatactgatgtgatactgtcaaatagtacagtactattgaccata

SEQ ID NO: 173809 - DNA, 675 bp, Cannabis sativa
gaacaattatattgtatacagagaacaatacccgacaatatagtcattgtcatgttccacattttcaagttcactcaacaactccatatatatatatacaataaatatatgatctttattcttcatcttcatcttcttccttcagctaagttctgtcatttataatacatatatataggtaaatcttgtcttttctttttttcttttttattatgaaagaaaataaaagggaaacaagatctgtaaagatatggtttttatttcttctgggcatttcagtttctagctaatattttttttttttgaatatagaaaatctcaaacacaaaaaaaattaaaagaattccatactatggaaaattttaactcagaaaatcagcatagataaaacttagcttggttctaacctcttcgtagctggaacggatttatgggcggaaatgtttcgtggtcgtcctcatggccggagagggaacaaatcggggttgggcgacgcctccgatgagatgagaatgagattggttctgtatactccgacgagatgagaatgagattggttttgtatatggggtgatgggtttttttagagctgatgggttttttagggcagctgggttttgtttatgttaagagaaaaaaaaaaaagagtagaggcgggagatgaaaagtgaagag

SEQ ID NO: 173810 - DNA, 525 bp, Cannabis sativa
  modified_base (233)..(245): a, c, t, g, unknown or other
  modified_base (317)..(320): a, c, t, g, unknown or other
ttaaatatacttaaattaggatatatttattaattatttatacttaaatatacttaaattaggatatttttcttaaaactcaaattagaattaataattaagttgattttattcaagatacttacttatttgtttttatttcgtgaaatttaattaaattagaaaatacatttaagttgaaaattaatttgttaattgattttggacaaacttaaattagaatattttcttannnnnnnnnnnnnaattaataattaagttgaattttattctagatacttaattatatatattttaatgtatttaattaaatagannnntatatttaagttgaaattttttttaatttcagactaacttaaattaaaataatttttaaagtatattttattttatttttataatcatttttcataagatttcgaattgcattattttaatgtagatatttcgaaaattttcaattttaaaaattagattaaagttgaaaattaatttgttaattaattttagatcaacttcaat

SEQ ID NO: 173811 - DNA, 799 bp, Cannabis sativa
tcttctcattagtatgaataattctaaacattacaacaattctaaatggcataaccattcaatttatataaagaatttaaatataaaagttaataatatacacaatagtttagaacaaagtaatatcaacaacacagaagtgataattttatggaaggcaaacaatctaaaggtcagttaattttatatcatgcttatgtataaaatgaagagaaattttactatattatcacaaaattgaaaaagtaatattatacatttaaaaaaaaaaaattatataagacgaagcattaactattaacatcacaacaacatcaccattaaccctaatattatctccattacagctcattgaacccaccaccgaacactaacgacaccaccatcaccactatcgaccattcatagaaactatatacaattacaaccctaaccttgtgcgcctgcatgaagaagaattagaaagaaaattttcttagtcctagaaaataataggtcctgctgtgagaagagaggagaagaagagtttgaaattttttaattatttcagaaaaaattgtgactaccataagagatgttagagttagaagggaaattattttttatattagggttttaatttaagcattctctcttcttttattgggctcaattttacttaatagactagtctttgcttttactattttttattgtacatacataatacaaagtaaaattcaaaaaatacgacaaaatgtattttatacaaatttctgtatatttttatattttatgaattcaattttattatattaaa

SEQ ID NO: 173812 - DNA, 552 bp, Cannabis sativa
cctaccataaaattttaaaaaagatttttgtgaaaaacaaaaagaaataaaagaaaatctaaaaaaaaaaaatattaaaagagggttgttattaaatactagaataggtttgaatgtttgatgagatgaatatatttttaatattttttaattgatgtttaatgttgaaatgaaaaaaattatcaccaaagaatatcataccatagtattttttatattttttttattattatttatcataaagtaaaaaaatattatttatttaataatttttaaagaaacctattattagattattttagaataaaaaatgtcaaaaataatgtgaaagaagaataaaataaaataataaatttttaaatgataaaattttttgatactcttaaaaaaaatactactattggaaatactcaaatagtttttaatatttgttaaatatatcacttttcaattagctaaaaatacttattacaaaacatttctcttattaaaaggagttacctagtatacaataataataataataataataataataatataaaaggaatt

SEQ ID NO: 173813 - DNA, 687 bp, Cannabis sativa
tattaaaacaatatgttaaatctataagcttatctataatcttattaaaacaatatgttaaatctgattttttatttattgatactttgtatatctctattttgaggtactatattctcacaattctttttgtttataattatatagtaagatttattcaattttatcaattatttttgtagatctctattttaatttaaccttttattaccttatattatttgacaataactcttctttctctttttgttttaaatcacaaattatataataaatttttttataaatttgtcaattttttttcgagatctctattctcggtgaaatttttttcaatttttaatatttgttaatctctatttttattttggtgtagtattttattatcctatatcatttgataatatcacttatttctctttcttttgtagaccacaaattatatgatgagtttttttttttttacagatttgtccaaaaaaaaaaaaaaaacaaaatctttattcttgatgaggattttttaatttttaatctttttttatttttattttagttttggttatattttttgataatattcttttttttctttgttagttcacaaattatatgatgaggcaagtaagtaatttataacaaaatcatccacttatgtataaaaagttactagttaattaactcaagtat

SEQ ID NO: 173814 - DNA, 1029 bp, Cannabis sativa
  modified_base (823)..(823): a, c, t, g, unknown or other
tacaatcattcttttactctagtcgttgcagctgtggacaattcctcttcatgtgacccaccacccaacagtggaaacaggccctggcccgacactcgccctggtggcgccttttacatctaggacattgaggaaaagtctgccagtttttgtttccaccaggaagaaaaccttggttaccctggaaccttttatttgggcctgtagctgataattcactagatcttttcttgcgatcaccggaatcagtacccctaccagaaccagcacttgatgtttgcttccatgaatcccttctagcaatatttttctttcgtatctgagcttctgcaccctcaaaaactagggccggttcaactgtctgagcataagttcgagcaacccccggttgtttagaagcaataatcacatctcgtgcaatatgttcacccaaccctcgaatgaactatgctttcctagcagctttagtagccacctcatctgaagcaaactttgccaatcgatcaaatttagtggcatactctgtcacagtcatgcttccctgagtcaaacgtatgaactcttatgcctttgccgcccgaatagactcataatacttctcataaaacaaggcctgtaaggcttcccatgtcatgttattcagaccgtgaccctaagatacaatctcccacctaatacgggcatcatctcgcagcatataagtagcacacctgacccggtcattatcttcaacccgcataaaattaaaaatggatgttatcatactcatccattgctccgccttgagtcgatcagcataaccctcaaacactggcgggttctncttctggaaccgctcatacaaaggttccaaacggttccctatatccggtggcactaccagaggtgccagagtatgagggttagggttttgagtaggctgaactcactgctctttcaattctctgatttgctcaccctgctgccgaatagtctcttgcattgcagcatataactcttcccagtttggtggtggtggagggttctcgc

SEQ ID NO: 173815 - DNA, 689 bp, Cannabis sativa
aaaaataatgcagtttagactttagagaaaaaacgtataactgaagttaaatacattgattacaaatccctttccacatattagttttatttatgataataacagcaaacagatagtgaagataagataagataaccatttgaaaaaaaaaaaatgaaaggtgatcctaatcctaggctttttaggtgtatcttgatagttggatgaatttaaaaatcatgaaaatgaaaactgtgtctaaaacattaaaggtaagctgtactgatcatcctttatcacaaacggctaaaatagttgcatgacttgtctttttgaagctgtgtttgtgttaggccttaggatattaaataatgatggtaattgggtcattgtaatgggatattgaagtagtatatataagagtgtattggaaagggttgggagagagaatgatttagttaatgagcagtagctcttgggagagcactgggtctctcgaatacccagcaatactgtactctttaagttttgctatcaatatatcagctcattatttcctataattactactgttaatactaattgataagaaattcctatcaagtggtatcagagcaatcgatttatggggcaaggtatgatggaaattcgaacggaacttcatcaggcttctaatcaattggagctgatgaaatcatcatttcagatga

SEQ ID NO: 173816 - DNA, 715 bp, Cannabis sativa
ggaatatgtgcacagggcgccttcgacggaagagttcagctacttctacgatataaagagtgtaggtctccacaatagcttttactgttttagaaggtgggctacttctgagattaatggagtggaagacacggtttccaacatgggagattggaaatcgaaattgttttatgtgtttaaggttttagggattaggactgactttaaccgtcgacctagtatgtcgcgtatttctttacttagtcaatttttgatttatcttgtgattttaggctaactggctctttttattgtcgtagatagaccaactcgacctacctttgacgtgactagcagagagactggtgaggttctcggaagccttcccgtacaagatcgtgactggaaattactgtcgacgacttcaaagctgcgagaacataagttgattctagagaacgcgagccttcagagggatccagtttataaggagccatctgagaaacaacaagagcggatagacaaacacctctccaagcagacctctcgaccaacctcaggtaacatatcgcatgttataaattggtgccttagaatttatttatacttatttttatttgtcctcgcagagatgacttttctgaagtctgcaccggtcctcaaccgcaagccaaaatctggaacagcgacgacttctcacttcgttcctcagaagaggaagagcgacgtggtggtc

SEQ ID NO: 173817 - DNA, 1018 bp, Cannabis sativa
tggtggactacccaaaatacccctccgtacactaacagtcattctctccatttctctctttactctcttcactctcatctaatttttttttttccattctcaatagcaaattcacactaatattttacattgttgcctgtccaagctactagaaattactacaactaaataaaattagtgtgatactctattctttgaggcatcgaacaaagttgtgaaacaattaatcggtaagtaattttttttttgttattggttctttaatttagtttagaatattgttttgatgctcgattcgtgggttgttgctattttgtgtgttgaaacggttattgtacatgaatactgcatttcttctagtttctgcaatttttttcgtctgctttaatagcgctcgataggggcttgatgctagtctaatataatatttggttccaatgatagggatgatggcctgatggacccgatagggggcccaattcttgtccgatgtcatatggaccagattgtcaggtctgatggatccgatgggcccaatgtcgggcccgatactagtttgatagtcaacttagacctaaggccaagaatgaatggcctaatagtgtgcccaatggggtccaatgcttgatagatttatggcattttgaggatttttttttataacttttccattagatttttgtgggaccaatgaggtctgatggtgttcgagtccgatggttgatagatttttggaattttgaggatttttacaacttttctattagatttttattctaaaattttaatagtatttttattaatgtttgtgacaagttcaactattttttgcgttcgttatgtatattgttgtttgaaaacttgagggtagagattgagtttataaccgagccaaaattatgacatttgagatatatacgaatgtaacctactcacttttggttgatattttgtatgaagaactcgaagttgacaaagtgtagtatgacttaaaattgaaagtgaattacaagtacat

SEQ ID NO: 173818 - DNA, 594 bp, Cannabis sativa
ataataataataattaaagttttgagtgttctgcatgattaaatttaagtagttgaagagtctcgtatcaaattaaataaaaatttaaaactaggtgtgcaagttagaatatatgtgatgtgagtaggggtgttcatccaattcaatcagtattattttatttatagtgcattcgatttacactaagtgtggatttcattttttagatctaattcaatccgcacaatagctcaaatccaatccaatctgcaaaagtacagattaaatcggttattttgaattagttactttttaatattaaattatttaatatatataaaaatatatattttttcaccgtaataaaataaaataaattataattattttatgtttctaacaacacattaaaataaataaaataataaattcaaaggtagaaaaaaattgtatgtataaaaaatgtttatttttattttaaattgtatgtagaaaaaaaactatatataagaataaaaaaatacatttcatctattaaattttgaaatataattgtattatatatattagatttttaaattactattttctttacattaaaatattatttatata

SEQ ID NO: 173819 - DNA, 748 bp, Cannabis sativa
acagttcaactaggaagaaggaatatacgaatagtgtgcaacaataacaacacccgtggaagaggtggcacaagcagtaaagttggctttggaaggtgaatgcagtggtcgtggtagaagaaagggtttgcaattgctgaagactttgtacgataacaccaagaataatcatcataactcccccaccaccaccactactgctctctcatgagtttaattaaaatttacattttctttaataattttaaaattaatgtcttcttaatttttctttttctttcttaatttttctttttaagttaaaatgagttttttattgatggaagtgtggagtttcatgttgaaaaattacaattaatgatgcataataaaattaactttaactttaaacaatcaaataattatgataagattaacaaattacaaaacactaattgaagaaaaacagagatgaaagagtatgaaaaatcttaaaaatgattaaagcagtaaaacgataaaaacaacaccccaagatatatacaggttcagatagattgatgtgaaatatggctctactccaattttggaacactactaaatcttctttattgattgagcaagaataaattgtctgttggattctcttaaagtgtttacactcttacctaagaattttcttcatttacaagagattcttcatgcaaaacccaaattcaatctctctcttttctcagtaccttcatctctctacctctcaatcttctct

SEQ ID NO: 173820 - DNA, 646 bp, Cannabis sativa
accagaaattgtgccattatagttttgcgtatcaaagcttgcccaaaagtgaggggtaggcgaatttgccttagaggtgcgactccttgatcggaaaaaccatacacaggcaggagacatggggttagatctttgagctggagccccatcttttcatagacagtcttgaataagatgttggaagaggctccatcatctatcatggttctggccaccatcttgttcgctatctggacctccacgaccagcgggtcgttgtgcaaaaatctgatcgtcacaacatcttcgtcattgaatgtaatggcgggctctcctgaccgtgggattttaggcttccttccttctacgggcaggatcacttcttcttggtcgtgttgtgctattcgggcatacctctcccgagctttgcccaaatctcaagctatgtgtgggtctccaacgatgacctgtagatgtccatctactggtggaggtagcaagtcttggttattatcacctctctgattgttatcggccttaacatacttctgtacatgcgagttatttttccttattcccacttgagtttgttgcattcattggtgtcgtggccgtagtctccatgaaacgtacaaaacttggtcatatctctcttgctgacatcttt

SEQ ID NO: 173821 - DNA, 978 bp, Cannabis sativa
agatttaaccgcttctaggggaattccacacaaatgagcccaatttagtccagtcagcagggcaaaagtttcagcttgaaaaacagtaatactacctgtaaagaatcaaacaatagacaaacaaaacaacattattacaggcaggaaaacctactattcacaaattagagaaaaatagtaacaatactaaacactcaaataaaaccctttaacaccgatctaaaattacagtaaaacaaaaaagaaaaataaaactaaacaccccttaataaccaaagtgtaaagtcctacactttggttagtaactaacaaagttataattcgtgtacaaactgagcaaatagacacacataatccatactcctctactaagaatcctttggttagtactagtccttaatgcagtgtaattaaattgtcaaaatcctcaaacttttagaaatactattgttcactatatgaaataaaaaccttaaaattaatctacagtactaatctcgtaatggtttgtttaatgcaaccattactgtatgatttgctgacataataatggcttccacaccaaataacttagattcttttaagacagttgcatctaccagcgaagtggatccattgattgtgaaaggatccctttgagaaggagagtagttagaaaccccctcctcactcatagccaaaattttctttactagctccttagttaaatcaacagagtcacggaaacttgagatccaactaattatttgcttagggtgtttttgaggatcaccatgagtcattttatttctctccttccatattgcccatgaaataataattaatctttcaaatgaatttttctccataatctcagaagcatatcttattaattaaaagataaatcttccttcgcctcgtgaaggaaaaggtaatctaataaagtctaaattccttgagcccatggacaccaaaaaaattagggaaatttacaaaaat

SEQ ID NO: 173822 - DNA, 553 bp, Cannabis sativa
tccctatttttaaaacagttttagtaagattcttttttcttatattttgatagaaaaaaaaaatagttttttattattttgcttattaagttattttatttttagcattaaaaattatttgaatcaattattgaaattaggggtatttttatttttacattttaaaactagcactttaacttaacttgctaatagacactactttagaaattcaaaccgtaaatttaaaacaaaaaaagtatatgaggtaattctctttgaaattattaattaatttaatatttaaaattgatagatagttcacaccttctctttgggtataacccttagcgaccagtctagttttaaaaatttcgacttcacctccaacacctcttttcttcttgtagacccacttacatccaattagacatccaattacacgatagtcatcaggtgcgtctatatattcccaggctttattctttttcatgtaatccatttctgaatccatgccggttgactattgtttctattcgggacttgtcattacctgtttataggttaatggatc

SEQ ID NO: 173823 - DNA, 804 bp, Cannabis sativa
gtgacaataatataaaattgcttggttatgggatagatcgaaatcgctgttagatttccaactagcgacgtaccttattagatacgggcgatagtagtatgaaaattatcaggttatggcacagaatgaaacgttgtaggatttcctcctggcgatgtgttgggtgtaggtatgggcgttaatgacatatgagaaccgggcataggtacaggctcgtctgattaggcgatgcgttatattggtaccaagtcgtggcacgagctcacctgattaggtggtgcaatggtattatatatgatattgcattatgacacgggcttgcctgattaggcaatgcaaatatatgagtctatccatttttatgcatatggccagttatattacctattgttcatgaatgttatggtataatcattttttgataatgaaatgtataattaactatttaatgtatctttctttattacttttcttgctgagtctatgtgattcacgggtgctctatagtacatgtaagggcaaggaaatgtaagaacagccatgagatgacagtcttctccaacaatgtacatattgaccccatcggcctgcgtgccgagttgccaggagttattttggactggttgtatctattgtattttgaattgttattgtatatagtcttttgagtaaatcttttataacagggatcccggaaacacatttctattgtcgttatgatgtctatttttagtgatttatattagtcaagtttttaataatatcactttttttaatctaagtgtttatatattaactatcttt

SEQ ID NO: 173824 - DNA, 650 bp, Cannabis sativa
ttacacttctgtctaaaaacctcagttaagtgccaccgtgaattactcacgtatatacttatgtacacgtgtcaaatttttagtggtccacgtaataataattattaaaaaataattttaaatatttaaaaattaaaaataattataaaaaatatattttattttattttattcttttttttcttcttttccttcttcttattcttaagagaacttaaaaaaagccatcatcttctcatccatcctagcagcctacattgttttttatgcaattgagctacctttttattgtacagctgtttctcattttttttttgggttaaataataaaccaatttcagacaatattttcataaagtattctaaaaatcaagactcaagtatacaaatcaacaaaaggtttacgacataaaattaagaaaacaagagggggaagagagagtctatgacaaagatgtaaaactctaatagtgtgtatgtatatatttatatatgaaataattaaaatcacgaagaagagagattaaaatacttaaaattagaatcaagaattgaatctgtaaagtccttttttggcaagttagttgacaaaatatttttatcttttatggtaagattcttgtgcattcttgtgtcaagttatttatttt

SEQ ID NO: 173825 - DNA, 718 bp, Cannabis sativa
tatacataattgtctcttttttcttgatcttataacaaataataattttatatcaccatgcacgtgacaacgttactaaaacaaaataattaatatgtaatattatcatgtcaatccaatatttttctttttcttttttaattataatgtcttactcttacacttagactatatatgtttatatagaaacctgggtttttgtacgttgtcgtcaatgcttatagcagctcatcatctaaactcttagttaaattagactaattagaatttttgtctcttaaattttgatatgtatctcaaatttttttgaatttttaaggccgttaaaacctttttttcataaattattaaaatttttaaatttaaacacttttatctaattttagtaaagaaagtttaacattaatcaaaatttagagagcataatttgaacgtgatttaacagatatcaaagtttgaatagcataatttggtacatgaacaatcactaaattaataaaattgaataaaattagacaaaaattttaaatttaacaatcttaatcatttaagaaaatttttaacgaaaaaaaatttaagaatataatttaatatatataaaaattgaagataaaattctaattaactaataattttataaataaatattaaaaaataaaaataaaataatataataataaagaaaaaatatgagtttttttttttctctctttttttc

SEQ ID NO: 173826 - DNA, 584 bp, Cannabis sativa
actttatatagaatagatatagtagaaacataaagcggtgatagggtactctaaaatttctttaaaattatttttcttttctcataaataaaatataacatttgtttatattttttctttcttttaattaaatttaaaaaataataatcacttttcaaaaatatattaattaataataaaagaacaaactaataaattttctctaatgtcttaaaaatgttaaaaaatatttaaaattcgaaatgaaatctaagattaagatatatatttgggaaatactgttaggctattttcctaagttttaggtcatattttatagttattttttcttctttattattatttttttggaatagaattatgctatttttctttggttttaggtttcgatacttggaatgtataaattggacaaatttcgaaaaacagtgatctataaaatagagaaaattttaaaagaaaataaagctgaagcttcaagcctgaattagcctatcttctgattagattttagaaaaagtcaaaacataaaagttgtagatctcttttttatctttccaacgcatcttgaattagctcatttg

SEQ ID NO: 173827 - DNA, 739 bp, Cannabis sativa
attttccatatgaaagaaaatgttagatcaagttaaaaaaaatggaatttgtctaacagtgtcttccaatattgtaagttgttaaaaatataactattgaaattgttagatttgaatatttttgttcaaatttactaagggcaattccaataaagaaactcaaatttagtgttaaatcaataccaaaaaattttatttcaacactaataaatttttttctaatttcaaccacaacactaaaaattacactaaaaagtatattttttattattatattatttgattgataaattatattattatataattttttgttttttaaaaaatattatttaattattaaaaagtacaaaataaaaagaaaaaagtaaaaatatagttgtctacactgcccactattattagtgggacattgtaaactcccaccaaaataggtttacttttagtgttgggttagaggcttttgatgaaaaaattacatcatatttgagtttttaaagttccattggagatggcctaataggtgtgtattatggacgaaagttcatgagccacaatttagtttatgtcaaaattaaaattgtatgatttggtatatgttgaaattcaaggacatgttagtatatagacactcatcacgttaggcgttcgtacgacttgaaagtcgttaaatccaacaatttaaataatttaaaagaatttttaagagtctaaaaaaattcaaaaaacacgatttggt

SEQ ID NO: 173828 - DNA, 616 bp, Cannabis sativa
  modified_base (438)..(438): a, c, t, g, unknown or other
aagattgctctatttatatatatataattaaacgtagaattatatataaattttaataattttaaaaatttataagtttggtttttttataataaataaaagacacttgtataagtaaatgcgtattttttttagagtaaataccattttgaaccctatgttttataaaagttattaattactctctgttttgttaaataataaaatagaccctgtattttctaaaattgtacaaataagacattgaattgatttttttatcaaaataaatcttaataataatctgatctactgatgttatgacaaaactagttatattttctgtatctattcgtgttaaaaattgtcttaaagttagttatataaaaaaaaataaaattgttaaaaattgaagggtcctatttttaccattttggaaaatatagggtctattttgtnatttaacaaaatagaaggtccaatagctaatttttgcaaaacacgaggtcgaaaatagtatttacccgttttttttattgtctttttcttaaataaaataataaataaattatttctaggattgaagtaaatttttaattttaaaaaagaagtactttaaaaatataatttaagttat

SEQ ID NO: 173829 - DNA, 584 bp, Cannabis sativa
caatcagttacaacagaacgatattagctacttataccagtagccaataccagtaaacagctatcatacaaggaaaccaaacaacaaaataattaacttcctaactaactttctaactaaccaacagaatttaatgcccaacttgatatacacctttgaccagattattcttcaaaagttttgatacaattgctcaaagtagtaacttcagagatattagcccttacaaagaagatagtatcatccgcaaacataagttgggagacctcaggagcatttcgtgccatccggataccatggatatgtcccttgctctgaaggatcagcctagataagaccgcattgcatagaagaaaaaggtaaggggacatcgaatccccctgccggatacctttacaagggaaaaacttcttcaacggctaccattcagcaaaatggagtaagagacacttgatatgcaagacatacctttacaagggaaacacttatttattttcttttgatgggagctaaaacaaaataggctaattagtaatttttccccccaaactttgacatgtactaaatcgtgtcccctgaacttt

SEQ ID NO: 173830 - DNA, 595 bp, Cannabis sativa
ggattgattacttttgtttgattagttaacttatatggtttcttctcaactttatttgcttttaacccttagtgcatattttcccttgttgttttagcactcatacataatagaaggtcgtattaacttaaaaagaaaatcaatttttgcactcataaatgaatcagatggtctcagaattatgtagtgtatcatacttgtgttgtcagatctgatcatatgatggtgttatcaaggattcaatattttttagtatttgtcataggtcatgtttctcttgtatgacttttcaaatctaatttaattttcagattcaaacaaaaaaattagttgtggattaattaatgttcaatattgcaggattatgcttaaaggtgcttaaaattaaatttaaaagctgttgcagtctcattaatttagatccaaaacaaaatattttactagctagcagattcacatagaactgctaaaataaatgtaaaatatttttaacataatgggggcattccgagaatcgaactcgggacctctcgcacccaaagcgagaatcataccactagaccaaatgcccacaatggttatcttgcaaccaata

SEQ ID NO: 173831 - DNA, 730 bp, Cannabis sativa
  modified_base (647)..(652): a, c, t, g, unknown or other
tatttttttcattatgctgatgaaactaatttttttctatatcttataatgtaatatttagtttcttttaatgttgaggaaactggtttttaaagttggtattgtttttagattataattttttgcattgtatttttttattatgtatgttattgatgaaactgattttatttttctgttcaatttttattatttaagagtctagaaattgatttttatttttttaacttgattaaccatgtttgctgtcatggttgttatattatttgagtttcatttttgattttgaagttattttttaacagatggaaacaatctccaattctaatcagctagagcttggcaagaaacccaactaaaagatttatgtagtgtaatatcatttctattaatatgagatagcaacaaacaacccaaacaaaaaaaatcctaaaataattataaaaaattaaatgtagtcattacaaacagattaataatatgaaataaacaaagttaactttgttagagtgagcacagagtttaatttctcagctttcttgatacataattatcaaagtttgtcataatagaatgtgtataatgagatatctcagttgtgagtttttatttctttaagactgcactataatttttttttacttttnnnnnnaacaaaacttgtgactaaaagtgtgactaaaagtgaaaaagttgtgactaattgtaaattattattatgttgtgacta

SEQ ID NO: 173832 - DNA, 513 bp, Cannabis sativa
aaaatagctaaaaattaagttttttcacattcaactgcaatagcaaaacaataacataaaaataaaaacatgcagaaaacaacatataaacaacttatgaataatactaacacaacacaaaagaaatatgagaactacattagcaacaaaatctatgcataactcagtagaaaaataacttaaccagcttgtgagataaattgacatcaataagcattatattttgaagttgagatcatttaaaaaaagattgaaaaccaaatctaaaggagattgttgaataataaaattttaaatttgaatgttatatctttctaagtcaataccacttagttgatcttaggtcaatagatcttaaatctgagatggttaggttctagcttaattgcattatttgcgttctttgacttactcattaaagttgaccaaatggatcttttcaatacttacatctgggaacatggtagtacaattgagtgagagcgctaattatagatatagaatctatagctt

SEQ ID NO: 173833 - DNA, 656 bp, Cannabis sativa
taattactcatggtaatacggtaatgatggaaaatactcttatatttgagtggatgggcaattttgtatataaggagaatattgaaatttcgaaaaaaagattaccttgttaagcaatgatggaaaggcatactcacccaaattagggaaaggcttataaattgagatgctatctaatgtacatgtattcaagggattagtgaatgttggatcacaaagtaggttatttattaaactatggactagataattgagggtaaaatgagttttagagtgattaattgagtatgaagagtggtgattgcaaggaattaatagtagcatacgaatcatggagtaaaaccttagtggtaataataagaaaggaatataagagtcttagatgttgatgaatcaacactatcgacgagagactcattacaggttggagtagtggtagttcataccaatgggttgtcaataaaacagagaatatacttgagagatatatatatttctgggtgtgttaaaagaagaattttaggatttctacctaacatagatataaacctttgagatcaagaaattgttggaaatattttaccaggatctagatttactgacaagtatgtttcattaacatcctaatatgaatttttaaaacaatgaaataaaca

SEQ ID NO: 173834 - DNA, 1151 bp, Cannabis sativa
ctccatttgattttgtttttacagagaaaaagagtttaatctatgttcatgagaatttaacacaaagtgatgtaagtgactttctataattttttcttcatatttttctaatttttttagagtaccatgttaatgtactaagaaaacatgattattcaatttactttttgtaataatcccacattatcaatatatttatataaaggagagtttaaaagtaatgatgtggcatttcatatttttttcatagtatttttactattttgtgagagcttcaagtttgtataataaaaaaaaaatctactaactttgttaaaaaaatccgcattgtttagaaagtattgtagttttctatatccaatctataaataagttttttttttccacattcattagtctaatcattattatttgctatagtatagaaagtattatagcaaataaatattttcttagtatgttattttttttttgactaattaataaaattaatattatccaattagctttatatttttagtttcgttttattatttatataatttttattcatataatatactctttaataatttcattttaatgtcacataatttaaagttaaatatttaattcaaatggtgtctttaatttttttttaaaaaaaaaaatcaaacaaaaaatataaacaataaatataattttgcgaataattcaatgtttatgtcaaatactaaaaaatcaatcaatcatcaatatctacatattaatataaaggaaagcacacaagagtgtaggtgactttctataattttttcttcatgtttttctaatttttttagagtatcgtgttaatgtactaagaaaacatgattatttaatttactttttgtaataatcccacattatttagaaagtatagtatcactaacctatgtctatgaccactattaaatgattatttggaccctatgttttgaaacatgaaatataataatatcataagctcaatattagtgaaaataattacaataaagatagattaaaaatcgggtaacaattgtttagaatgagggttaggatgaaaaagttttaagattagaataaaaatatttgattacaattagactcattgtatcgttatattttattttgtaaatattgagaactat

SEQ ID NO: 173835 - DNA, 585 bp, Cannabis sativa
  modified_base (260)..(264): a, c, t, g, unknown or other
ttgtggcgctacattgatctataacatcaactaaaaaaacaaaaaggaaaagaaacctttattttagaagggttgtggcgctacattgatctataagatcaattaagaaaaacaaaattgacaaaaaaaaaaaataaaaaaagacaaaagatccaacattaatctcataacaaagaaattagagttgtagtactttatgctgggccgaaaacattagccccaaaaaaaagatgcttcccttatcatatatatatatatannnnnatatatatatatatattaaaagtaaagtagtatatattaatatatatatatgataagggaagcatctttttttttttttgggctaatattttcgcccagcataaaatactacaactctaatttctttgctataagattaatgttggatcttttgtcttttttgttttttgtcctttttgtttttcttagttgatcttatagatcaatgtagcgctataacccttctaaaataaagggttcttttattttttatttttttagttgatcttatagatcaatgtagcgccacaacccttttaaaaataaaggattcttttcctt

SEQ ID NO: 173836 - DNA, 581 bp, Cannabis sativa
caatttacttgaagaaattccttgacaaactctatctgaagaagaaactatacactctcaagatggaagattcaagagaactcagaaaacatctttatgagttcaatatcgaatcatttttggatcttagcaacataggtgtgaaaatagaagatgaagatcaaggtatcttgttgctcagctcactacccaaatcctatgaacactttgtggacactatcccacatggtagagagaccttgaccatgacagaggttaaggcaacactcaattccaaggagatacagaaaaagaatgatgagaagtctgatggtgttgcagacagtctatttgtgaaaggcaaaaatgaatcaaaagactccaaggatagatacaacaagacaaattacaagaacgatcagaacaagggacacaatcaagtgtacaaatcaaagacaaaatccaagcaaggaaaatagtgttatctgcaagaaggaaggaaattttaatgatgaatatgtagggcactcaaggcaaaattgaacagagagaagggaaaggaaagaggtgatgcaggcattgcctttgatggttatgagtct

SEQ ID NO: 173837 - DNA, 583 bp, Cannabis sativa
tatttgtgagttttttaatttgtttgtccgtgtgtatgtttttttccatttggttgtttgatgaattggtttcatttatcttcattatttattatcttaggttttgttatgattttgttacgagggtttacaggttggaaattggtttgttgttgtacgtaattaagcattagaggaattttcataaatatgggaattgagggtatggtctacttttttatggcataaataaatatcactataggattatggggttttttaattttttgacatttatatgggtttttttatgctatatttttgtaaaaaaaaatagaaatctcatatttgtaaaacaacaataagttttgccggaaaagtcgtcggcaccgaaaagtcaccggaaaagtcgcacgggaaaattacggccgccgaaaaagtcgtcggaaagtcaacgtcaccggaaaagtcaacaaaaaagtcaacgtcgcaagaaaagtccccaaagtaaatgtctcagatataactaaaaatataactagttatatgaataaaaattaataactcaaaccggttatgtaatacccggaattaagaaatggat

SEQ ID NO: 173838 - DNA, 741 bp, Cannabis sativa
  modified_base (173)..(174): a, c, t, g, unknown or other
agaaatcaaaagaacagatcacttgctttcttgcaagcagcttacattgataaggtgctagagtgattctcaatgagcaacgcgaaaggggaagtttgccttctagacctggtgtgcgtctatataaggaacagtgtcccactgatccccaagagataaaagatatgggaagnnttccttatgctttagcagttggaattctaatgtatgctatgttatgaattagaccagacatttcctatgcagtagaaataatgagcaagtatcggtcaaacccaggagaggaacattggactacaattaagcatattctgaaatatttaaagagaataaggaattatgtgttagtctataagagtggtgttttcaatcccgtaggctagaccgactcagattctaggcttttcttgatgatatgaagtctacatgtgggatggtatttactcttaggggtggagcagttatttggagaagtgtcaatcaatccacaatatttgactctaccatggaggccaaatacatagcaaccgctgaggctattaaggaacttgtctggctaagaaagttcttcacagaacttggtgttgttcctcgtatgggaaaaccactagttttaccttgtgacaatgttggtgctatagcaaacaataaagatcctcgaagccacaagaggagtaaacacattgagagaaaataccacatcatcagagaatatgtgggaagaggggacgtactggtgga

SEQ ID NO: 173839 - DNA, 1348 bp, Cannabis sativa
  modified_base (189)..(190): a, c, t, g, unknown or other
  modified_base (1299)..(1301): a, c, t, g, unknown or other
ggcccattgggtaggaagtgagaaatgtgctatgagaaattggcctttacaaagtggcccatattgtaatttcagtggaaattacatgcttttttataactttggaaacttacaaaaatattgaaatttgaatttattttcacaaaaatactatcacatagaaaatttttcaaaaatactgtatttttnnaaaacaccagtagaacacaaaacagaacaactcaaaacaacagtagaataactaaaaaaatcagtagaacactagtgaaaacttaacacagtatattgcagtatgaaacttataaaaaaatactgtaaaaaagtaaaaactaccacctggcagtatttttataaaaaatatggcaaaagttagtatactatgtaaatttccctaactttatgcatttttaaatcattttttaagaattttttatttttacactttaaaatatatatatatatattttttttgcatttttacggaattttacataaaaacttttatagaaactaacggagcaacctaaatcgtaactaaaatccatataacaacccacataaaaactaccagagaaaccactagagcaacataagctgtaaatttgaagaaaaaaattaaaaaaaataatatgtagaataatttcttataatttaatggctttttattttaaaaatataataatatggaattattttctcacaaatttataaggaaaattaattacatcacatttttaatagtagttagagtttctatgattttaagaattaatttgtaattttaatattttttaaaattagtttattatttcaactttttttattcagaaaaattaagtactgttatttttcacatgtattttacaaattttactattaaatagttattctgttatttgttatttattattattttttattattgtattttttgtttatattgttcatataattttttcagctattctcaaatatatatgtatatatactagcaaaaaattacgtgtgaggcacgcatattaaattttatgctaggttttttctacgttacttaaaagtgacaattaaaaattaaagaaaaaatatagttaattattaggtgaaattattattatgtgtgtgtaaatattataatttataatttttgacaattaaaagttaataccggatgcaatatattagtgtacactttattctttgtggagttcttatcttgtagtgcagtagtgactggtgaaataaaaactctaacaataaatgttgtttttgctcttgataaaactatatataagtgaaaannntgttggggtaatctaatatttggcctagacttatttaatcattgcaa

SEQ ID NO: 173840 - DNA, 527 bp, Cannabis sativa
cgcgtctggggtctttcaccgcctctctcgggacgaggagacgcccaatcacaactacgggggttttggagcctggagccagacccatctcatgtcctgggccatgctcccccttcaagattattttattaactttcttgcttttttcggcctcgcgccttaccaactaattccacaagcttatcgcctgctctcgggcttgtttttttttaagtagctagaggctgggcttcacctagcccggctgaaattttatatttttatgaacttgtatctgtcccgaaaaagggggacgagtttaaagacggttttttctttcttcgagcccatccttctaatgagggcctggtcccttttaattttcaaaagaatgtaaaggaataccgccatcgctttttcttctctttcggcttccaagtcgtggaccgcctggagcttctcacgcagtgggttaggattcctcctcttctccacactgctcctacccagttgttcctccagcatgccaagactttctccacttatga

SEQ ID NO: 173841 - DNA, 866 bp, Cannabis sativa
  modified_base (834)..(835): a, c, t, g, unknown or other
tgatctccctctcctcttgttttcgttgccatccgttgcataaagaaaagtatcactaagctttgggcttgaagttttaatcttttacctttgaattcactctcaattttttttctttccaatttactctgagttatatgtatatgtaactgtcaggggctgaattgggatcttgctttgtgctttgaaagcggcggtggataaataaatactaaaaagtatcttaaagtgtcaattataaaaggtcatacctatgcaggattgaattagattggactagaaaggattgaattggactggacaagattggattatgctaaaagtaatcctgtgtttagtttaagaatagactacactatttttatttattttcttttaaaaaaaaacttaaactaaaataaaaaaatatataataataaataaataaatatgaataatttacagtaaaagaataaaaataattaaatataaaataatatatggtatataattaagtatatattataaacatacaataaaataatttatctattttttatttaataaataattaaaatagtaaaatcaaaaatattttttttaacagagtaaaataaaaatacttaaataatgtaaaattgtttacattaaacactaatttaatataaatattaattttttataaatatttatataaattttttataatttaaattaatatataactttattgtcgtattatttctcttagaatcaatttaagtaactattgcttaattaataatattttaaattttgaaagcctatgataatttaaaattatacactttcactaattttaatgaataagttttnntaaaaaaaaatctataaataaatgtgtgata

SEQ ID NO: 173842 - DNA, 537 bp, Cannabis sativa
gactttttctacttgaagctaaatattcgataataataattgaccaaaaaatagtaaggggaaacttttataaatgaacttgtccaacgaatttggacaccaccaaaatttatgcaagtattataataattcaaataaaaaatttatgaacactcatttagaatagcgaatatttaacaaatgagctaccgaaaacaaataatgacacaaaatatagtgatttagttagattttggtctgttttagtctactgttacaaataatttctgcttagtttatttgatttggatcactcctttatatagaaagcaaagtgtccttttaattttacatgactgatctattttaaactgtttttacaataaatgatagtattaaatcagaataaacgtaaaatagtaaataaagaataatttaattcgttcttgtattaagtctagcaacgtatgtgacttatcgagagctagttgcatgtttatattctcgcataagctcgcaggctttaggtgcattctatattcgctaaacggctaatgg

SEQ ID NO: 173843 - DNA, 898 bp, Cannabis sativa
attctgatttagtgttctgcttgaacgactttggagtgtggtctttggtgggtgtagttgtggaagatgaaagagttttaaggagaaaaagaaagaaaaaaaaagaaaaaggaaaaaagaaaaggaaaaaaataaaacagatttttataatttatttatttatataatttttaaattatattttatactattttaatatttaatattacacggactactaaaaattagtgtacacgtgagcagtccattgtgaaacttaattgagatttttggactgaagtgtaaagagaaaaaaggaatagaagttcagtaggttttgccgttaaaattttaggttatgtggctaagtgttaacaaaaaagttcaggcgattttgttgacaatatccttaaaataaaatatcatattttttaggtgatacaaatatttttgataccttaaagaatgaagaaatactaaaaggtagcatagtgcctagcattctacttgtaggatttttaccaaattgccctacaccaacaagatactttaatatcagtatcaaggtcaaaatcgacctttcctagtctattattaagtatagaccaaaacggcaccgtttatccaacacgacaccaaaaccagtgtcgtttgaatctcagagtttaagtactctgaagaagggtctagaaaccctaacactcaatcactcagcctcacaaacccacaaatcgaaaccctagcagagcaagttctctttgagaacttgctcgattccaaacccagaaaacccagaaaacctagattcgaacacacacacacacatagattttaggtttaaacacatgaaaaaccagtaataggaaagaaatcaccagatttgtttcagagttcaccccaaaaattagggctacgtctc

SEQ ID NO: 173844 - DNA, 527 bp, Cannabis sativa
agtaaggaccggtagtggtggctggtgtggttctatatcttcgaatcgaaactcaataaatgtgatgttaaataaataaagggctgagatgtaaaataatcttaaatttgaaaactaagttagtaaatgtctcatttttaaaaaaaactacaaaatgaccaaatataataaattagctaataaaaattataaaaatacatttatcacatattttttaaaaaatatatataataataaaattaagttatacaattttttttaatattgcatattattatattgtaacaaaaatgaataaatatattagattattaaatatatacaatagtatttgatatatcgtaatactgaaaattaatataccgcactaataaaattatataccacaaaaaaagtataacaatattaaattgatacttaaaaaatatatatatcgtgctgacaaaattatatataccactattaaaatatgaatacatatcaaaaaatttatatataataaaatagaaactaaatatcatcttaaa

SEQ ID NO: 173845 - DNA, 1060 bp, Cannabis sativa
tagatcaaaaaatgtaccgttagcggtcttaacatataatgtaacttagttaacatttataggtgttcatccgattcaattcgtactattttatttatagtgcattctatccttactaatgtgaattaattttatattttggatccaatccaatctgcatagtatctcaaattcaatctgcaaaagtgtagatgattttagattggttactttttaatattaaattatttcataattattaaaaaatatttttttgtataactaataataaaataaaataaattattattattttatgtctctaacaataaatattaactagataaaacaaaaaaaaaaataataaattcaaagcaagaagaaaaaaattgtaagtataaagatgtttaattttattttaaattatatttttcttataaataagaacggattaacatttaagttttgaaatatacatgatcatgtatgtattagatttttaaatttttattttttacattaaaattttaattgtatatataatttttaaaatatatatataaatatgtgtgaattagattggatcggttaattttacatgttaatcaacatgcaatccgcacaagtggtgatttttaattttccaatccaatccaatctgcacaagtacaaatatctgtattttgccaattggattggattgaatcgtgcggattggaataaattaattattttatgaacaccccttaaaaatttttattcttgactgaagtttaaaatattacatcagcaatgtgagttacatcattaatttactagtagtaggatcgcaaatgtttcacgttccagtagttctttattagcgagccatttagccgaggcaatttgtaagctccgattcctactactgcttcgattacatatggaccctctcagttcgggttgaacactcctgcagacgcatctctcgtgtttgtaaatactcgccttagcaccacgtctccgtcgttgaatagccttttcttgacttttttgttgaagtatcttgtaactcggtgttgatacgctgcattagtgactt

SEQ ID NO: 173846 - DNA, 565 bp, Cannabis sativa
atatatatatatatatagagaaggcaatcaaagagcaggagtcccaggctcttgataaggatcaactgggtctaaaggagccagaggatcattgatctaggcgaaaggagcaacaacattctggtcggtaggagaagtggaagtggccgcctcagggttctcattggccgcctgagccatggagtaatcgaaaaacatgtctttggaagtgccaaggcaatcaaaaaatttttcctctttttgggggattgcccttctctaagaagtcataaaaaatctcgagaacagctgggtctaaggtatccactttcttcccgagcatctccaccttggatttttggctctcaatctctgcctcaagttcctcctccctggtcttcttgtccttggcctcatcctccaacctacgaagaagagtctggagacactctctctcgtctttgagactggtaattttttgaaacaaagaaacattgtccgcctcaagctgtgcagctgatggcgcattgtaataccctaggattaacgaaatagattagcaaaaccctaactagttaattgagta

SEQ ID NO: 173847 - DNA, 536 bp, Cannabis sativa
tttggacgaagtgagcttgggcgtataaggttatttttttttcaatgcaatagttatgcaaaaataactaattatcaacacaaaaacaacttaacaacaatcaaacttcaaaataaatttattaaatattaacatattgcattaacacaattaaaatttataaatgacactacgacaccgtacaagaactactaattgaacatataaaaaatatttgtaaaattattgcaataaatataaaagaattttgaaacacataaactaaaaaaatataaaaattacacaaaaataataattaaaaaaaaaataaagtgactaattaaaaatatgttcaattagaaatgaagtagagaacaatatcaaatatttttttatatatatatatatatatatataatgtagacataattaactcaaagtatatttgtaaggtcttcacttcaagtttccattggacccttacacttatggaatgaaggctcttatacacgagtacatcactctggctgcttcatggactgacgactagccctaca

SEQ ID NO: 173848 - DNA, 508 bp, Cannabis sativa
agaaataggggcagattcacatagaaacaaggtggggcagttgtcctattaaaaaatcgagaaaaaaatatatatactttttaattagttacgacatatatttgtaataaaatatgatatttataaacataatattagttttggtgtaatagttaaattagattacatatatgatagaggtaagggttcaaatctcatgaaaagtattttttttctttttaaatttatttttgcccatattttacgagagaaaaaattacacatcctttcactttaaatcttaagtccgtcattaagtaaaagtcaaagtaaattaaaccaagcttagagcatatattaccttaaacaaaatacataaaacaaaacttataatggaacggaatgcaatattatttttttgggtaaataccattttggaccctgtattttacaaaaattaccaattagaccctctgttttattaaatgacaaaatggaccatgtattttctaaaatgatacaaatagga

SEQ ID NO: 173849 - DNA, 778 bp, Cannabis sativa
  modified_base (130)..(139): a, c, t, g, unknown or other
aaaaagaaagtagaataaataaataaaactttgtctcaatttcgtttggaaaaggtagaaattttctttgattttatttgttataactataaaaagaatatgtaactttttttatttttatttatttatnnnnnnnnnnttattattattattattttgcaataaaaagaaatacataaattaaacaatgaaaaaaaaaaaaaaaaactaagtctcatacttttcataagtactaggtaaatattacgtgccaaggcacatatgattagttttattttaggttattttttttttaaaataaaatatacatatatcataaataactttaaattaaataatatttattttagattggaaatagttgaaaccatgatagggatttaaaaaagatattttaagtaatatatgtgtaaagtgcttctaaaaagaaaaaaaaaatggctatttcttaaattttggtaattaaaagaaatggtgaagtgtttgtattttacattcttcattcattctaaatccatatacataaataacaaaacatgaaagaaagaagatgagaaagtccttacaaaaaaaaatgttaataaaaataatttaacatattttaacagccaataaataagtacagcatactgtaacaggatcaataaaactttattttcattaccaacatagaacttaatttggaagcaactgcttcaatcttttcaccacagcttttgaaactctagaaagaaaaaaaaaataagcttacctaaaaattataaagttaacataagaa

SEQ ID NO: 173850 - DNA, 613 bp, Cannabis sativa
  modified_base (436)..(475): a, c, t, g, unknown or other
ttataaataattaatggggtttaaaaaaaaaaaatacttaatgaaataaattttatattattgatgtgtttggtaacactttttaattagttttttttttttaattcaataagtgaaaatattttctaaaaatatattctattaaattttcatttttcaattttttaattgagaattaaaattttgaaataaaaaaacacttaatttttttaaacattttttttgttaatcagtatttggattccagccccaacctaaactttgagaccccaacccgcatcccctacacctggccctagccccatacccggatccaaacccaaacccggacccagaccgaacttgaactcgaacccgaacccagaacccagaacctaaccgaatccaaattcagaccttagccccaaacctgaacccttgttggaaatattttacnnnnnnnnnnnnnnnnnnnnnnnnnnnnnnnnnnnnnnnntaaatatgaatatctctaaaaaattgaaattaaacacataaaggtttaagaaaaccttacattggttgcagtagaatataaggactccttccgttcaagatgtctagcccttgtttcttttatgtcgcagagcattat

SEQ ID NO: 173851 - DNA, 652 bp, Cannabis sativa
  modified_base (613)..(618): a, c, t, g, unknown or other
tacttgttaagatttataaaacacccatacatatactcacaaatctaatcatatttctaaatgtgctttaatatagaaatcctaaatcatagtttatagaacatttgctaaatcaaagaagaagaaaatgataacgagatgagcggaagcattaacctgaagtttttgttgaaaattacatagaaggttatgatcttcaaatgatacactatttctttaaaatattttctctgatggggaaggagataatacaagaaccctagtgtttactggggaccactacctatttataggctcgttatagaatgagttttaagtatctataatttggctcctcaataaattataaattaacttatgaaatctacataatatttctatgacaatttaatacccttttgatgatacctataatataattggtcgcttaaatttatattacactttacaatagcatatatattatatactatgtgcctataaatagtattatagtccaacaatatactcataggcgaacctaggatttcagttcaagggacgcatatatatttatatatattttttgtaaaagaggggcataatttatttgggaaatttgatattatatgcnnnnnnttaatttatctactaaaaatatgctagcatattt

SEQ ID NO: 173852 - DNA, 788 bp, Cannabis sativa
caccaatccaaccgtaagttttttatgattaaaaattagaatttttatagatttggatgcgaatttgtgtatgttcttcagattagattgttttagattgtgtatgcaaatttggatgtttttatgcatattcatcagtgatgtctgtttgttttaacaatgttatcgatgagatatcgataggttatcgatataatgtcgaccaaacttgaaagtagtttgaccattagaattaactgttttgttaatgtatatatcaacaggatgtcgtaggtgtgtcgataggatgtggacacaataattttagttgattaagattattattttaaagaatttagttgatttatcgataggatatcgtatgtgtatcgataggatgtcgacacaataagcataaaaaattttcacctaaaatgtcgataatttgtcgacagtatatcaatatattgtcgacaatgtgatttaattactttgtgtgattgctaaggtgataatattgaccgaatatcgacatgatgtcgacattgtattaacaatgttgttttgctaaatagatgtgatcatatatttagaaaatctacagcatgtcgacaatgcaatgtaattgttcactgtaatttctgtttgataatttcgacagaatatcgacatgatgtcgacctttttgattttttcaacatttatatttctttgttatatattttttcagatggctcccagactcataattccagcatccgagcattttactggccgcgtgaagacagaagtgttggaaattattttac

SEQ ID NO: 173853 - DNA, 619 bp, Cannabis sativa
gaaaaattctacatctacattctcgaaaagaagtctacaagaaaattttttagtttaaatttttgtatattagtttattatgttatagttatttaagatattctgtaaaattttaattttaaaaaaatttaaaacgtcaaaaataaattcaaacaatctatttcacaagcatataaaataaaatagtctcgcttacaatagacaatttgaacactattttcatcgtgttaaatttttataaatttttcaaaattttacaaaattactcaaataattacaacataaatgactacattcttaaaattttacaaaatattttaaataactacaacataaataactatattatcaaaatttaactaaatgttctaaataataaacataaaatattctaaataactaaaacataaaagataataataataaaaaaagaattaccttttatactattttttaaccttcttttcaaatttacggtttggatttcaaaagtggttgtaacgctaattagaataagggtcttatacgattttttattgcaatttaagttgcagcgctagttacaatatgagtttttatgtagaatttcaaaaaaaattattttaaagtgtaaaaatga

SEQ ID NO: 173854 - DNA, 596 bp, Cannabis sativa
  modified_base (525)..(533): a, c, t, g, unknown or other
aaaccattgatttgagtgaatgaagttgtagcggcttttaatccacacctatccagatagttaaatagccgcatgaaatttagatggtacaaaaacgcttgacatccaaacaaaatagacctcatgattatcaacaacatcaaataaaaaaaaatgtataattaatatattatggactatataattaatatattacaattaattttttttttaaatgtatgtgttttagatttcatttaatttaatgtaatttttttggtcatgtaatattttgcaatagttatattattgcaatataatatatatatttttatttcattaaaaaattaatataataatagtaaataattttttggaattacccatatactattttaaacttttttttattttttttatttttacggtttggattaattcagtggaatctatgtaaatttttatgtggatttagattgtgatttaagttggtccattagttggtatatgtgagttgttaatatgtgaatttttgtaaaaatacannnnnnnnnaaaaaaaaaaaaactttttttattgcatgttgttgctccaaaattcgcccaaaatacgtggac

SEQ ID NO: 173855 - DNA, 695 bp, Cannabis sativa
  modified_base (656)..(668): a, c, t, g, unknown or other
ggctatatggactttaagtattttaagaatattaatattcttcagatgtttgatattattggtgagctctttttcgcaaaattattgttctctcattttaaaaacagtcgcttataataagatcaactatagaacttcaataagattttcttttcctttaaaagaaaaaaatgtgtagtgtttaattgatttaataaatattttattctactaattattttaaaattttaaattcttactagtagctatcaaataattcttactaattatttgataaattagttattttgagttattataaaataattttaagtaaaatatatttacttagtagaatattttgtatgatatttagtgtgaatcattagagttgttgcactaaaaattataagattctacactaaatcggtgtaactattagaaatggtctagctagctataagttataacaattttgtaatatatggagataaagaagatagctagtaatattgatgtgatgaaatatatttttgggaagaaaagaagaatagcagttaagaatagaactatatattagaactattctagttcgaggaggttcttgcgcaatttgtggatatctgaatgattctaatcactacggactcgtttggaacgccgtattaagtcgtatnnnnnnnnnnnnnattatattgaattgtattttatgcaat

SEQ ID NO: 173856 - DNA, 833 bp, Cannabis sativa
agtcgagaccgtgcttgctgttgccgtatttgtgttgggtttacttcccgagacaatttttaacaacttcatctcgtttcttgcttcttctttgagcataaatacttgctctctttcattaaatttgttaatgctccttactgggtgaccatgtagatcatcccacaattctcctctagccgtggataggtcagttgtgattcccgcctgaagtgcagtgagttaaatactgccattcaggtttctgacctttgtagtggttgtgctaaaacggcttaaataagccttaagtgactcggctggttacaattttatgttggttatggatgatgcttcaggtcgtctgtctctagcggcttaaaattgctttttaaagtccctggatagctattcccaggaaattatagaatgatgagtaaatttgtcaaatcaactgctcacaactcctgttagagaagtctggaataaaatgcaatgcaaattattcgtggcattactggctcgcataatagtgttaaagttattaaagtgagcaactgggtctgtggtcccatcatacttcaaaacatgtgggtttttaaatccctgggaaaatttagaatttaggatatctggatggaatggcttggtttcctcatccgagtcgtagcctggaaatctaccatgctctccatctttatactccgtaaacttatcttctagttcaattatttgtagttggatagggtccacttgttgttgatttgcattttgattaagctgatggcgcaaattaggtgaattttgattcagatgctcgcgaatatctggatgtcttctatttaggtgttctc

SEQ ID NO: 173857 - DNA, 787 bp, Cannabis sativa
caaagttaagattttaatccaattcgtacatttgcagatttaattagaatcgtgcatagtagtttagattatctatttaatgatcattctagaaaaggtaaataccattttgaaccctgtgttttgcaaaagttacaaatttgaccatttgttttgttaaatgacaaaattgaccctgtattttccaaaatggtaaaaataaggccctgagcttaattttcaacaatttttttttaatataaccaacttgaagataatttctgatacgaacgaatacagaaaatataaacagttttgtcataacacatttagatcggattattattaaattgtattttgacaaaaaatcagttcaatgtctgttctattttagaaaatacaaggtccattttgttattaacaaaatagagggtcaaattaataatttttacaaaacacaaagtccaaaatagtatttaaaaaaaaaaagaactattttatgaacactttgatttaagcccgaaaacttaaatcctatagtaataaacaagttcatcgatttcgtaaagagtcaaaaacagaactaaatatattgtgtagcaaaaataagatgattgtaattagatagaattaaaaataataaaattatagatggaaaatgatattttataaaattaattataaaaaaaaaaaatcaaattattagttttatccatttcagttttctcgtgctatttttcttataacatgtattattatgaaatttttggtgtaaaaatatgtagttagttaattaattaatatctac

SEQ ID NO: 173858 - DNA, 634 bp, Cannabis sativa
tgtggtgatcatcattaaatggaactttttgaggagaaagcttgttgggcactaactagtaagtattaatttctttagtaactcttttaatttataagaatatatagttttaaagatgaaagttttatataaagatttttttaattgtattctttgagatagatcctattgtgaagataagaaggtaaatattttgtactaaaaattctactttggagctaaagcactaatcaacttctttacttaaatcttttaaaatacattaaaatttcagtctttatttttaaatcaaatttatatattaaactatacattaatttttttattttttgttctttatactactttaataatatgaaagtttaacttttagcatcttttttattaatttttttttgatagatatatatatattgtggatgaagatgtaagttcgagatggaatgaagatatatcttgaggatcatttaatttggatctctattttagcttgtttttcatttagtttttcagtttgtttgtcatgatcatcaatatgtaatttgtatttcaatttcacaattgttcttttagagtgtatttatggttgcttagtctataataataaagcgtctaattttctttgtcacgtata

SEQ ID NO: 173859 - DNA, 699 bp, Cannabis sativa
tctttaccttaagctttccctttttcaagaatttgttatcccgctactaccagagcttgaattgttatgtttcagattgaaaataaaagaaatggataaaaagagataacgatttcaaaggacgaagaatttcaatttgtttatattgttttaaaacataaacaatgtatatataaacttatcattagattctgataagtttataacaataatattaataataataataataataataataatatcaaatttttttattaatagttatcgatcttataatatcttattcactaagaaatttctacttttaaggcgttaagttaaattctacacactcttaattatatttcaatactaataaactaatttatcataatatttctatctattggagaacattgtctcacatggattaaatgtaaaagtattaagccatatattagaacatgggctactccactcatcaccaattggttttgggatggaaccccatgattctcatcatggtatcagagccatatccctagccggctttcgatgcacacctatctaaatggttagctagccgcacgagatcagatcgtgcaaagatgcttgagatctgaacaaaaataatcgagcaaatggcatggcctgtgataaggtgattcaagattggtgagcaaaaatagccactgtcactacaagaaatatcacttt

SEQ ID NO: 173860 - DNA, 739 bp, Cannabis sativa
  modified_base (92)..(94): a, c, t, g, unknown or other
  modified_base (711)..(711): a, c, t, g, unknown or other
tgatttacacatggattgcattcatttatcaatccgttcatacatttaattagaataattaaactaaaatacgtaaacataataaatgaagnnnagtttccagtttaattcactaaatacaacaacgtatgcgactcctatagtgccagttggctgttcgtattcttgcataagctcgaaggctttaagatgcattcgagacaagtcgagtctaggatgtttgcgtcctcttcaagttggttatacggacatcctataacaagctaatagaaccaagacatgtgagtctttatcggtttatcaaggctgttgggtcagcgggactagctcgcagaatagagaatcaatctctatgtttttgcaggaggatcacggggatacttgcatataccctggtatatgcgagctcaaaaccgttccttggtcctacataatgcgagtcataccaatgcgattagactcggtcatgtttgcatcatctcgctgagtctagtttaggcgaggttcatattagaggggtctctcaatcgacatctcagctctcctagaagaaagtgaatacacgtgtctttttaataggagtctgttctcgagtttctaggtgagaaaatctcactataacacatgcccctagtttcgcgactgacagatgaggtcatgacggaaactatagtcgagaggcaggcgaagagatgtcacgaggtggtgacntttggttgtcccatcgagggtttcaaaa

SEQ ID NO: 173861 - DNA, 1145 bp, Cannabis sativa
gggataaacgtgcaagactattagtgcatgtttagggattctagctaaatatttaattataaatatataataaataaataaataaaagattattttttgtatgtactttttatatatatttttttgtattttttacccccataaatttaatttttgttttagttttgtcatcacatattataattttgtccatataaatttgtgttttttatttttatctttacatattttcatatttattctcataaatttactctagtctctataaaatttatatttttctttgtaataaaaataatattttttttaagtgtaatatttatcaaattttttttgcccccctaatatgtgtggtttgctccgccactctatgcatcacaccgatatttttattactcaaagatgattactcatcaattttttcacttccatgcatcatattaatttttttactgttcaatgtgattactcagctcttcaactttttactatgtggaggtctgggaaggaagctcttctgcctataaattattaaaaagtaacataaacagattttaaataagtagccgacttcatagattactaaaaagtatttttcattttacttaaaaatattaccacatagtattttattaatatatatactatacgataacttttaaatataataaaataaaaaaaaattacaatactttataatattacttgctatgctgaatattattaagtttaaaattttattattttaaaatataaaaaagaaacaaaaaaattacatttaatattagttgtctttttttggagacagaaaaatatatgtttctcacatattaaaatagttatttttattatttatatatgtgtaaaattttaaaataaatttttaatgaaaaagtaatcaattgatatcttattcacatcaaaagcaactaaatagttgcttttttcaaaactcccaaaaaccaaaaaattttcgaaactatattttttagttttttctatattcggtaattattttaaattttagtatgtatgttgtggcactcagtatttgtgcaaataattttcttaaaagtatttttgtaaataaaattaattttaggtttcacaaaattttaaatatttctacgatttttttgatttta

SEQ ID NO: 173862 - DNA, 509 bp, Cannabis sativa
gccccaataaattatactaattttgtcacaaactaaaatcaaagaatattgatatatttaatgtaaaagtatatcatccacaataatctctaaacaatgtgggacttttgtgaagtgactctcatattactaaaagcgtacataaatgtggaaaaatgaaaaaataaatatatatttaacaaaaataataatataaaataaaaattctaaaactatatattatttttatttgttaaaaaacttaagtttttttttaaaaaaataaataaataaatagtgcaaaaatatgtgaaaataaataatattaattttgaaacaaataaaatatatataacctataaatttaacatatagtgttaattatttaaatacattaaaataaagaattataaaaaaagatactttttataagaaaaaatatttaagtgatttttttaataattattttaaacttgataaagattgaaaaatgtaaaaatataatttaatttgcactcacttaaaaaaaa

SEQ ID NO: 173863 - DNA, 681 bp, Cannabis sativa
tttttttttttttttgagattgaatgcattcatcaaatatttcttcataatgtattgatttgattcgatgtcatcccatattaatattattttatgcactaatttgttcttattacccctaataaaaattattaaatagaaaaagattttttttaattttaatttacaaatatttttattatttttaaatattgttcttgactattgactaaaataattgaggtcattttttttgctgaaaaaataatgaggtcattgcttgtagtatctgacaatgcgatattgtttccaattatagctaatattccaagtgagaagaagaataaaataaataaaaccatatcctaaactttattattcattagagaaatatcgctattagtttttagtacattttacatgtaaatattgatattagttcaactaaatatcggatattaaataatttaatgtaataatttttaaaaatatcattgttaatcaattacaaaataacacatctagaatttacaatgttccaaattccactaatactgaatagtaatattcaataatatcaatccaataaaagacaaaagagtagcagccgttgaaattgaaatatatttttatatctttatatattaaaagtgcctatctaacagtatttcttggtttaacattcttggtttaacagaatat

SEQ ID NO: 173864 - DNA, 508 bp, Cannabis sativa
cccaaatgtccatatgaataagattaaatattgcagaagttatattgctgttagatggaaatggaagttttttttattttgcaatatgacaagtaggacaattaaatggtgttgagatttcagaaatatataaacttttattgattttattagtaacaattatagatagatgtccaaggcgtgtatgccattgaagtttatttagatgaatgttacaagtagtaattggtgagcctttattgcggattgtctgctactgtagatagtaaagattcccaatgcgtttaggtgtttcaatcttcgatgtctgagaatggtcctggatgtaacaatagttgcctgtgaaatgcatagaataatttctatgttgtaataatttatgaatagataacaaattgtaatggaactgcggcacaaataagacattgtgcaaagtaatgaagctgttaattttgacagtgccaacatgttcaatttgacaattagtgcaatggggacgaggcctttt

SEQ ID NO: 173865 - DNA, 598 bp, Cannabis sativa
ttgtaaaaagagtgacaaactgatttttaattactttcttcagccaaataaacataacataaatcacataatcaccaaatattaagtccactaaaggacaaaggcttatggggaaaaatgaccattttgcccctcccatactaaaaagatttaacagcactaaagggtattttgggaacactctaaattcccaaccattcccaacattcccgatgtcaacaataccgccccgctagactaaaatactaatttgtaattctactgagctatacaccgtgttccatgttgccgggcaccgaaaatgcaaaattataaaattttactatatgacataaaaatgcattcagaattcaaataaatcaacataaataattatataaatatcaataaataattttcataattaaactctaattatctgctaattttcaaatttaaactaagcggtctttacgctatgtaagttacttttaaatttaggcatttttgtattttatgccgcgtaacagtagaattgacgttttagccaatagtgtcacatagatacagtttagtatcttagaattagtgaaaaaaaatttatgtatagttataatat

SEQ ID NO: 173866 - DNA, 994 bp, Cannabis sativa
cgatgctatacattagtataaaaggcgggacacgtaaacacaaataaactaattcgagaaacacaatatatgacaatcccaaaaaactacaacacgatatattaaatttttttataatactgaatattataattatataattaaaattataaaaataaaaattaagattatatattaatttatttataaggtgtgatataaaattttaagtatttataagtaaatatttaaattctaatgatgttaataattcttttatataattatcggtaaaatattgcttaaaaattatataaatataactaaagctttgtacatataatttagtaattgtaaaataaaattatgaaaaactaaagcacaaatagtaattgtaaaataagattatgaaaagtaaagtacgaatttaagctcggatataaaaatgaattgacttatttaaaaaatatgaactgacacgagcgaagcacgacacgaatccaagtacgatacgaaaatatcgggcctaccctttaaaaatattggcgcgacctatatttttctatcacgactcgttttttgaaaaacacgaataaatatgagtcgggccagcacgacacacacgaacttacaacattaaatatatactagattgaagttatgtgcaaatgcacgtatatttagtttttattaattttttttatatagtatattatacttttttttatctgaagtatataataaattttaattgttataataaactattatatagtttttaattaaataaataatatcattttaaaaaagaattaattgtttaatataatatatgaaaaggaaataaaagagtaaaaatggtcaagagtataatagaacattcttattcttctatggtaataagagaatatgttgttatttttttttaaaagaattaaacctcttattataaatcaaacttattcatttaaaacaacaaataatattaggcctgcacatgggttgggttgggcgg

SEQ ID NO: 173867 - DNA, 738 bp, Cannabis sativa
ctgtggcaaagcctttgtttttacataacgtcacaatttcttttgaattaggtgacttggatttccaaattatgcctcccaaaccacgtacgtccaaaactcctcaagatcccagagtcacctacgaggctaagttaatagaatcgaaggtgcgatctatctcaggctacacaggtgacatgctgaagacctttggaattgcacttgtgcaatcatgtcaggttaggtcagtacgagagggtgaatttagttgctaccccctgcacgctttactggtagcaacccaggaaccaatggtgagaccatagtgattcaactagtatgggcacttggagccttgaacatatttgtgcaggggccattctccctcttcgggactacttcaaggattacataaatcacatcggggttgccccattccagttgactgccattgcctacagggttctcacttgtttgaaagtattgtacaaaattctgaattggggttgtcctacacccgtagagattgcgtatctttactaagttaaatccgttccatcgaggaagaacgctgcagtggactttttctatcttagtactcatgctagcgagccaaaaattattgtagacttgacaaataaggtatccttcaaggatgacttcttcttgacgtctggtctctcccccattggcacaaccacattttgcaaactccgtaagtgattgttctcttctttcttatttacatcagtcttc

SEQ ID NO: 173868 - DNA, 527 bp, Cannabis sativa
gactggtttagcagctgaagaaagtggctaggttggagcgttggttttagagttgcattttgcttgtgccgatcgaaaatcatgcaagtagttttctgcaaatatggccaagtccttggcaggtttagctttcgaccaaagggtgcaaaagatttattctattttaacacgtgtgtacattgtagacaaatgaactagatagttttccttgcgcatcgtgaacaaattggaccagtcaagaactcgattcgagtgtcgccaaactgttcttgcatatttgcaaccgaaaagagatggccaatagattcccatgcttggttgtagatagggctgagcaaaaaatctaagaaattgacaaaaccgagtacaccgaccgtccgaacactgaaaaaaccaataccaaaaaaattgaaaaatcgaaaaaaccgtctccgattaaaactgcctttgcacggtcggttttagtgtcaatagcaaaccgaccgattgaatcaagaaccgaatgaacatatatattatacactata

SEQ ID NO: 173869 - DNA, 520 bp, Cannabis sativa
gcaagcctaaatacttgatgcacccatcaggcgaaacaatccccaacttttgcttaatctccctcctcatgctcgacggggtattcttactaaagaaaacagaggtttttaacttattaacctgttgaccagaccacagacagaaattctccagacaactccagaaaccatcaacctcttccaaattggctctacccatccgaattaaatcatccgcgaagaaaatatgggacaggattggaccacccctactaagctttatgccttgaattcttccctgagccagggcttcatgtaataacctcgaaagcacttccgctgcccagatgaacagatagggcgatagggggtcaccttgacgaagactacaagaaggaaaatctatcataaggtaaaatttagcccacaggcaattttggatttaataaaattttaatcttcagtttatactttggtgtctggtgaaccacataattttaaataattagggaatagtcacagcatccttagttatataaaa

SEQ ID NO: 173870 - DNA, 870 bp, Cannabis sativa
gaatatttaagatattcaaactcaagtaacatgcatattattttacccaccacagtacaatatatcacataacctacttcactatggatcaatatttaagatattcaaactccactaagtattgatattaattgataacaaaatgttagtgaatgtatatacctacatctagctaaaattcaatcaacacaaaattattcaaaaccttaaaaattagctcacaacctacaatataatgaaatacaataaaattaaatttaattatttaactacttactagttatatcatttatgagtaactagttactaataaattactgataaatgatataattagttagtaataaaaatatatgaatataaatgaaaaaaaaaagtaactagttactagctattaagtaaaaaaaaatatgaaaacaaataaataagaatgaaaacataaataaattcaataagtaaattaaaaaaaaggagttatttttctcatctattttaaaaatttataaacttaatttataaactaattaaaactctcctatctcattctcattcacaatacatatacaatacttagaatatatatatacaatacaactataatatttttatacaataaaactacaaaatatataaatacacacaatacatatttaataaaatacaaaatacatatatatactatatattaaggtttaaattcttaccttataaccgcaatctgacaatcaataccgacaaaaatttggccactatgcacataaaatttacaaaaatgaaaataaagtaatgtacattactaaaatgaattgaaattatatttatactttaatggaggttaaaatttaacgttttctctactaaaatttgtgg

SEQ ID NO: 173871 - DNA, 601 bp, Cannabis sativa
attgactttgatccaatcttcaggtggaggtgtccaagccggagaagccaccggagctgtcgggggtaataagcaggaaacataatctgtataacaatgagaaatagagtcaatggccattacaatgttactcgggtgagagttatgtaccttgtcattacaggttttccatattgtgtcaacgacgattgaagcataaaggaacaacttttcaaagtccaccccattcgaattcaagttccaaataaatttaacacaatcccaaactcgacctctagagtcagggatcgggaacaccccccacggggaggatctccagagatggtaagcaaagttgcaatagaggaacatgtgttccatcgattctgcagcctccccatacaacaggcataattcatcttcaatgggaattctcctagtcaggagaccacggactggcaaagcattcgaaaggatactccacaaaaggactttatgtctttctaaaattttagagtttcaaagtttattccaccccaaacttaaaactttgcttgtcctcaagcaaaaagaaaaataaagaaaataaaacaagagacaatatgatactaaagttggtgat

SEQ ID NO: 173872 - DNA, 844 bp, Cannabis sativa
  modified_base (216)..(221): a, c, t, g, unknown or other
tattgaaagattggactgggaaaaaaaagattatgtgttagaggcatatactatatacgatacctttcaatgttttaaaaaattgaaataattatataaggtatcagttcttttttttttaaaaaaaattacatttctacaattaaaaattttttattttacattttttactgtttttcataaaaacaacacaaaaataataagaaaactacatannnnnnacataaaaataacatctaaataatattaaaacaacaacaaaaaataacatgcagataataaaaaatcaataacaaattaataagagcacacaataaaaagaccgaattttttgtaaataaaattaaaaaaatcgtaaaaatatctaaaatttcgtaaaatcgtatttttgtaaattttttgttgtttttatgtgtttgtgaaataatctctacaagattttgtttgtttctaagtgaaattaaatttgaaaaagagagaagagagggacagagatactttagtgggtgttttttcttttcttttcttttttttttttttttttacttgtaattaaattttaatggaatttttataacggtataaatgttgtgtacattactgtaattagagtgaggtataaaactaaaaactaaaataaatgagctctattaaattctttaaacactgattatatcacatcccaaacttgaagaaatttttctctagaaagttaaacagattttatatttttctttctctcttcatttcattaattaaatttttattcttcattttacttctttgtgtatttttttttgtttttattaataaaatatatgtaaagatataatatttaaatgat

SEQ ID NO: 173873 - DNA, 565 bp, Cannabis sativa
ctagcttttatattatttaccaatactttattagttagagatattttataaaattattataattaattatataaaatttaatatttaatttaattagtactaaacttaaaacttttagtggaggcgatttttttttcttataaataatatcaataaaaaaatatattttatgagaataaaaaatgtgtagaataaaattaaaaaatgtaaccttatagataagcaagtaaaatatatattatttttataggattagaatataaaataattaaaaaatttatatataaatataaaaaattgagagagctaatgatctcgatcatatgatttttttttcttccacagtacatttttaatatttctctaatattatatatatatatatctaataattgttttaatttaataataataataaaaaagtaagacctttttcttgagaggctgttctgtaagactatacaagattaagaaggggcttttttcataaatgtacaacaaaatcaaaataattacaaaaaatgtgaaaaaaaaaattattttaaaaatttatacattttgaaaa

SEQ ID NO: 173874 - DNA, 629 bp, Cannabis sativa
gaagagagttttgaattacacgccacgaaatttttttaatcttggtggtaatttcattatcaataaacgaacaaaattattatattacttgtttagtataaggcttgcttcatatgtttattttatgatcatatgtttaatatataaattctactaaatccttgtcacattgctactcatgattattatattgtctatacagtaaaaaataatcaaaattatgtgattaaactaattagtcccatgatttatcaatacataggatttacactgatatgataatcaacaatttagtttacttacacttgtatagtggaatgtcttttctaaggcattagcaaagtaagcttgtattagatttatgattatacatcagactggaccgatatttacagtggaaaaaatatcataaacttactgtaatatcttttctaagtaaatatcacttagttgatcttagatcaatgatctcaatcctaagatggttaggttctggtttaagtgtattacttgtgttctttgacttgttcgttcaagataaccaattagattagctcaatacttacatctgggaaacacgatagtgtagttgagtgggagcgctaatcataaatacagaatctatagct

SEQ ID NO: 173875 - DNA, 839 bp, Cannabis sativa
agtataaaaatgttaataaaaataggtgacttttattttcgggtaaatactattttggattctgttttgcaaagttactaattagatcatctgttttgttaaataacaaaatgaactatatattttccaaaatgatacaaataagatcctaaactgatattttgtccaaataaaatgtaataaaattctgatttaaatgtgttataacaaaactgtttacattttttatatctgttcgtgttaggaatttttttcaagttgattatattaaaaaaaaaaaaaagttgttgaaaattaagcttaggaccctatttttactattttagaaaatatagggtccattttgtcatttaataaaatatagggtccaatctgtaacttttacaaaatacgtagtccaaaatagtatttactctttatttttcgtgtgttaaattaatgaaacccgaattgagttggggatgatcaagtttggcagccaaggttcacccaaaatagagatgtttgaaccatccccaacacccaaaatagagatgatcaagtttggtaacttgggttgttaccaaatagctatttgacataatttggtacaaataactatttgaaactataagatattaatggtgtctaatattatatcattattagtgtgatttaaaattagatattgtatattttaatggaaaatttgaaattttatacttacatatatctaatattttttttcctaaactaatacttttctacattgaaaatatataaccacatttccaaaagcccaaaaatacccctctcaaaaactctttttgttttcaatttttctaggcttttaaggggtc

SEQ ID NO: 173876 - DNA, 534 bp, Cannabis sativa
tggtaaaataatttccaatatttcactcataagctactacattagctttcccaaggtggtactgcaaagtaaaatcgtagtcctccatatacttaacccatcttctttgcctcaagttcaagtccctttcagtaaaaagatacttcaagctcttatgatctgagtataactcaaactttatgccatacaaataacatctctaaattttcaagacaaacattactgcggcaagttctaggacatgtgtagtgtaattcttctcatgtggtttcaattgtcgagaagcataggcaaccaccttaccattttgcatgaggacacctcctaagtcagtacctgaaacatcactgaataccacatatggttcctcactattaggaacagtgagaacaggcaccgaagttaatcttacattcaattctctgaaagcttcttaacaactatcatcccacacaaacttaacttcctttcttgttaactttgttaaaggcatatcaatccgagagaaattctccacaaagcaacgatagtagc

SEQ ID NO: 173877 - DNA, 508 bp, Cannabis sativa
ttttcttgttgttgtgtttttcgtatgctgttttatgtttcaaaaatttccccccttgttgttttaggttaactccgattctgacttcgaggatgaagttcctgatttgaaagtgaagcctaaagttaaacccaaggtatgtttaccttgattcttttttttttttattatttttttaagttgaaattttttaatcaactgttgtttttcattttgtttttgttttacttgtttatattcacggttttatgttttgtctcatttttgtgtgtactatttctttatgtatttatcttgatgttgtttttgtgttgtttttttgttttgtttctgctattaaacagtttgaagcattatttggtcttttagtgttgtattggctttttctaaacatttgttttaaggtttgttttcagtagttttcgtgttgtttaatttaatttcacggttgacaattactatagtaatttcatgttttgcagattgttgttaatatgttgcttggaag

SEQ ID NO: 173878 - DNA, 700 bp, Cannabis sativa
cgtatgccgtctgtgattgtcgtagtggtcgtctactccctaggatctagtctctcccctctggtaactcagagtacaagcttagcttagctgtgacgctctccgtacaaatagggttttgaaaaccctcgacttctagggccggtcctaaggtatatgggacctaaggcgaaatcaaattttggggcccctatatatacaatttaactattataaaaataatagttctagtgcttagtgtaatggtaaattttttaaaaactcttaaaggttcaatccctcataacgacacattaaatattttttaaaaacattaaaaagtggaggttgggaattgatcccatgacatgacctcttactttaaagtaagaccttctaccattacaccaaacaattttgttatattttcttcttatttaataatttatctatatattaatatttttttctcacaattttggagccctgagcgttcgggggcctgaggctcatgcctagccccctaccctcagggccggccctatcgacctctgatgcctttccttgagtatttgagcctttctatacatttgtctcttttacatgattaataaaattagtattttgtgaatattttgtagtttattcaagttaatttatgaatgatttatatatttcaacaaggttgatgtcttgttattttttttttattgatttatag

SEQ ID NO: 173879 - DNA, 576 bp, Cannabis sativa
aaataaatttgataaaacttgtaaggtccatcgaaaaagctgttgggaaagtcactgtcgtcagaaaagttattggtaccgaaaaagtcaccggaaaaatcaccgtcgccggaaaaagtcacaagaaataaatgtctcagatataaacaaaaaatagaacctgttctgtaacataatgaataaaaacaagtaacacacaataactcaaaccgattacaataaaaaaaaaataaagagaaaatcaagttctaaaatactaaaacataaattaaaaacaaaactagtttcataataaaatacctcataacacataatacgtcataaaaccgattaaaaatattaagccgtaaatataaaagaaccggtttcataacaaaataaataaatacaaataataacacacattaactcaaatataatataataaactggttatattatcaactagctaaaaatttgagataaaaaaatttagttatgtaaagcaactaagataaaaactcacacgcaaaaagtagttaaataaaataattcaaacaaaaatatccatttaacatgctccaacctaccaaataa

SEQ ID NO: 173880 - DNA, 525 bp, Cannabis sativa
acataaccaatgctgcaaaatagggggagctgggcacaagaagagaacatataggagaagacattaaaaataaaaagaagcagaacaactaaaaaataacaattgaacaatggagaaaaaactgaatatatattggagcatagaatactgaagaaaatatataaatttaattgttactattaagaataaaacagtacaataatatttagaaaaatgtgacaaagaaatgaaagaaaacaatattaaaacaaccttaaaataataataaaacaataagagaagaaactagtaacagaagagggtaagttggagaaaggtggtggacttaaaagtgcagaagagatggagccaacactttgagaccaaaaagactgaagaacatgaacttagtgggagtttttgaaatatttttacaagaacctcatcagagagcaagctcttcatctctcaattatacacacaactacgctttatctttcctatattttatttttcttctttctccttcacatactcttttttttt

SEQ ID NO: 173881 - DNA, 685 bp, Cannabis sativa
atcaatgagcattgtggtcaacaacttgaataaaatccatgaaaaaccgcatcgcaggaggagaaataaaagaaaaacaataaaacgtagtcaaggccgaacatcctaactttgacgccagcaatgcagtgggtcccacatatatcataatatcatgcaccccaccgacactccttctaaaccgtcggcacctcttcaattcaaatcactaccactgtcaccatctttcgcattctcataaacctcttaattaataaatataatttatgttagcctaattatttataccatatatttataggatatatagatagtttttaatttttttttttttcaaaaaatagttttggctagtttggaattcagaattaaattagattagattggactgaatttaataagattgacttatactaaaagtaattttgtgtttaatttaaaaatagactgaactattatatattttttttttcaaaaacttaagctagaataaaaatatataataataaataaataaaaatgaataattctcaacaaagaaaaataaaaaaaaaataataaagatgattaaattataaaataatatatcatatataattaactatataccataaatatataatttaataatttattatatttatatttaataaataattacaatattaaaataaaaatatttgaa

SEQ ID NO: 173882 - DNA, 612 bp, Cannabis sativa
ttattaagccatagatttcgaatcacagatccagcaaaactcggaggtaaaaccccagtgagattattgtaagaaagtctcacatcttgtaaatttgggaatgagccaaaaatatcaggaatagtaccaaacatattacaacttccggcatataaagtaaccaagctagaagatccgaccagctctgccggaaaactccacggagcaaggtttatgtttgtgctgatactcaaagtttgcaaatttgtcagtccttgaaaacacccagatggaattgaagtgaaattgttaccatcaaggtaaattgattgaagaagagaaagattcgccattgatgggaaagagcctttgaaatgattcccttgaagagacagagttgtgagttgagacagagtaccgagatcggaagggagagttccggtgagagacatatctcttaaattaatggcggtgactttgccggaactacacttaatgccgtcccaggtggaacagtaatcggcggtggacgaccaacccttcggtgccggagatacgacggagagaagctttgacattacggcggattcgtctgcggtggaggtggccagaatgaggcagagaaacaacaac

SEQ ID NO: 173883 - DNA, 687 bp, Cannabis sativa
gtcagccttccaacaatccgagtagcaacgagctcattttttgcttgactgtgtgcctcatgcacacttccgtctctcgaacaactcccgccaagtcatgctcgcaagcatccatgagtgcatccatgcatcgaggttctctagccaagatacttgcactgtccttaggttcccactctgataaggcaaatcccaacaccaacgctcaccttgtcactcgtgaccaaggtagcatgtgtggaaagatgccaacaccaagtcaacgtgccaacgcttctatcatgtcccattcgatgctgtctgtacagtctccctcgtcgtccaaggactcccatacgtccatggacaaatcctcaaggtgtcatgcctccacgcatgttggcaggccctccagacaagccaccgaactagtagcatacgttagaccactgtctctttccaacatggtgcattcgtcccatgcgcgtatgcaaactagccccgaaatgactactcgtgtcatctcatgttgagactcgtggtcaaggtgcaccataatgtctcttagaagtttaggccacatcccgtgcaagcgtcataccgacaagtcaatgaaaacagacccattaacctttgcagcttcttaaatgcactaccgggtcggcccgataatgtccatgagtactccaactcatggagacatatgag

SEQ ID NO: 173884 - DNA, 566 bp, Cannabis sativa
aaactatcaatctcgatttttgtggataattctgaaaaatctttaaaatcatcaacaaccacattagctgattccaaacacattagctgattccaaaatattagctgattccaaaatagtttaaaacagtttgagttctcatgttgtaaacacaataggctctactatttgtggaatatccaatgaacacaccaacatcacttttagcatcaaattttccaatatgctcatgatctctagaaacatagccaacacatccaaagacatgaaaatgacttacatttggacgcttacctttccagatttcataggttgttttgaaagtacctggacgaataaacactctgtttattgtatagcaagtagtgttagtagcttctgcccaaaaccattttgtcggcttcttgctatttaacatcactcttgccatctcctgcaaagtttgattctttctcttaataactccattttgttgaggagttttaggagctgagaattcatgagttatacatgaagacttacaaaaatcatcatatatagacttttcaaactccttaccatgatca

SEQ ID NO: 173885 - DNA, 604 bp, Cannabis sativa
atctagatccatattcacgaaacagaaataaaatgcaaaaacaatcttagatccaaaacaaaacaaaaaaaaaaaaaaaaccaaaataaaaaaaaccaaaataagaaaaaccaaaataagaaaatcaataataagaaaatcaatataagaaaatcaataaaagaaaatcaataaacgaaaaaaatagaaatagaaaagaaatgatgaatagatctgaactcatgggtctaagatctgagagtttaggagctggttgagacggagctcgaacgatggtggagctcgattcgtcgcgaaggaaagggatggacagagcaagagagagcgaaggagggggacagagtcatggtggtgctcgtggcggctcgactatgtctggatgagagagggggagagagatggagagagagaaggagagtgtgagagagagagagagacgaatggtaatggtggtggaggagagggaaggtcgtcgcagaggagagggacgatgcgagagagagcgaggagtgggatggttatggtggtgccattaccaccatcagaagaagaagaagggttagggagggttagggggttctgtcgagaagaaagagaaagagaa

SEQ ID NO: 173886 - DNA, 509 bp, Cannabis sativa
ttatgagcttttggtgggttgcaagacacgtatattttgttttattttaggtgttatataatttaattttttaacgatataataaatatttatatataatttaatttaaatttttttgtttaattaaaagttttttaatataaagtgattaattgaaaaaaaaaaattggaattatttttatttattcaatgtaagaaaataatagtgatacaactcaaaagtaaattttgaatgcaatatattagtgtaatgatttaaaaataatagaaacaataaaatgaatgttataattataaagcaaagcttaaaattgtgaagttattatttttttttaaaaaagaacaatttctaaaatgttgataattatataaaaccaataaaatcattgcataaattttgaagaagagaaaattaaaagtacacataattaaaagttcctattctttctttgtacattttttattttctctagctaggtctgtcttttttttcgttaataatttgtcct

SEQ ID NO: 173887 - DNA, 969 bp, Cannabis sativa
gtgcaagcaacgatgtgacagctaatgagaacaacatggtgaagaaaaatgagtatggtggtaaggaaaaattgattataggtgatggtaataaactccatatttctcatgttggtgctggaaagttatataccagcaaggagtataaacccttgttacttaatgatatgctgctagttccaagaatagctaagaatttagtaagtgtactagtttaacctctgataatggtgtgtttgttgaatttcacccttattgtttctttgtgaaggaaaaaatcacaaagaaggtgctgctggaaggagtgcttagagatggcctttactagctcaacacttcaccaaacaattcagcctcaagttctaacaactctcattttttctctggtgtgtcgagtctgtcgaatcaaaaagttgctcggtcaaatatttttaaattttccaagaagaatgtttggcacaggagactaggccatccatccaatagagtccttaagcttgtttgtgactccaacaatgtaaaactttctaaagatgaaatagaaagtttttgtgaagcttgtcaatttggcaaatcacatgccttacctttaaattatcttcttttacagcttctaaggtgcttgaattaattcatacagatctgtggggacctgcccttattgcttcaaacacaaattttaaatactacatacactttgttgataattttagtaggtacacatggttgtatccattgaagcaaaaatctgatgcactcaatgcattcatagatttcaaagcatttgctgaaaaccaatttgaaactaaaatcaaaagcattaagtgtgattggggtggagagtatcatgattttgaaagccttgtaagaaccaatggtatcctttttcagcactcttgtccccatacttcagctcaaaatgggagtgctgaaagaaagcatcgacacatagttgagatgggtcttacc

SEQ ID NO: 173888 - DNA, 821 bp, Cannabis sativa
ctttacttatactctttttcactctaataataagtatttattaaaagattataaaaatgactatctcgtcaaacactatttaatgctcagatgtacaaatatttcaaaagtgtaactaaaaatttaccgcaaattacttatttttttagaataattagtatttttgtaatttgaactttcgatattacctaattttgtcccctaaaatatacggcttgtcaaaaattcttcctaaaatataacggttacatatcatgtcccttctgttaggtttcgtttcttttatcgttaaaataagtatttttaccccctaaactttgaccaatataaaattttgcccccttttattaaaaaaaaaataaatttgaaaattataatattctatctttttaaagaaattataatattctattaatttaaaaaaataataaaaattattaaaattggataaaaatattaaattaattaaaaaaatattttcaaactttattttatttatccagaagtatcttaaaaaattaaaccaaaattattgagaatctaataaataatttaactgaactaagattttttaaagaaaaagtcaaacttatttatatttacaaactcataccttaacaaataaaaaaataattaaaaattcaataaaaaatataaaattattttgaaaaaaaattataaattaaacaaaaaaaaaatgttatatttccttaaactaatctatatttttttgataaaaataaaatatattcaagtttgttcctgtaaaatttaatttttaatatatttttacaaattaaaattttaatattttttttaat

SEQ ID NO: 173889 - DNA, 1086 bp, Cannabis sativa
  modified_base (365)..(366): a, c, t, g, unknown or other
taagactatcttgcttaagcagttataatatcatacgattcatggcaaaattaaggttgtgttctggtatggtcacacagaactccacaagtttatcatgttggacatcttgggtaagcatcccttttaattttttttttttgttgaactccacaatttactaactgtccttttttttttgttgcatatctattttatttacaccccaaaaatttctaaagacacccaaaaatttctaaagacactccattttaataacttttattttatataattttttttttaattgtactaagttttttaaatttttttcttccaattcatatttttaaaaaatatacatatcaaataaaaataaattatannttaaatattatgacaaaaaatttaaaataaaaacttatatgaaaatttcttagaaaaaattatgaaaataaaatcaaaataagtattgaaataacataaaataatgttatgaaaaaaattttaaaaaaatatttagagtaatttttaaaaattatttaagtttgtatatttttttaataatgaggtgtatttatcattttatggggtgcaaatagaactttcctttttaatattaattactttgataataaatcactttaggaattttaaatataaaaattaatgatttaaatcgatttcaaaattagattaaaaaataaaaaaaaaattgtattaacatatagaaaataaaaaattattggagttaactaaatttgataaatgttaattaaaaatctttacaatttataatttgaattcactaaaacttatgaataattttcacatacctaatttaaatttcaatctacagtaatgataattataaatgagatacgatgatgccaccagctttaaatgtaatggtaattacaagtgaattacggtaacaataatggttttgaaatcatatgaaagtattctataaatttattttattgtttttttatagatttcaatttagtgtgagaattcagttctaatattcttttttcactataacttttaagaaatctctttttgtgctttttttgttacataaaaaatagtatgatgatttta

SEQ ID NO: 173890 - DNA, 757 bp, Cannabis sativa
tcttcaagtttaatgaagccttcaacgcggtcgagaaaatcactcattgagtataccgggccgttcttgatccttatgtccttccaaagttcaccgaggacttcaatgcccccagtatcgtggaaaactttccatcttaagttacccgtgaaacctcggtcacctccgtcatgaatctgctgatgtatgatcggagaggctcgcctggtctttggttgacttcgaccaggtctcctaaatacaacggaagttggcgagaggaggagacttttgcatggaatttcgacgagaaggctttccatgagttgaactttctaggggccagcttgaaataccattgctgggcagcttccgagagggtagcaggaaaaattctacaacatacgtcacctcgtaccccctgcagatctatttgcatctcgaaatacttgaggtgggaaagaggatcttctcttctagtgtacatcttccaggttggcattttaaacttctagggtaacgccaagagattgatctcgggagagaaaggggttccacgtgctcagttgaactcgagatcattgtttctcttttcgggcattccttggaacatattctttagtttgtccagttgtgcctgcacagttggactaacctgttcggcattttggccgatctgagtcacgtcagaatctttctgagcgggaatttgagcacaggtttctggctgcacgatcggcatgccaagctgattgtctactcctctccttctattcag

SEQ ID NO: 173891 - DNA, 569 bp, Cannabis sativa
atctcaaaggtttttaggtcctgtgagataattattcttcaattacaaaaacaaaaaaacagatgttcgagtactcgaatcaaatcataaaattatatgctttgtatgtaaataattgataaaatatacaaaaaaaaaataaataaataaaattataggggtatgttttaagcctactccagtgtagaaagagttctctttatttttcattcctcatcacctctttttgaatgaaggtagatgctacctcctgcttatagagaaataggtgaatgttacaaactgtagtcattatgagggttaaaattataattaacctgttaattgtactaatttaggttcttaatgcctaaaataaatgcttaacaaaacagccaaaatccctgcctagcatttccagctaccaacaaccaggtccaggtttaacctaaggcagactaagtctgtcagtttaagggttaaaaaatatatattttcttagtaatttttaaaaatgttacatatttttttaaattaaattcaataatttttattttttttaaggctcattcaatttcaggtcagtcttg

SEQ ID NO: 173892 - DNA, 655 bp, Cannabis sativa
cacgccactttgcccagcgtcgaataggatccagccgtttagatggagggggatcgtgaaggggacgctgaggtccagcagatcgaggagcaggatgatgtacgtcctggaagttcctctaaggcagaggtagaggcaaaggttgaacccccaaactacgatgatggggagccagtcgatgctgacggagatgtcctggttgagggcgtggactacgtcaatgaaaaacttgctactactgttcctcatagaaggcaaggtgccttgggtgccaggtgggtaagccctctgtccagggttactgaggcgcgccttcggactctcgaccaggacgaatacctgggcgaattggattgctacattcctgcccataacaatcgtgccacaaaccctgaaaaggggatgtgcgccttgtcgggtgcccatggttagcaaggggcattgatgcctttgcatcaatacttcaagaatgtggcggaattcatcgtcctctgcctggcccaattcactcctaagggcatcaaatatctgtcccccctcttcgtcctctacgtttcatattgtattttgtgaggactttgaatcattcgtccaggtcctctatgtgccccccagcctttctagatttgacgagcatatcatccacgtagacttc

SEQ ID NO: 173893 - DNA, 911 bp, Cannabis sativa
aagcttgtcactaaggttcttgtatcaagattcaaaccgatccttcctttagtgatttctgaagaacagagcgctttcttaccaaatcgccttattactgataatattcttgtggcttttgagctggtgcatgccattaaaaataaaacagctggtcgtaatggtattgcaactttcaaactcgatatgagtaaggcgtttgatcgggtggaatggtgttttattgaagcggtaatgaggcaaatgggatttgctgagagatggatatccttagtaatgggctgccttacaacaaataatttctcttttcttatcaatggggaagtcaaaggagctttaactcctactcggagacttaggcaaggttgtccgctatcaccttatttgtttttgatttgttctgaatgtttttcaagattgcttcatcatgaacaacaatccggccatttgaggggtttcaagttaacaaggaatgctccaccaatctctcatttgttctttgcagatgacagtttattattttgccaagctgatgaaggttcttgcttagccattaagcgagtgctggatatctaccataaagcctcgggttagacattaaatttggacaaatctgtgatgtccttttctcccaacacaactttagctgctcaggtgttttttcatcgacatctctccatgcctatttgtgactgtcatgaaaaatatcttgggttgccctcctactctgggcgagataagaaagaattattgagcaatatcaaggagaagatttggaaactaatgaacacatggaatgagaaaatatttttagcaggtggtcaggaagttcttctcaaagccgtagttcaatcgattcctacgtatgccatgagttgtttccgccttcctgtttacttttgcaatcaagt

SEQ ID NO: 173894 - DNA, 511 bp, Cannabis sativa
tttttttttttttttacaacaaaaataatataataaggacattatattcacacccttaaaattgatgtttacaccctatttgtatataaaaaatgtaattacatatttatccttttatataatgaccaaaatacatgtttacaacttcaaattcaatttttagtaactgcactcaattttcttgttttttttcccttaatcgaaacttacctagcaatcactaacaaaatttcatcaatggttcttttcttaaaaaaacattaacaggaaaatcactcacacaaaaataaattttctatcccagaaattataataataataataataaattttcttttagataggagtcttcccttatcttttttgtaaaagaaagaaaaaaacattcattcacgatcataattcttttaatttgctggatatttattcttaattcaatttttgaatgtatatattactaatgaaagagaaacctttactaaatcacatgcacaagactgttaatatttga

SEQ ID NO: 173895 - DNA, 584 bp, Cannabis sativa
tacaggtaactttcataagagactatagaacatttctgtttcataagagactatttggccttgtgtcttacttatttggcgttgtgctggtacagcgaaaaagggtgtgtatttacaaatatttaagatttgtttaggatatgaaaattgttttatgtttttgaaaattaaaataagaattcttgattggttgagtgttttcaaaaactaaatttaaatattattttgagttttaggctaaaaaatgaaaacactatttttatgttttcaaatcatgaaattcaaaaaatctccaattattctcgtactttttttattttgagattcttaatcaatcacatattcaatttttcaaaactaaaaaatattaaatcacactacgaccaatcacatattcaaaaacaattttttacttacaaaatttaaatttttgcctctagaacacatttttaaaatacataatttttgaatcacaaactaatcctgaaatgacatattcaaatcatattttactaatttgagcaggctcttcaatcccccaacctgtttcgccagcactttcgccagaatccgacaccacacca

SEQ ID NO: 173896 - DNA, 613 bp, Cannabis sativa
  modified_base (429)..(429): a, c, t, g, unknown or other
ctcagcgtttcgcgtgtttgtctcctctagacggtgcctgagatgacgattttccatctcgacaatcggtacatatctcgtgcgatcataggcaccatcatacatgggttgagcaccaacaacacttatgttgggttctttattccttgtttcttggttttggcctccttcacgttgggtctttcttgaacgtgtggaccgtgtattttctgggtttcgaccaccttcatgttgggtccttcttgagcgtgtggaccgtgtagtctgtgagttgggaggcctccgtgagcccattagctcttttccaggacagtgagtagtcttttcaagatgagtatcaacattttctccgttatcagccatggagaaagatgttttcttttggttagaagggttttttctaagcttttttcacgtaggctctcaatnaaagcaccaaactattaacgcagatttttgtgaacaatagtaaagcctatttcaagattaattcgcacagaaattatagaaaataaagaagaaaataaaacataaagctttttacgtggttttgcagttcaaattttgcatagtccacgagtcaatcttattcagattattctgatacaaacta

SEQ ID NO: 173897 - DNA, 939 bp, Cannabis sativa
agcaccacaattaagttaagttttacatctaatagagaatttaatctttattttctcaatgtgttttttcctttgcatgaatctctatgtgtatttttatagaaaaccttcaaatagaataaaaatctattttaacaatatataagagaatatatatataaattatatgtatatataacaaataaaaaatagtgatcattattacttacttttaatataagattgatttgtgttgttttctatttatatacacactactttgcatgattagaagttgaaaaatatttattaatcataaaataaataattaggagaaagaaaaaattgtaggaattcaatggacaaagaaatataaattatagtcaataaatatcttattgatttaggtagaagtggaatatgtatgggtgatattgatttagttaattgtataaatgaataagtagtaagatctgagtatatatttaatcaggttgttatatttttttttccttaatattattaaataaaaaagattataaaaaaaattgtaaattagataaagtagaaaattaaaaagagatcaagtcaccacacctatttttctttcagatttatatgtagatataaaaatatatagataaataaacagattagaagactacttaaaattaaatattaataatttaaaattaagtttattaataataataaaaaaattcttaaattgatactattttagaaagttaaataattaaaaattaatttaaagaatattacatatatcattttcaatacattaattatatggtataaattataaaaaaaaattaaaatatatcattaaagttaatataaatgtatgtgatgtttttttagaaagttaaataattaaaattaataaaaaataataatatattatcttcaataaattaattatatagtgtaaattattaaaaa

SEQ ID NO: 173898 - DNA, 542 bp, Cannabis sativa
ttatttttaattagcttttaaaacaattattctttttttttttttctgtaagttaaaacaattattcacaaatcaaaatatgatcattttgccaagttctaagccaagtagttattattttttttttcttcttccttcattttatcatttctttaaatttagatattgtatatgtatgaaatagttttctagattttttttagagcatgttgacattactaaaaaaactaaccaaatcaaaggatgtgtacactattcatctaataatttcttttcgtattcatttctatttttttaatgaaaatgaagaatttgattaaaaaatgaagaataaacaaacaacaaagtaagaagtaagcagttacaaagtgctctaaaaggtgaccactgccaccagttggggtcggataatggcataggtcacccatggcttgtgagaagccatgggtggtgtctttcacttgtatttggtacatggatgttgaaaatataatttggtcaaaaaattcctcttcctggtgtggtaatcgacctgtgccatt

SEQ ID NO: 173899 - DNA, 645 bp, Cannabis sativa
tatatctatacacaacaaatttatttacgccccaataaaataaatcaactaaaattattttaaaatttacacttaatactttttttaaaaaaatatattggttctcttttaatttttagtaattttttaatcttattgtcatatttttttttaaataatagctttattatatttttactctaatatttttctatattattttttaatttttatattaatattcaaaatatattttgttttacatgtgtgcatacatgagaaaaaaatgaattaaatatatattatggaaaatatatttatattttggggtgtaaatattatttcacttaaaaatatttattcttctataaataaatgaacaaattatttaagtagtagagtactttaattaaaatggcacaaatataataaagttagagtaatttgcggcataaatacctaagtttatctaatggttgcagtttaatacctaagttaaaattttggcggtaaaaatactttctgttacagttttgaaagtttcgtaggtaccttaccgttttctgccacgttgagtgacagatggcaagacacgtcatttaaaataatgacacatcatcaatattaaattgccacatcaattaaatccaaaataactaaaaaaaa

SEQ ID NO: 173900 - DNA, 585 bp, Cannabis sativa
gaccgttggccatggtttctggtgtgaagggatcagttcgacgtagccctgcgtctcggttactgagtcgcacggtgatggcgacggggcgtagctcgctgggaggaggtcaggctcgcaacagggagtgggttcccaaagctctccctgcctcgcgcatgccacaacctaccgttctgggtaataaggttcttggtcgtactctggttgatagaaagtcgactgaaggcttgcctttttttttaagtcaaactcggctgacctaagaagaacgagtgggaaagagaaaggcttttttgaaagggttgttgggccggttcatcttctaatgggccggtttcaaaaatggatatttttaaagatggagcttcttctggtgggccttttaataggtgtaatgtatccaatttatctcttcatgggaccgagcccactttggagaaccaaaatacagttttgcctttgcttaaggttagggggccgtgtgataatattgggccgggtgggcttcctgggtttaaagaaaataatattgctagttgtgaaaggccaaccaagaccatttccattgagagttcaacttgt

SEQ ID NO: 173901 - DNA, 725 bp, Cannabis sativa
  modified_base (698)..(699): a, c, t, g, unknown or other
caactcattaaaaaatacccttcctttgttggttgttaccagggagccaaagttttgacttataatacagaaatactacctgaaaaaattaacaataccaagaaacaacaggtattagaaaagaaaatccttgaattaaacttaatagactaaattcaaatttaaatacctaactgaaaaattaaaaatcaaccacaaaaagagaacgaaatcccgacaaaaacctacagagaaccatccaaaaatataaccctttggctaatagcaagaaactaagaacactcagcaaaaaacatgtgatttccattatattaaaattaaacttattgccaaagtcttaataatcgtaggtcctccccaaaaccaagcaaaaattaaataacaataaataaaactatattacaataaaatttaatgaaaattaaataaatgagaaagaacgatggcaaaacaatcgaaatataacataaaacaatctacatcaaaatggatcgcaaaatggatcacttcttttgtccaatgaccataccacaaaaatattgggattataaatcattttaatataatcttatttgttatcaatagaagattagaagtcatttatgtttacatgtagtttttatatttaagatgtaatatacaatttttgttaaatctaaaacatatagttattcacaattacagtgatgtcaacagannggaaggtaattgtgattatatgcttc

SEQ ID NO: 173902 - DNA, 546 bp, Cannabis sativa
gagagagagagagagaggaaggttgagaaaaagtgaaggttcttctttctattctagcactttctcattttctcaagaaataaaagattaaaatctcttttcttaatattaatattcttaaaagcataagctgaagtgtaataaaagaataaatggaataattaccccctaactaataaccaatactattaaacctacaataataccccaaaattaacattctaagcatataaaatatgactctctaaaggcccgacgtcactttccacagcttccgaacacaacactgaaattgaataatttacataaaatagcataataaacatatatgatattaaatatattttaaaatatacatttcataaatattaatttaatctcatacataaaccctaattatttaataatccaaagtattaatcatatgcggtctttacataatgaatatctgttagacatttatatgtataaactgtaacatatatgattatgtataaagtgcggaattaataaaacatatatgtactataacttaaggatcgaaat

SEQ ID NO: 173903 - DNA, 714 bp, Cannabis sativa
gcccaagctactcaggaagcccaggattgggaaaacagatttgcagaaatgcaagccagaattgaggaacaaaataatgaaatccagcgattgagacagtaggttgctcctacagtgcctgttctagaaattctagtggcacctgcccctgttgtccaagccgaaccagttataggggtgaatcggatggaacctctgtatgaaaggttccgtaagcaggcacctccagtctttctgggaggtccgaatattatgaaagccgagcagtggctaacagtgattacaaagatttggaatttcatgggcgtcaccgggaatgatagagtggtctgtgccactttttcagtttcaagaagatgcattggtttggtgggacatggtgtctatgatacatgatgtcacaacgatgacctgggaaaagttctagaaacttttcaatgctaagtactacaatgaggccgtcagaagtgccaagaggaacgagttcactcacttgaccctgaaagaaaatatgagtgtcactcagtacacaacgcagtttgatcaattggcaaggttggcctcgggaattgtgccaaccgattttagtaaaaataaaaagtatctggatggattgagtgcaaagattcaacatgacctgatgattactacagacgacaacaccacctatgttgaaatggtggaaaaggcactgcgagccgagggcgcagttgg

SEQ ID NO: 173904 - DNA, 512 bp, Cannabis sativa
caagtttcaatgaatatgctaattgtttttcacaaaaaaaaaaattcacaaaaaaaaagtataaatagactaatctacttttaaaaaaaaaaatttaaacatatatttatcattttattatggactatttacataaatatgagaaaatatgctatagtttacatatatatgacaagtaaacttaatgccaataaatatgatattcaaaacaaaaaaataaacaaatatcacaaaatgacatgtctaataccataaaaaatattaaaaatcaaatttgactttttccctttaaatttaaaaactaaccataaatagaatagctgaaaacactctctacacgttttcttctctctacaatttcgcgatggcttctctctctcacactctcaattcttttctctcctatcgcacctgcgatcaaaatcgcgatcaaattctcttcgatcgaactctgcaagcatcgatcaacatcttctccacaccgatcaatcaattctccaaaaatcaatctg

SEQ ID NO: 173905 - DNA, 532 bp, Cannabis sativa
ttcggttggaattgggtgaagccataagaagctgttcgccgcttagaagaaaaacactatgctgactaaggatctcgaggctgctgaccattttgaggagaccatcgagaccttatctacggatgggaatagtcttcaggacgagaggacttcccttcgaacagtttttcatcggatgaaggaggaaaaggaagccaaggagggggagctttcggctgaagtggacaggttgaaggagaaggtcaatgccttggagacagccattctcgagctcttctttgatttttaaaaggctaatcctttggccaatttcgactactagggcaatgctaaggacatgtaccttgagttctgcacgtcccaagtggcttatggcgaaactgaggaggctgcttcaacctccggtcaggccactgatgcacgtcctgtctaaacaacagatcctcctgctctggttagcccagaagaaccgaattaagaagctgggactccagctgcttaaacacttctctttttatctttttatttgata

SEQ ID NO: 173906 - DNA, 804 bp, Cannabis sativa
gtgaaaatgactactttggtttttcaatcctattttttgtctacttgttacactctatctcaggttgttagtttatattaatatatatattatatgtataatgttatgcaacaatgcctttaatttatcctttgaaataaaataaaatatctaatttaatttgaattcataatttatattcacatataaatatcttatagctgattaatagaaattagttaaatctttttattttattattatttttttaataaaatgaattatccaattatatatttaattcaataattaaaagataattaattaatttaaattaaattattttaatccataaaataattaaacaaaattaacatgggcttttatatgtcaccgtacatgtgtaagccatattttaaggtctaaaattgatttcttaattttactataaataagatttattatttattctaccaatagataatgattgattaattctcattaatctcttatttcacaaagattaaaataaatattattttcaataaaataatatatttatctctttaatattatttaaaaatagtattatatttaactaattaatataattttatctaataaaattaaatagttaaatattgtttaattaaacaattcataattgtcataattattcaaaacaataatttccataaattactattttccccttaagaacttatttcttatagaaattaattctcaatcaaatttactcatctaataaaactttccctatacaatgttatatagaggtgacttggagaccatggacctatattt

SEQ ID NO: 173907 - DNA, 565 bp, Cannabis sativa
gttacgaaacaatttagtttttaataataaatctaccatgccgtctggttttggtggttcttctataatttcctcgatatgtatgccccatgatatccctattgaaatgaggggaaactcttttgtgcatgtcatagcagctcctccgttgtgatgttggggaaacgacatttcttccacttaattttgatctaagataatttccccttttgctaatcgctcatgaagttttttcctcagagcgtagcatcccatggttgggtaattaatcgttcgatggaagtgacagtagagttcatgctgcttttcctctaaagtaggtagttttgtgacaaatggtagtactacctctccatccctgatccatgcctccagtaggatacagattctttctttgttacaaaggaactctgtcggtttatcattccgtcgacctttttgatgagcttcaaaatttcatttttcttgtgccatttctatgtcagcaccacgttttgaacccttccatggccgattttgatcattttggttagatggcttagccagtcgacagacagtagcttca

SEQ ID NO: 173908 - DNA, 541 bp, Cannabis sativa
ttcaattgaaatgatttccatgttcggtcaagtggttgatgattgtaaggttttattgaaagaacttcaacatgtttctgtcttttttatcaggcgatcaactaataaggtggctcataactttgctagagctactttattttatcctgattgcagtttcaatttggggtctatcccagttgatttgctaccttttttggtagctgaatttaatggttaataaaatgatgtttttccattaaaaaacattattagggtcaaactttacatttttattaccaagaaaaaataaattaaattagaaaaattaaagtttttttaaaaaaaatacgagagacttcttcccaaagaacttctccttcttgacagagaaaataaagtgagttgctttccattgtaggcaatacttcaccaaacaatcaagtgatggagatctgaaattaagcaatgtaaaagctttttgtgatctccatgaatgctgactaagaactttgggttgatctccattaacgccaacgagaagtttttttttttttttttt

SEQ ID NO: 173909 - DNA, 663 bp, Cannabis sativa
ttagtcttttaatcaaaacaacttgttcaaaaagttaggttataccagctttagcttttagctgtaacttatttataaattctttaaaaagttattttttgatatatttttatcaaagcttgatctaaaagttgtgccaaacatgcccttaaagtgtcataggtagagatgcacacaggttgggaaattggcagagagtgctctccctgtctctatccctgttaaggattttaatccccatgcccgcttattctccattggggatgcgacaggaaatctcctaatgggaacgtggacgaggcgaaaaatccccggggcagagaatcccctaataaaaaattaaagtttgtaataaagatttaaatatataaaaatattcaactacataaaaattaaaataatacatattaattattattcaataaactaattattatacaaaacacaacttaaaattcattaaaagaataccaatatactaaaaaaatacaaacataaattataaaatgtaaaatattactaaaaatataaaataaaatactaaacgggtctccgtcgaggcaaagagtgtgatcccctgtaatatccagtttaaaatagtatttaatttttttgtttggatattaattgtacgaggataattatctcatttatttgtgttgt

SEQ ID NO: 173910 - DNA, 1035 bp, Cannabis sativa
  modified_base (592)..(599): a, c, t, g, unknown or other
ttcaaataaaaaggtctctgcaattatcattttgaaaaagttgtttctctcgcggttacctatcccgaaaggagtcttgtgcaatgatagtcatgttcggaagggagtttccgattgactatcatgtccactctgggtccagtctccaagatagctaatccttctctagaaaggagttccagctggctagttatccttcttgaaatggtggtgctggatagtcatctacaacaggccttcatcctatctggaaacgtgtctagcgaagatcctggcccttgagtccagaagctcgttcatgttcttggaggccctagtacttaagctaacgtggagacttcattcaaatgaggtgttggttaagttagttgtttctaactaacttaacaacctcgtttcttgcagccacctgctttacgatcttgatcctaagcttataaataacacatttgactcaacttttggatacacgattgagatacgagttagagaaccctgttcagttgaaattgagagagaaaagattgagacatagagagaggtgcaaaggaaagagagagattaggtttgggtttggattttgtaagaagannnnnnnntagatgaagaagattcttgagtgtaaattgtgagagttaaaacactttgtgagagctcaacagagaatctcgtctcgattgtattgtacatattcttgctcaatcaataaatgaggattacagtggtgttctaaaactggagtagagccatggatcatatctatctattggtcttaaaccagtatatatcttggtattgatttctttattttctgcatttattgttttcgatttcttatattagaatattacatttatgaaatattggtgagagatatgaatattttatattgattgaatttggacaaaattatttacctgatattctatatatggtcagattttgatatttattaactaatttgatttcctaattaattctcaaaatattgtgacaattaatgtggtgcagatactgatggagtatctcacctat

SEQ ID NO: 173911 - DNA, 543 bp, Cannabis sativa
tccccaaactctgccaacaacaaccaaatcaggaagaaccataaaacctcctgctcatttaaccgattacaattgtgccacttccagcacacaacaccctattaccaactacctatcatacaagaacttttctcctcagttcagggctgctgcccttgccatctcccacctcattgaaccaagctcttttgcacaagcctgcaaaataaaagtttggaacacagccatggacacagaaatagacgctctcgaagcaaatgaaacatggattgttgttccccttcccccgggacaacacacaatcagtaacaaatgggtttatcgcattaaactcaatcctgatggctcggttgaacgatgcaaagcacgtctcgttgccaaaggatatactcaacaacaaggtgttgattatttcgaaacttacgctcccgtagctaagttcaacacactcaaattactcctctctcttgctgccattaaccaatggcaccttcaccatatggacataaacaacgcatttcttcatggtgatctccatgaaga

SEQ ID NO: 173912 - DNA, 507 bp, Cannabis sativa
ttcctcacttgttgaacaagaaatcttacaacacatggtacattctacgggtacacttactttccccttttctacaacttatgtcattgccagtatagcttaaagtcttttactaggtttgtagcttttttgggtattagggcgtcctacttttctgttgcttgcttacatttttatactagggattttcgataacaactttgaggcttcaggcaatgcattttcttgagtactgccaggatttttttgttgttgttgttgctttctttgattgttctgtgattttggcttcttgttcactctttacatgtttgcatggaaataaactatttgttcactctttgagtactgccactgaatcttcaatttgttttacctgttgccttgaatgtggaaataaactttgtttactttttaattacattttttaagtaatttttttatttatttaaaaatgaggcaaaaaacaatgttatattttcgcatagtatgttactgaaatttagt

SEQ ID NO: 173913 - DNA, 602 bp, Cannabis sativa
ttctatttgtcacatgtgacaaaatttaatagaacgcacaatttactcaatactttggagaccatttttaatgggatgaaaaatttagaggcacaataatatataggtcatagttttagaacgaaaatcttaaataattattaaaatgataataagtatacgaacaaaaatgttaatttattgatttatttatttatttatttactaaaagaacaagagaagtgctaaggagactctcttttgcactctcctttagtttgatgacgaatatcatgttttgaggtaagtttattttagggatatttacaaaattatgagaaaataaatagaaattttgatatttatatatatagcatctaaagttaatactactaaatatgacattttataatcaaactaactaaatatatgggtatttgaatagaaaatgtcataaaagtattaaaaaaataatcaatttttcaaaagaggatcatgctctctccagccacaaaagattttttactctctcattcgattcaaattgcttagtttcttatgcgatcaaaatcaatcaccaaatatccttcatcaagaaattaatttttttcatcaagaaactg

SEQ ID NO: 173914 - DNA, 1221 bp, Cannabis sativa
  modified_base (628)..(647): a, c, t, g, unknown or other
ctcacactagccgagccaccacatcactttactttagagtatttttagtattattattattagtttgttaaaaaagtattaaattttcataaatattttttttacatatatttatttataattttacggcttaaatttcatatttttaaaaatatatttataaaattttaaatcataaaaatacactttggtcaacaaaaattaacaaaaaaatgacaataaatcaactataaaacaactaaaaacaatctcatgacaacactaaacaaactataaaacaactaaaaaaatggtttattatttttactgaagaagtatttttgtaaataaaaaaaataaaaaacataaaaataaaaaaatttctgagttgaagtatttttgtgaattttaaaaaaatttgtcaattatgtaattttttctagaaaaatataatatttatggatataaaaatagaaagactaattaggatttttttccccttaaactttgacatgtaccaaattatgtctcttgaacttttgtagccgttaaaaattctctccgaactattgaggtaattggatataaggacttttgtccaatttcattcaattttactaattcggtgattgtttatgtactaaatcannnnnnnnnnnnnnnnnnnnctaccaaattatgcccctcaaattcaacatgtaccaaatcatggctcctaactttcatttatgttagattttttttactaaaattggacaaacgtccttaaatgtaataatctcaatagtttaggagtaatttttaacgactttaaaatttcagagagcatgatttggtacatgtcaaaattcgtgtgccaaaaatcctaattagccaaataaaaatatttgaatttaataatgaaaattataaatttaatagaaacaaaaataaaattacgcgggatgaaaatgatattagtttcatgtgggtaaaaaataaaatatttaaaaatttatacgtataaaaattaatttgtaaaaagttgaggggagaaaatgacaacataagacccacttcctccgcccatatttatatatatatatatatatatatatttatactaggttaatattacatgaaattaatgcatgtacacttagggggtgtttggtatgaggtgttaataatttgattataggaaatattatgaaggagaatatgattatagagaaatgtgtaaactgtgtttggctgtgtaag

SEQ ID NO: 173915 - DNA, 541 bp, Cannabis sativa
  modified_base (480)..(496): a, c, t, g, unknown or other
aattattactttctcaataaaattaacaaactacttactcaaaagaaaaacataaaaaagtagcacaagtcattatcaatgactcagcctaaagagtaattaaagactagtactaccaaccgagtcacttgtttttgaatatgacccaacgagttaaaagaaacaaaaaagcaaaaccccacactttcatgttttttagtgatatttttgcaaaacaaaattaaaaaagtgttctttttccacaaaaaaaactttcattaatttctttaaagcaccttccttgaagttagtttactacccgccatattcagttaatgggaatttactctttggttgagagactcaccaactttgaaaattcaaacttcaaaccttttgtatatgtgtatatgtatatatatgtgtgttattacttattattatatctcatcatatctttgtgtgcttggttacttgttgactctctctctctctctctcnnnnnnnnnnnnnnnnnctctctctctctctctatttctctttattgaaagaaagaagggaa

SEQ ID NO: 173916 - DNA, 546 bp, Cannabis sativa
ttgccatttcgggtattgaaggtggggttcaagctgaaactaatggaaaggcttctgctggtttgcctggtatagtaccacctattactatccctacttatgaccgttccttgaatgataagcctcatttgaataaagataataaaggtggacatattgtttctctgggccgttcacttcatgcatctctccaagtagctgggccggttttttctagtgggccagacgtcatgaggcctaatgggcctgggccttctaatttaaatgacaaggccatttgttgttctaaccttgctgagaacgtggtgagagaaacgggtgggtttcttattggtgggccgagtgatactaatggtaatggtaagctagtgtctcttgggtcggattacacattatccactgggccggttaatgctaatgagccgcaactctctaatgggttggagaccaataaggcaactttagttaaatgtgatgagaatattattactacttctagtggaaatggggcagaaaagaattttgaagaaaagaaggctttgtctc

SEQ ID NO: 173917 - DNA, 560 bp, Cannabis sativa
aaggagccttcactgtagaagcccaaggtcggtctggtggattggcttttctttagaggtttagtgatatgggtagtatattgggcttttcaacaaaccacattaattattctgtagaattcgaaggtgaacctaagtggagagttatggggttctatggggaacccagttccccaacatagcatttcgtcggaactcttggaacctgctacgatcgttggtgggtactcctacacagtcgtggtgtgtgataagggatatcaacaacattatttcacaagatgacaaaaagagaggataaaattaacataattttaatgataattaatatttatattcatttattggtcgatatgtgttgttaccgtagtaaggtacatttattgaattgtaataagctattacatgatctatctgatctttagctactgtaaacataaaacatttgaatggtaaattccgtccaaaagacattgctcaagagcaatattgattttgaataggggtgttcattggaccacatccaatatttttaggcctatccagatccgatccaatta

SEQ ID NO: 173918 - DNA, 877 bp, Cannabis sativa
  modified_base (786)..(787): a, c, t, g, unknown or other
tagcattattatttaatttaccttgacaacctcaaagccacatctctcgtgaattcttatattttatacttaattaactattttttataatatatattgtagttgacaaaatattttttcttttatggtaagattctcgtacattcataaccgatttcttaccttatttattcggtttgtaaatgaagctttagcggctaaatcttttttttttttttttttttttgaaaaattttataatctttattaattgcaatccatagtgattacatgattaaaatctggagtaacatccctactactgataacacgatcaacaactaaataggatgctcgagctaagaaatgagcaacactatttgcagaacgtctaaaaaaattgggataaacatctcgcaagttatttaacagcatcttacaatcagaaataatactccaaaagtatgaaaccataggagtatagctacgtaatccttgcaccgcagtaagactattagtttcaatgacaaccttcctccaatatttctgtttaacccaactcaataccttcttaacacccaaagcttccaccatttcgagttgcaacacccctgaccgacagcaggtaaaaacttccaccaatgcgtcagttttatccctaatcacccctgcaaagctgtaagttacagttcctgaaaaaatggtagcatctacattaatcttcaaggtgttttcagctggtttggcccaagtctcagaaccaacgacatcagtaaggaattcagctgtaggattaaatgttgaatnntgagcccgagtccaatctgcgagtaaagcttgagctaagtgagcaacactcgcaatagtaggggacttatcagaccatactagctcattt

SEQ ID NO: 173919 - DNA, 686 bp, Cannabis sativa
gaaaaaaaaaaaaaaagattgttatttttaagaaattggaaacattaaaatgaaaaaataattgttaatttaaataatatatatatatttttttaattttaacaagttggtaaatttaaaattaaaaacaatttaaatagttgataaataagtaaatattatttttacttagtaataattagttttcaaattttaattattatataaattttaatttgatcaataattagctttagtaataaggttaatttaatactattcataatattaaaatttacgaaaaaagtttgtaggtggtaacacaaaataggataagacattgtaagatagcataaaataaaattcttatcttgatttgatctctttaattagaaaccaaagataggatagaacaattgtgtttgtataatcacctagtgataattttttttttcatgcacacaactttccttagactcgtttggagagactaagtcagtaaggactctcaaatacgcttctccaaattatctagtacattctttatctgcataaatagttaaggcttgttgtgtatgttgggattttatgccctaaataaaactcatttcgatataatcttatctgttatcaatagaagattagaagtcaattatgtttacatatagttttcatatttatgttttaatgtatacaatttctgttaa

SEQ ID NO: 173920 - DNA, 768 bp, Cannabis sativa
  modified_base (540)..(547): a, c, t, g, unknown or other
  modified_base (625)..(635): a, c, t, g, unknown or other
tggccactaacatgctaaacttcactaatcctctgaatggcgaagcttctgcttgtcagttggccatggagaaggcagtgcttttgaaacactcttgtgtgctaattgagagtgactcggagatagttatcaaggcgctgaatgtgacttgttccagttggggtattgttaaccatgttcaccaatgtaataagctctctagtttatttttgagttgtaattttttgttcatttctagatcttgtaattttgcaacccataatgtggctaagtggactaatatgccatggttgacttgtcaaccatcccattgaacgttatttgtaacgaccgtgaggtttagtttaatttatctataaaaggtttttttctataaaaaaaattaagaactttaatataagataaatacaattgagtaaacataaaataataataaaaaaagtaataatatagtatagattttaaatttgaacttcaatattcaaatgcaacaaaaattattaactataaatctaagtttaagttaaacactaaaatgtnnnnnnnntaaatataaaatagtttaataaataaatgtaatttatgtaatataatatatatatatttttattaaaaaatatataannnnnnnnnnntcggtttattcaggttaattgagcagtttaaaataatttgtaaaccactcaatacattcattgggaacttcagatttttattgtattacttcgagatgtattttttgtcggtttattcaatttagtttgagcg

SEQ ID NO: 173921 - DNA, 721 bp, Cannabis sativa
ccatgttgaattttaattgcaaaataacgtaaaaaatctgttgcgttcatactttttattttacagatttattttttctgtgtgagattgtcaattttaggctcaaatttggttaacgaaaatttgcgttaacacatttcattttcagtttttcattcaaaaatcttattcttgccccaggatcaaaactcacttcgagcaataaccatctccaacttcttcatctaactgtcaccattatcattcagctttttttttatatattttattttgtatatataatggaaattacccgttcctatgcttcttcatctccattaccaaaaaaaggcttctgttatctcaaattttgtccacctaacgtggcttgtccacgtaagcaaagacagagtacatgtggaatacaaccttgccaataccaagacaggatctccatacaaggtatggcaaacttgtcaagcatcaaccgaaaggagtaaagcgagccatcaaggagctataacaatatgtctggccgaccaagagaagcctacaggccagccaaggtgagcttgtatggccgcccaggacctaggcacaagctggcggaccaaaaggtggctttcactgtaaagaccacttagtttaattgggaaattagaaattaattatgtttaactatggaaaactatttatagatatttaaataattgtttatgctgttattattaaattctgaaat

SEQ ID NO: 173922 - DNA, 529 bp, Cannabis sativa
agtatttcaattacttatgatgtcctttttaaattattacaaacctaatctacttcgtttatcaaatttataatttcaccttcatttatcaagccttttcaatttcttgagagattataaatgtgtcaaagtctaaattgaaactccacaatatgaatttgttcttagagtattctaatattctatataatttttttatggtttttatattcatttttattatattaactattagagtagtgatatgaaaagttgaaaatcatctatgattaaaaatgtaaagttaatatatatttttattatatattaaccataaagtatatatattattttattttcatttttatacccatttttatatatgaagaagcaatatatatatagaagaagaataaaaatcatgatgttggctacataagttgaattaaaataacattcttcatgagttgaaccatcacatctagataacacataaatataaatgttgatcgaggttttcggcaaccaatttaataatatatatgagaaa

SEQ ID NO: 173923 - DNA, 519 bp, Cannabis sativa
attatcactactagactgcacttagaggtgtgtggtgcgggtgaaaaatctatgtaacatcgtattgtagccttgctttttatttttggagatctttctcttggaggcttattcctttacacaatattgtcactttctcttgggaatggattaaatttatttggggacttaaaaatagaagagtggattctaaataaagtattttttttatgcctttattagtctacaacaaatattggttatattttttttatcttttcgtgttagaaattattttaaaattaattatattaaaaaaataaaattgataaaaattgaactcatgatcttatttttagcattttgaaaaatatagagtttattttctcatttaataaaacaaataatccaattaataacttattatttacccatatcaggtttagtgacatttttattagtggcatttttttaaaaaatgtcacaataatgatattttaatgacatttgttaaaaaatgtaactataatgagaataaat

SEQ ID NO: 173924 - DNA, 557 bp, Cannabis sativa
cgtgtctctcaccaaaattacaatcctgtgatttagggccctatgaaacgtcgagctgcaattccactcaggcttaccggcacacttgagcacggaaatgaggtaagatagcataaagcatatatatgtgaatgaatgtatgttattatttgtttacactactaacactagcaataatgtaatttaagggtgttagtacaatgtaagattttagagtaattacggtgttaccaacacgagtacagaattggcactcttgtgtatgtggtacaacactcggtaactcttgggagtacaaattggccctaccaagatgagtacaaagttggtacactagtgcatatggtacagtgctcgaccctaccaacacgagtacagagtcggtgctttagtgcatatggtatagtggtcgtacttctattaagaatgttcttaaccatttagcgggctcgattattgagctcaggacagcttaagcataaagtcggtacatcattactgttatatatgttatgcatatcttactgagtctgttgactcatcaatttgctaccatg

SEQ ID NO: 173925 - DNA, 542 bp, Cannabis sativa
ggagtgtgcaagcagtcgaaatttaccggttgtccctaggataaaacaacccagtcgtcgcactgtatcggaaccccactgcactgtagagcaccgtcgaatacacccaggaaaatttgatatcgcagatggaatttttaattttatgaaaactgtatttttctaatacgaaagagatattttcttcccatcaattcaatcgcattatataggcgaatggattgaataatcgtaacgggaagaataacgttttctgaatcgtcgggtgagttggtttgaccgtgtcccgttaactgatacgactaagtaatcagtttaattaaacacttttcttaattaaattaataaataataaaaaataattattttattaaataatttttttgtaaaaaataatatagtgtcacaccacaccaaccaacccaatccggcctggctcggatcggacggacggacggcgcgcgcgcgtatgtagtgggtcaagtgtgtgtgtcctcacccattcgcacaaaactggggaccccttggggcccaaacccaaa

SEQ ID NO: 173926 - DNA, 536 bp, Cannabis sativa
cttccaagtagggatgtaaattttttcaatgtgggactgggcgagttgatggaaaggagattaatctgttttattttattttatttttaaattaactcttttgaataatgataaatatagtgtaatgtttaatttaattttgaatatataatagtctctaatgatttcctctgtgcacggagtagactcaatacagcatagtaatgaaaaagaaaattacctaatatactactttttttattattatttttttttaaatttaatctttgggttttttcggtgatttctctagtgatttttatgtggtttttttttttttttttaataaataaaatctttattgaagaacaaaagaaaactacaacaaaccagaacaaacagagggggcaaaatccccaattccacccttacaaaccatggagctaattcttgcccagtgggccagcttatcagctaaaaagttttcctctcgagatatatacaacacttcaaacctacgaaaacttctacaaagcctaaggcactcacaaaacaga

SEQ ID NO: 173927 - DNA, 506 bp, Cannabis sativa
  modified_base (70)..(75): a, c, t, g, unknown or other
ttagatcattattattaggtattaataatgtaatgccctaattcttaggcgcgctacagtgattttccannnnnnatactaccttgctaatcaagggttttctttgataatcgtgtcaaatcaaaacttgaataaaattaataaactttataaacatacatatatatatattatataaccgggatcccgtgctaaaaacttttataaacattttgaaaatatatttttatttttcaaacttgtcgcatagcgactacaaaatatatcccttagatgcctcgagaccgaacactccagattgccccgccttgacatgtacaatcactacccgagctcaaaactcactcctgttcagcttctgcctttctcttacctacacaagaaagtagattctgtgacccaatagactcagtaagaaaagcatacaacaaaatatacataatcgacctttgtctaggcgcccatacacctatccacgaggcttaccaaatgattaagaacgttct

SEQ ID NO: 173928 - DNA, 525 bp, Cannabis sativa
gtcttcaactaggggcgagcattggtcgctttggtccgtttttttctttataaaaatccaaaatttcgttttggtctggattggtgcaatctaaaaaccgaccgaccaatcctgaacctatcttaaaactgaccgttttgaacctcgatttggtcggtttaaaccgcccaaaccaaacttcttttttttttctttaaaatatgatccaatttattttataaacatattacatcttacaactacaaacatacaaattaattgttcaaaaactaattatcttattcttttaactttaatattaataaaataataataataatatattattattattattatatattactagtaactacaatacataaagcaaaaaaaaacttaataaattaatatatatatatatgtatgacagctagtttcagttttttcggtcgatttattacacaaaaaaaactgaccgttcaatggaagttttaaccgttagtagttttttcaaatttcggttccgttagtttcggttccaac

SEQ ID NO: 173929 - DNA, 764 bp, Cannabis sativa
agtcctcgtgagatctacccttacttgcgattatactaaaataattggaagtataggaattaaaaaaattagtaaatttgttgtggcttacgacacgcatcacctcaccaagatctttcatatcaaaatagtcatataataattgctttgtctcatattacagatttttatcattagaagcaagcaaaatatcatcaacatacaatttcaagaaaatgaagctgctcccactaaccttcacatatatatatatacattgatcaactttgttctccatgaaactatttgcagtgacaattgcatcaaacttgagataccactatcttgatgcttgtttaactccataaataggcttattgagcttgcaaaccatatgttccttgtcaggctcctcaaaaccaacaggttgagtcatgtaaacatcttcatacatatctccatttagaaagacagttttcacatccatttgttcaagttccaaatcaaaatgagcaactaaagccatgatgattcacaaagaatctttggtagagacaggtgagaatgtttctttgaaatcaataccttctctctggctataccctttagcaacaagtctagccttataccttaatatttgcccacttgagatcatgcttgatcttgtaaacacatttgcacccaatgggtctgcaacctttcggtaggataactaaattccaaactttgtttcgcgacatggaacttgactcatctgtcaccgcattcaaccataacttagattg

SEQ ID NO: 173930 - DNA, 772 bp, Cannabis sativa
  modified_base (203)..(204): a, c, t, g, unknown or other
  modified_base (393)..(394): a, c, t, g, unknown or other
gtcaaattttgaagtttaatatacttatatgatttaattattattaaacaaaatatgactccacgcgaagccaaattatttatgagttttttatataatatatatatggataattttttaatgggtactaaaaaaattgatgaggtggcaatttagtgacttgctagattaggttaccaacaagtttttttttaaaaaaaaannatatatatatatatttccttttttaattatagagaatgatgattttgagaattatttttagaaattaatttattttacttaataaaaaataaaaaatatttaatcacaaattataaaattataaaattattattacaacaaaaaatcatacttttagtcacaacaaaaattgtgactaaaagtaaaaannttgtgactaattataaattgtcatttctacgttgtgactaaaaaattcgtggttaaaagtattagtcacaaaaatcacaatttgttgtgactaaaactaaattagtgacaacttataattgaatattatgtttagtcacaagtaacttttttgttgcgactaaaagtcacatttagtcacaaattttttttattgtgactaaaaaattatcactaaagatggtcttttttgtagtgattgtatttgtgactttgttgttggctaaaaattaagtgagcaaacatcatattttatgagagaaaaaagttagctactaatgtcaaactctatgaaaccaaataagaaaagttaaataaaaaagtaaaagacatttgttgc

SEQ ID NO: 173931 - DNA, 662 bp, Cannabis sativa
tcgtggaagctgaagtccgcctcacaaaaattcgacgtgactctcgcatgcacgtagttttttgtgcgtgaaagatcactgaggggtacgacacatcttcaaccttccacgttggaagataatgctgcttgaagtttttcacatgcccactgatgttgcaccctttagtcttttaaagtgaaatcattgcttgaatttttatgcaactttagtcttccctcgtaaaagctgaactctgcctcataaaaattttacatgactcttgcatgcacgtagttttttgtacgtgaaagatcacttggggtagcacacgcctttaaccctcatttccggaagagaaggactacttgtagtctgtcacacacccagtggttacttgtagtctggcacacacatcttggtgtttcagcctttggccttttaaagtgaagtcatcgtttgtattttgataaaactgtagccttccctggcggaagccgaagtatggctcataaacattcgatatgactcttgcatgtacttagttttttttgcgtgaaagatcactaggggtacgatatgtcttcaaccctccttcctagaagagaaggactgcttgaagtctatcaccctcctactgaagtttcaccctttgttattttaaagcaaagtgatcgcttaaa

SEQ ID NO: 173932 - DNA, 916 bp, Cannabis sativa
aaaataatttaatttgatttttttattgataataagatatttaaatactatatgttaaaaaaaaaagtaattcccacttaaaataaaaaaaaaaataaatgggtcctataaaaaaattataagaataaaactttaaaattaacacaatataatgtataaaaaaataattatttttttaatataaaaataattttatttgaagtttgttttttaataataaggtgtttaactattctttgttaaaaaaaaaaagataatttccacttaaaataaaaataaaataaatgggtcttattaatttttttttaacaccatataatgtaacaaacaagtattattttttttgatataaaaataatttaattttaatttcgttttttagtaataaggtgtttaaatattctttgttcaaaaacaaaaaaaaaacaaaaaaaaaaaaaagaaagtttaaatactcttcaactgtgtcaaaataaaggaatttttacgttaaatactgaaatttttgaattttttactgattttttttaaaattactgtgtttcttttcaaaaatattatgtaagttttatatggtgtactgtgttaagttttcattgttgttctacggttggtttttagttgactagttgttgttttaattattttgttttgttattttacaatcgttttataaaaagacaatatttttgtaaaaaattctgtgtgatagtaaaataataaagttttagccaaaattcaatatttttgtaaaaatcccaaaataaataaaaataaaaatatgatttgggcttacttctttcgtttaaatatgggatattttcaaaaatatgggaaaaataaaccattttatgataaatatggcaagaaaactaaatgccacaaaatatggcattaactaaccaaccaaactaca

SEQ ID NO: 173933 - DNA, 520 bp, Cannabis sativa
  modified_base (455)..(462): a, c, t, g, unknown or other
tgtaacaaactttttgtttaaatttactataaccaaaatcacatgattgttcaccacgtccattagaggaacaactacctaaaaagattttataaaaccattatcgcaatgacaatatagcatactgctattcatccacgaaatagtaatattgacatcaagaagtaaaaaaatcacaataaaattaagttgggtcaaaagaaacaaaaagtgtggttaaatatatcccttacataccaattccatccgcacaatcaatgtatttcatgactcttcttcaccacattcacattatttaacgtccatctcacaaaaactcttgcgagtgagctaaactcaatacatatctaacaaactaactcccaagataaaatataattaacataaataaaataaataaattacttgtccacagtaaaaactggggagaaacattgtaaagtccttttttggcnnnnnnnntgacaaaataatttttccttttatggtaagattgttatgcattcatattcgatttctt

SEQ ID NO: 173934 - DNA, 648 bp, Cannabis sativa
ttttgttctggatgtaccctaaagatcagagtgaaggtaatctagttttgccttttttgtatgcgtagcttttgtgaatttcaacctgcaacttttaccataaacacaattttcacagaattccaatttcttaccaagtttatctttgagtatgccttgtttctcaagctcatgtagtcatctctcactgacatgtccaagtctcatgtgccaaagctttgtctggtccattgcttcatttttgactactgttgcaaccctaccaataactgtattaccagctagatagtaaatctcatttatgagatttcctttcatcaccactgtaaagtcttttagaacactaagtgaactatcaatcttgatgatgcagcctttaagagttagtgcaccaataaataacaaatttctatttaggtcagggacatacctcacatcactaatggttctttctgatccattgttcattttgatcaacacagaaccaattcctgcaatcttgcaggctttgttatcacctaacaagactgaaccactgtcttgttcttgaaagctgcaaaagaaataatgtttgttaggagtcatatgaaaagaacaacctgagtcaagaatccactcatcaccagtggcttgacttgatgccacaag

SEQ ID NO: 173935 - DNA, 533 bp, Cannabis sativa
aatatacaaaataaaccaataattgtaaattcattagagtatctctaaccatgctctctaaacatactccttagctaaaataggcagtgagaattaaaaatgagctccaactatacaaaaaatggctttctatagtagagaatggacatggaggtctctaaatgtacagagctccttacctaacattttttattattattttgatcaaaagcactattattttttttaattattttataaaattaatttatatttgacaaatttaaattataaaatattatttttttgaaggagttataaaatattattaaaataatcaaatataaactaaattaggaagcatgattggagcaacaacaataaaaatggctctttattttagttttttagctattgcagctataaaaaaaaaagagtacttacattgtcacatgacgatagtagttaggttgcttaaactctacaacctaactcttttatttacttttataaatagaccaacaatttataagtagctaaggggtgaaacaacc

SEQ ID NO: 173936 - DNA, 594 bp, Cannabis sativa
aatctgtctccaaattagtgtaatgttcctgtcccaccaagtatttttaatacatatcatttatccttatttagtacataataaatttgttatttaaatttaattaatacatgtaaaattaggagtgtgcataaatcgatctaatccaatcacaactgaccgatccaatcacaaccgaccgccaaacattagatatccaattatgatcggatcggattgtatgttatttttgaatatccaattggatcggaacggatgttggatagattgtctaaatatccaatacatccaacatccaattaaattaattagtatttttatttaattttgatgagtaattagattttataattgtatacattaaaattttactctttttttcttggattgcatggatccagtctaatccagtacatattggacctgaaatattggatggatccgatccgatccaaaaatactagtctaaaatattgaataaattcaattgaaccaataaatgtatatgaaatatatccaatggatcgattggatggttgaaatcaattggatcggatcagatggtaaaatctaaggggtaagttgaaaaatgcc

SEQ ID NO: 173937 - DNA, 546 bp, Cannabis sativa
gctaggtgtatatatgtattgtagagatattatataacgtagtacgtatagctagttattattcaaaacttcgtgcgcagatctaatattataacgatagaagattaattttgtgtagttttgataagttaattaattggttcttatatttgaaatcgaattcagtcaaaaaaatttaacacataagctagcatcatcaatttgaaaaataggtaaatcacttagtatcaatctatacaaaaaaacacatttttttaatttataaaattttaacttgaaaacaatttcggataatcatgaattataataatgtgagtttccatctctttaataaggggcacattattaattatagtaatcaaaatataaaaaaatatatatattttttaggaaaaagaaattataaagttattatttacaccatgttgtctttcttttttaatagtgcaaataaattagatactatctacaattgaaaaacttaataggttcatattatcccatacatatatatatatacatatactaatactatatatatgctag

SEQ ID NO: 173938 - DNA, 995 bp, Cannabis sativa
atatagtcttattaattaatgaatgaaagaataagaaattattttatgttacttggttcacatgatactttcatgattataattttaatatataaattctattaaatcttgaatttatggacaatcatgattatagtgttatctacacattagaaaataatcatgattattgttatcttaaattgtatccacttgacgtggcatgtccacgtaagccaaagatagaatacatgtggagtgcaaccccatcaatagtagaacagagcctccatgtaagatatagcaaaaccgtcaagcagcgaccgaagggagtgaagcgagcccacaaggagctgtaccaacaatcttggtcgtccaagaggatcctagttcagtgcatattgttgtttcatgacctaatctctatgtcgacataggtagatgaggtatgcactcacctgtaggtgaaagacctagaatctgtataggaagtgaattgaatttgagccccagtattatggtggttatcaggtgcgactacttgagtttggacgtcattttttatgagtggtattgagagttagaggtctagtggacggtgtgatatgcatttgacgcttgattttgtgattaattgtggtctctcaaccttgtttatacattttgataatgatgatgagatattttattttaaaagctaaccacgcaggaattttattaaaccaatgatcctttgatattagttgttttcttagtgggcttaataagaccaccccatgttttctctattccaggaactcagtatgatgctagtggatgaggaaggtaccgttgaggaagaaagtcgttattagtttagtcttattctactatttaagctttcaatgaaactgactttgtatttaagttggaatggtgttgtggtaattacaacacgcaagcatacatatcgttttaacaagtattactcacaaagagtgaggtcgatccacgaggattgtagttaaatacgttaa

SEQ ID NO: 173939 - DNA, 578 bp, Cannabis sativa
  modified_base (440)..(441): a, c, t, g, unknown or other
tcaaaagcataaaaataaaacaatacctaaaagcaatctccatttatccaaaaaaaaaaaaaatcaatctttcactactactattatgtactaataactttttagtcataactaatacttggcatcaattttttcagtgataacataagcttaatcatatttttttttagtcacttttagttttttaactaaaatgttgttacgatcgacaaaagtagattttgtataaaggtttgttatcagaccaatcaagtaaaaagaaaattatattaatcatcttctatagcataactgaaacaaaatcggtttcaacaatatttatttaataccaaatctttaaaacaaaaacagcaaaaatcaaaacgccttttacacatagaaaagtttttaattaattatatttataatgaatcttcaatatacatgtatatatatatatnnatatatatataattatatatatatgaacatgtgttcacaagcggttcagcaggaatgccgagaccgatctcgtatgccgtcttctgcttgaaaaaaaaaaaaaactataatctacacattgattcttttttttttcg

SEQ ID NO: 173940 - DNA, 560 bp, Cannabis sativa
atggtacatactaatattgatttcctccatttgctacaaaattcaaatattaaacaaataaaatgttgactgcataatttctcattacatttctgattttttttatgagcaaaaaagtacattaactttttattgtaatattaacatactatcttttctggatgcaggatatggataaaattttcattgtaatccaacatagtggttattgggatgaaaatcaaaattacatcaactttcaagttcgcgaaatggtcattcccaataattgcaactacaacaccttggttggaatgatatgtaatgagctaaagatagatcttggatcaacaactctaaaaatagagtaccaaggaaaagacaactaccgtccattccacatagaagatgacctcgagttttacttctacaaggagttgaagaaaaaatattcagattttacaaagtacccgttgtgccttacaatggagaataaccatattgagtcgactgtttttccaacatgaagtacatcaacagagattaaccatattgagccgacttttttttcaaccagaagt

SEQ ID NO: 173941 - DNA, 649 bp, Cannabis sativa
ataaaacctcaaatattttgtcattttccaaaatattacaaaaaaattaataaaaggcagtataaaacctttaaaaaaaatacagtaaaaattaaaaatttactgtctgacagtatttttttaagaaaataacaaaaatcaatataccatataaatttctcattattttatctctaaccaattgttaattatctttttagtaatgtgtaagtgccctataattaatattgcgtactaaaatgatattaacaaaaatatctctttgtttcaattaaattatagatttcactccaaatttttagtgcagactccaaatttaatttaaattgattctttttcctttttaaatttactactttaacaaaaaataataataaaaaaaataatctctgttataatctttaatctatgtttgtataccaaataatattggttttttatttttagtaaattgcgccaaacccctaaatcttgacctaaaatgagtagtgagttttttttttttggaagaactaaagttcattaagtaagaagaaaattgggaatcatagggggatcaccctccccttgatacagaactgcagttgtctaaaaattctagcactccttgctaaactatccgcataaagattgaaattacgattaatgt

SEQ ID NO: 173942 - DNA, 622 bp, Cannabis sativa
aattgaagcgaatttttttttgcatcggttctaagatgaagtaaaaaatatgactatttacgtttacggttattgtgtcggttaccctaaccgacacaaattgtttatgtgtcactttaaaactgaagtaaaaatccctttttgtagtagtgcatgttgataccttggtggataagattagaaacttgttggtttaggtcaaggttgactcagaatgtcacctaattatttatataacctctttttttggatcatttggtaatgtaggaatgcaagaatcatcagaaatacttgatctattgaacaagtcaagtctttggttaattgtagattcttagagtttgtggggtctagttcttcttatactactagtaccaaaaatcttacttttagtcacaacaaaatttgtggctaaaaataaaatagttctgactaattacaaatcaccattcctattttgtgactaaaaagtccatggctaaaggtattagttacaaaaatcacaaattattgtgactaaatatgtttttagtcacaatacttattgtgtttaaaactaaattagtgacatcatgtgtctaaatactatgttttaatcacaagtaactttttgttgtgacta

SEQ ID NO: 173943 - DNA, 755 bp, Cannabis sativa
tcccagaaagaaacaaagatttggcctttactctttgcccccaaacctctgatttgtagtgttacgtaccaatggaacctaaactattgattaaaaaatatatatattaaaaacgtttccaaaagaaatatatatatatatataaattaaaaaaaaaaaaccttattcatttttacacataaaaacagttttttttttacatttttacggaattctacataaaaatttctattgtaactaacgctgcaacttaaattgcaataaaaaatcgtatagaaacccatcttgcaactagcgctgtaattattttagaaacccaatccgtaaatttcaaaaaaaaaaaattaaaaaaccattatatgaggtaattcaaaaaaaaaaaaaaaaacctcaaatttaaatttgatcaattttcattttttatataaaaacatggtgcatctccatctcttcgctaattttgacaaatttagagaacacgtgtcaattataaggatcttatacctcattctcccttaattagattatcggtatacacctcgagcgttctcattccattaaggataacaccgccacaccaaactagcttcttaaagggccaaacataatctctcttataaagagtgatgagatcagaactcttaatctaagcaaagaaaattgtcagtaaagacattcctctgttgagaatcatggggttccatctcaaaactaattggcaatgagtagagttatatatggttcaattctctacc

SEQ ID NO: 173944 - DNA, 548 bp, Cannabis sativa
aaaatcaattcacgggcccatttgtcaggcctaaacaaagcaatggatcagcccataagcagagtcagactacgtctcagggtttagctataaccctgtctcaataaagttggacctctttgatcctgaaaggacgactcttatctagagaagtagagacttagagaaatacaactagataccttcaagggtagtcccggaggagtagtcgaagacgtgttcgggtgcagtcctatgtggcatccatttgacatcaaattccacaaaatcaggggtttgtctcttgtgtcacacaaaaagcaacatacattttttccaacgccaactactttactatacacgatcagtagtgcatggcaacctgtcaacatcaaattgtactatgttgtacgaatgacaattacccctcaattgtgcctcacttaccgacccaaaatcaatattataatgtattttaccccatcgatttccttatttcatgtagaactcggtttcagcctataaatagggttttatttctccatgcaaaagattatgaattttagcta

SEQ ID NO: 173945 - DNA, 554 bp, Cannabis sativa
taggaaaatcagttcaatttatagagcatgatgatatgacttgcctctcttacaatgatataattgaattgttgcataatcatagtgttaggattttatgtcctaaatacaatttaattttattataatcttatttactttcaataaagatcaaaaattatatcttgaccttatcatatgttttgttcacatgtttaatacagattatatatttaatatacaagttctattaaattctgaacatatagtttttcataattacagtgatgtcatcacagtgaaaagtaattgtgattatatgcttcaaattattaagtctcacgatttatcagtatactggatttacattgacgtgataaattagtgataaggtttacttacacttgaataagtggaatgtctttttttgggcattagtacactagtatcaatgtatcggctatacatcggtatggactgatattgacagtagaagatatcataaatttactgttatatctttttaagtccatatcaatggttgatcttaggtttatggatcttaatcctgatat

SEQ ID NO: 173946 - DNA, 1215 bp, Cannabis sativa
  modified_base (126)..(133): a, c, t, g, unknown or other
  modified_base (405)..(411): a, c, t, g, unknown or other
  modified_base (589)..(593): a, c, t, g, unknown or other
  modified_base (759)..(760): a, c, t, g, unknown or other
ttttttttttgtaagtatactcttttgtctgttcaaagttttgggttcgaccaaaccttttgtacgcactggatagtaaattaacaacatgctagtaaattcgactcaatttgaattttgaaatannnnnnnntattcatttattgatcgaaaatgtttttgttacagtagtaacttacatcatagctatttgatctaatttgatctcttagcttaacttgaaataaaacaaattgcagaaattagaaattgtactttataagatcgtcatccgacctgagtactttgtaatttcatccaaacctttgggtgtggtctgcccagaaggccattcacttaagagtaaatgttctttttgtttagtacttgaggtggtcatctgacctggtacttctattggtagtnnnnnnntaaatgttccccattccaataccgtggtacaagaagaagttgcattttttcatcatatttaccgaatttttatgctcctgattcgagaacttgaatcacctaatatggtccttccctgttaggtccgagtacaccttccgtactatctttggtgtttagaaatactcttcttaggacnnnnnctcccacaaagaatttccgagccttcacttgtttgttgaaataccgagctattttttgttgatgggccatcaactttaagtttgctgtggtttgtttctcttcgatttcatcaagtgattcggcaaggagtacatgattttcttcttggttgtacgtcaatcttcnntgggatggtggctcgagctctacgggaagcatagcttcagatccatatgccatggaaaatggagtctgtccggttgccgttttctcatttgttcggtacgaccattgaacttcaggaagttcctctggccagtttcttttagcatcctcaagtcttttctttagtgtatccttcagggtcttgttgactgcttcaacttgaccattttcttggggatgcgccactgcggagaaacttttgatgataccattgttcacacagaaatcagtgaaggactggctgtcaaactgtttgccattgtccaaaactattttgtatggcaatctgaactggaagattatgttcttcacaacgaattcttgaactttttttggatgtaatggttgccagtggttcagctttcatccacttagtgaagtaatcaattgtaaccactgcatactgcactccacctt

SEQ ID NO: 173947 - DNA, 565 bp, Cannabis sativa
gaatttcaattacatcgacatttgtatgtcgctgactaccaatgtttagaaaggtgtttttgaggcgcgcctcaagctgagccgtttgaaaagtgcatcaagccatgcaccttgctgagaagaagttaggtgtacgcctcaagcggtgaggcgtaggaggcgggcgcctcaaattttgtgtgtaaaatgggctatttgagccctaaaaaaaggtccaaattggtattttaaatttggttttctgctacctaaaataagtaaaaattactcaaaatatgggaaaattttaagagtttacttttttatggcataactaaataaagcataggtgttatgggttttttttttcttttttgtttttttacgtttatatgggttttttttatgccatatttttgtaaaaaaaaagtagaaatcccatatttgtaaaacaacaataagttttgctagaatagtcactggcaccgaaaaagtcgccataaaagtcaccaacactggaaaagtcgccgaaaaaatcacgaccgccggaaaagtcgtcggaaaagtcaacgtcaacgaaaaagtc

SEQ ID NO: 173948 - DNA, 521 bp, Cannabis sativa
cttctctcttactctgctcttacagggttccactgtccaaaacactgcccactaccaagtgaatattaaaagaaaatggaaacactatgacgttatattatggtaattaaaattacccttaaattctcatctgacaacgaaaagctaaaagtgataacaaaataataaagaaaaaagaatgatataaacttgaaatatgcctcgtaattgtttactcatgtcctatagttttattattaggcatctactcgtgtccctttctcttcattttgtctatgcaaaagtttatattgttgccggggaatggtatttgtgagaaatcattttcaagcccaggtatatgaacattgaacatgttgaataaatctacagaaaaacaaaatcagcaatgttaattaatttaatatggatattcgtattatgtgtgttcagcatatgctaccttagagcatgtttggtattgttttctgttttttgttttaaaaaattgtttttagaagtgagaacaaaaaatagttttt

SEQ ID NO: 173949 - DNA, 545 bp, Cannabis sativa
taaaagtaaataaattgataatttcagtatagagtgtaaatttctctctcttttttttttttttactaattttgaaaaataccatatttattcacaataagagcccattttttttttttctatagctcattaaatttgaagaccaaccgtagtaccacatttactaaattataattataattgaaataatttatgacatgttttttaaactctaattagtattaataattccatgttgaacaaagatacaaatagagtagacaaagatatgatttcataatttgttttatgttatttactcaaattgataagaaagaaatataaaatatgtcatattttttcatacttagaaaacaggggttctaccaatcacaacccaaaatatctgttgaaaaaattatacggacaaataagtagaatgtttcggtataacttcatcgacagaagccaccttttaccaatagctccaaagaagtattaccaatagaggtgctgttgggaatattttaccaggatctagatcatgttggaatatattttaccag

SEQ ID NO: 173950 - DNA, 651 bp, Cannabis sativa
gttttctttatttctaaaaactgccgacacaaatatttccataataaattttcttgccatttctcacgtgggtttaaaatttatttttataaactaaaagttcgtttgtaatattttttaaatttattttttaattcttttaattagaaaaatgataatattttctaaaaatatattttataaaattattttcactttttaacttttcaactaaaaattaaaattttaaatttttttttcttaataaatattttgaactcgaccccaacctgaaccttgggactcagactccagcctcagctccaatcccgaacatggaccacgactctgaccccaattctaaacttagacctgacttaaacaaaattaaaaacaaaaataaaaattatagaagacattttattttttgtttttaaaatttaaaaacaaaaatagttatagaatacatttttattttttaaaagtaaaattataaaaatacaaattttacttttatttttataattaaaaattaaaaaaacaaaaatattaccaaacactcctaaatcattcaggggctgtttggtacacagtttttcttactcgaatgggaatactaagtctaacctatgtttggtatgcattttttatttttttgagtggggttttgag

SEQ ID NO: 173951 - DNA, 533 bp, Cannabis sativa
gtttcgacaactgaggagcaaaattgaaatcatcgtcttgaacaataggatgtttgcccttattcctattagctacagatttcaaactcattttagaacttttctttggcacaggggaaggagtggatgaagaacgagtaatagccatatttataaatggattaagagaaaaagaaggagagggaaaacggttatgtaaatcggttaatgtgagttaaaaaaatggaagaacaaaaagaagagggaaaacgagttaggatcgtggagggagaagagttcagctatggaggttttgttttttaaaaaaaaaaactgaaaagaaattgaaaataataagaaaagaatagaaaaagatagggaaatgatgtaaggtatgattgatgtagtcaccaatcaatgacgtgtacggttgcatggagtgtgtgtgcaaatggtaaaattgtaataaaataaagttgatgagtataaatgttggtttacccgtgtgaaagtatatatgtaataaagtatgtattttgtatttttggtgtaaa

SEQ ID NO: 173952 - DNA, 941 bp, Cannabis sativa
  modified_base (206)..(208): a, c, t, g, unknown or other
agtgtacgggcaaagaagaaagcacttcaaaaaacaacccagagccagtacaagaaccccagccgagcagcagcaaagacaaacccacctggaagttacatatagatgggtcggctacagattaactgttcggtgcaggaattgcccttgtcacacctgggggcaacatctacatagagcggtcaaatttgggtttagagcatccnnnatgaagcagaatatgaagcccttatttccggcctaaaactttctcgagaacttcatgctgaacacattgagatctacagcgactcacagttagtagtaaatcatgtatatgggatagtacgaagctcgaggagaaaagatgatagcctatttaagcaaaatacatgacctgctcgcacaattcaagagttatgccctcaagcaaattccaagagaagaaaacacaactgctgatgcactagcccgacttgcgagcaacaatataaatgataaggctaatctaatccccatccaatttcttgaaaaacctagtatcaccgacacaggagaaattgaaatgattgacacatctccaaactggatgacgccaatagcagcctacctcaacactggggaactcccaagtaacagaaacgaagctcgaaaaatgaggagaaaggttgcacggtatgtcatcgtagattgagtcatgtatagaagaggattctccatgccattactcaggtgtgttacacaagaagaagctatacgaattttttttgaagtacacggtggattctgtggcaaccacgcagctgggcaaagcttatccaagaaaatcttaaggcaaggatatttctggccaatcatgattgaagattcaaaggcctacgttaaaaaatgcgacaagtgccaaatattttcaaagatacctcgtgcaccgtccaactaactaactcagatgcaaagtcctt

SEQ ID NO: 173953 - DNA, 544 bp, Cannabis sativa
tagccgtgaaagtggcctgaaggagatcaatttcagcaggtgtaagactctctgagatgcctgaaagaacgtattcaatgacttcattgtcaggcatttgactttgaaaaagtgtagtaaaatattgctcaatggtggccaagattgagggtgtatcattagcccaggaaccgtccagtcgttgaagggagagaattttattggtggtgcgtctctgggaagccatgcgatggaagtaacgggtatttttatctccaagtttaagccatgtgactcgagagcgctgctgccagtaaacttcctctttttgcaataagccactcaactcttcttcaagcttttgactttgttctaattgttcgttcgtaggattgggcaaagagttgattaatttgagctgggattggacagtacaaatttgggtagtaagcggggggcccaaagacttcttccaatgtttgagccgagaggaacaatgtgttagtctttcattgagaccaattaaaggattggagtgagtatttgaagtggtctgggtccaggc

SEQ ID NO: 173954 - DNA, 682 bp, Cannabis sativa
ataagttaaacctcacagtcattatataatatgtttagtagatagaagaatatcaccaaatagcttgtgggtaaatgcccacttagccacattatggacaataaaattacaagtcctgccaatatgagagaaaatacaactcgaaaataaagagaagtgactattacaaaaagaaacatagtttccaataacccaatgagactcctccccattgagagcattgatgactacccttgagtcactctccatgatgacaaacttggcatcaaaatccaaaacaacagaaatagccaaatagtacgccgtcacttccccacaaagagcatcagaaaagtcaagacaagccatatgaactcgaaccaccttgcctaagtggttccatgcaacaattgctatacacatgctatcaaggcccactttaacatcgcaatttagtttgatccaatcctgagggagggggggagaccagcactccttcaagcaagggacaggggaagggaaaatagtagcatgtaattctgcaaaagaaaattgaatagagtcaatgcacttcttcacatctctaaagtgacattattatgaaccttcccatttttagtgtgccagatggtgtcgaccacaagtgaggcatacaggaaaacctcctccacatcaatccccttatgtttcaagtcccaaatga

SEQ ID NO: 173955 - DNA, 658 bp, Cannabis sativa
taaaataaataactatagtattcggtaaaacaagctgcatagtggcggatgtaggtcgattgtcgcaataactggtaaattgtgcgcaccagacctaattacggcgtgttttggaacgatcctacggtccgatcaagtttcggagacttctggcaaagtctctcgctcaaataaataactatagtattcggtaagactattctgtaaaacaagctacatagtggcggatgtatgtcgatcgtcgcaataagtggtaaatcatgcataccaaacctaattacgacgtgttttggaacgatgctacggtccaatcgggtattggagactttcgatttagtctttcgctaaaataaataactatagtattcggtaagactatgcgataaaacatgctacatagttgcggatgtaggtcgatcatcgcaataagtagtaaattgtgcgtacgagacctaattacagcgtgttttggaacaatcctacggtccaatcgggcttcagagactttctatttagtcttttgctaaaataaataactatagtattcggtaagactattcagtaaaacaagctacatagtggcggatgtaggttgtttgttgcaataagtggtaaatcgttcatacaaaacctaattacggcgtgttttggaacgatc

SEQ ID NO: 173956 - DNA, 612 bp, Cannabis sativa
tttagtttcgacaacatgatttacctttttgttctattacactgtctttttcatggaatttattgctataactttattcttattaatttttttttttttactttttacctttttgaattagatagttataaaataactataaactaaaaaagcaacataaaaataacaaaataaatgcacatctatacacctgagccctttcgttgaactcagtgatgcttcttactggacgaccttttaagtcatcccacaactcgccccctgcggttagtagatctgtagagatccccgcctgaagggctgtaagttgtgtgctgtcatccaaattcctaaccctagtcccaaccgtgctaaaacaacttaagtatgccttaagtgtctcaccgggctgctgattcatattggttcgcgaggccactttgggtcgtctatccctagcaacctggaactatttcttgaaatccctggacagctgctcccaagaagttattgaatgatgagtaaacttgttaaacctgctgctcgctgctccaacaagcaaggtggggaacaaaatatagcgtaaattattcgtcacattactcactcgcattattgtgttaaagttattca

SEQ ID NO: 173957 - DNA, 554 bp, Cannabis sativa
aatatgtcaacaaatattttttttctcaacattctataacaaatgttattttttataaactttgagtatatacttgtaaaacttataaatttgataaaaatacactaaattttcactaaatacaaattttaaatataagtttaaattagagtaatttgcgacgtaaatatttagtttaattctcagttgcagataaatatttaagtttatcttttgacggtaaaaatacataatttatatttttgaaacttccataagtatctgactattaagtgtcaagtcattatccacgtgtcattttcttattagtatattaaaattaatttttaaataaaaaataaaaaattaatgacatagacccatcagaaactgacatgcggtcattgatttgacacttaacaactagatatttgtagaagttttaaaaatataacttaaatataattaatgtcaaaaattaaacttaagtatttatctgtaattaagaattaaatttaaagaattatgccgcaaattactctttaaattagactgtattgtatattatatagata

SEQ ID NO: 173958 - DNA, 661 bp, Cannabis sativa
ttgttgtgcaagaatttcaaagtagttattttgctcatggccgaaactagtaatagatgaaggatcggttttacctttcaaagaagagagtttggctttgctctgtcgaattcttttcttgaaatcagaggttaagcttctcccccaatcgccaagaagtttgctgcatatgttgatcttttcttgaagtggcagatgcgtattcgaatcccagcaggattgaacaatttgagcacacataggttcccttgtccaggcattttcaaagcgaaaaagatgagcagtagcagtcgaaattgtaggagcaggctcaagaaatataggtgtgtgatcagaagaagagacatcaccattagtaaggactgcatttggaaatgtgtcaagccagggatgagtgaccagtgccttgtcgagacgaatctcaacccagttttcagatcccttgccacgttcccaggtgtagggatgaccttttagctccatatccaccaaatcgcagctttgtaaaacatgttgaaaaccttctatgagtgaagaagggtaaggtctgcctccccttttttcattttgattaccaacattatttatatctcctatgatacaccaaggaagttgagattcagtagagagagtggtgattaattgccaagatttgaatcga

SEQ ID NO: 173959 - DNA, 564 bp, Cannabis sativa
ataaggatgaataactatgaattccaaccatgagtgatttttttttatgtcattttaccaattccatagattcccaataattcgatataaagtcatatatttttaggaaaatttacaaaaatactgaaatttgaattaatttttacaaaaatactattacacgattttttttttcaaaaacactgtgtttttataaaacaatagtagaacacaaaagggaacaactaaaaataacagtggaacagctaaaaaataaccgtagaacaacagtgaaaactttacacagtacacagtataaaacttgcacagtatttttaaaaaaaattatgccccacagtaaaaaagtaaaaatattgaaaatttcaatatgtggtgtaaataatcttattttttttatataattatatattcaaaaattttcgaaaatatgtcaagtgaagtctaaatagatatcaacgtatagaagaaatgctctctttttttttttcaagaaaaaaaaacaccataaaggtattggttatttttaagggaaatttacatgttatactaacttttgctattttt

SEQ ID NO: 173960 - DNA, 1148 bp, Cannabis sativa
  modified_base (991)..(995): a, c, t, g, unknown or other
taggaagaattaatattaaaaaaattaataacgacatattctgatctacggtgatcgaaggagtaatctcctctaccacagctaaatgatcggccacagttgaaataaataaattagtgaaataatgcaaccataacattcggcaactcatcctcccaagtaacccagtcacccacatcattcataaatcgaattatagtattatgcttctttctagaagtagctttagcatgaaagtacttactgtcactatctccttcttgaagccacaactgtttagagcgttggcgccagaacacttcttgttggttcataacttcactaaaattcagttcagcctcccgaaacttttgaatggatatagcatcacaccctttcttccagtgctcgatttccctcttgcaatgtccaatcctttgcttaaaattgcctatatagtctcgcccccatgcttggagagattccccacaataagatatttttttcataacatgctagccttcacaaaggtcccaactatctttaacaacttggcgacacagcggttcacgaagccaggcattttcaaaacggaattgacgaaatggcaccgtcacagaacgcaccgtcggttgaagaagcagcaggcaatgatctgaagcagaggcttcccaattacgtagctgagccatacgaaacctctggaaccagttagaacaaacaagagctctatcaagacgaatttcaatccatgaatcaatgcctctcccacgctcccaagtataaggatacccgataaactccatatcaacaagatcacaatcagacaaagcttgattgaacccatccaccagcatctgtggatatctatttcctcctcttttatctgcatgaatagtagtattgtttaagtcgccaatgatacaccaaggaagagaagatttttaccttaacgatctcaataaattccatgttttataccgaacaactctattaggttctccataaagannnnntaaacgccaaggagaagaagctacttccgagatctgaatatcaatgtgatgaaaataatagctaagcagttgcacatcgtcattattacgccaaagcatggccaccccaccactatgtcctctcgcatcaacagaatacaatccatcaaaccc

SEQ ID NO: 173961 - DNA, 681 bp, Cannabis sativa
tgttgagactatcactcaacctagcctcagctcatatcaacttgctcgagatagagaaaggagaacaacaaaggcacctgacaagtttggttatgctgaatttacagcctatgcacttagtgttgctgaagatgtggaaagtgatgagccttcaagttacatcgaagccatttctggtaaaaataaagttgcttggttgcatgctatagaggaggagagactgtcattaaagaaaaataagacatggacagtggtgaaaagacctgaaaatcaaaggataattaagtgcaaatggctattcaaacaaaaggatggtgtaccaggtagtgagggaccaatgtttaaagcaaggttggttgctaagggatttactcaacaagaaggagttgattacaatgacatattttctccagttgtcaaacaaactaccattagagttgtcttatccacggctgctagatttgatcttgaggtggatcaaatggatgttagaactgcatttttgcatgggaatctagaggagaaaatctacatggagatacctgagggctatgatgagaaacctgatcatgtatgtctcttaaaaaaatctctttatggtttaaaacaggcttcaagacaatggaaccttagatttgatgagtttatgttgaaaattggctttaccaaaagcaaatatga

SEQ ID NO: 173962 - DNA, 528 bp, Cannabis sativa
atattagtggtatttagtatattacattatacaagttttttttaatgaagtcataattcttaaaatttattgtatttaggttaattaggatttttactttttgaactttgacatggatcaactcatgttcttaaaattttaagaacattaaaaaaatttcttaaactattgagattgttggatttaagaatttttgtttaattttaataaaaaaagtctaacatttcaagagtcataatttgatacatctcaaagttcgagggacgtgatttgatagacattaaaggctggggaacataatttagtacataacaaccaacgaagtagtaaaattgaatgaaattgaacaaaagttcttaaatctaacaatgtcaatagtttagggaatatttttaacagtaattaaaattcggaggcataattttggtatgagatttttacacctcatgtcaaaattgacaccttttttacatttttatccatacacggttttttaaacttttttaacttttacatttttcaatttta

SEQ ID NO: 173963 - DNA, 848 bp, Cannabis sativa
tgaagaacaaaatcaaaccctacttgctctagagtgtgtatgtgtgtgtgagagagagagagagttcaagagagagataagtgggtttttcttgattttttaataaaatgaaaataatagaaataaattaggttttattaacttaactttagcataaaaaatcaggtttaattagtcaattaaataaccactaaaggacaaaaagaccataatgcccttgcccacactaaaagtcataaaatcactaaagggtaatttggtcacttctaaaatctcaattattcccgatattcccaatgtcttactatattgccccgctatactaaaaatactaaaacgtggttctaatagccaaacaccgcgttctaatattgtcgggcgcaaaatatataaatatacgaaatttaatatatgacatataaaatgcattttgaattcaaataaaactccgtaaaatgatacttcgtaactaatatgaaagtttcataattaaaccctaattatctcctaatttccaaattaaagttaagcggtctttacatctttattgtaactagacctaagtcatcaaaagaaaacaaccacattttagtatctatggcatttgcatcttgttcatagtggttttggcaagatcattctctttaaagagtaaatatgccaatatccacttgaaagtaggatcatctatattcgcatatataaatgtccatttaggggtgaatatgagttgtcgttaaattctttagatgatcactatagattttaccttgtgcaatgaaatttgaaatggttaagaaatttaatgaatttctagcaatggtgaaaaaccattaaggtaagtggtt

SEQ ID NO: 173964 - DNA, 646 bp, Cannabis sativa
aagcatgttttttcccttgttgttggattagcagccttcttacgcttattattcgtgttaacaactttaacatgcttcttgctattcttccttttattcttctttttgagttttgaagtagaggcaatgtttgtctcaggctttgccttaccaaccgtagaattactagaagttggagctttattttctcctttatgtggtcctctagtcaaatttttaaatgtctaatggttcttgatcaactcgttaaagtcaaaagtcaacttgttcatgacgtaatttgaagtaaagggcagaaaagttagacttaaacaattcaagatcaaactcacttgagtttcctgatcaataatagctctatgattctccgcttcctggaataaactagccatcaagagtaagtgatcaccacgttctgatgaggtttcatccgtgtatttataaagttcttagtcccctcaaaataagcttgatctgatgccatcccaaacatttcagtttactggttcatgatttctacagccgtgagagtattggcgaaccttgtcttcaaggtatcaatcatgctagacagcataaagtatcgagctttccttctttaaggatttactatcttgctactaccagagcttagatcactaggttt

SEQ ID NO: 173965 - DNA, 1117 bp, Cannabis sativa
  modified_base (323)..(325): a, c, t, g, unknown or other
ttcttataattattaaaaaatatagatattaaaattattaacatttgaaatttaatgtagttttatgatttaataatctatatataaaagagaggaatagagtggtgacatgacactctataatctcttcatagctatttttctcttctgtccttaattctctcatttttaatattttattaaagcatgaatctacaaagtgatattttaatattattttaataaatatttttttataaaaaaatatctaacgtaagccaattatttttttttccaaaaaaaactatatatataatactatacgttattattattattattannnttattattattattataattttcacattttttaaataaatatatttatatatttatatcacaattaataaaaaaacaataactacttttaaaaataaacaaataaattaacaaaaatattatttttttaaaatatcactcatcaattaattacttatattttttttttctttttcaaactataatcaatatatatatcatatattcctctaattcttttcaccttcatatatatatatatataaatatatatatatatatacagtcttcatacctcctactattttgcatattggtatgtaaccctcttattattaattttctctttaaatttttttaattttatgtgtatagaaaaatagttgttgcccttgatttttcccaaaatacgtggacgcggataacggtgacacgtggatctggaaagaaccatcactcatgaaaatcatttaagtcttcgactagaaaaaaggacacctcaaggaaggtgcctcccgaaaaagagcataagccccatctttatgctccgggaggctagagccatgctaaggcagttacgggaggtaaagagattactcgtacaatcactttgcatttaatgtcgcatgtgtgaagacgtattgaagcctccataaacgacatgacagatggcttaaccctccttttacgacgattacactacaattgatgagtctagtgacaactacattatgaggaatcacatcagtcaagaggggataaaagattatatccacctaactcctaagatacctacgatataggtcatgtattt

SEQ ID NO: 173966 - DNA, 540 bp, Cannabis sativa
atgactttttcgaagtttgctgtcagtactagaaaattcgctgttttagaaaagacgtccgaattaacattgttatcggaaaaatcactaagaaagcggtttcatcatcaagaaatcattttcttggtatttttttagtgattttttcggtgacaatgccaattccgataaattttttggcgtcagtggcaactccgacgacttttccagtaccgacagctactccggtgatttttctgacatcgacatcaaactccgagtgacttttttggaactagtgacaaataaaactacctaaacaaataaaaacgttaaatatgagatttaaaaacctaatttacataattatggaatatcatataccacataaataaaaaacaaaaaaaataaataaattggtcaaacttaaaagtgtcatatttaacataagaacttttaaaatcccatagtaagtgtaattttctctactagctaataaatctattagtttatattggcatataaaataaatttttattattatttttgtatattagaaca

SEQ ID NO: 173967 - DNA, 653 bp, Cannabis sativa
  modified_base (597)..(603): a, c, t, g, unknown or other
gaagccgttgtgataatcgctacatttgaaaatgagacaattatcgaaataattacaatggcaagtgttgcaaatatattcttgctgcaaagacaagataaaagtgtgggaaggatgattaaagtgatgagacaactattcaggcaacgataaactataatattaaaagggtaaatattattttggactctgtgttttgtaaaagttaccaattggactcctggttttgttaaatgataaaatgaaccttgtatttttcaaaattatacaaataggaccctgaacttaaagggtaaatactattttggaccctgtattttgtaaaagttatcaactggaccctctgttttgctaaatgacaaaatagaccatttattttctaaaattttacaaataggaccctgagctcaattttcaacaaatttattttttaatataactaactttaagacaatttttaacatgaacaaatacagaaaatgcaactcattttatcataacatttctagatcagattattattaagttttattttgattaaaaaaattagttcacggtctcatttgtataattttgaaaaatacagggtccattttnnnnnnnaacaaaacagaaggtccaattagtaatttttgcaaaacacatggtccaaa

SEQ ID NO: 173968 - DNA, 718 bp, Cannabis sativa
  modified_base (382)..(384): a, c, t, g, unknown or other
  modified_base (560)..(562): a, c, t, g, unknown or other
atgaggattcaagctagttttgttattatttggtgggatttaactgtgggtaaagctttagactcaaaactttgcttttatggtaaaatgttgtttagcttgctgtgctggttgttgctattttcagaggcttattcatgtctatttgagtggattagatcaggtttagatgcatgttagttggatttaaccaagttagagttttgaactcaaaccttggagctttaatggtggattttaattctgtgcatgctgggttgttttgttgcttttgaattgttatttagggtatttggagcaggtctggagagttttaggtggtttggggttgaattggtcaagttatggaattttgaaaaattcctgcactgaactggaattnnngttcagggaggcctgtaggaaccagtcgaccagttggcttccaggaatttttccaagaaccggaatttcggttgacgaaccagtctaccggttggggcaaatttgggaaccctagttcttccaatttttgtgttatttagggcattgccaagttgtttatcgatagggaaactttnnntttcaagtttaagtccctgaaaagtgatttagcttatcacttatcagtgttgtgattattatgatttaggagccgttaattcgccgagcagattgttccactcaggttgagcggcacacctgaattcagaatcgaggtaagattagtataacatta

SEQ ID NO: 173969 - DNA, 975 bp, Cannabis sativa
  modified_base (923)..(927): a, c, t, g, unknown or other
atgcgaaaacaactcattacataataaggaagagcttggacaaccgctttgattaaaatttctttccccgcttgagaaaatagacccatcttccacccttggagctttgcttccactttctccctaattttgctaaaaatttattttttgtttttaccaacaaaggtcggcataccaaggtacttggtatgattcttgacaagagttacccccaagtttgtagctatgtgatttgccaaggagtcatcaatcttacatcccacacacatttcagtcttctcaaggtttatgcattgcccagataatgatgaataatcctcacgaattccctttagtgcaatgctatcctccatatttgcgtcaaggaagatgaggctatcatccgcaaataagagatgagaaagtttttgctccatagacccaaactgtaagccatgtattctacaagcccgttcagcttcaaaaattaagcaagaaagaccttcaaaacacaataagaaaaggaagggagaaaggggatcaccttgtcgtaagcctcttccaggaacaaagtaacctttggtagagccattgataagaatggagaaggagaccacacgaatgcaattcatgatcttagttgtccacatcttatcgtaacccaagcaagtcatcatagtttccaagaagtcccactcaactctatcatacgcctttgacatatctagttttactgccattttctttccatttccaaaacgcccttttcgcatacaatggagactttcaaatccaataatggcattatcttgaataatccggcctcctatgaatgcactttggttggctgaaattactgaattcatgctttgcttcgtcctattcgctaaacactttgaaatagctttgtagataacattggttggttttatgccctaaataannnnnatttcaatataatcagatttactcattaatatagatcagaaataacat

SEQ ID NO: 173970 - DNA, 562 bp, Cannabis sativa
ttaaattttatttttacttgttctactactgcaaaaaatccattttaagtccatcaaaatcggactatataaaatttttgagtctattttatgttggacataatagcccgagacataaagacataaaaagggtatttttctagtccaacataatatatatatatattatttaaaattttaaataatcaataaatataaatttctaaaaattcaaaatttacatatatatatatatataaaatattaattaaattaaagtaataatttaattattaaattaataaataatttagtttaagttttaaatttattaattagtaattcaaattaaactcaagtctatttatgctagactagaaaactcccaagaatattttctagtccaatagaattggacatgaaaataaacccaattttagaaaaatagaaaatatatatcatgtccattactagttttctagtccaatattgttggacatgataaaaaaaaattctagtccaacaatggtagactagaaaactccctaattactaaacaatcactgaaatagtaaaattgaat

SEQ ID NO: 173971 - DNA, 534 bp, Cannabis sativa
cacctacttgtgccattcaaaagaaagatcacactactacaacatttacacatttagtgacacaatttagtgacctgcacacaaagtgcgggtaactaaattttttagttaatttttagtgacacacattactagacagtaaaaatttcaagtatatgttccataatgcgtgtcactatatatttaaagtgtcactaaaaaacttatttattttaaaaattttataaatatatagtgacacacacattctaactctaaatgtattgagagtcccataaggtgggtcactaaagattcaataaaaataaataaaagaaattgaaaagcaaaaaaaagttgaagcacacgtgcaatggttccttctttctctcttaatttatttattaaaagcaataaaagaaaataaataagaaaataaatgggggtattaaaaggatatgttgaaaccctaattaatctcattcttttttttttctgaaacaaaccctaaatctcatcatcttcccacatcctcccgtatctatctatctctcc

SEQ ID NO: 173972 - DNA, 549 bp, Cannabis sativa
gtagtgtttttaaaaaggtaaatgagattaaaatgatcctaaatttaaatttagaaattaagttagtaattattattgggtgattttatgatacactcctttaaaagtaatatatttatacactctttacttgtttcgacatttaaaaaaaaaaattggtctattttttttttcatatttatgtacgttatagttatttaagatattttacaaaattttaagaaatttgaaataatttacaaaataaaaaataatgttcaaacagtctatttacacgcgtataaaataaaataatcacttgtgcaacacactatttagaatacaattttcagcgtgttaaactttttcaaatttcttataattttgcaggatgtcttaaataattataatttacatgacaaaaaatttgataaaaaaattattttgaatattaaaacagataatgatgtatcggtacatccctattaaggggatgcattatagaattttctaatattatttttaaaaaaaagttaaaaaaaattgttaaatataataaattagctaata

SEQ ID NO: 173973 - DNA, 540 bp, Cannabis sativa
  modified_base (464)..(465): a, c, t, g, unknown or other
gatctagaaccgtaactggactagtacgcggactccaaatcagccctatacccgaattgggtgccggacccggatcccaacccaaacctggactcgggacccgatcccgaacctgaactcagaccaaaacaaggaaccagactagggtcacagaacaagggtcgggacctagaaccacaccgcagtctcgatccaaaacccaaactcagaaagtggacctgggacctaaaccagaaccagaccgagacccgtgacagtgatccagatcttgacttgggatttgggtaacggggcctagaacagaccagtagtcgatgtctagatcttggactcagactaggaccagattccagacgaagaaccaaacacgaacccagacctagacctgggacccaaaattagaaccttaacaagaatcgctgaaccacgaccctagaaaaacactaggaccgtgaccaggaccnngacccagacctagaaccgaacactaacgtagcctcagaccagaactgagacccggacctggacctaaatttggga

SEQ ID NO: 173974 - DNA, 778 bp, Cannabis sativa
  modified_base (560)..(560): a, c, t, g, unknown or other
tttggcttaggtgcctctttttcaccttcaggactatcatcttgtggtttggatggcactggttttggttttgggatgataggtgggttgtagtgtttcccacttctgaaggtcactgcactagcattctccttaggatttttctcaggttgggatggtagttgattgaacaattgagattgcatttgattacaagattctgagagtttacccacttaattctctaaacattttatcgctgcttgagtttcttgtttgaagttttgagaatcagccaacatggcattaataagatcttcagtggtaggcttgggaggtgctggtggggtagattgtggtgcttgattctgcgtggcaggtgtccactgttgataattaaaagatggttttgtaggttgctggacattttgttgattgccatagcgaagatttagatgattctgccatccctcattatatgtgtttgaatatggattatactgctgccttgattgacctgggaaacctctaatagcattaacatctttggttggcccttcatagagagtaggacaagtatnagtagtatgccccacaacttgacatattccacatggttttatctgttggcctaaagcaagttgttggatcatggatgttaattgagctatttgttgactaagctggttctcaatgagtttgcccacttcattaacctatcgtgatgttgagggagagtctcggcaagtgccaaactattgtgaattggcagccatgtttgagataagatttctggctt

SEQ ID NO: 173975 - DNA, 529 bp, Cannabis sativa
accagcatcccctcctcgacctctccatcttccattttcttcttctaccagtttctgcttagtcctatctagtattacggaaagaaaaaatgaataagcacaagcacaaacccagttcaatagatttgattttgatcttaaattttggtttgaggaataaaaattagccaaaataagcctacacctgatgatcacaatccataagaaccaagaataaccgctaaaaaaaaactaatattataaaagggagcaacacctcagagtgacagtcgcaacaattttaacacaacacagtgaacaatattttctctgagatattctcctttttttactttccacaagcataaaactaaaaccacatacctgtactatacataatatgtatatagaagtatatacatatcacatcatacatatttatgttaaagtttatatttgtattaatgtcaatttaagcaatctccacagaagaaaactgtgcaaaaaagttaacatgaacttgaatcaaaactcatcaaccaaatatata

SEQ ID NO: 173976 - DNA, 642 bp, Cannabis sativa
tagatagctttctggataccctactagatgcagcatatgtagattgtgatgtagcaaaattgaattctgaagatgcaaatgacaaatctgctgctgcaactgaggcaggtgaacccgaacaacctatctcgattcatccaaacatcattactgattcaatctagaaggaaccaagcaccagagtaaaactgaatcatcctaaagatctcattcctggaaatcttgaagaaagcatggtaacaagaagaaggtatcttaatttgattagttttctttgttttgtctcacaatttgaaccaaaaaatgtaaaggaagctatgacttttgaagaatggctcaatacaatgcaagaagaacttaatcagtttgtccgcatcaagattcggattttggttcaaagaccaaaaggtatcaatatgatttgtagtttattgtatttgactgctagtcgtcctgatattatttatagtgtgagagtttgtgctcgatatcaaagtaatcctatggaatctcatgtatctgcagtaaaaaggattattcgatatgttaatagtactctcgactttggaattcttgtattctaaagatactaattctaacttggcttgttttagtgatgcagattggacaggaaatgctaat

SEQ ID NO: 173977 - DNA, 537 bp, Cannabis sativa
  modified_base (369)..(373): a, c, t, g, unknown or other
tcttaaattcttatattattttatagtttcaattgctacaagaaaatatgatctttatgagtattataaatatttaaagactatttttgtccttgattggaataattaaagaatattttattgtatgtgcctaacttgaatgtaccgtataattagttgttacgagaagtactactgtcaatctcttagtcaatctttattctttttcactgtagtgttcgttatatatgcatgcttacaacattattacggtaaatttttgaaaaatttcgaatagtttacaatgccgaaaatacgtttgaagttttaatttgaacacgcatggtaaactggaatatcaggaactctattttcggtactgtaaactannnnnaatttttcaaaaatttacaggaatgatactgtaactataacgaataacgctatagaaataaatatttcggtgcgcatgtgatttcggatgtggaggttgacagtgcacacctaaaactaaaagtgttccaatgatacactccttatttattttggtatcggaaa

SEQ ID NO: 173978 - DNA, 551 bp, Cannabis sativa
gttctaaattgtaattttttgtaatatatttttatttatttaaagggacactaattcaagttgattttgtgctacaggtaatctttcaatttttttagtgaaattagctttgactctttagatgggttaattgagcttgtacttttagttttcatgatcaagttaatttttgaaattactgtcgttagttttagtactgatatatgtactctgatgaattaagagtttttctgacactaagtgttgttttctaaactttcggtggcatcaattttttatgttagtcacaatttaaatagggaaatttaaaggcttcatcctaatagtcaaagttacttcgtaggctactattaagtaaccatatagatagatagggaagcatgactttaaaataaaaatatattttaactaagtcttgtcttttgacatgttttgagagtgtctttgtccttgacgttgttgttttgagttttttgctatggcttcgagtagtcatcaagatggagactgggtagatcaatatgctaacttggatatcgaaggagaagaag

SEQ ID NO: 173979 - DNA, 1049 bp, Cannabis sativa
tagaaactggtgtgacaagctctaccctgctagatgtgtcgtggtgttgtaaggttgatgcctccattcgtgatgatgaagctggtttagcagtgattaaggttaacgaggatgatgtagggacttctctggttttcctgggctggacaaaagttaagggagtttttgagggtgagtttctgagtattgctttggaccttcggttggcaaaggagaatcacacaccagtagttaaaatcgagactgattccttgattgcagccacagcctttgacaatgcacaattaccgtttggctgggagacctttcctctgttttgtgatttcatgaatttatgtaagtcttttgataaggtctttgtgtgtcatgtgaaaagagagaacaatgtgttggttgatatgcttgctcaatgggcgagagtgcataaggccgaggccactggcctcttaagggatgtagccccatcatgtggttactaattttctttgctttcaataaaagtattttacccatcaaaaaaaaaaaaaaaatacaatggaaaaaaacatcagattttagtagttattatacaaaaattttgtcttttctttctttcttctttattttgctttattaattttggtgtaaagacactgccttttctaggaacagtttttttggcaagactcaagtgtaagttcatgcaatttttattttttctaatatattgattctgtttgttcttaatttccacatttgttatattaattttctcttcttctaaatggcactttaaatttaatagtaccgtttatataagtttagtcatgctttgcttatgtaagtgatgttattaattattagagtgtttattatattatatgacttttactgcattctgccgatggtattttgtcgatttaaattatataatatgatagtatttttagaagtcgtattactttaattagagaacatatttttctagtgagcttaattatgcacattttctaactataattaatggtgtagaattatagttgagtttaaagaataaattttattagaaa

SEQ ID NO: 173980 - DNA, 692 bp, Cannabis sativa
gcaagacaagaacagatgttccattgtttcctcccctaaaccacacagagggcagcaggtttcctcaatgtggaactgtctacctatcactgatctgatagggagcgcattagataggatgcaccaccaaaggatcttatgcctttccaaaattttgctgttccacaacctgttccatagagacggagctacctcacaatgatgggccctagccagagcttgagacagataagctgatttgcttgagaattgaccatttttttccagagtccaaacccatttatcttccccaatgccagagggtttaccgcctttaactattgcagtaatcgtttctttgtcaaaaaggccatttagctttgggatgtcccactctccatttgcaagcagcaggtcatcaacacattgatcattggttattacccctactttaggtctcgggataaaaccttttagatggggaatccaggggtccctccatatgctcgtcgtcctaccatttgttacaactttacaagccccctcccttaaaatagaaatggctttcacgacatttttccagaaccaggaatcagaattcttgtatcgacagtggagaaaatccttcccttttagatacttggcttccaagattttgctacataaagattgggagccctttaacaaattccaaccccacttggcaaggaagg

SEQ ID NO: 173981 - DNA, 1019 bp, Cannabis sativa
ataaatgtaataagtatttaagtttgtaataatcatatactatacattatatgtttctaatttctaatgattatatatgtaagcatgatgtttcgataagacgatgtaatggttcgagcaatgagattatttgtttggtttttcatttaccattaaattttgtacttgcaccatttggatttcatggggttcaacttgttatttgatttttacatatatatttcatgactttctactatttaattaactggttttgatacttgtgtatgattttattagttttggggcttcgcttcaagtatctcggaaggattggtgttgtttgaagattttggattgttggctttgaggtaaattttatgattaatgttgaaaaatttctcaataatctgtaagttttgatgatgaatttattggtgtggtgttttttgcttctacaatactgaaaatttttagtaaatcttcttttctttaagaactatcaaaatcaccttgatgcgaaaatgctatgttgaaatctcttatggttggcttagaggttgttagtgatttaactttcattgaatatctaggattgtttttagatatggtcactgagacttgttttcaagtttttgttcatatacatgtttatgtttctaagcaagctgataagactccatctgaaccctttttttttttgaatttttactttttttaggcaattagatcaactttttggggcatttgaatgtgggcatttattatcatcagaagattaaaaatctctgtcttggatagcaatatttcaatgaatatagatctaggattagaaagagttgtgtttgatctaaaagagaagagagctctttctgtcactctctttttttctttctttctttttagtatgatatacagagttcaccaatcttgctttaaaaaacatttgaaagtgtacaaaaaagattacaacagatttagtcacttaactatgtcatatttttgacagtttctccattgttgtatgtatacatattttt

SEQ ID NO: 173982 - DNA, 506 bp, Cannabis sativa
  modified_base (455)..(478): a, c, t, g, unknown or other
tttttatattttccaatgtgatttatatatttaaccagtttcttttccagtttttaaggtttttatttgatgttgatttgtctttaaccggttatttttttagttatcttacatatttttttttttgtttattaagttttttgtgttgtatatattaggtttttctgatttttccttttgtaatacatatttttatggtttttacatttttcttgtgaagtgttgttgttacattgtgttttgtttttatagttttttgttaattttaaccggtttttttgtgtttacttagatttcccaatgtttttgtatatttaaccgatttcttttccagttttttaggtcattatttattgttgatttgtttttaaccggttatttttttagttatcttacatattttttttatttattaagttgtttatgttgtatatatgttggatatattttaccannnnnnnnnnnnnnnnnnnnnnnngtttcattaacaccctaatatgaattct

SEQ ID NO: 173983 - DNA, 501 bp, Cannabis sativa
ttcttgactgttcgtgttcgacggaggtggagatctggataatggatgagtgtgaaggagctccatttttaagtatatgtatctctttttcttagttttatatttgtccttttttaaaaaaagtgtaatggaccagtgtctggtggtgttccgattagatccaactggttctctctttcatttattttcatctatgtatatatacatatttatttttatatatgtcggatttttttttcgggtcaaaacaatgttagtgatttgtgtaaattagatttgatttgattagcgggtgcagtagataagattttgtttggttttttggttgtcttcgacatcgaagacgacgaccgtagctgagaatagggtggtgaggctcgatgtggttggggatggaggtggggtgtgttggattgagagagagaaacagaatgaactctattcattaatggagccaatggctcagtatatatacagtgcgagaaaggaaggaaagagcaa

SEQ ID NO: 173984 - DNA, 521 bp, Cannabis sativa
aactccagaatatcaaattgaacaatcccaatacaaacagcaactaaaaactaaacttcaacatcaaaacctaactcaacatcaagaaacacaaagaaagaaggcttagaaagtaataccttgaatcaaagtactcaattacaactagaaatccttgaaccaaatcaaataactctaatcctagctgctgcccagaaaaaatcgagagagagagaggtgttttctagactttttcctcatttttccttccaacttaagtaaataaaaccttttgtttgttttttatttaattagattaatttctaatgagcccacactttctacaagacaaaagaggataaatataacataaagactattttaccctcaacacataaattaaaagtttaagattatcaaaggtaatttggtaattatttatccccgctaacctcctgacacctccaatgtctaacaatggtaccctactatctaaaacattctaaatcatatgaaagcgtgactctctaacggccaaacgt

SEQ ID NO: 173985 - DNA, 595 bp, Cannabis sativa
tatatataagagtactcaaataagatgttttaaaataaagaatttctaaaatatttaaataattaaactgaaaacacattacatcaaatgctctaaattttttcattattttaaagtttttttttttttttaaattcaccattcatgctctaaacatatattttattagttgaaaagaataaaattttggtgatgtttgtaaaataaaaataatagggttttgataatatatttgaagaataaagtagagaaggtgactgattcatatatctatacaatttatgtttatttaagtatatttttcgagtatgacctggttgaatttttcttttaaagaaaaatgagtataattaataaagatatattctttgaagtttaatttgggataagttgaggaatactattttttttgtatacattaattaaaaatactctcatattatattttattaaaatataccacttttttgagtggattgttactctccactcaagtctagcatatattttacattaacctaaagggtataatgggaacatcatcataaaagtgggtatatcttaaagaatctgaaaatgaaagtaaaaattaaaa

SEQ ID NO: 173986 - DNA, 531 bp, Cannabis sativa
aatatatttaaatgatgcaaagaaaaaatatataatttaatatttgtggttatataaaaaaaaaaatataaatttggttatgtattttaaataataaagtagaaaaacaaaaaaatctttaaacatcaatgtatgaaattttcttattttaggaaagaacaaaaaagatactttttctatcaaagtgtttgttttgagatttattttcatcctttaaaaaataaaaataagatgttttatcattttttgaaacgaaagaagatctattcaatacctaatatatttaggattttccgtaaaaaaaaaaaattaggattttaaactagagaaaaattaggattattttataaaaatagtctttattaatttttttttagggaaattacctattgtacaaccttttccaattttttttgtatttttacgttctctttttaaaattttcaattctataaacctttatttacataaatatttctttattgacttttcaaattcattcttacctttttgttgctgaatttatgtaaa

SEQ ID NO: 173987 - DNA, 505 bp, Cannabis sativa
gtgtcatcttaaaatagaggaaaatgtattaaaaaagaaaaccctataacaaataaaactaagcatagtgaaactttatcttaatcttctatcggttcagcagtttgaatggtgaattgattgtactttggactcatttctcgttttcgatctacatataactggattctccatttattgattgataatttctctgtagttttttggagaaagaatcgatctctaagatttatttatatagtttaatcatcttgaattgaaagaaaaaaaaaggaagaaaaaaaaagagtggaccctctaatcaatatataatttattaaagcttaaccaacatatttaaaaagagaccacaataaaattggtcacttacttataaagtctttatttgagcttataaatagaaagtggtctattttaggttggttgtgactttttttttctttttcactctgtttttgctaaaattgcatacatttcttataagggtctttgaatacatgagtct

SEQ ID NO: 173988 - DNA, 817 bp, Cannabis sativa
ctttttcttgccgaatcactcctttaaacatcataggagttgaggtaagtctttgttgtatattttccttaaattctctaggttttaagttagtttttgttggggttttgatttttcaggggggctgctaattgtttggtgatgaaatatgattctatggtagttgttgagggtgtttgagcttgctttggttaggtgtagggggtggttgaattgattgagcttcatagggatagaattgtgtttttctttactttgaagtgtgattttgagcaaattgatatattgcaatgaattagttgtttggttatgtcatgcttgctatattatactgttctggaaagtttgattaggtttggtggagttttgggccgaatttggaagagaaaagccttgaagaactggtctgccagaaccggtcgaccggttgcttgcaagggaattttttcgggttttcttcaggttcagttttggcccgggaagttgtgtagcatctgttttaagttgaatatgggatgcttgacctattttgaagttgttgggagttaggttatgcttgattttgagttagggttttattacgaaatttcgggttaaggtatttattgagttttacttgtcgtgacataggaccgggatcgcctagcgtgttttccacttaggttggcctgtacacttgagttctgaactaaggtaagaaaagtggtaagcaccgtatgtagttaaatatgaatggttaaatggaagtggccttgattattatcaagactttgattaaatatttattgagcctaggttatgacctagggttggaaac

SEQ ID NO: 173989 - DNA, 544 bp, Cannabis sativa
acttgtcaatagatccaacaattaatggctaatttttggtgaaagacctcttctagtagaagtcatggtattgtttgaatgagttgggaatgattggcgaaggataagaatcttggtggtttgggctttcgtttttgcattattttaatttagctatgttagctaaagaaggctggaggttgttgactaagcctaattctttggattctaaaatttatatggaggttaatttatttgctgaattgtgttctcattgtagctatgtttggcgagtatatggagctctcaaggtctggtttgctcaggaatgcgtcgtatcattggtgttgatgaccatgtggatattcttcatcatccctggctacctaaaaatgtgccttatgttcttactgttgggttccattcttccaccttgttgggccaccaccttaccttaatttccacattagtatgacattgttcgccttggacctaagctctcacggttttatttttgggtaccttcccaaaaggtctcgtactaatggagtaggtggaacactta

SEQ ID NO: 173990 - DNA, 802 bp, Cannabis sativa
gggcaaagatatgcttgcccactacattaagcggctggttcctgaggttagtgaacaactggctggtgctgacaatgactcttctttggagctgctgatgggcagagtcttgaaggaattcaccagggtaagtctttctttacactttcctttaattttctttacttagctctaatggtaaagttttttctttgtgcaggctggtctgaagttggcctacacttactcccgagctaagtcttgtgcttctaggaacacggctctgtccaacaccatgagggcagaggtggacttggccaagaaggatgctaacaacgccagggcaaaacttagacctgttcggatggagctgggtgaagccaacaagaagctctttaccgcccagaagaagatagctgagctgactaaggatctcgaggtttctgactgtcttgaagagaccatcgggaccttatctgctgaagtgaacagtcttcaggatgagaggaattctcttcaagcagttctttgtcgggtggaggaggagaagaagcctacggaggaggagctttcggccgaggtgacaaagctgaaagagaaggttaatgctcttgagacagccggtcttgagctcttctttgacttttagaaggctaatcctcaggccaactttgactacttgggtgatgctaatgacatgtacctcgcgttctgcgcttctcaagtagcctatggtgaacctgaggtggctgcttctaccttcggccaaactgctgatgtacctcccattcaaacaacagatcctctagcttctactggccca

SEQ ID NO: 173991 - DNA, 713 bp, Cannabis sativa
acctagaagccatagaagcttggagtaatttcttgcttttcttcagcaattcaaaaggttattggtgagaaaatccttagggataggaagcaacaactcttggtaagcaagttatcttctcttcctttgaattttgtaattttaagtttaagtgttcatgcaaatttgaggttacggtactgtaggtgtaattcaagtttagttttgacttctgaggttaattataagttatttaagctaagttaggttatctttgttgcatggtgttgtggatgagcaaggtttgagctttagagctcatactttcctcttcaatggtggattatgttgcagaggaaattgtgtggttttattgcttggattaagtttattgtggccttattaggtggtttggaagttttggtacgttttggggttgaattgaggtatttttgtggtttttggggattcctctactgaattggtcggtcggttcagtatggacctataagaactggaatttcggttcatccctaggtagacccctcaaaactgtttttctgattgggaatcggtctacaggttggggcagtttagggcaccctaaactttcccctttttacgatatttaaggtattgtcatgttatccatcgatagggaaatttttagtttaaattttaaaacctcaaaaagtgatttagcgtgtcacttacgaatattgtgacttaagggc

SEQ ID NO: 173992 - DNA, 731 bp, Cannabis sativa
aataaataacacagaataactcataccaattataattaaaatagagccgaatttataatataatgaataaaaaaataacacaaaataactcaaaccggttataattaaatagaatcggttttataatataatgaataaaaataaatacaccacaggataacttaaaccgattataattaaaatagaaccggttttataacataaaaaaacatataacatagaataacttaaaccatttataattaaaatagaaccggttctataacataaaataaaaacaaataacacaaaataattcaaatcacttataacgaaaaaaataaagagaaaatcatcaattcctaaaatactgaaatataattaaaaacaaaattaattctacaataaattaagtaaaaacgaataatacataatacctcataaatcggttataattaaaaaaaaaaagtgaggatcaattttaaatatactaagacataaatttaaataaaaacagtttaacaaaataaataaaaacaaataatactcaataacttaaaatataagataaggaaatcaattatattttttaagaaaataattatttcaacaccccattcgttttaaattttatctaagatatgaaaagcaaagatataattgccaatgtaagaccctagtaatgaattacattttctcaaagggtcaagatgcgaaatggtcctaaatataacaattaagttaataaatgt

SEQ ID NO: 173993 - DNA, 1006 bp, Cannabis sativa
  modified_base (951)..(962): a, c, t, g, unknown or other
ttggatcattcatcagagaggatagcccatacattgacattcgactagtgagttggttaatcaaacatgttgacccaaccactagcatactggatttgtatggaagaaaaattcacttatctgccgcgatgttcggagatgttatgggtgtggaggatggaagggatcctctaatcacccagggtgatagtgacactcgatatctagaggagatattgaacgttgtcgactacaccgtgtcgttgacagcattggagaaatctttattagaatgcattgaggcagacaacctatttctaattaaattttgtttggtggtgatagggacagtcctagtgccaaaaacgggttgcgatatcacttcggagtacctacactcccttatgattaccagggacattcgccacaagaactgggcaactgtcgggttcaggtatctgatgaactcaattttcagattccaaaataagcatacgaagaatgtgtctggctgcaccatattcctgcaggcagaggcggacccacatagaggcgaggtggggcagtcgcccaccctgaaaaaaaatcgggaaaaaatatatattcattttagttagttacaacatatatttataaataaaagtgatatctatacatatagaataagatttggcataatggtaaagtcatttcatacatctaaaggaggtcatgagttctaatctcaataaaagcatgtttactttaatatttttattttactttttgaacctctaccaataacacttatatttaatgtattaattattgaaccaaatatattttattgttactgttgcccctgattttgtccaaaatacgtggaccaaccggattgagacacgtagactgaagaggttaaactctgggataattcaactaagtctttttaaagggatcatcatttaacatgcctcccggagaaggaatgtnnnnnnnnnnnnctcccggagagcaaagctacgacaaagcatctccgggaggtgtc

SEQ ID NO: 173994 - DNA, 1037 bp, Cannabis sativa
caacatgagtcaaatatacaagctaccacaaaaaaaaatacatgcatctataagcactgcagtacacgagagaataaaaatcactaccatcacaataattcaaaaacttacctgtaaaaatatggtgcagccggaaacatttttcgtgttcttagtcttgtaccgctgtagagagctcataagatatcgaaagccagcagtcgcccaattgttcttcttaattgaccttgtatcaactaaagagtgcatgtagctagtgctgacctcggtaccattcttgggcagtaagactgttccaatacaaacaagcacaaacttaatgagaaacaggtaatcgctctcgctgctttccttcagctcattctccagcagagttagaggaaacctatagtccttggcctttaaaattttgtcaaactcaaggaggtcacggtcactttctgttgccacatgttctcccccatccctgattcccatgacatcctcaaatagcttggacgatagttgaattgttcttccaaatatctacagccgggaagtggttagatccacgtgacgataagccaactaactatcttagcatcgatgtatgggccatcctcccttgagaatgtagagaaactggtaattctgactatttctttttgagcgtcgttgagaagtgggactattctacccaaacgttcgaaggagcaacggccagatacttgaacatcccctaccccttcattgttctcaattcttggctcagcagataatgtctccttcaacttcttccctttccctctaacaccaaccttcgaaggggaagcctcaacttcatatgaagcccacttctcaatctcttcctcactaagcagcttaaattgctatttaaaactagcaaggacctgcaatattaagactctcgattattaagtaaagaacgctaaataaaagatcaaaaaataaaagacccatgacacactcactactacaaaagacgaaattcgcgacggtcccaaaaatactttttttggggacccgtcgctaaaaaa

SEQ ID NO: 173995 - DNA, 724 bp, Cannabis sativa
aaatcttgtatattttataaaaaaaattaatcatacaatattattgttataagttattaatgattaaataatcataatattaccactactaatgaaatagtaacttaaataatgaaggcacatatcatattagaaagttcagagaaaacaatgaacacgcatcagtcataaaataaaatgaaaatcataatatctttttgttacttaaatttgtatttgatatgtttctatgatttttacccatttacaaaattctgtatagttttgagaaaattaatattttaatttgtaaaaaatatgaattttcaaaaatttatttttacaaaacaagtatattgctaaaatattttatatattttcgtgtatataagataagaataatttattattttaaaatattgttattttttttagttattagatttttttttagttttcgttttcttattacacttttacaatttttcatttatgtcgtaaagttttatctaattttttttttaataagttattttattttcttaacattgctagtattttttattttttctgtgttattttgtacggtgatattattatgttatgttagttttttatgtaaaattttatcttttggagttgataaaaatttaacgagtttgaacaagatctctcttcaaattttcaagttggagataagtttctatcttttttttattttatctattacattattattattatt

SEQ ID NO: 173996 - DNA, 576 bp, Cannabis sativa
ccaagtctagttctacttttaaggctgtttaaatttgcaattaatttccaccttgtaaaccgagctcgctagcttccactatttttcaccaaaatattctaaaatccccccaaacactactacaaaaggtattatttgcgttggtcaacgcgtctcaccaaaatggttgaccaaggcaaaaaatgaggagagattttatgcttcagagtataattgaggccaaaaaattagcaattagggtcggctcattccccgacacatacagtagaacctaggaaaaatgtgacaattttaaaaattatcttgcatcagtggaattgtgaagccaatttcttttgcttcagttagaaattgaggttaatacatttgccacagttatccaccgaagcaaaaagattaatacatttgtaaaactcaattttcacaaactttaatttcattttcacgcatcaaagacccatcccattttgaaaccctagcagacccatcccccatttcgaaacccagcacagccacgccagccaccgtttagaaagactgtcggccgcccaccgtcctgttggaaattattttacc

SEQ ID NO: 173997 - DNA, 955 bp, Cannabis sativa
tttctaaagaaggggatagaattaaatttggtaaactcaacaacaacaaaaaaaactcaacaataaaacatatttggtaaagttaaggttgatgtttaaaggcccgtttagcacaacttttggaaaagttaaaagctgcttttaaaaagctgtgataaaaatgtgttcggtaaacagtcaaaacacaactttttgaagaatttttgaagaagctacagctaaaagctgaagctgctccaatccaacttttagaaaaagctgttttgtttaaaagactataataatttttttttgtattaaaaccatatttacttatttattacatattaaaaaaattataaaaatttaaaataaactaattataataaaataaataattttttttttgaagaaaaaataaataattattaaatctcttattttcttaaaaaaaataatttatattttattttattattaacaaacaacatcaacctagaatttttcttatatacttgaatttttttaaaaaaaatttgataaaacataataaaaataatattataaattatttttatcaaatgcatataaattcatatttaaaaaaaaaaattgaaaatatataaaaaaaaaagaaaatattatataaaataagtttgacatatttgatattataataaactagattataacattatcattataatagatcataataattgacagtactttgaaatttataatttatcaaacactgagctcagtttttttccacagttttgccacagctgtttttttctcacagcacaactacaactgctttttcccacagcacagctgtgccaaactggccctaaatatgagaggtcaatgacatgtattataaaagggaaatttaattttctatacttaaaaaatcctaaaattatttccctaaacctaaatgttataccataggcaatatatgactactttt

SEQ ID NO: 173998 - DNA, 563 bp, Cannabis sativa
aaatgagtttctcatcattttaaagtacttgattgtgtaacatgtaataagattacaaatgaatatatgagttttaaaaattatggaggagagtgatcccacccttgatttatgtctgtttatgttgtgttgtaatatgaaaagagagacatctctcttaatttgtgtgattgttgctctaacatgaaaggacaactaggcttttaaatgtgaaattgtagattgattgttggtgatggctggtgatggttgtgctacttctttggagtggttttacttgaagtgtttagaatgattgttgtacatgaacgacaaagatttggtatcttaaatgaaacagttactagttaagaatcctttttttaggcaaattactccattgtatttggtttttataagtatgacaaaagtaaatttaacaattagactaagtacatatagtgaaaggatattatataggaagagatgcttgttgggttttgtgccctaaataaaatccattacaatctgattagttatcaatttaagagatttgaagcgatttatgttaacatgtatttttc

SEQ ID NO: 173999 - DNA, 806 bp, Cannabis sativa
  modified_base (186)..(188): a, c, t, g, unknown or other
  modified_base (313)..(323): a, c, t, g, unknown or other
  modified_base (773)..(778): a, c, t, g, unknown or other
aaataaaatataaccgcacgcgaaacgcagtttatttcttatttttctctaaaatcacactaaaattatttttctcttctctccttaattctttcaattttaatattttattaaagcataaatctagaaattgatattttaatatttttctataaaaaaagtataaatctataaattgatattttnnnattattttaataatttttctataaaaatataaaatattttaaaaaaatgaagcataaatctgtaaattgattttttacaattattttaacatttttctataaaaaagcataaatctataaattgnnnnnnnnnnnattattttaataatttttctataaaaatataaaatatttaaaaaaagttagaaaataaatatatatataaaagagaagtatgaggcggtgacatgacattttaaaatcactaaaactatttttctattctctccttattttttttaattttaatattttattaaagcataaatctataaattgatattttactatcattttaatattttttctatagcaaaagcataaatctacaaattcatattttactattattttaataatttttctataaatatataaaatattttaaaaaaagttagaaaataaaaaataaattccgaaaaaaatatcaataagatatatttatatatatatatatataaagcagaagtatgagacagtgaggtagcgctctaaaatctctccaaaactatttttctttgttctccttaattctctcatttttannnnnntattagagcataaatttacaaattgata

SEQ ID NO: 174000 - DNA, 750 bp, Cannabis sativa
taactaaattgttgcataccttgttcggtagccgaagttattggataataaagttaaatttccattaaaaaaatatgagactatgtttaggattaattgataattgtaatgaatggtgaatagaattatgtgttgtattctatacaatagtatatatttatatacaatgttaggagactaaatgggaagctactaaatacagataggagactagtaaatacattttaccctaatatttacaactaatattctatcactccccctcaagttggagcatggatgttaatcatgcctagcttgttacaaagataatcaatcctcacgccattcaaagtctttgtaaaaatatctcctaattgttctccggtcttcacatatcctgtggagatctgaccttcttgaattttctcacaaacaaaatgacaatcaatctcaatgtgcttagttcgcttgtggaacacgggatttaaggcaatatgaagagcagcttgattatcacaccaaaaatttactggaatagatgtcttaaatccgaattcagtcaaaagctgataaatccatattacctctcacacatagactgtgtcatagctctatattctgattcaacactgaatctagacacaatattttatttcgtactcttccaagagattagatttcccccaacaaatacacaatatcctgaagtggatcgtctatctaccttggagcctgcccaatctgcatcagagaaacactcaatctggg

SEQ ID NO: 174001 - DNA, 711 bp, Cannabis sativa
ggagcacatgtgatgtgtggctccagtatcaatgatccaagaaattttttgaaatagaaacttgttaccagccatgtttgaagcagcaggtatgttgttggggtcatcccgatttggtccttggctcaactgttggctgagtaaggagatgagctgctggcattgagtggaaagatcagcctgggtgttattgtgggcattttctggtttagaacttgctgcaacattgctggcagcagcctttcctttgtcagctttctttttgtccccatagcctggtggaaatccatgaagaaaataacatttgtccacataatgtcccggtttgccacaattagtgcaagaaggcctcggtttctttgagctggggttggtggtggatgaagaggggcgaaccgatgatgcaagagaggacaaatcagaggatcctaaagtcctttgtctctcttcttgaactatcatagaaaagactctagataggctgggaataggttcatttaggagtatttgagctcttacaggggcaaaagactcattaagaccggttagaaattgtaatacttgattttggttgtagtaatcaagaaacaatttcatggcaccacaagattaagtggcattaggttgaaattcttttagctcatcccaaattgatttgagctttgtaaagtatgtggtgacggattgatcaccttgttgcaaacgagtgag

SEQ ID NO: 174002 - DNA, 573 bp, Cannabis sativa
ggatataattgtttcttccctttaaacttatcatttggttgtaataactgcataaaacttgtaaaaaaattcatacatataattcaacacactatgtttgtttagataagtagaaaaagactaaaagggttacctcgaggaggaattttaatgctaggatgtgtaagaatgaaatctccagttgaatgatccagtgtgaatgcatgagttcctgaaccgaaactggtgcagaatattgtggcagacgaatagagaacatagccggaagccactagtctacttccactttgaagagaattcagcatagccttttcctccctgggaatatgatccagttccacaagacgtttatagatcccaaagatggttccggtgggaatggaggcgtcgatgtttcgagaaccatctagaggatctgttaccaccacaaatggtccatcatcacttatccaaatgggagcatcatcttcttcagaagccatgactgcaactttcccagattttctaagcgatgacagaatgatttcattctgtgaacaaagagaatcaagtaaggaaaaccaatctaagatg

SEQ ID NO: 174003 - DNA, 579 bp, Cannabis sativa
tatggacagaacaaaatggggtggttcacggtggttgtgtcaagcctacatcagccctttccaactatgctgcaacttttgtgttgcaatttaacgcagcctgaacaccatgaccccattatgctggtcccaatggctacaccagccccaccagaaccatggaaatcccagctgatggggaaggcctcaaaatgaatgttgatgcagctgtcaagcttgatactcgtcgaaccggtattggagctattatccgaccaagtccttgctgcacttcaaagccactaccaggatgcttcaaatctcatgaaatggaggctatgtactttctatttcatagtttactttaggcttctcaaatacagctacctatctcggaggtagaaacaaatgctcttcgagttgccacagctgtgaatgacccaaaatctgctcaatctgttggaagttattttatcacgatctagatttattaatatgtatgcttgattataaatctataatctaacatcctaaatatgaattccctaaaataataaaataaacacataaaagttgtagaaaactttacattgatggcag

SEQ ID NO: 174004 - DNA, 928 bp, Cannabis sativa
gttatgcatccctacttcaaaatgtggagccaatgctataactcctgggacctgctgctccacacaataaattctgcttttcagcatattgcacaactccattttctacctttcacctgcaataacattcaccatatcattacaaatttattaccaaccaaacgaaattgaaaattatatctatatttatataagtatctatatacttatatatgggtcatgggtaatattagaaaattttgagtttttatgattaatttttctgtttaattagaaaaatttctcatttttacattatatgggttgagattggtccatcagctgaaacaaaaaaataataataaaaatagtttttaggcagaaaagtgataaaaaagttgaatttgacttaaatattttacatatgttacatatttttatatagtgtaaaaaagttatattttttgatatttttttttttaaattaagtagcaaaattaagcatagaaatttaaatttctcttatatatatatatatatatattttttttccgttgctctcttttttttcctgttttttttttcttcattttttttttctttttttgacaaggggtggcacaccccaaacttaattgtaaatactcttttttatttcttttttttttttcaaggggtagcacaccccaaacttattacataacatatatataactaaatatagtcttatttctccacttccgggttgcccaaatgtgattcactaaagtcatggcaacccaaagtcattcttcctcaagcctcttccaaagtgatggaggtctttgctcgatcaacctccccttcgatataggtttttagtccctgcccattcactttcaatatccttcttgactgttcactcttaacatccacaactccaaaagggtacaccttgacgatggtgaat

SEQ ID NO: 174005 - DNA, 1046 bp, Cannabis sativa
gcatcacatcgtatcggcccccacaatgtactaagttccattattgcagccctctgatcttcatgcaaactctagctcccctcttgaccttcgtaggctcacacgactactaagtctcgatggcacagccctctggcctccacctaatctctagcaccatcttaacgcttgcgctcggtcttcttagccctactggcttctttgatgcattcattccacaactctacatctctatcgatgcctttatgtgacttacgcccacgggcaccagccaacacatcccactcaactgtctcggcgcttccacatggatcaaatcaaagtcacatgcgaacacctccaagtacaatcatcctctgacgattgcggcatttgccctcttggtctccatgtgcgtccctctttacacacacgtgtagccactgaagcatcacatgtctatcccaatttgaaccatcatggtcatcaactctcaaccactgtcatgactaacaagaatctgacggcccctacaatacttccacaccccaaccaacaagcttccttttcaaaaaaagcgcctcttgcggatacgatgaaactccagcaaacttggcctagtgtaccaagcatacaatatggactacccaatcaaccttttactatgccaacgagttcgaaatattttactgtgcctctctataatttcatgtggtagttgtctttctagcatccttccacacgcctacatcccctttaggataggtcaaccaggttcacctcccactaagatgaacttggctttgatgccaactatcacgggctcaccttttcaggcagcgaaacacccgtgtgataccttgacttctcaaagccaaggttagccttccaaccattagagtaacaatgggctcattttttgcacaaccgtgtgcctcgtgcacactttcgtctctcgaacaactcccgcagagtcatgctcataagcacccatgcatcgaggttctctagccaagatactcgcactgtccatatgttcatggacccatcctcaaggcaccatgcct

SEQ ID NO: 174006 - DNA, 798 bp, Cannabis sativa
attttgcctcttacttcaagcttaagtaataatatggcttaggagtaaaatagtctgataccataacctcgcctaactccaatattcaaaaatcaaacttatgattgtcctactagataaaaggttctaacctaacccgtgtgactctaacgaccatctgttgcatttttcattgttaccgaacaaagattataaaaataataaatttcacatacagtataattaatacacttagagtctaattaaatcttcagaattgagaaattataattctaatgcccattttttgaaaataggacccacaagacaaatatccatatataatcatataataaaagtgtttaatgccaattgccctactaatatattttttaagtatgcggttattgcacatatatgatctctattatatacaacactgtcacttaaatatcatactacatcagcaatctaaattgagattgcttgcaccaaataacgggcatcagtgaactgtactagcaatcgttgaataaagatttcataactttagtatgttgctgactattttattcatggataagtttgacattaatttttcgtacaatacaagtcataatctcatgtatgactaagaaattttctgataattatatataacttattcaatataaaatattaataatttaacattcaagcatatatgaaaatattaaactcttatttataaatataaatatttttatagctattcagtgcataaactgttggaaattattttaccaggatcttagaactactcacaagtatgtttattaa

SEQ ID NO: 174007 - DNA, 923 bp, Cannabis sativa
taaattataaatttgtcaagggtcattctattaatcaagaggataagttatcaattaactaaaaatagctacatattaaaatcaattcaaatttacctatttttataaaattattacccaatatatccttacatatgctaccttaattaattgagtctcaaatgcaaagaaccccaattttgccatagcagtccaatgcatgcaatctctctctgccattataattgacttagaatatcctgtaagatatgactttataaagcattgaattagctttgaaatgtaagttgaatcgcatcaatcagatcaatattgagtgagttatgactatcttatagaaggcagttcatggcccagcgtctaggttgacatcccaacgtccaggttgacatatgtcaacttggatgttgggtaagtgaaaacatgtccaagtgatgtacttaaagatgcctaagtgatattttaacatcacttagtctgtttatgtgttctagcgaagctggtcaccagttctcagagatgttgatgttctacgaaaatgagagactcgaaacttttcatttccgagtaagtttaccatattgggaatgagaaatgcgaagttgtgaatttgacttctctaatttcatgggtattagttattgtaaaaaacaagacggatggtcgaaatagaatcagaatcctgcgcatcaggccatttgtcaacctgggcattagattctcattcttgagctctcgagatctcattttgatactcccaatgttcttaaacttgaggacgaggtatcctaccccatttttaactattacaaattcattggtcgaatcagatgagtgatcgaaaccagcgcactaggttgattgtcaacttgggcactgttttgaggggctcgagtttgtggttttctccacaagtttccttg

SEQ ID NO: 174008 - DNA, 822 bp, Cannabis sativa
tagtcttgaaaataccctagttttgtgagtaagagcttttttgtaattgccaagagaggagataggtggctgcctagttatttgacacctagcaagccaattctttcagcaagggaaattgattttccctaacattttatctcatttagtgaaattaaaagaaaatactaatattggaaagaaccctcttctttccttctctctctctttgaaaccagcaagaacaagggggatagctactattttgtggtgattttagcaagaaaatcttgggagattcaagttgaggtaagccctagaaaaacccttctttagtttttaagcttttacttggtttgagtttatggttttgtattataggggctgttaggtttgggaatgcttagggttcgaattttatgtttaatttgagttgattaagggtcctagcagcttgtattgttggttggtttaggtttttgcaagtttaagctttgagttcaaagctttgatcattaatggaaagttgagtttcattggttttttctgtgaaatactggctggaatatattgtctatgcgttgtttaggtactctgaaaagtttggtggcatttggtagaaaattgagcaagaaatggaaggtttgtggtgaactggtacaaactggctagtcggttttgccagacctcaaaaaccagctagccgattgtggcaggatccccaaacgcttcgttttctatattttcgtccattgcaatgccatggctgggtgttccctatttccagagtttgggtaacctttagggagtataacagaacctagggttatggttttggatttc

SEQ ID NO: 174009 - DNA, 527 bp, Cannabis sativa
tatgagacactaagatgtttcgcatcttcataacatgacatcttataaatagttagtaattttcaaattttttattaaattaaaataagtgagacccaatattaaattacaccaataacaaataatattacaaggtgctagacactataagtgtcctttaacatttctcatatatatatatatatatttttaattttttatattttgtgtagtaatctacattataattataatattacaacctataacaaaaaaaattgaatagtttacaataccaataatataatttttaatattcttttacacgcgtattcataaaacttttatctatttcaacactggaatttttcaaaaactcacaaaataatatattctataacaaatactgtcataaaaatatatatataaataaatatatatatgggtattctcttaatgggtattactcatgtatgggtattttattcttgaccattggatcaaatatctaatggttgatatttataatcattaattaaatattaaaa

SEQ ID NO: 174010 - DNA, 863 bp, Cannabis sativa
agccaggtcccatgacctagcctagggccggccaggaactttacttccaggcatacactagccagcctatagggtatctcctgttggccggccagaccccatggtgaccacccatggctgaccaagtcttgaacaagacctctttggctggctagggtgtataaaggatccgagcatgtgttttttcatgagctcaaacatgttctttatgttctttgtgttcttcgtgactcaaagagccaagaatcacaatgaaggttagaattagattttttttgtctgaaaattagacattgcacatcctaagactaccatgcgaatcaagataattaaaagattacaatctaaaatgggaatctaaagacattaaaagtaaagaataaggttcatgcattcatgaaaaaattaactaaatcaagtgaataagcaagaatagaaagcttacccacaacgagaaaccgttgatgaagaaaatgggaagcttggactgtcgaaatggcgcaaaaatctcgagagatggagcaatgtgggtttgacctttagagagaaggaggaacttcttcaaagtttcttttttttagtgagagaatagaaagtgaaaagtgcagagaagtttccccccaaaaagacttaactagattctgtgggaccactcattcacttgccatgtagtactcagctaaaaggcatgtagaattgcaaagcagttaatttactgcaacaaatgagatcaaatagtcaagagcaggtatttcaaagactaaaatcacatcaacatttattcagtaaaggctacatcagttccaacttagttggtaagtccctatctgcatagacatctgcatagggacttaggggataat

SEQ ID NO: 174011 - DNA, 600 bp, Cannabis sativa
tatatataaatatatatgattataataacttgtgaaaaagataatactttacttggtcatggcatttccctattaaatggtttgagcataccattccttctctcttttttatctgtgaagcttctacaaatggaaaaagggtaggaggccgtacgtggtttttgtcacgtaagtatcaacatggaatattaaaacttcagattcaactctcactcaaaataatagtgaccagtcttttgactgtcgaaatttctactacagcaatcctgttaaacatgtaaaacctcacaacactaaaaacgtaattaatttattattgtaagaataattacaccaagacttgaacactttatcttgatcacaatacacaccaaacacttactctttttatttactagacactcatacttaaaagtttacttgcacactatttgatgggacactcttttagagtgttgttgggactaggggtgttaattggatcacaatccaatccaattatttgttggatattggatttttccatccgattcaattcaattgaattgagtcatccaatccgatccgatccaatggatgtattagattggatcggttcca

SEQ ID NO: 174012 - DNA, 646 bp, Cannabis sativa
ttaccaagcatgtggatgtgaattggagtaaaatagtttggaacagaccaactatacaaaagcaggaggtgattatatggctgatattgctgcagaaacttaaaacaaaagagaaaatacaaaagtttaatccaatagtggataaaacttgtttattattcagcaatggatttgaaaccttagaacgtctcttttttaattgtccttacagcagcatgtgtatacaaggaattaaagaatggctggaacgaaaatcaaagacaagcaacctgttgcaacttgctaaatggacttataaatcgaagatgtctacaactcgaacgagcatacttcatgctgcacttgcagccctggcatatcacttttggagggttcgaaatgatgctctttggaatcaaaagcagttgtgtattcggcatactgtacagaaaattacggaagatttataatatagaatttaccatgtaatgacttaaaaggctaaagatatagatagctaatggtttatggaaagatatacaaaatagaagtagcatgaggaatatgtaagaaatcaattgtatgagttgtaattggtgtatgtaattggtgattgagcaatgcaatgatccttattcataaaaaaaattgatgtcttgatttaaga

SEQ ID NO: 174013 - DNA, 1128 bp, Cannabis sativa
  modified_base (768)..(771): a, c, t, g, unknown or other
acatgtattctataaataataattaaaccctaattacctagtaatccaaagtattaatcataagcggtctttacaattatccccctgttaaaaggatttcgtcaatgaaatctaacttgaacagctctagatattgagtcctcatatcagactccaatacccaagtagcttcttctactttactatttctccagagtactttaaccagtgctatggttttgcttcgaaggaccttctcctttctatccagaatttgaactggttgttcatcataagacaggtctggttgtaactccaatgcctcataactcaagatatgtattggatcagacacgtacttcctcaacatggaaacatggaatacattatgcacagctgaaaatgatggaggtaaggctaattggtaaggaacctgtccaaccttctcaagtatttcaaaaggtcctataaatttgggactcagcttgcctttcttttcaaaatgcctgattcctttcattggtgacacacgcaggaagacatgatctcccagctgaaatgtaatatctcggcacttgggatccgcataactcttctgcctgctctgagaagcaagcattcgagctttaattttgtctattgcctcatttgtcttttggaccaactcagggcctagatatttttcgttctcctatttcgtcccaatgaattggggaacgacactttctaccataaagcatcccataaggagccattcctatagtactttgatagctattattgtaggannnntcaatcagaggcaaatacttgctccacgaccctccaaaatccatgacacaagctcgtaacaggtcttcaagtatctgaatagttcgctcagattgcccatgtgtttgaggatgaaaggtcgtactgaattttagactagttcccatggccttctgcaaactcacccaaaacattgaggtaaatttagggtctctgtctgaaacaatagacttaggtaccccatgaagacgaacaatctctttcacatacaagtcaacataatgatccactgtataagttaccttgacaggcaagaaatgtgctgactttgtaaagcgatccaccacgacccaaactgagtcgtacattcctgtggtt

SEQ ID NO: 174014 - DNA, 958 bp, Cannabis sativa
actataactcaattatataataatggctgtcattctcatgtcaagaatattataaattgctaattccacccatgaaaaaaattactaattccactatgataattcaagatatatacatcggctggtttaatatatataaataataattgtgatataattattaagttagaggaattattttatatatattttttattttttttttatttttatagtgtggtttgtgatgtgaattgaaattgttctattagttatttaatatatttttatataaatacaaaaaatattttaaaatatataaataaaaaaagggaaaccccattaatttatatacatttttttaaaccaatcatatatttccttacaaacaaaaaaaaaaaaatcaatcatatattttaccataaaaaaaggatttttttttcaatttttcaatttaaaacagttttttttatttattacagaattccacatagaaactcttatacatagcaactaatggagcaacataaatcgcaacaaaaatccatatagaaactcacatagaaactaccggacaaagccgtcttaaatattttggaggccatgttctaattttaaaaattaggcccctatgaaaaagaaaatataatttataaataatatttttaaatattatcatacggttatatgttttacaaaatactaaaaaactctaatcaatttataaaaattgttaatgattgcaatataacaaaaaaaatgataaaaaaaatatgcaaggtttgaaaaaaaaaataataaatagcaacaataaatttttatttttatttttttgcttaaaagcaataatagaattgaaaatgaatttttgagaatagacataaaaatgatcaatgatatgttgctagccctttaaaaagttgagttggttcattaaaaaaaattgaaaagcattaaaaaaatatatattaggcccttt

SEQ ID NO: 174015 - DNA, 532 bp, Cannabis sativa
aattaagattattagttacaaaaacacaatttatcaaactaaattaatgacaacttgtatctaaatattatgtttgtagttacaagtaatttattattgtgactaaaaatcacatttaatcacaataaatttatggtgtgacttaaaaattattactaaaagtagatttttttagtactaggaaggaccaattaatgcaagtgttttgagtttttattttatgaagagtattatccataaatgagtatttattattaggaaaattaaagtttttctgtttaattctactatctaattaaaataaatattttacttttacattatatagttaaaggttgttccatcggaagagagataaaaaaaattgagttcaagtgaaaaagagagggagtataaaaacaaagctaaatataaacatatcttcaaatatattgtaaaaatacatggtttttttttggtattagttattagtattttaagattgtaattaaattattgattaattagtagaggcggctttggatctaataaa

SEQ ID NO: 174016 - DNA, 598 bp, Cannabis sativa
  modified_base (364)..(369): a, c, t, g, unknown or other
acttaaaattaggttcaactatatttattcctctaaaattatatcaaccatagttttgggatgggtgctacttcccttttcaacaaaggatggacaaaattgtggaacgcagctcaaatcgccaaattgtgagccaccgagttagtagaacggggcagccaaaaaacactactattaaccacaggagaaagacaattaaacagttgcaaaaagaaagaagagagttgccaaaccggaatcgcagactttttaatggcattaaccaatataatttatttttatttgataggtatattttttaagaaaataaattaaaagaaaaaagttaaaaaaaacttaatacaattaaaaatataaattttannnnnnataaaaattattaaaatatggtgtctttagaattatttaacatttattgaaaaagtatttttttatataactaacaacaaaataaaataaattattgttatttatatctttaaaaaataaattaaaataagaaattcaaaggaataaaaaaattgtatgtaaaaaaaatgtttaattttattttaaattatattttatacatttaatctattatattttaaaacatatt

SEQ ID NO: 174017 - DNA, 619 bp, Cannabis sativa
gaactgcccacaaaattaggaaagattcgtcaaagtgtatgtaacgccctaacaataggaacgccacgaatcatgcctaaacataagcaaattttgttaaattgggattactagaaatgtaatatatatcccagaaaataatttagtatttaattgggtatattttattaaatatgcaattattctggtaatgaagtaagattatgattttacttaagttaattaatgtaaatttactaaatggttaaataaagcgttttttattaattacggagattttattagattatgtgggtgtcgtggataccatttttgaaataaaatatatttgggcccagtaaccgtaggaacttagcgtagtggtcaaaaatatcacgacaataaaatatggattgaattgaaaattataccggactagtttaaaattttaggttgtcggtttggcaaattagttaaaattaccaaaatacccttagattttaaatagtttaggttttattaggaagggcaatattgccatttcattttagagttagaatttctatttttctgtcctatatgttttggctgaaatttgtggtagattcatgaggtattattgataaaaaaaaaaaaaaaa

SEQ ID NO: 174018 - DNA, 531 bp, Cannabis sativa
tttacaaaaatactgtcacacgcatatttttaaaaaaatactatattttaataaaacaacagtgaaacacgaaacataacaactaaaaacaacagtggaacaactaaaaaataactgtagaacaacagtaaacacttaacacagtacacaatatttttgaaaaaatattcgccccacaataaaaaaaaataaaaaaataactggttatttattggattgatcaatccaattcattttagcaaccatttaagttaatttcattaaaaagaaaaaaaatatataaaaataataatttaaagcctaataattcaatatacataataaatattaatttaatctaacttaattttcataatcttataataaagccaaaaaataaaacttattcgcattgcaatttaattagcgtttaagaaaataagaattaatattttagattgaatttttttttttcttaatctcatgtgttaaatatataaaattatagatatattttaaaaatatataaatataattagatgaccactggat

SEQ ID NO: 174019 - DNA, 689 bp, Cannabis sativa
  modified_base (375)..(378): a, c, t, g, unknown or other
ctaaagttatattcagcataataaaacttatctaaagctcacaaaaggacaaagtactaaatggtcaaaaagaccactttgtccccactattttggtcacttttaaatctctgataactcccgacattcccgatgtctaactaagttgctctaaaactactaaaatacgaaaatgtgattctaatggtgaaacgccacgttccgatgttgtcgggcacaaaacatgcaaaaacataaaatttcatatatggcataactaatgcatcctaaattcaaataaatctccataaaatattaaatcgtaattattattctattttcataattaatcctaattatctgctaattttcaaaacaaagctaagcggtctttannnntatccccccgttaaaaggatttttcctcgatatctaaagctgtataactatggatactgagccctcatgtcggactctaactcccaggtggcttccttttctccagaactttatctttttagtctaagatctgaattggttgttcttcgtatcataagtctggttgcagctcaagattctcataactcaacacatgagtagggtctgaaacatactttcgtaacatggaaacatagaacacattttgaactgttgaaaaagctagaggcaaagctagacgatatgccactagtccaaccttttcaagaatc

SEQ ID NO: 174020 - DNA, 609 bp, Cannabis sativa
catccaatccaatgtcaaccgagtgatccaattacaaccgatcgtcgaacattagatatccaattgtgatcggatcggattagatgttatttttgaatatacaattcggttggatcggatggggtgtccaaaaattcaatacatccaacatctaatcgaactaattagtattttcatttattttttataagtaattatattttatattattatacgtaaaactatatgtagatataaaaattaacattaaaagtttactttttttttcttggattggatgaatccaatctaatccaatacatattggacctaaaatattggatggatctgattcgatccaaatcatactaagtctaaaatattgaataaacccaaattaaactaataaatatatatatgaaattaatccaacagatagaaccgatccaatccaacatccaatggattaaatctgatccaatatttttaggcctaactagatccgatccgatgttagattttaccatccgattcgatccaaaaaatttcagtcatccaatcgatccaacatctattggatgttggattggattggttctattcgtcagatgtatttcatatatatattta

SEQ ID NO: 174021 - DNA, 798 bp, Cannabis sativa
atataacataatattttagggatatatctatagaaaagtgttgggattttcttcttaaaaaaggtacattatcttaaaaaaagaataaatattatgttgtaaatatttttggtaaggagcaaagattatgtttagtaaccaattttttaaaaattactctaggtgtaatcaaacggataaaaaaatctaggaattttttcattttatacttcaaaacagatttttttttttagatttttatagaatttcacataaaaactatcatagcaactaacgaagtaacctaaattgcaatcaaaatttacataacaacccatttagaaaccaccagaaaaactaccatagcaatccaaaccgtaaattaaaaaaaaaaatgttaaaaaacagtatatggggtaattttctaaaaatctattgtaataataataaataaatcaaatatttaaaaaaaaaataactaccaagaatattataaacttaaaattttaatgacaatattataacttaaataaaaagtatatttattaatattgtatcttcttaatttatacacttataacatatattaaaaaaataacataatctttgacatactattgatttttttatttacaaaagtcctaaaatatatagcacttctttaaagaagctattataaccaaatattactttaagttaactgatgtggtgagaaaaattacttgttatatggagataaaaaagttcaattatattgtgtcaaaatatatagtaaataattaatatctcaaaaaaattaaataatatttattttaattt

SEQ ID NO: 174022 - DNA, 603 bp, Cannabis sativa
ccctaagtattttgttatgaatattttaaatcttcgtgctgccgaccaaaaaagtagtttcttactgcactcttctaaagaatgtgaaaaagatgttgcaacatttaaaaataaagaatcaaacacgattttttttttttaaaaaaaaaagaaaacgcaaatacatccaaaaataaataataaagagcattgttattgggtattagtggtgtccagtattttttataggtgacaccctacgtttagttaatgatatttcctaaaagtattttttaatttatataagactcgatacttaattacactaatatttgtatgacaccgaaaaaatattaaacagtagacacgttaaactataaacaaataaaaccaaaaataattaatttaaaattatgcaaaagggtagacttaaaccctaaacatcaagggaactaaccacgtgcctaaccattcaagctacccaactttgtgtgatatggaatcactttaaaataataataaacagcttccaacgaaactggtcaagtgaaaaaaataaagagatttttacacctcatgtcaaaattgacattttttttacatttttatcaatacacggttttt

SEQ ID NO: 174023 - DNA, 769 bp, Cannabis sativa
ttttatagttaatttgcacattgttcattgaagcacaaatacgaaaatcaggcaaaatatagttttatggtatattttgggtcaaatttaactcaagatatacatcatccattaaagatagtcttattatgtgtaaattttgggtcatgctatattttatgccaaatttgaaacaatttttagcatatgtgctaaatttggaccactttatacaccacaattagagtttacttttatgaatatagactaaaacatacatatacaccacacttttagctttctattggggatgctcttaatatatacatatctttattcaatttattaaaattttaactttttttccaattatacataaatttgtaagcttttatttcttgttgtgcaccctttcgtgaaatttttctataatccttaatcttttgtattttctcaaactaaataagattatcttaataatttgtattttttttgtcatgtttgaagttatttatttttgtaccaattattaatgtttttgtcattttttaaaccttatttttttttttctttttctcaaaaaactctcattttgtttactccattttctcttttaaaatattttttaaagtatttcctacatgtttttaccatctttttctactacggtttgtttctttttatttgtttaatagtaaatatataaagatgtagaagactatatgtatatgatattaatcatttttggtgttattcttttttttttttttttttaaatttttgttatttt

SEQ ID NO: 174024 - DNA, 610 bp, Cannabis sativa
tgcaagcccaattattataaaaaatcccaaaaggcacaaaaggccaattctaaaataaaaactatacattcgataaagatgaatcctagatcaaataagcatataagtggaagagttacatcctagatatatgacatatctcgaatgggatgagatagctcgaaagggatgacatatctcgatgggatgacatatctcaaatgggataagatagctcagacgggatgacctatctcgaaagatatatatcttggatgagatggtgacatatcttgaatgggatgatgtatctcagtcggtcggttggatgacccgtatctcggtcagtcggttagatgactcgtgtaacgccctaaataattaggcacgctacccaagttatttaggaaaccctaatcccctaaacgagattactaatcaaaatagcgcagaatttaaacttttgtaataaacgaaatgaaaataaaacttgtaataattaaactttacgatctaaaagttatagaaattggaatcccaaaaacatttacaaaatattattacaagtcctttttcttttagccggcctaagtggcaaaacagagttttaaaaacacaacactggtagacc

SEQ ID NO: 174025 - DNA, 591 bp, Cannabis sativa
  modified_base (217)..(223): a, c, t, g, unknown or other
cagattaggaatgacaattatacttgcaggttcgggtacccgcgggtacccgcccctactgggacagggatgggggttgacttttgggggcgggggcgggggcgagtatgtatttaaatatttatattcgagtcagaaacgggacgggggcgggggaatagatacccgcctcgaacccgccctgatatgatatatgtataaatttaagttttaaaannnnnnntactacaattaaaataacttcatgctttaggctttttattgattatactttatttttttttgtagtatacacactattccacttaagtctattgttttactgagtttttatgattattttttttttgattctctttgagacatcattttttttcaaaaatatatatgtaatgggtattcgatgagaatccttctcttgtcgggtaatccccgccccgcccccgctttaattttattaaagagtttgttaaagggtaaatagtggtataagtacccaaagttttgagtttgtacgtggcataaactcaatgcttttttttagtggcataagtacccaatgtttgtaaaattgtaattttcttccagttt

SEQ ID NO: 174026 - DNA, 780 bp, Cannabis sativa
  modified_base (706)..(743): a, c, t, g, unknown or other
ggggatgctttccataagctctctaaatgctcagaagatgttgtggtgaatcaaggagactcacaattaaagaatgcacaatattaaggtatgtttattattgttcaatgccctaaataaaataattgatcttggatgtttatgagtattaattgtgttcattattattgataatagaatgctcattgtgtggtaatttaacaattggtatcatgagcttgggcatttgattttagggcttattaattaaaaaaaattctggattttttaagttattcgtagagaaaattagattggaagatgattattgagttaatcaatattttaaaccatatttcccgtttccttttttgttgaaaatgctgagaacccaagcttttttaaaaaaagtttgttaatggccgaatatgggtatgcgatttacgggtttagagtgtttttcgagtgaaatgagtttgggaaaaagagagaatatgaaaaatggtgaatttcccctcaaacggcgtcagaaacggagcaccagaggtggtgtttccagtcggtcgggaaaccgggttcgctatcggatcgcacgactcggatttgactcgcgtgcccagctgaaggtcagggatgacctcaaaacgatgtgtcatttttgggctctccttcagacaaacaatgtgtcgttttcgggttaagggctgtgtaaagaccgcttagtttnnnnnnnnnnnnnnnnnnnnnnnnnnnnnnnnnnnnnnaattatttatagctatttaaaaaattatttatactgt

SEQ ID NO: 174027 - DNA, 826 bp, Cannabis sativa
ttattattattattattaggaatttaaccaaaaaaacaaatattacaaaaatacttttagctggccaaataaataaatatatcgcttcaataaattttttttacacaaataccacttacacacaccttcaacccaagatacatgcttcctgggcaactattgcgcaaccacgcaacaacccaacgcaatcgaaacgaaaatttaaccagaaagagaaccaccattaattccagtgacttcacctgagaagacgaccaaaatcaatcaaaacaagggttgtttcgtattcatgaaataaaaaagtgcagaaaaactactacgaaactaaaattcaaccggaaatccaatttaatttgcataaaactaatgtcctgacttcaattttctgatccatgaaaggcatatctcaaaaagttaaactagagttcccaaacaatccaactcaagtataatccaaaaaaattaaatcaatactataataacatatttatccttgtgtatttttgttgtttttcaaatttctatagtgaatttgttcatattaaatcataaagagacatgtagatagagttacgtacgtggaaacacggttctgatttttaatgtttcataaaagatgcattatagttgcattaatattttgctaactattatttcgtctcattaaaacctttgactgatgcaaccttcagccaaccacccagaatcttttgtatgattgaaatcttcatctaatgcaaccttcggccaatcactttgctgttggaattattttaccaggatccaaatttactaccatgtatgttgtttaacatcctaatatgaa

SEQ ID NO: 174028 - DNA, 574 bp, Cannabis sativa
  modified_base (437)..(440): a, c, t, g, unknown or other
ttgggaaaatcatgtatagtagggtgggcatccaatccaaatccaattagtaattggatttggaaaatcatcatccgatccaatccaattagacttcgaaatctaattcaattcaattactaattggattggatcgattttttaattggatattcaattacgcacctaaattttaatattaacttaaaaatataaagaaaaatacgtaagaactaagcatcaccttttatttaagtttgatactttataaatattaaatatattattcttacaagtgtaatgtagccaaaaactttaaataattaaaacaacaatatttcttagtaacaaaataaaacaaaatatcatgaaaataaatacacgaaacaatcaagtattacaaagtcaacatacaaaaaaaatctaataaaaataatatataaatatataaatatatnnnnatatatatatatattatattttcaatattttctattacacataattttttaatatataaatgtaattaaattggattgatttttaattggattttgagattgacatccaataaccgatccaatccaattagaat

SEQ ID NO: 174029 - DNA, 547 bp, Cannabis sativa
tcttctctaatcttcactgactctggatcggttaactatgtagctttaattcgttctagcatatcagattgcagcgtcatgttatgaagtttgcctacaacaaactcgatgcttgatctaaccatgtcttttgctaagtgaggtgaaatctgaaccatactagtcacttgcccacgacccttcctactcagggcatcgaccactacattggccttccctggatggtaaagaatctaaaatcgtaatccttaaccaactctaaccaacacctttgtctcatattctaatctttccgagtaaagaaatatttaaggctcttatggtcagtaaaaatttcacacctctctccgtagaggtaatgctgccaaattttcaaggcaaaaactactgcggcaagttccaggtcatgagttaggtaccaactgcccataatatttcaactaacgggaggcatagggcataacctgatcgacctgcatcagtacacaccccagaccctgtctagatgcatcacaacaaaccatgaacttctctttattagatggta

SEQ ID NO: 174030 - DNA, 506 bp, Cannabis sativa
ttgtagtttcgtaatagttgcatttccattgttgtttgtagtttcataatttggaagggccatacgaaatcgaggacgaaatcgactccggacttacaagttcaaaagaatggacagaaccatggtgcctagagcctggaatgctgatcacctccgaaagtattaccaatagtcgaaaaatatatgtttatgctctgtaaagtaaatttgtaccggacaagtatgtgcaacctctaaattaatgtttgtaaaactaagtgccctaaaaacaattttcatgtcactcagggggtagtaaggcataccacgcagacaaatgtaaaacaagccaaaaatttaacgaagttaaaaagaaaagtatgtatttaagcataaatataaagtgtttaaacccagcgaaaagctctaaaaatatgaagggcttggggacgggccttaaatgtctccccttaagaaaaaatataaattgtcttagggaggggaaaagggactataaatgtaaaaaa

SEQ ID NO: 174031 - DNA, 548 bp, Cannabis sativa
cagtaatcactatcactctttctcgctctcatataaataatattctattgtcttcgagtttttgattgaaacatgtgtttatgtcttgtgttttggcttattgtggatttttgaggttgaagttaattgtgtttttgcttctcaaccgaccgtggtcggagaagatgaacctcgaacgtaccgtcgctgccgtggtcggagaagaaggtcttgccagaagctgatgggtcgtggtcggagaagaatgtccagccaccacctttttctctccccgactctagttccacagatttagagattttggtttttttttttttttttgagtgaaagggattttggtttttgtttattgtgttaattattttatttcaaattttattattaatttattaaattaatttttatgtaaatattttttttaaagtaaattaaatttttactttaatagttaatattaattaggtcatatttaataagatgatgtggtattattttaaatgatgtggcattattttaaatgatgtgtcatgccatctggtgtctagtgt

SEQ ID NO: 174032 - DNA, 566 bp, Cannabis sativa
catctcgggtgaaaagcaaaatcacaaatcttggcaattttagctatgattcttgataagtactacaagcctatcccaaagtggagcggtgacattgggtccccttgacgaagacccctcttaaactggaaatacccatctaaagcaccattcaccataaaagagaagcgaggggtagtgacacaaaccataataagctccacaaacttctttgggaacataagaacttaaagcatttccttgagaaactcccaatccactgtatcataagccttctacaaatcaattttgaaaagacaagcaaatttagccactttcctctcatagcctctaaccatatcttgacacaccatgatgttgtgcacaattgccttcctttgataaaaccactctggtttttggaaataatgtcaggaagcacttctctcaatctgatgcaaattatttctgtcgccactttatagatcacatttcagcaagcaattggtctataagcattcattgactcagggcacacagtcttaggaacaagagtaatagtggtagtaggggtgttcaacaaaatt

SEQ ID NO: 174033 - DNA, 708 bp, Cannabis sativa
gcatgaaaaatgtgaaggcatgatgattaaggagattgaaaacaagatggagtaccctgcactttggcagaggcatctgcccaaacaactactaatggggcatcgtcatccgacgagtcttcttgctcctccaggatggctttcccctttcctgctataggggtggatggatgagcaggtaggtcggctccctgatctggatcgaatgttcgatgggcctgtgcccagccggaagtttcttcttccttttgagcggtctttcctgctcttcctcagcctcatcctcctgctcaaaatattcttaagcatgttgttcggccctgactcctcccttcaacttagcctcgcacttaagttgaataagctgcttctcctgctcagaatgctcctaagcatactgcttggctcttgcacctcccttcaacttagcctcatgcttaagttgaatgagctccttctccagttcagctccctcaacccgcccagcattggacttcctcttcttctccttcatagggtgaggaaaaaatctgttggatagagcccgtactccacaaagttgtcctctaaggtcaacaaagtgatattccgagcatcatccgacagctgaccaatcttttgagctctgtccctaagagctagcgtgaggggtggacggtattatatagggatctactgaaaccaagtataagtggtgcccatgccttc

SEQ ID NO: 174034 - DNA, 851 bp, Cannabis sativa
actgacctggtctcgtatttgaattactttaacacaattatgcaaccgagtaatgtgacgaaaaatttacgatgcattttgttccttacctcgcttgttggggcagcgagtagctagtttaacaagtttactcatcattcaataacttcctgggagcagctgtctagagatttcaagaaacaattctaggctgctagggataggcgaccagcagcccagcgagccatttaaggtagacttaagtcattttagaacgcctgcggctagggtttggaatttggatgacagcacgcaacttacagcccttcaagcggggatttctactgatccattaactgtagggggcgagttatgggatgacttacaagatcgtccactgagaagcatcactgagttcaacaaaagggctcagttgttcatttggaaagaagaagcgtgaaaggaaatgaatctgttgaaaacaagctcaggaggcaaacccagcaatgtttcaacaagaactgtttccacaagaattgataactcgggggcttctggtttgaaccaaaggacggagttaaggaaccgtcgaaggataaaaagaaacagaagaagcatgataagtatgtgttggtatacactatttataccgagcttaatgaaactcgggagaatatttacctcgcacatgagtagaaggtggccttcgacaagcccgagcccatgaggaattcgaggagtaagagggatcctaacaaatattaagaattccataaggatattgggcatacgaccgacgaatgtttccaattgaaagatgagatagaaagtctcatcgctcaaggccattttaagcagtacgtgaaaagaca

SEQ ID NO: 174035 - DNA, 870 bp, Cannabis sativa
agtcgaagatgattgtcgaaggcctagagccgaggacgactaccgattgaaattgttgatcttggaagaccaaaaaaacaaagaacttgagagaaatctaagtgcacagaaaaacattttaagaaaaattaatagcaaaaattttaattagatacatttaaacacaataataagatctatgagaggagagatcttagaggttaagagaaaatataaatatatatacttacagtgagagaaatggacgtgagaaagaactattgaggagagagagtgaatcggcgggggttctactttggaaatttaggagttttacacagttttatacaatttaaaattattgggtttagagagaaacgaagaagatgaattgatgaagaaaacaactattaatccaaaaaaaatatgagggaagtatttgttttctcgctagtgcaaaaatttcatctaccgccaataactaaaattttttatttgtgtaacactatttgctgcggaatccgctcctaataataaatacatgcgctgataatagttttttcaaatattttattattagtggtggattgcacccggtaataaatatttctccgctgctaatactatattattattaatttaatattaaaactatttaatagtgttgaatcatatatccgattgagattattagcggtggatttgtcccgcccctaataatttcgcaggtaaaaattatttttcttctagtggtactccgtgccccacaacagtacaaaaaaacgtgtagattaagttttcaaatttttaaataatttgcaaatcataaaaattagaatatgtctaatgttattcaacacatataaaaatcaagtccaataatcaagttga

SEQ ID NO: 174036 - DNA, 577 bp, Cannabis sativa
aaaatatcactgaggcatcaaaaagtacatctccgaaacatttttccactcacccaatgtccaagttgacgtcatatatcaatctaggcattggaatgtcaacctgggcgttgaaatgtcactgggttatggactacctttagtaaaatggccataactcacttaatattaatctgattggcgcaattcagcttgtatattgaagctattttaataatctatgaagtcatgtctcatacttcaatcgcaattttgaaattaacgacctcaaacccctaatggagttacaaaaataagctccgacttagctagagcgagtccctctgtcacgaatcgggctccgaaaattggcaatcaacctgagaagttaatttttaccattagatcatcatttacggtcacaattagccagtttaaaccatttttatattaaataaactacccacaaaagtcagagcatctctctctagttcttgctctagatcttaaacacttagtctttttctgtaatatcatctcgtgagaaataaaaacttgaagtagacatagtttgttacaccctaactagcataggcgt

SEQ ID NO: 174037 - DNA, 530 bp, Cannabis sativa
gctcaataggtccatttatagaatcaagcatgcttctcgttcttagaaaaaaaaggtttcatgaaaaaattaaaacctactactttcaccaaaatgaaaatgaaccttgtgtttaccaactcaaggataatcaagtggtagtaatcctggtcctttatgttgatgaaattttgattactggtaacaatataaaaaaaaaatgactgacattaaggaatggcttaacactcaatttgagataaaagctttgggtgaagctagttatgttcttggtattcaaatcattagaaaccggtagaacagatcactttctctctcgcaagcagcttacattgataaggtgctagagcgattcttaatgagcaacaccaaaggggtagttatgtcttttagacctagtgtgcatctatctaaggaacagtgtcccatttatctctaagagatagaagacatgagaaaggttccttacgattcagcagttggaagtttaatgtatgttatgttatgcactagaccaaaaattggctatg

SEQ ID NO: 174038 - DNA, 531 bp, Cannabis sativa
  modified_base (216)..(216): a, c, t, g, unknown or other
  modified_base (283)..(283): a, c, t, g, unknown or other
  modified_base (384)..(417): a, c, t, g, unknown or other
gtacctaattttttataattgcggtattaatactcaaaattttatttttctaaactccattggtatgcactaacttttgttagtttattcaacatgtggatggtccaaattatttcagttttattttatttattttcacttaataattatttaaaaataaaacataataataatagtaataataataataagggactttttttatttttacacttnaaaacagttttttttttttttgcatttttacggaattctacctagaaacctctattgcaactagcgntgcaacctaaattgcaacaaaaagtcgtcgtaaatttgaaaaaaaagtttaaaaaatagtatgtgggataatttccctaataacaacaacaacaacaacannnnnnnnnnnnnnnnnnnnnnnnnnnnnnnnnntaataataataataataaacctaaatctttgaaatctcaaaatctaattaaaaaacaatcaaatccaattacatttatatatatatatttaaaaattagttatatttatttata

SEQ ID NO: 174039 - DNA, 1220 bp, Cannabis sativa
gcttaactccatggcccacttgagaagcctccctgaggcctcaagcttctgtaaaacttgttacagcgggtgatttgtaaatatcttgatggagcgagcttggaaataaggcctgagtttccttgatacaattaagagacagaaggctagtttttcgatcaagggatatcgaatttcaacccttatcatgcatttgctgacataatataccgagtgttgaactttttcctcctcccacaccagagctgcgttgaccgctttctcaaaaacagctaaatataaatataagtcttcttcgtgaactggttttgacagtactgatggcttagtctatgaaaagtgaggtttaattaaaaactttttgattaaattagaataaaacttctttataaagtaccactaatgtatggggatccctgtttataaaaatttacatatatcaaatctcaaaaccgttattataaaatcaaagtcacatttcaaacataaaagaaaagaaatcgatcatgcttcccgaaagccatgacaccacgactgatatgtacattgctgggagacctcggattcatggccgaacgtagcactttcttacctgcaccatgaagcacccgtgagtcacaataactcaacaagaaaagttattaaataagaagcattgtaaacgcagatattcacatctcaatataacatatatattggtgattcacgcaagtccatcatacacatctatatggttttaacatttatacaattacctatatgtcacgcaataagaaaactacaacatcttagtcaacatcttcatcattatactaagtgaatagttaatcaatacataaccatatattctcagtgcttcataaagcactccaatcttacattcatatggacacttactcttacttcccgtgagtcattgaggctctgaaaggaaagtgactaatttcataagtaatataaatttattcagtcacactataacaatatgtatttaattacaactcatcccataataacacgctcgatccatgtcacaacatcgtaaccacacaatcccggtacttcataaagtacccttaccacttgttaatcacgagctacatatgccactactattgttcgatacagtaaacgataagtaagaaacctatctgcagtttcaagagtaattactcataacggtaatgaccgtttcatttactcgatcataatcgagtcac

SEQ ID NO: 174040 - DNA, 609 bp, Cannabis sativa
tttcttatccaagtattcggtcagcattgactgtaagcgaaaaattgtaacttctcagccagagggcgaagatccctttgtttatgttggatctgtttaggggtctcgaatcccgattatttcaatcttaagggctagagatttactacacagtggatgtgtaggatttagcggttgtaattgactctagcagacctgaaacatttgggcctgaggtagtcagagttgtaaaagaatttcttgatgtatttcctgaggagttagggctgttcatataaactgggaaactgcggtttaaatccggaccactacaatccgaaccattataaatcgtaaccggggaaaccgtttttggtggtttggtcaatccagatcgtttacatcgtaatggttcggttgcggttcgtaataaataattaacggttaaactggaccggaccgtttataataagtaattaatttatatatttttttatatatgactatatgtataatttagaaattttttgtgagtcaagttttttattgcatgaattttagatttttatgttatgtttgacttttgagaatgtttttatatcattatttatatcttatagatctattact

SEQ ID NO: 174041 - DNA, 565 bp, Cannabis sativa
ctagggctactattattgaccacagtacattggatggggtagcaagtacttgattttgattttgattttattgaaataggactaatagatgtttttggtgtgaaatatttacaaattaagtgattattattagtactaatgcaaggtagtgatgatgatattattgatggaccaaattggtgaacagccatataatgctttttttttaattatatatataaatttttgagatgaaaatttctgcattgtgcctcttgtatttatatatgtttgatatgatggtgaattaggcaagaacattaattaattgaaacattattttatagttttaggtcttcgtacatatatacttaatgtatcttacgtaaatatatatatttatagaagataataataacaaatatattaataaaaaataatgagaattaaatgttaaattaccagtggtgtctagcaccctcctatgtgttaatatcgctagtggtccaactaagtatcgaatcgagtcccatataatttaatataatagcttttaagaagtggttaccccctatactattttttt

SEQ ID NO: 174042 - DNA, 597 bp, Cannabis sativa
  modified_base (308)..(310): a, c, t, g, unknown or other
tacatcaatcagatatgctatcggggacacttattaaaatatatgctcaaaatccattttttttaaaaaaaaattgagatataatcgacacaaaatataaatttggtcaaaatgataaagcttatgataaatttgatcaatattcatagtccttagtgtttagcattaatgcacctatactatattcctatcaatgaaattaatacaaaaaatgaacaaatacaaaacaaacagaaatgagtaaaatgttattggttcaaatcatcaatcaatatcaatcaatatatataaataaaggaaagcacaannntgatgacatggcagtttctatgaaatttcttttcctttctttgttttctcatattttcacattttttttttattttttaattacttttctttaataaaaagctttcatttttttcatctcaccttatttaataataagaccttttattttttttttcatctcaacttatgtaattactaatatattataatttaagtaacttatgtaattattctaaaaaaaagtaacttatgtaattactaatgtactatattacgaatatattataatttaagtaatttaacata

SEQ ID NO: 174043 - DNA, 520 bp, Cannabis sativa
  modified_base (135)..(146): a, c, t, g, unknown or other
  modified_base (282)..(295): a, c, t, g, unknown or other
gatgactcgatagatccatgaggactcaatggttccttccgggatgatgattgattccttcttgaggactattacctttcgtgtcatccatcacttttatgtcatgaggcttttttctgagctttttcacagagnnnnnnnnnnnnagcaccaaactgttaacgcagattttcattaaccaaatttcagcctcacgatgataattcaacatagaaaaataaaagatatgaaagcaaaatatatgaacacaagattttttacatggttttgcagttaaaattnnnnnnnnnnnnnnagtcaatcttattcagatttttgagtattttttctagggcctctttcttcagagtttttcctcccttttttgagattgtttgccactatttatagttgcatagtggcaaataattacaaagccgaccaaaatatgtttacaaccattattcctaaaattgtgggatctgattacaaatcaagccaaataaatgaggtttttacacagctgtgaatatcccgcttt

SEQ ID NO: 174044 - DNA, 549 bp, Cannabis sativa
atttaaattgattttgcattatcttatatgattataaattatatgtgataagagtctgtgaagaataattagtatttttactttctgaattttcggcattacttgattttgctctttaaaatatacgacttgttaaaaattctttctaaaataatgctgttacataattatgcctcttttgttataattcatttattttaccgtgtaaaaaattagcatttttaccctctgaattttgactaatacaaaattttgtccccttttgttgagaatatttattttaaaaattataatattttagtaattgtgaaaaaaaataataataataagtattaaaaaacttgataaatattaaatttattacaaaatataaattttacttaaaaaaaaattaaattattctgaaaaaatatttttaaactttattttttttaaaatgtatgtatcttaaaaaattaaatcagaattagtgagaatttaataaataatttaaataaattaagatttttttctaaaaaaatcaaatttatttatatttataaattcata

SEQ ID NO: 174045 - DNA, 1254 bp, Cannabis sativa
  modified_base (614)..(622): a, c, t, g, unknown or other
aaaatatatataaaataatactaataatttaaagataaatataaaatttaataataattatgcaagtcatttaatgtaaaaaaacttgttaactaaaattaataataaaattttacatcatgttatgttgtgatttaaatttagatcgttttttgttatgtgacatatttgtatcacaatttgacacactattagagtagagttttaacaaagtgagctatattttatatttacattactcatttatattggagatgcttttacatatatatcagtatacttagtactctcttcaatgttatatcgctattggtataattaagtatcacctcccatttaatttaagataataacgtttagagaatatatttaatcaatcacagaacaacacctctaagtagtgttaggcaaccataactgtaaattcccacatattatcaatgtgttacctaacaatgaggatgtctattatttatcttacaaaaaattctctctctttaaggtaacatcactaaggagcacaatgtttagcccattattattagggtaaatagcgacataagtacttaaagttttaagtttgtaagcagcataaacccaatatttatttttannnnnnnnngtactcaatgtttgtaaaactgtaattttcctctagttttgtcagtataaactccgttttggatttattaaatgaacatttagaagtaactgatactacatgtttctgtctagaccgaatgatgaagaatctagaccttatatgtggtatgtttaagaaaataacagagtttgtattgacaaaattagagaaaaattacagttttacaaatattgagtacttatgccgctatttaccctataaaatattataatttagaaaaagaaaatagataagatatgagaattctctaagtattttatttcaatgagtgatctcttatttatacaaacatgagagtcaaaaattagtaaacgaagaaaaagagaatattaattataattaatggtaataaataaaaaatttggacatccatatatttattaatatttataacactcccacttagatgtccataataactgcctcattaaaaacctcaccaagaaaatccagtgtgacaaaactcgatcaagggaaaaagtgcagcatgaaattactctccctcattttggcattcatggagatcttttaatcgacgcattctaatcttgtggatcattatctcaaaagttgatattagtaatgacttt

SEQ ID NO: 174046 - DNA, 807 bp, Cannabis sativa
gaacccagctagaaccaaggaattagttgctgatttttggtgttttcatcaaggaattcaaggggaaatcaagttgaggtaacccctagatcatttgttgtagttttttaagctttgatattggtttaaatatgtgattttgagttttaagggctgttagggttagaaatttttagggtttggtttttatgttcaatttaagttgattgatggttttggtagctggttttactgctttatgttggatgtgtgcaagtttgaacttagaaacccaagctttgatttttaatggtctaatttaattcagttacttttactttgaattatcggctggaataaattgtgtataccctaactaggtactctggtaggtttggttgcatttggtggagttttgagcaagaaatgagattcttgggtgaacaggtatataccgagtaactggttttacccgtacctgtaaaaccggttagccaatttaggtagggttccccgagtgcctcgttttctcaattcttttccatttcagtacaatagttgggtgtttccctacttcctgagttagtgtaatccctagagagtataacagaacctagatttgtggattccggtttcccgaattagtgtttcgatcatgtgatttacccgattttattatgtaattagggcatccatttggcacaaaactttccgttcaggtcgaggccaacacacttgaatttggaaaaaaggtaagaattgtatataatgtgtgatatggatatgcgaatgtatgtatatgtttagtgtatatgcatgcttatatgt

SEQ ID NO: 174047 - DNA, 685 bp, Cannabis sativa
ttattactaatttcacttattttatcttacttaaataagaaaaatgctaaaagatataatatcactaaataatcgtaagacgtcacttctaaataatattagatattactgatacttaataataatggtccctaaatataaataatgatcataaaaaactattaattatttttaaagtgttatcttataataatgtgagtatcgtagtgcctaagagtatcactaatggtagtattctttaagaatgttaaatttttttacatcatttaaaatacaatattttttttatttctctttcacataatttttggcaattcttgttttaaaatgttctaatattaaaaaattatgaaaattatactatattattatataatatatattaaataattaaattattattttataataaaataataattaaaataaataaaaaaaaataagatataaaagatgtcataatatatattttctcactccaataataaatccattaacaatgacaaatagcaattatgatgaagcatctaatagcaaatagcaattatgtttgtgtagatatggtaaaattcctttaaaaagaaagagaatttaatagacatgttgaagccatcaataaaattagattgaattaatttagatgggaattttgattttatatacttaaaaaattaaaaaattttat

SEQ ID NO: 174048 - DNA, 519 bp, Cannabis sativa
ggagtgcggtgttggaatgttcacaaaagtatacatttttaactttcttttttcaatcactgtcattgttttgatttacatataaataataaacgtgggtgatcttgatttcattttcagcaataaagaagaagaaagggttctgttgagaagatttttttctttttaattttaaattatttataattattttttaaaattcatgttacctggatcactaaaaatttgctacgtgtacaagactgtacacgtggacagtcaccgtgacacttaactgtaatttttagatggaggggtacatagcaaaacggaaccagggtttaggtagttataccaccaaaattttggtttttgtggtaaactgttacaaaccgtaaaattcaggtggtttagccgccaatatctctttaaagtaatagttatcttagagaaatttacatggtatactagtttttgctatttttttacaaaaatattgtcaggcagtatttttttattttttcattgtatttttttttt

SEQ ID NO: 174049 - DNA, 524 bp, Cannabis sativa
  modified_base (458)..(459): a, c, t, g, unknown or other
cagcggacgttcaacaccttagccgaactatcatattattttgatgtgatatttttggtttttaatcaatccccattgatattatatattagttaataattatacaataaattaatataaagataatcatataatacaatatgtatatgttataattaatatataaatattactgttaattacaaaaattaataaaatattgtattttttttttgtataattaactaataattacataataaattaatataaataattatatttatatggatagataaaaataatatggatatatatatattataatttatgtataaatatcaccaataattacaaaaaattagtaaaataattaatctgattttgtataattattataataatatagttttttttagagcaataatatagttatttatgatacataacttaatgatataattatttataatatatanntatatatatatatactagatgagacttacgtgtcgagccacgtaaattttagttttatataagtt

SEQ ID NO: 174050 - DNA, 634 bp, Cannabis sativa
  modified_base (499)..(500): a, c, t, g, unknown or other
gtcgaaactggtcttttcgagacaactatcgaatacaaaagaaaaattaaagttagcaaaccaagagaaaaaagacacagaataatttaaacaagtcttaagtagaaatcacatatgtattatgtgaaaggtggttgtgccaattggagaaagactagtcgtctagaagaattcatctttaaagggagttttatttggaaaatccacaatgatcttacgatcgcttgtgtgagtcccaaggtagtaaaaaccccatgctgcattcttcctcgcaggaacagccttgacagagtaaggatactctatttcgtggggagtggggcactccaaattcaaaattttatacaaaaccttcaaacttgtgaggattctgtatgaaatgagattcaattggaatggggcaagcccgagatggtttaggaagtccttgaaatagtcttgcagggggataatggctccagccctgatgtgttcgaggctctaagcacctatccctatnnagccactcgtactggccttgccactggctcctcagatgcttcgcgagtaagtcgtactggtggataacaactgaactcgccaacaaccaccgatctaactcggcagtcctgcttatattcaataccacaagtcc

SEQ ID NO: 174051 - DNA, 723 bp, Cannabis sativa
gaagtattatgactctcgtgttcagaatagagagtttataatatgcgacttggtgttaagaagggtgttcttagcgacgcgtgacccgacagctggggtccttgggcccaattgggaaggaccgtatcagatcgaaactgtcttgaggcctggagtgtacaggctcgctcgccttagcggggagcaagtgccgcgagcagggaacagtgagcacttgaggcgatactaccagtaggtggaagtcctcctcgttcggaggtccttaccttactttgatgtttagccaagtttcctcttagttaattatttatttatttatttacttattttttgatgcccaaaatctttattagattgtcatattcttagaaattcttagaattgttattttcaaagcttgaataaaaaatttatttattcaaaagatagttacattgccaaacccaaaaacaagtcaccaaggataataattaaaccttcgtaacttggggggcataagggtatagatttgactatactcgttcctaatcctacaatttccataaacaaaaataattttagaaaagtggtgaatttcttaaaatcacaaacacttagactaaaaattataatggatagtgagtagatttaatcatatacatgataagtacttaatctagaaaagagtattaactccaaacaaaaaaaactagtaagtcaaacatgttcatcaagagagcttaa

SEQ ID NO: 174052 - DNA, 562 bp, Cannabis sativa
gggttcaaaatagcattcagatcttagtcagatttgtacctaagaaaatgagaagataaataccaaaagacaatgaaggtcatgatgcgtagatgaagagagatgtccaactgtgctggtgttgtttctgtccacctttgatgtcgacgaagagaagggagattggcagggtcaggggttctaaggatctctcaagctcatggtgagcttcattttctttgacaatagtcaaagatggcccaatcaaatctggacgtggttcttgcgattgaagagagagaggaagaagaaattgaaggagagagaaagggtgaggatgcataattatagggtttcattttattttttttagaatttaatgattttttaaaattataattttttgttataaaaaaaattataaaattatgattttcttaaaattataaaatcattttttacgttaaaaaaatttgatttttttataatatatgtttattttttaattaattatttttttttaatttttaaataattttttttaatttttaaaaattgttagaaaaaaaataaaaattaaatg

SEQ ID NO: 174053 - DNA, 841 bp, Cannabis sativa
gcccgcgagcttatgcatgtaaatgaactaataactcgcaccattaaagtcgcctacgttgctatatttagcaaattgagtcgaaattgttcttcatttattccgtttgtgtttttcttgatttaatgttgatactcaatgtataatggttcgatattaaattaagtttttgtgtaataaaaggacgcttgctttgtatataaaggagttatccaacatgaaataaaacaggacagaaatccttacaacagtggactaagcagaccatgatctgactaaaccactataatttccttgtgttcatagtattttccagtatgtctgagtgtctattatttgaatactcgccattctaagtggagtaatgtatattttaattaatatctatattttaattttttattcggtgttgtcaaaattcctccaacaacagaaggagagactctcttttgtcatgtaataatatttttagtttaatctacataaaatggactttatccatggttaaaaaaagaaataattgcatgaggatacatacttttcattttattttaagaaatgtccttatttatattaatataaaaaatattatttatattaatataaaaaataccgtcagttttttagttattttatacgcacgcataccgaaataaataacttcactttcaatgaagtcaaaaattatttttactgggaaacgtaaattgttttttttttgtcgttttttgtatcttttccttacttgtattttcttgtcagattttgtcaaatcatttatttttgttttgtttttttttttttgttttttgaaaatctttatcttttgttacgttttgtt

SEQ ID NO: 174054 - DNA, 614 bp, Cannabis sativa
ttgtggtattaattggacttaaattctaagatttttcccaatagtcatttgagttgtatgggtccgggataccataatatgagcttttactagtaacttggacatagaattcaggataccaactatcaaacctatgagcaaaaaggtcaacgcaattctagatatacaaaatctactgactatccaaaaatttgacaaggcaccttggttcagccatgagaaaaatttgggaccacccataaaagtgatttattctacctcggggagcccctttagtactttgggcaactttgtgagtaacggtacccttgttaaacgcaactcgagcaacatgatcttgttcttcctccttgggagggacttttatagttgaccaagtggaatatttttgtgctttaatatccatggttgattgatcgtggagattacaactcgataacctcatcccaaatggaaaattgaccaatatttgatagtcttttgatagaacctcatttggagtaggttttagcaccattgttgttcacggaagcaatgaagttagttcaagtacatggacaagacttacgaggcttttgaaaagttgtatgtgtacaaggatatagccatggtgt

SEQ ID NO: 174055 - DNA, 656 bp, Cannabis sativa
ggtacgacccacccatttgtcaacaagcgaaggatgtgattcctgagctgctaaggaggattcaaaatctggagagagaagtgtccatgctatcatctgaaggtgttaagaactttgtgactaacaaagaccattctgaacctattgaaaagtcaatgacctgcaaagacagatatgaaattgtggagagttttgatgataacactcccaccattgatgaatcctaaatggaagtcaaacttgtaaatgtcaaaggagtggatgtattagatatcttgtaatatgtattgcaatatgtattttgttgtttgtacttaaagcatgagcaattaattgtaacaagtgtaacttttgttgatcaatgaaatataatctacttttaattaattaaaagcaaacattgctttgagtcttgtattacaaaatgtgtactaatagcaacaacaaaaaacataaattagaaggcctaaacactaaagaatttgtataaaatgtaagcattatgtgcactaattcaaacacaacacataatgtgcagcaataacagtttaaaaaactaaaattaaaagccctaaacactaaagtgtttgtgtcaaaagtaagcatcacgtgcactaattcaaaatacaacagtttgtgcacaagatgctacaaca

SEQ ID NO: 174056 - DNA, 577 bp, Cannabis sativa
attcggtttggaagggattaatttctggtttagatttgggatatttctgagttttgttgtacttcttcatgttcttcagagaagaacactgaagaaggagatcacggatagggaggtgtagttgtatttgttgttctctgctagggtttgatttttctgggttgtgtatatatgtgtcgtgtgtgtgtgtggctgagtgaaataagagatataagataatacaaatatgagtgtaattggcatttagggtttctattgggataaacgatctatagctgaaagaatagtgagctgtcgttttgtgtttatatgttgagggtcaaacacatgggtgaattgggtaaatggtcagatttgaccttggcttttgttgattaaagcttgctgtgtgtgtagggcaaagaaggaataaaattcctacattaatttatataaataattgactttatgaaactttagtgaaattagaaaacaaagacttagaaatgtagataatcaaactataagaaactacatatagttaaaaaaaaaaaaaaactaaaaaatgaaaaacaaaaaaaagttaaaatgaaagaaa

SEQ ID NO: 174057 - DNA, 679 bp, Cannabis sativa
taaccgattatgaaaaatgagagtgggtgagactgaaagagagagagcaatgatttggacaatgcccgtgatgaacgcttctaattgaagttgtccactctatgtctcaagaagccgaagccacggcgtgaggccaacttattattctttaattcaattttgatattgtttctatttttaatttatttaatttatttttttctttaaaaagcttaatgtttttacaagtgtggtgcatacttaaggaagagttgactaattttatggtaggtgtcgcgtcaccttcagccccaagtggagtttttattggaactataggtgtcgcgcatgccggattacataggataggactgaataatttcttaaactctagatcagggaggcacattttccgatgggtatgagtccgccgagaccagtccttaatggaaccgggattttttttctaaatagaaaatgagacggtgaggagaattattttttttgccctaatattaaataagactagaatagggatgacacttcccatctccaagatgactcatatattattttattttataataatattttataatttataattgaaatttttatcctaaaaatctattttgtatattttattacatttttactcctacacgcctacatcaacttttttacttaccatctttgtttt

SEQ ID NO: 174058 - DNA, 676 bp, Cannabis sativa
gaagaaatcccttgctaacaaactgtatctcaagaaaaaattgtacacactttgaatggatgaatctaaagagatgaggaatcatcttgatgattacaacatataattctggacttgaactatcttaggggtgaaaatagatgatgaagatcaagctatcattctgttgagttcacttccaaagatgtatgagtattttgttgatacaatcctatatggcaaagaaatgttgaccacggcagagtttaaggctgcattgaatttaaaagaaatttagaagaaaggaaatgagaaaggtgttgacgctgaaaagcgatcaactaatctgtacaatctgataagcagtagcagccaacaaatgtatgaacagacagtaaaacgagaacaccacaattataatagttcactccccttatcgcgcaagtaatggagctacgtctatttagagcttttattatcatgaaaagctaattgcattacaagagactcgggaaaaaatgactaagtttagcttcatttagagggagaaagtgtgaagagagaaaagctctaaccttgtagagacaaagtaaagtgttaaaaatgcattgtttattactgttaagagcaaagcaatgatcattgtcaaaattgacggtatacccttgatcaaaaatctgactaatgctaagtaaat

SEQ ID NO: 174059 - DNA, 1057 bp, Cannabis sativa
tgttaattaataaatgaaatgaagtgaagaggagaagtggaccacctttcgtgctgctaactactcttttaataattattagttttaagaggaatagacaaaaggatcagtgaaaatttaaggtttgaggaagacgagagagcaagagagttattgctaattatacatgagagtaatgttttgctcactcaaaatggagtattgctcagggcatggtttaaaattcggtctacacagttttgcgggttttgtgccatgaaaaaaatgaatttttgatgcacacttatttagatagttagccagtcgtacgagatttagatagtacgaagacacttgagattcaaataaaaatcaaatttatttagatggtacaaaaaaaacttgagatctgaacaaaaataaagtgagcaaatgacatgatttgtgataaagtgatttaagattggtgagtaaaaacaaccactatcttaagagagaacattcgacaatattatctcacatgaattaaatgtaaagatattgaatcatatatagaaacacgagttactctactcatcacctattgattttgtgatagaaacttatatttctcaacaacgagccacgacaggtggctaggcaggtttaacaaaaaaaaagataaaaatctgctgccttggcttgttgttaggtgttaagtagatgagaaggaggaggagagaagagggaggtccagtcgtcaaaggggctatcggtcatagtgctactacaatgttgcgactggatgcgatcaaatgagggagatggggttcgatttgatctcatgtgggtaggggcataatccgtgtatgtgcttaacgagtgtttttcaatttttagtttcattggtcgggctcgagcaggttggtcgggtccatactaaatttgatctaaatattccgtcctagttgctattacacttcagactttaagaataattaattataggctaattagtaattttttcccttgaactttgacatgtaataaatcgtgccccctaaaattttttggcagttaaaaattcctcccgaactat

SEQ ID NO: 174060 - DNA, 506 bp, Cannabis sativa
ggtgcagttggggtatgcatttttgctaaactgcacggtgcagtatgcaatttgcgattaaaattacaccactctatacattacaaagttactaatttttacaatatgatttttgttttttttttttttaaatatatgatcaaacatatctaatatattatataaatttttggagataattaaatatatgtaatcacattaaaaatagactgtattttagtattgttaaaacttataagattgatttttagatttttattataatatttgacaatgataatagtgtaaattgctaatcaaatcgcattacaccgcactgtatttttgtggtttgatttttgtagttttaaaatattgtgatgcagttgcagtttgagaaattataaaaactggatatacaattagtttgaaaaataggtcagaactcatactgcccacgctgtaaatactcctgttgagaatcatgatggggtttcatctcgaaactaattggtgatgagtggagt

SEQ ID NO: 174061 - DNA, 540 bp, Cannabis sativa
tatataaatatatatatattgataataatatctaaactttgttttgtataatttatatatgcagcccagtaatttggttcgttgccgtgttgtttctactgtccaacacatatggtaagttattgacagtttgttctgttattattaaaacttattatatattaccatttcagtgactgaaatgttgttcttttttaattaacaggaatatactcttatttgtggctgccatttctacctttgattgtaagtacaacacaattcacgaataattgatagatagtatatatgttttattaattagtcccacatttgctaatgtgtggaaataaattgtaatatataagatgaataggctactccttccatagggttttcaaatggaaccccattcatcttattcctaaattctaacatggtatgccaatgtgtgccactttctagtgttgggtttttgacctgtttcaaaatctacaaatttctcgacgtgtacacccacaaatttcccgatatttggccttgtgagattctttcaaatgt

SEQ ID NO: 174062 - DNA, 829 bp, Cannabis sativa
attccagcatgttttgatcacattacaagtgactaaacaatgagtaattgtttcattatccacacggcagagagaacagagagagcttacctccacatgcttggttcgaagttggatcatagtcggaaggcatcccaccgccgcacgccacatcaggcttttaatcttgggtggtaactttaagctccaaagtttactccaaaagttattatcattagtctcataccatcatcctttaagcttttggagtaaattataagcactcttaaccgtataaagatccgaagtctctttagaccaaacaaaatgatcttccaaattattatcatgcaaaggaatggacatgatcaaatgcttatctctatcaacaaagagatcatcgataacctccacatcccacctagagccatcaggtgttaggagattgtttaccatagcaactgaaagtgcagggtgatccgaaatgacaaaaggattaacttcatctggcagccacagagagtgaagtattggaatgttattacccgatccaatacaccaacgaactcctttctttactaagtcttgggattcccatatactcctccaaacaaaactcgggtttgaacctatcgaggctaatagaaaatcaccctgaggaaagtatctggccttaaaaactcgagttaccaaagcatttggtcttgtaaggagcctccacccttgtttacccaacatagccaagttaaaatctcgcaaattctaaaatcccataccaccccctttcttatgtttgcaaagtttatcccatgacaaccaatgaatcccctttccactatccttgttagtc

SEQ ID NO: 174063 - DNA, 667 bp, Cannabis sativa
attataggggtgactccttgtgaataatatgatatagtgttgttttccagaatcacttcaacatctaatgatattataatgagaataaagttgaaaggatacttttctagtaggtagaaaagttgtatggatccaaagtgtaggttggaggtgttacctcacgagtctcgccaacttgaggtatgacatatttcagaagaagagacaaggtaagacttgagattaaatagacaagtagcatactgtctaactatattcccagcattatcagaaatacatggtgttagtcatgtattaatgttgggtaggtatagaatgacttatgtaggggatgtagtactacatacctacaattagatacatcggatgaggaatgagtttttttttttttttagagcaggacgctagacttcataatacaaaccaagtggggaagaaacctggaaagtgaagtcaaattagagaactcagtagttaaagatgttcagatttgattttgaggacgaaatccttttaacgaggggataattgtaatgaccgcatacttaaaatataaaattaataatcgattaatattaattatttgcattatttgattatgtgcgtgtatcatgtcatatgggacctattctcaagaaataggcatttgatttataatttatcaatt

SEQ ID NO: 174064 - DNA, 1172 bp, Cannabis sativa
  modified_base (438)..(445): a, c, t, g, unknown or other
  modified_base (723)..(735): a, c, t, g, unknown or other
tgacatttgaaccatgggttaaaaccaaatcattagatctgtccacaagttaaccatgacaattaagatcaaacaataataggttttacaaaacttgttttaataatcaaacaatataaaacacacaaacatgtaacaagttggatagttggatataggatttatttaaatttaaattaattaattaatttatttatttattaatttcgaaaataaataaataaataaataattttttttcgaaaataaaattaaaaaaaattaatttatatttaaacctataaatttaaaaaattaggtttcaactaacctaaatatctatttcaaaaaaatgctaacaacttttcaaatttcatgttattaaattaaaattaaatatttaaataaatataatttttctaattttataatttaatttttaaataaaataacaaaatnnnnnnnntagcaaaatatcttatttcaatttaaaattttctcattaaaataatcttattttatatttcaaataaggtcattttattaaaaaaaatttaaataatttaaaatattaaatatctgaacttaaatttaaaaataagataaaataatcaaattttaaaaataagataattaattaagcaaaaaaatagatttttacctattttcaagcttcaaatttcactaatgtcttaaattaatttaaaaaatactaattcatttaattctgataattagatttgnnnnnnnnnnnnnaaaaatctaaatacaaaattacacaaaaaaaaatcgaaattaattccatgaaaaaaaatggaaaaatttgtatttggtgcggatggtatgaattgcataccatccgcgcgcacacgatggtgtgcatggcagagtaaacacggcacaagaggctgctagcagcctctccacgcgcgcagggatgagattccgacatctcagcctgtcctgaccgagaaaattcagacaaggcttgtccgaatacgcgtgaaccccttaaatcaaggggattcgcatgtacgttgggtgacaccacccctgatttttccaatttaacgaaattcataactaattcaaattaaatcgaaattgagttatgtaaaaaaaatgaattgcttaattttttccaacctatccaacaaaaataattccagaaaaaaattgcaaacatcaaacaa

SEQ ID NO: 174065 - DNA, 965 bp, Cannabis sativa
catggcccatttgtcaaaatggctcctaagttttgtgatagtgaatgaattgtattttatatatgatagaatagtatatatatacaaagttatgaaactaaatagaaaactactaaatacaaataggaaattactaaatacaatttactataatttttatcatgaacaaaatgacaatcaatctcaacgtgcttagtgcgctcgtggaacacgggattagaggcaatataaagagcagcttgattatcacaccacaattttgctggaatagaaatcttaaacccgaattcagtcaaaagttgataaatccatattatctaacacacagactgtgtcataactctattttgattcagcactgcatctatacacaacattttgtttcttactcttctaagagatcagagttctcccaaaaaatatacaatatcttgaagtgggtcgtctgtctaccttagaacctgctcaatctgcatcagagaaacactcaatctgggtccttgtaaactatacctcgtcctggtgatcctttcaagtaacataaaatttgctctaatgttgtccaatacataaattgactaatgacactaactgggaatgcaaaatctggacgaatgacagttagataatttaactttccaaccaatctgcgatatttcttaggatcttcaaatggttccccatcacgtgtaagatgcacggctggattcattagagcattacaaggttttgctcccaatattcctatctcaattaaaaaataaggtacatacttcctttgagacagaaaaatacattgtttactctgagtaacttcaacactcaagaaatacttgagcacccctaaatccttcgtgtgaaactgggtatgaatgaaacatttaaaaaatgagatgtcttcagtatcatttccagtaataacgatgttatcaacatacaccactaataaaatgataccagcagtt

SEQ ID NO: 174066 - DNA, 666 bp, Cannabis sativa
gccttatgtaattatttctttttaaatttttattgtatttatatgtttaacaagtttttgattatatagaattaattggtttattaatttattgtcttaataaaattattttagtattgcttcaatttctctaaaaaaaaaaaattacttcatttgacatcatttttttttattcaagtattttatttttaaaaaagaaaaaaaaaagaaagaaaaaaaacacaattttaaagagaagcaaaatgaaatgttcagtttctataaaaaaaaattaaaaaaaaaacttcacttgacatatttttttttattccaatatttttttttttaataaaacacacaattttaaagttttttatagcatttctccttatatataatgatttttcctatatttttaagtttttttttttagaaaaaatgtcatattttgtacacttaaatttttatgcgatatacatcaaaacttgcatttttctcatatttttgtaaatatccctcttatttgttttttcttgctttcaatttgaaaatacgtttatgaaaaaaatggattatttcacaaatacacaaaaccaacaaaaaatacaaaaatacggtctcacaaaattttaaatatttttatgatttttttattttatttactgaaaatacggtctttttatgttg

SEQ ID NO: 174067 - DNA, 539 bp, Cannabis sativa
agttcttccatgctaaagctactgatagaaaaagcataatacgatttctcgccttcaagatgactcgggtagttaggtctcgtgggatgatagacttcctgatgttatgttgggttatttcaagaatctatttacgacatcagctttacagttctctccgatcattgatgctactcccagtacggttacttgggctcataatcagcaactccttgatccggtcactgaggaggaagtgaggcgcgctctgtttcatatgcatccggaaaaatcgccgagacctgatggtatgatgccggggttttttcagaaatattggaatgttgtgaaggatgatgtggttatgcaggttagaggtttctttgatactgctattttacctgatgctcttaatgatacaaatattgtccttattccaaagaaaaaacagcctatttctatgagtgatctgcggcctatagctttgtgtaatgtcctatacaaaattatttctaaggtgattgcgaatcgccttaaagtagttttgccaaatgttatct

SEQ ID NO: 174068 - DNA, 910 bp, Cannabis sativa
gcaaaaatcctaattagccttattgtaaatatggtttgctgatgtgataattgatgaccaatttgccctcacaaatttaatatttattacaagtttatttcttttgtccttaccctcacacattgcttttgtttttacgctcacacacgttgaagtcaagctttttaaattacactacactaatcactttcttgtattgccaattatacataaatgataattgatgaccaatttaccctcacaaatttaatatatatatatatatattacaagtctatttcttttttgatcttaccctcacacattgcttttgtttttaccctcacacaccttgaagtcaagctttttaaattacactacactaatcactttcttgtgttgccaattatatataaaagtccttttgatatggaaaatatatgtgtattataaatatattataattcatagatataattatgtacacttataataactttgataccaagtggctcaaaaaaaaactttgatactaagtattattaagttcaaatctttatttgagagaagtttcttaaatgtgattatatgaaaataatattaaaaaaataattagtgatatatagtcttactaaaaaagaaattgatagataagattatttttaatactagatttagagatattgttaacttcaacataataaataaataaatattcttagcacaacatttaccgcgtaaaactttagataaaaattagttgtaaaaagaaaaaaaaaaacaaaaatattgatcgttaataattaaatattttaaaataatttatcattaatgtttcacgataaaattacaattaaaaaaagttatattattattgtacaaattttgacacaattattattatttgtcaaatttgacattttcacacgtg

SEQ ID NO: 174069 - DNA, 691 bp, Cannabis sativa
  modified_base (59)..(67): a, c, t, g, unknown or other
  modified_base (132)..(134): a, c, t, g, unknown or other
aaatcttacttttaattacaacaagacttctgactaaaaaaaaattgtgactaattatnnnnnnnnnttcctatgttgtgactaaaacgtctgtgactaaaggtatttgtcacaaaaattataatttgttgnnnctaaatgtgtttttagttataatacatgttgtaactaaaagtaaattagtgacaacttgtatctaaataatatattttagtctcacaagtaactttttgttgtgactacaagtcacatttagtcataaaaaattatgttgtaactaaaaggttgtcactaaaagtaattatttttgtagtgtaattaaattaaaacttgagctataattagatttgttgattaaaacttaatttacttgacaccttgagctataattggacttgttgatcttgtagcgattgaataaagaacattaaaattttctataaatatgtaatttgatatttttatttttttctactaaatttaatataataacaataaattttttttattcaacttgttgaattaaatatttatttattatattatttctatataaataattcttaattttaaacttttgggcctctaaaattgtgaagctttggacctagtctcaatataattatgggttgagatgcaaaatgacccttaatttggtaactaagttagtaaatgtccactttttaaaaaa

SEQ ID NO: 174070 - DNA, 510 bp, Cannabis sativa
atatatattataacaactgaataagtggcaaaatattccaatacactaatcttaattatggtttgttgttattattaattgaatagattagtttggacgctaattaataatattaagtttattaatcttatttttgtgatctatatatggattatatatataataattaataattaaagaaaaatgattatatttcatgatccaccgttatatatattttatactagatagatgttacgtgtcaaattaataacgtatgttaattttattttagtttttagttttatttaatattataattttaaaattaataatattcaatgtaataataatcattgaaatttgaaagcataatattgatttaaataaaaacaaaaattgctattatactttgtaatagtaattaaaaaaaatattattcgtcttaaattatcaattctaatatatcaaaattttaaaatactatttaatagaaaaaataaccaatatgaacaaatttattattaattg

SEQ ID NO: 174071 - DNA, 962 bp, Cannabis sativa
  modified_base (291)..(308): a, c, t, g, unknown or other
aaaaaaaaaaaaaaaagattagagttaggattcaaaacctcatcaagagcagcaacctgtagcattccatagccattaatcttattcgaaataataggatcctctagaattttaggagcttcattctgtctcagtcctctccttttgggggtaatccattaacaatcattatcaactttatcaaaaccatcaacccttgcttgcttcaaaattaaattcgaatctttagcttcagctctagtatatatccatattttcccctagcacattgtgttggaattattttaccannnnnnnnnnnnnnnnnncaagtatgttgatttaacaaactaaacatgaacttctaaaacgataataaataaaacacatataaagttaagaaaccttacagtgggtgcagcgaaataatatgtctccttccactcggatctctaacccttgattcctttctgtcgcggagtataatcaagatctgagcccgaatgtcctttagttagatgtgatccttcacagccttccaatctatgattgaggtactgtttgctgtgttggcactactctctcactagggatttcgaaattctctctctctcttgcactgtgtattttgtgtgtttcaagaaagcaagaggaagagaggagggctgctatatatagagaaaaggagagctgaactttccaaaataaacagtttccttaattacagagtaattgattaactgccttatttggtgtgatccaccactttccatttatagataactgctaggtttaggttagtaaattttgttcattaaaaaattgaaaataataattgggaaacacacaaccatgtggccagccatggtgggactgggcctcacttgcgttttgcagttttcacaattttatttctattttcccaaaaatgccatttttccaattctaaccatttaaatgccaaaaataattatttaataact

SEQ ID NO: 174072 - DNA, 518 bp, Cannabis sativa
taatttgtcagaacaacttccatagaacaactttcattgagtcttcccacctatcctatgctttattattattgttttttgaaaccttgtttacttatcttagtaagagcttactacttagatgctttcaacaattattcgcatctatgaagaagaacaaataatttgttatgttttttccattgatatttagtttttgttaggatttaggactaaggtgtgattaaggtgcatgaggtctcatctcaaaattaattgacaatgagacgagtatagttcattcaacttatatatgctatcttatttccacacattagcaatgtgagactaactctaatacactctcatcatgtttgagcctgaaaaatgtgagtataacgaatgacttttaagatatcacatagtcgagcatgacatttaaaagaagagatttttacacttggtgtccttttttatcctttttttacttttttgtcaatgctgggttatttaaacttttatacaagttttatttttca

SEQ ID NO: 174073 - DNA, 513 bp, Cannabis sativa
caatttactaataaatcaaaaaaaaaatgtaaaaatgtatattaatattatatattttaaattgatgaaatatatatatatttttataaaaaaatgtattgaatttttaatatttttttacataaaatacggtttttgatgtatttctatgttgcactcttgttattttattgttaatttttgttatttgtatattatttttaaaattgttttgatgttgttttcttgttacattcatgtgattttcttgttgttttcttttattttacacaatactgtaaaaatgtttttaaaaaattgaacgtaaaaatgtaaatttttttacaaaaattagtgatttatgtaattatcccttataattatcatataatttaacaagttttgatttattagcatataatgtacatatatattttcaaatgtgaaatatgggacaaaccacagattaaccattttagttggcctaagaccactatcagtttgtctatgtaacatccccgcttcaagcctcca

SEQ ID NO: 174074 - DNA, 710 bp, Cannabis sativa
  modified_base (70)..(70): a, c, t, g, unknown or other
aaaatcacgtgtgcaagtgtaacagactctttgaccactgtttttgacgtgttaaattttttcaaatttnttaaaattttgcagaatgtcttaagtaactataacgtacacaactataaaaaaaaattagactaaaaaattcttataaatgccgaaacagttaggagttgcatgagtacagctattttaaaggagtgtattgtagaattttctaaattttctttataattatctacaatataattatttaaaatatcttataaaattattttaaatttgtccgaatttattaaatttttagtcctaaaaacaattaccgaaataaaataatagggaaattttataatgcaccctccttttaccgatacatctctatctattttagtatctgaaataatttttaagttaatttttttttatggtcatataaattatacttatttaagacatcctgtaaaattttaagacattcagaaaagtttaacatgccaaaaattgtattcaagcagtgtgttgtatgagtgactattttattttatacacgtgcaaaatagactgtttgaacattgttttctgtattgtaaattattctgaatttcttaaaatgttatacttaaatacctataaaatagggctgtacaaaaaaatttgtaaaccgcctaaaccgaataacccgcccaaactgaaccgaaaaaaccgataaaaattac

SEQ ID NO: 174075 - DNA, 660 bp, Cannabis sativa
gacgatgttcttctattttgcaacggcgattacaagagcattatctacctgctacaagggctcaaactgttctcacagacctcaggtttgcaaccaaatccatccaaatctgctatatactgtcatggtatgattcattcagagatgcaaagggttcttgatgctttaggagagaggagaagttccattcacttacttagggattcctatcagccctaaaagactttcaccgagggaatgttctactttggttgaaaagatgacacagagaatcagagcatggagtactcggcatatttcatttgcaggcagagctgtgctaattaactcagttctcttggcaattcatacttattggagccaggtgatgcttcttccaaagaaggtgatcaaagagattgaaaatatttgtaaagctttttcatggaagggacaacatatgatgataggagctgggcaaattgcttgggaaaatgtttgccaatccaaagttgctggtgggattgggctcaaaaaagttgctgaatggaacaaagctgcaatgttcaaatatacattaaagacaaggaatggtggagctatgagattcctcaaacaggcagttggtattggaggaagattgtagctctaaaaggtttgctattgaatctagttgatcct

SEQ ID NO: 174076 - DNA, 698 bp, Cannabis sativa
aatgggggagggtggtggctgatggaggggatgggtttctggtgtggacgggggcgaaatgggggttggctgggtgtagtcgcaccttagtcgggttttgtgaaggttgagcaagggacgatgggggcaggtcgaaggttgaagaaagggggggtggggtctgcagggttaatttttttgaaaaaaactttttcttttgaatgtaatattaatgtatattaaaataaaaatattattaatatataaacttttttttataataatagtaataatatatataagtaaaatactagtaatatgtaatatataggcctttcctctcgtaattgaagtgatattacgcctgctgaagcaaaatttctacaaaagttcagcaaaaatcttgctgagtgatctttcaacaggtatctcttttgctaaaattttgctagaaaaatgctacagcatgcaaaggttctctaaatcaacgaaaaattcttttgtgcttcaaagaaatgctgcagcaaaattccatcaaaaatttagcaaaacctctaaacttccaaatcacctccaagactccaaattgtgttccaaaacaacctgaaacatcaaaccaagtgtaaaatccacccaaacacttaaaataaaaattaacaataaaataaaataaaataaaaataaaggaaaatgaagaattatatatatatttttttttt

SEQ ID NO: 174077 - DNA, 571 bp, Cannabis sativa
  modified_base (373)..(376): a, c, t, g, unknown or other
gcaatgtggaagaatctgatcaagtagaagagactccttctactaccactgtctctgagactactacctaaaatatatactagtacaatacaatgttgttaaatcacattaatcagtgaaacaaattatgtattttcttttcttcccataatatatggcaataaaattataatatttgattaataaagctaacatatactataaagtatagattatatgttttaggataaatactattttaaatcttatattttgaaaaagttacatattagactctctgttttgttaaatgataaaatagattgtattttctaaaattgtacaaataagaccttgagtttaatttttgacattttttttaatataaccaacnnnnagacaattcctaacacgaacatatgtagaaaatttaaccagttttgtataatacttctaggttggattattattaagttttattttgacaaactatttatattttttgaaaaatataagatctattttgtcatttaacaaaataaagaatctaatttataatttttacaaaatacaaagtccaaaatagtattta

SEQ ID NO: 174078 - DNA, 531 bp, Cannabis sativa
agtgggtcaggatccctcttctccagactgcccctacccagctgttcctctagcatgccaaggttttctccacttatgacaaaaaaggtcttaacgtgggggacttggtcacaacggagaactgccggaaggccaagctcatctccgggagtcaatcggtagacgacttcaatctctccaaggttctatgcccaaatattcataccccggacgttgaaaaggtgctcagggcggacatcatagcgtcggtggaggaccggtaccaaaagtacctctttaggcgaggacaggagttggcttatattaaggctcaggccgctgccgggaggaccctttgagtggagggggcaaagagcagacgccttctcggcctaagttgctggtctcggttcccaatattagggccctagacggcagcacatctggatccggtaagtctcctttaacggttcatcatgttccttctgcccaagagtattcccggtgtaggcctataggatttgacgagcgtcttcttagatttaggatgcc

SEQ ID NO: 174079 - DNA, 710 bp, Cannabis sativa
  modified_base (448)..(448): a, c, t, g, unknown or other
tctcggacttgacctttgtcgtcactgggttgttttcctaggcatcgagaggtcccttcgccaacgggttttgtcggttgaaactcttcttggtgttacatggtgttttctttgttcatggggtcaccatggtcttcctcctaatatttcttccatctcatacttaccatgatggtaggtagttattaacacttgtgttcactgctcttaatgaaagtaccaaactgttgatgtagtatttcatcagtagatctaagaagatcgtaaagaagcaagacaaacacaagcactagttaataacagtaaacttatttgtgaaagaaaatttgacaaagatgaacatgaggattttatagtggttcaccccctttcagcagtaataggtagtccacttggggtgttattgatctcaatgcttgaggagagttctccagagttatgttctccnagagttcactcctcaagtgagtttagaatgagagaatgagagctcaagagagattttataagaattaaaattggggttctattataagttacttcactccccacatataggttttcatctgagagtaatttagagttaaaatcgcttaacttcagagcaccttcccgtaactatcgtcaggttaggttggaaatacaaaaattacatttcaaaataaatatctaaaaaatgataaaatattaaaatatcttctaacttcatg

SEQ ID NO: 174080 - DNA, 563 bp, Cannabis sativa
ataacaaaagagtaaccattaaagtttctaagtgtacatgtcatctaaaagacatgtcttcaagtttaaatcctttttttagtgtatagggtagcttttcaatcgtttatctaaagattctacatataacatgtattttattctaagggtttctttaatttccccatgtgtttgtgttaatctttaaatattggattaattaacatttttatattctcaaaaaatatagatctataataccattaacttgttagtcatattcaaactactgagaagtgagatgttttcaaagtgacttacaacgaataaaaatattactaatttatttatataacacactaggtttatttttccaggtatatttcttctttgtaaaaagatatatatttctatcttctgaggtatagttataattaattaaattattaagagagttctatttgcacaccataaaattatatgcacaccctattattaagaaaaattataaacttatctaatttttaaaaattactcttaatatttttttttattttttctcttacattattttatgttaattt

SEQ ID NO: 174081 - DNA, 541 bp, Cannabis sativa
catattatgtctctccaattaaaacttaacacctcatctaaaattttaaaattgatatattaacttaaaatattaatttaattttaaatgtagtagtttacatattttaatttttatttattaatttaaaatatttgtttgaattattattgataaataaaatattgtaagaattaaaatgataaaatcaaagcctaaatattaaattttaaaatatctaatgtttttaatatatatatattttttgtttatttaatctattgaacactacaaatcataaaatttatataacgtgattagaagagttgctatacattagattttaataacaggataaatgttatatgttacttatatatattttcttcataaacaaatgattaacatgaagttttatatatggttatttatatttacatatttttaatttatgtatatctattctactagtaaaaatttacgtgcgaggcacgtatactaattttatgttaggtatatctaaataatgtaatttatattttgataattaaaagtaaatact

SEQ ID NO: 174082 - DNA, 595 bp, Cannabis sativa
ttaagatgattctaggtccatgttatgcaagacaagaatggaaagtcttgcattgcattagaataaatgagaacttagaaaataaagaaacttgagatcaaggaattaatgttaactaacatttgtggagagcttttgggaagctctatgtgtgtggaaggctataaatacaagtctttaagatccaattcccacacgccacactcaagaaagaagcaaagccaaaacactgtccaatttgcctctcttctttccagtactctctttaggcggaatatattagcaccatcacatcatcatcttaatctttattttctaccttagagattaatccaaaccctacaaaggcattctatgcggagaccaacatcaagagaacaaggagttatttttcaagtccttaaataggttaacatagaactcaagataagtgttccaagcaataatcatgaaattggcctatttcctaattatttactgaatttttagaaagttattataaactaaataaacatttgggaaatgagttgaagaagaagagtctaagatttatacgtggttcgagtgttactgaactctagtccacgagtcaata

SEQ ID NO: 174083 - DNA, 564 bp, Cannabis sativa
ttgcaagtttacatccactagaatcaaaaatgtcatgaggttgcaaattttctaaagttcctttagaagctaaatttttttaacaagactttgaaacatgactaatgcaagagtgccacaaataaaaactaaaagacaaaagagataaacaaaaagaagacaaatcaacattaggagttgcatatactaataatatatatcagttcattcaaaatatataatccccctgcctacgcttggtcccaatcaacttttgagattgtggatcttgcacatgatatgaagtagaagaaaaaaaaatattgaataatcagaatcacacaattgaccaacaaatacaaaattcaatgaaagattaagaatatgataatcattacgaagtaaaaaatttgaactgacaacaggaccaataccagctaatggcatgagagtaccatcagtagtgaggacatacacaaataatgtaggacttaaagaaataaaagatgcataatgctaagacatatggtgtgaagcaccagagtccaaaatacatgtagaaggtgacatacttgatgtgctagt

SEQ ID NO: 174084 - DNA, 644 bp, Cannabis sativa
caaacgagccttcactttcaagttaaaaagttactactttctatttgcaatcattactagcagcttatttagataataattctattcttagtaatatctcatactctaatataccctaaactacgaggtcaatattcaacttcctattttcaacttcaattgccatagacctaagttatccctttggagataactgattctccacgtaacagagttccaaaccatatttcatatctatctcaaggtttatccacttcgttaatcaccctgactaccacatgctaatgtgtagttctaaagtcaattaacataaagtccaatagaacaattgataagaaactgacctaacatcactgaaaaactatcttcaactttaatttcggtaatggccaatacccaaacatggagtgggtttgccccttgttctagttccctcttctatagttgtgggaaattcctcttaaagtgccctagtaaaccgcattggaaacaagtcttacaaatacactctcccagatgatgcttcttacatcaagagcattctggaatactataatgaccttcaaggccaccctggcccagtttcctatgaaacctcttcttctggctcaagcccactaatgtagatagagctttcctcttct

SEQ ID NO: 174085 - DNA, 741 bp, Cannabis sativa
  modified_base (78)..(82): a, c, t, g, unknown or other
ttggaattcaattttagttttataataccgcaagtgggattttgttggattttgtgccctaaataaaacttatttcannnnnatcagatttacttattaataaaagatcaatacaagagcattcatgaacctgctgttgagtgggagttttgagtaggtaacagtttaatccaggaaaggaacattggaagacaatcaagtaaatctaaagatcaaaagaggaactatatgttagccgataagggtggtattttaatactcttagactacaccaaatcaagtttttggacttgcgttgatgctagaaagtctacctatgagatggtgattactctggaggtggagcaaggatttttggagaagtgtaaaaaccgattcagagtctctaactctaccagtgagactgaatgttaaagttgtaagaaggatacttattctgcctatggaaagttctatacaattattttttgtgttgtacaaataacgaatgaactactagtgttacttcctaactaacacagaagtagtttccaaatagtaaagaacatagtatccctagaggagtacacatatagagaggaatttcactatatcaaggattttgtgattaaggagatgtaatggtggagaaagtttgcattgaatacaactaatcagatcctattacagagataatactacatactacacttgatctggatatcaatttgagattaattggaattcaattttagttttata

SEQ ID NO: 174086 - DNA, 515 bp, Cannabis sativa
gggatttttttctttttatattttcacgtatttaatttttttttttaaaatgaaaataaaattattttcatgttgccgcaacaaatagtattttatatatataacttaaaaatttttataaacaaccgtgcaaattgtttcctagttaacgtataaaaatagagaaaattatattctatactttttttatattgtcatattttatttttaccctttttttttcaagttgccgcaacacataatattttatatatataacttaaatttttttataaaaaaccgcgcaaattgtttcctagttaacgtataaaaaatagatgaaattacactctatatattttttatattgtcttttttttatttactctcttttttaaagtctatcattattacttcttttttttaaacatcatgccaattttgtccctgtcacttcaagatactctccatataactcttttatgtcagggtattttgggtacaagacatataaaatagatatgtttcaattaaat

SEQ ID NO: 174087 - DNA, 579 bp, Cannabis sativa
actggagaatattagaaagtttggggtcgaattgaagtgtagggttcgattttcgggttcccagcacaatcagaagtctggttctgggggacctgtaggaaccggtcgaccggttggtacctaggaaccgaacttccggttgggaaccggtctgtcggttgggccattttctagaaccctatattccccgtttttgtgttgtttagggtattagcatcctatctattgatagggttatctttagtttcaattttaaattcctgataagtgttttagcgtgtctctcatcgagttttgaacattatggtttagggccctataaagcgtcaagctgtgttttcactcaggctgaccaccacacttgagcgcggaacgaggtaagatagcataaataatatgtatttgaatatatgcttaagattaattatttacactactaacactaaatgagatgtgaattttaaggatgttagtatagtgtaggagtctaggatagttatagtgttaccaacacgagtaccagggggtacgtcgtgcatgtggtacaacacttagtaacttccgggagtacaataatgg

SEQ ID NO: 174088 - DNA, 845 bp, Cannabis sativa
acttgacctccttctttgtgagctgtattgccacgttgcgtaaatattgtccatgtaagtatgccatgtcaggtggacaaaaatctggataacaagggtcatcaatatcatcagatgtcgcaactgaacaaaccatgaaagaaaccaaccctaacataacaaagatttaaaaacaatacagcctaaattataatgaatacacctcaactgaaggatggtcgtaaatgacagtaacttttttctgaatatcttgaacaaccaaaaacaaggacttgaagttaaagtcataaaatcattggccaactaacgattcttgactggatataacttcttccaacttatctgttaacatatctaggtcatcgcaatcagtttcttaaatttaaataatcctaattaaactattttttaaaatcaattattatagcgattgtgtcataattaaactattttattttaaattaattattataactcacaagtcaacgtagcctagtcaatctatatgtatatataaaggagaagtattagaaggtgacgtggcgccttaaaatttctccaaagagtattatttactctatccttaattttctcattttttattaagtttataaatatttattatttattttcttattttttttatttcttataattttactattttatattaattatatcaattaataatattttttaaaccatatcacattgctgatttttttttaaaaaaaaatacgtgactggtatttttttttaaataccattcaaatttaaattaatatatatataataagtaaaaaaaaaaaattatatataaggttaaaaaagaaaaagaaaaaaaa

SEQ ID NO: 174089 - DNA, 1828 bp, Cannabis sativa
  modified_base (1211)..(1213): a, c, t, g, unknown or other
ctctatcttggcttacgtagacatttggataacataagtgtgttactgatttctcaaatcaggcttctatttataatagttaaaaccctattaattaaattatatttaattatttgaataaattaatatctataactgaattcggttattgatatttatgagagaatctctcaactacttgagacaatatctcaacaactttgaaatatctataatcacttttcaaattcaaatatttatttgattgaattaattaattaattaaccaaaaaatataaaccacagggaaccctacaataagggtaggcgcttactatgtcttatttaagataaggacggtgtattttgtcctgacaacttctgtctcaacaaatattattttgaaaatttttgtcttaataatttttatctttttcctatctaattaatttgaaaaattatttatttattgcaaaaataaataattacaatttttccagttcaaaatatatttttctcaaacgacattataatgctctttatcccttcccttgatagtattttaaggtggcaattcaaggaccatagacctataattctaagctccaataagctagattatttattgagtctcaaccaaataatctttatttattaattccatgattacttcactaaaaatatagaattgaacttttaataattatagatttatatttactgaattttattgtaatgtccattgatataatcaattccagtgattagccttccatgtgttggttcgtaattagttttgattaaattactgttttacccttctaattacttatttatcctttagtaccataaattcactagtggaagtataatttagattccatctaaatttgtgcacaactttctagttctagaattaacacctaaagggaaccaacattcgatccgtcaagaaagtcaaagttctataattgtagatcatgtcctcaaccatccacttattagcttcccaaaacagatttgtaagaattatcttgtttgagaaactttaacgagtgtattaaagaaactaataacatgataagagttcatgattactcaagatttaggccaatctaccattgataatcgttatgatatgaattaggtctttatagtaaatggcatgttagataaagacaacttcattcacatctttacttgttatgtataatctctattatatacaacannntcactttgatgtcatactacattcataatctgaactaagattacttgcaccgaagaacaagcatcagtaaaccatactagcaaccgttaattaaagatttccaaactttaatatattgccgactattttattcatggctaagtgatcttaattttttgtacagctacaagtcacagtcacatatatgagtaaataattttttaatatttaaatataaattattcaataataaatattaataatttaatattcattgtatataaaatattcaactctttattgataatcataaatatctttataggccttttatggcataaaccctaataatctcccacttgccctaaaagaaaattgagcatctcccttagtcctatattatttacatgacccataaaaggtttcatagataacatctttgtgaatagatctgtgaggttatgttccgacgcgatctttaacaccgtcacattacctctctctactatatttcttagaagatgatacttcctctcaatgtgcctctcttgtggctccttggtttcttggagttggccaccgctccactgttgtcacagtagagcaccaataatttttctacttcttgaactactt

SEQ ID NO: 174090 - DNA, 755 bp, Cannabis sativa
tttttaagatgcaccaaattgcattaccattattttacttttcttgtgtgaatattatgtatggatgcattattttagaatacaattttatggaatttaaatatttttatgatttttttaattttatttatataaaatatagtcttttaatattgtactcctgttaatttgttattgactttttgttttttatatgttattttttatatagatgttatttttatgttacttttatataattttcttgctgttttcgtgttgtttctatcaaaaatcataaaaatattaaaaaaaaaattctttaaacgttaaaatacaacttttttacaaaaaaattatgtcttgtgtaattatctcttttttcaatagacgcatcatttcttattcttctaagaattaattgcagcaaaattttaattaattgacccaaataataataattattcatttgggatgagtcgctttaggtgatcttagattcttttcattttgaataattagtgattttattttgaactttcgacaatactgattttaactcttaaaatgtacggcttgttaagaatttcctaaacttttacacttacaaaaatttagtccttctgttagattttgtcccgttatttcatttgaatgataacgtatcttagtaaattagggtttgattggtttgagatttgaaaattgtgttttctaaaagagtgttttggaaacaaaaatttgaattttgtaagtgaaaaattatttttaaaaat

SEQ ID NO: 174091 - DNA, 553 bp, Cannabis sativa
gtcgacgacgacgaccggtgacgatgggcggctgaggatgggcggagaggctgactgattaggggaagaggctgagtgaaaacccaaaaaattggggagagaggcgaggtgaaatgagggtttcagctgcaaattttttttatacagttttgtccccaacgacatgcccccaacgactatgtcgttggtggcagactgacacgttgcaaacgacatagtcattggggcatgtcgttggggacagttttggggggaaaattgccgcccaatttaacgacttcttttcaaaaacctctcccacatttccaacgacaatgtcgttattgaatagtttttcaataacgacattgtcgttattgaaaaaaagagtcgtttttaataaatattttttttttaaaaaaattgaatagctttcccaacgacattaaaatgtcgttattgataccttcatctttaatgaggatttttaggcgttggtaatagtggcgttggtattgcccataattcttgtagtgctaggcttcctggaaataacttgccatctggagaaggt

SEQ ID NO: 174092 - DNA, 501 bp, Cannabis sativa
  modified_base (261)..(266): a, c, t, g, unknown or other
gctcaacatgattaacatctatgccccaatttaaaagtgagtgttaaaatattaactatatattagttgtaaaaattagggttaatagtatacatgattctattcattattctctataaatataaatgtaataataataaaaaagaaaatatgaaatcccatatacacggtaatttctcataattaaattcaaaactaaaaaatgattaattaaaatttttaaatagccaaggaaaaaaaaaattacctcatatattattnnnnnnttttttttaaatttacagtttggtttctaaggtagtttccaataacaatactctatttaaaattattattagttaaggtaccaaacactatataccgatatgacacgcgttacttgtggttagcggtttttaactatattatctagggtaaatatcattttggaccctgtgttttacaaaagttaacaatttgaccctctgtcttgttaaatgacaaaatagaccctgtattttc

SEQ ID NO: 174093 - DNA, 649 bp, Cannabis sativa
gcatgctgcgagccatgttgagtattgtttgattcttcctttctgccactccaatttgttggggagatcttggtactgttaatggacaacaaattccataatcctaacagtatttgttgaactcatttgatgtgaatactcctcctcggtcagatctcatggccttaattgaaagagcactttctttttcaactagagctttgaatttcttaaagttctcgaacctttctaattttttcttcaagaaataagcccatacttttcatgaataatcatcaataaagaggaggaagtatttactcttaccaaattagttttgtttaattgggccacaaacatcagtgggtacgagctcaagcggctttgtggctcttcatagtgactcctttgaaaaacttcttcgagattgctttccaagtaagcatccttcacaaagttgatctggttggttgatgcatggaaggcctctcaccatctcctacttctctaagagtttaggcccgccaaaattgagatgcccaaagcgtagatgacaaagccatgatgactcatcgtagaaggcctttaaacacttcagaacatcatgttgaatattcaagagaaacattctattctttgtcatggaaactttggcgatcaaattactttt

SEQ ID NO: 174094 - DNA, 577 bp, Cannabis sativa
gtgcctctgagaatatatagggcgtattaaattatattgaaaatgatcgattcgaaccatgacattatatatataaccacttgattgaaaatgatcgattcgaaccatgacattatatatataaccacttgaggctagctcaaataaccataggagggtgcgtgtgttggaggtcctgagttcaaattccaagttatgtaaggttaatatataaacacttaaataaaaaaaataaataaataaaaaccatgacattatatactatatcataaacccaaatcaactaaattatgaatatttattgtttataatatattttattttacttaaataaaagtctagtaaaattttttattttttattttggaccctcaaaaagtgtaagccctaggtacgagtttatagcccgcctatacttagggtcggccatggtttcactaatttgtaattagttaatgatattttatatttcataaagttatatataaatatatatatatgttagtatttattatttagaatcacttgtaaattttataaaaatttaaataatttatagtactaaaaataaaattta

SEQ ID NO: 174095 - DNA, 580 bp, Cannabis sativa
tcacagattgtagctggtattggaaacgattagttgttgtgaaaaaaaatttaagacaaaatgagtcaagactgtttcatttcacagaaatatagtatctgacttaggcataatatgttgtttgatcataaagataaagtaacttggagtaaatttgtttgggataggatccaaagcataagtttgtcatgtggctggttatgtagtagagtcttaacacaaaggattgaattgtgaagtatgatttgaacttagatcaacacttattgatttgtgaaatagaaaaagaggatataaattatctattctttgaatgctcttatagtaagagatgtttgaaggttgtcaaaatttggtttcactggaaagtgaagattgaaaagcttagaaaactactgagatggatttctcatgcaaaaatatgagcaatacttgcacgcaggggcggagtaaggataaaattattgggggggccaatatcagcaagtgtatacaaaaagtataaatttcaattaagaaaaatattacagtgttttatttttataaatattttatgcaatattttaaatattatgaatca

SEQ ID NO: 174096 - DNA, 908 bp, Cannabis sativa
atagagtcaatataatgttgtatggtatttaaattgttgctatgtactttatcattgcgagctctccaaatcgtgtcaacaacaatagacgcatacaagaaaatctcattaacattagctccccttgtgttaaggttccacaaaaatttcacccagacccacattcttgctccagattcattgattggaacgagtccccacatgacgatcgccaaaagtggtaagacaaattacaatacagaaagagatgctccatggtttcatccgctcccccgcaaaaagggcaagtcgtatcttcaattgtcattcgttgccaaataattttgcgaatgggaagctcattagagagaatgctccacaacaagactttatggagttcaagaattttcttgttccacacggaaggggcaacatcacaatgaggaaccatgttcaatgcttgaattaagtaggcagatgataagtcgatattttgccttataaatatagctaatttatttattatattcttaaattgattctttaaattattgattagtgtaattataatttattaggctattttgaagactaatcatgtatttgaagtcatttggagggatgttagcatattttggtggaaaatagtaaaagtcatcgagctcggttttacaaaacaaaacttaattgtaaattttggcaaccttagaagcagaactggacttggagctcaacatgaaagttttagatctcgttcttagctttccaaaatatcttgagtcgtccaattccaagttgtattgaaaaagttatggccaaaataataatcatgtgcataatagaaattgtgctaggcgctatagcgcccaattcctgcgctatagcgctggtctagaaaaaaaaaaacaaaaaaaaaaaaaagagataat

SEQ ID NO: 174097 - DNA, 710 bp, Cannabis sativa
tttagctgaaggtttttcttttgaagtgtattttagaggttattatgaatttatgatactattgtttaagtccccaagtgatgatttctccacatcgcttggaaatacactttaccacccttgtttttatataaatatttactagtgcaagcttgctttttcactttatattataattaactattaagcaaataaacaatctaatttaaatttagtaaatgtgattttgaattcaatacctaaaacttaactgaattttgagatgaaatccttgatgacttatgctttgaaaaattatttaggcattttctttagaatgtttgtgccttttaagctaacttattttgtgattatccctagtttatatcttttgagtcttaatctaattataatttttttactacacactttttgagttaaaaaaaaaaaaagaaaaagaaaaaattgatccattaattatttttatttaaactaattatgttatgggttatgggtttaaaaaaaaaaattatgttatgggtttcaaaaaagtttgagagaaattgtaaatatgatattgtgttttaagaggctaaaagcttaaaaagaatgagataaatttttaacatgttgtaatttttttcttcaatttcaaaaaaaaaaaaataagaaaaaaaatgaacccttaaaacataaatcaaaaatttttgacaaaaaactttctgaatttt

SEQ ID NO: 174098 - DNA, 558 bp, Cannabis sativa
tttgtgaataatactcatccctatttatacgcagaagaatgaaaaagggtaatcatttcaaaagccttagacgcatcagttccccccaaaaagcaaatattaggaatcaaatataatcaagtgtaaccatcaaacgtggtgagagaaaattgggttttgaagcattaattgtgtcagagcattaattagccaaaaacagaaaggactcctggtcagcctgacatcgaattgcgaatagacgcacctgacacgtgtcacccatccaaatgcaagggctactcggatgaagtctacatgtaacttcggaagtcccacatagacttggtgggcaaatgttatcccaatttttgcactctgacgtggcatcacacaatggtgacacatagaatcgactccatgtatctgctcgcaagaaatatgccaaacagggcaacacatacatttgctcggacgaagctctctcaacagagcagtgagcaatccgtgcagcatgccaacactaagcaaattcagctttcgcatcgtgagtcaccgaagaaatccctacaactttgggat

SEQ ID NO: 174099 - DNA, 675 bp, Cannabis sativa
  modified_base (377)..(377): a, c, t, g, unknown or other
ctttcagactaactaatgccccagcagtcgtcatggatatgatgaatagggtgttcaaggagtacctagataagtttgttgtcgtattcattaccagcattcttatctactccaaaactatggaggaacatgaggaacgcctgaggataactccaaaccgacttaaggagaaccaactataccaaattcaagaaatgtgaattctagttagagagtgtggcattcctaggccatatagtttccaaagatggagttgaggtggatcctacaaagatcgaagcggtcaagagctggccaacacctaagactgcaagtgaagtaaaaagcttcttgggtctagttggttactatagacgctttgttgaaggattttccangatcgcaactcctctaaccaacttaatacgaaagacacagaagtttgtctagtcgaaaaaccatgagggtagcttccaaacacttaaggacaaactaataacaacccctgtattatgtgttcccaataacaaggataagtttgtggtgtactgtgatgcatcaaaacaagagttgggatgcgtgctgatgcaaaatgacaaagtagtagcgtatgcctcaaataacttaaggagtatgaacagaggtacccaacacacgatctggagttggcaacagtagtttttgcgctaaaaatat

SEQ ID NO: 174100 - DNA, 506 bp, Cannabis sativa
ctaattttattaatgaaaagtagcaatacttttcaatttttttggacacgtgtatacgtggggtatttggcatgttatacacgattttttactctgtctttcatttcaacatatcatttccaactttttcagtttgattcatattctctttgttctcagtttatttctttctctctttttttctctttcattagcattgttagggtttcattttctctgctagggtttacattgtgtgtggatagttattcggaggagatggtgcttacaaggaattcaatgtcgccgtcgtcttcaccagaggcttctaatgtaaagaaaaaaaaaaaacaaaaacaaaaacaaaagatagaggagagtaattcaaaaaacaaaaaatggatggatttctttgaaggatgtcgatatcgataaggagaagaaaagtaagactgcttgcatttcgaagaggagtggattgtcaaagccttcttctgatgataggtgctctaagaagatgaagagtg

SEQ ID NO: 174101 - DNA, 687 bp, Cannabis sativa
tcaggagtgccatttgtaaagtgactttcaatgagtattatgcatagctgagttgaaagagctaaaacctcttattttgttaagaaatgctactgaatgaagtttattaacataagttggtagaaatggtattatgttttatcactccaattgcttcaaaaacaaaatatattaatttaagtaaaataaaatttattttttctaagttagaatatttagaggtcatatttatttgctcgagttaaatattattaagtacaagtagttgatgtaatgagacgaaaataatttgtaccaattggaatttaaataaataagagtcaagttgcgaaaattgagaatgaataatttaaaaaatcaacaaataaataaatttatttcataattttaattataattcttttttataagagtcaagttgcgaaaattgtacaatataagcaatgtggtactactaatccaagtttaggtttagagaaatgctaaaaggcattagtgatgcttatcaccctcttacgtgttactatcgcaattggtgcaattaagtatcagatctcgtaaagtttaatgtaatagcttttagagagtatcgctagccaatcgtaaagtgacacatctaaaaagtgctaggcactactaatgcctaatagcaatgttcttaggtttaaatgtaggataattttacta

SEQ ID NO: 174102 - DNA, 913 bp, Cannabis sativa
tatagcagatgctactggtactagacatgaagatctggagggcatcactaaagctttcttagctttctaccaagagttgttgggatctaagatggtgaacagaatgcatgtgaatatcaacttaatcagaaaaggggcgtgtgtaactgaacaacacagtcagattcttactactgcttacacaatggaggaattaaaagatgcagtttttggcataccggcggtaaaggccccggggccaaatgggtacaacagttccttctaccatgataattgggagttagtcaaacaagatatctttgaagcaattacttcatttcttcactcaggccatctactcaaggagctaaattcaacaataatcaatcttgtgccaaaaagtaagtgcccaaatgttgtaagtgattatagacctatagcctgttgtaatgtactttacaaggttgcaactaaaatgatttgtagcagactgaagcttatactgccagatatcatagctcaaaatcagggtgggttcataaaagggcgattcattgctcataacatcatggtttaccaagatttgataaggcactatgggaggaaaaatgctaaggcaaactgtatgattaaacttgatctacagaaggcatatgacacaatggagtggagtttcttagaagaaatgttacatgcttttcaatttccaagttcattcatcaagctggtaatgatttgcatcaccactcctagattctctttactctttaatggattcctacatgggttttttgaagcaaagagaggtcttaggcagggtgatccaatgtcacctctgcttttcgtgctgggaatggagtatcttagcaaaataatgaagaaaataggtgatacagaagactttcagttccatgaaagatgtgggggattaaaa

SEQ ID NO: 174103 - DNA, 528 bp, Cannabis sativa
agaattgtgattactcagccacccctcctactttgatctataaggacatccttagagcccctaccaaattgatttttaagaagagtatttttgaactctctaactttggtcctatagaggaaatgtatgggagtgctatttcttccaaccaaagcctttaggattttgctgaccaatatctggtgccaagtatagccaacaccacgttagttaataagattccttaatatgactgtgttgggttaagtgtctctcctgctataagcctagctaatttctgtttgaatagtactattccaacctcttatataatgccccttatgcattctgttgtttgttccaagggtttaagtcctatcacggttactgttgttgtttcttctacctctaagggtaaaagtgttattccctcttatttgttgtgagttactcctcccctttactctcaaaatcctactaaggttgtctctattggaaatattttatcaggatctagatttactaccatgtatgtttcattaacatcct

SEQ ID NO: 174104 - DNA, 1064 bp, Cannabis sativa
aaataaatggaaatgttaagctgctaacataacagagtttaggggattttacaaataaaattttaaaattgggaattagttacaaaaatgtgacaacttaaaaaagttatgtcgcaaattactcaatagtatatatttattttcattatttatgattacacaattttggggctatattatgtgccaataatcgaaaaggtactctgcaatttaacttgcttaatcactttcatattttttaaataacgtgccaaatcagtaaatgatttaagagcaattacttaaaaaaagttaataatatatataagagccttctagtgtaatattttaaaaagggcttagccatttaaaataagagggcaaatgttatattttcagcaagagttatttttactttataattagttgtgatattatattgttattacaattatactattactatttttaacataattaatctactaactttttgtttataaaattattaaccacatgattaagaataataataataaaaaacctatacatatattttgaaataaaataaaataacaattaatatttatataaaattgtgagttttttttttatttttaaaaattatccagaataaaaattaatacaacttatttttttttttttttggaaaaataatactttttttatgattattataattatattatttatcaatataaatacaccaataaatcatctaatatatttatatatgtaatgaaatacttttatttattttcattatggtatttacatgtacttttttatttctttttcatatagagtattgtatatatatactagtagaatagacacaccatgtggaactcatcttaatattaaaattttcttattataatttgatatatagtaaaaaaagtatacatataagataaataataatagttcaaacatatatatatattttactgtaaaaaaatatagtaaattaaaaaaaaaattgagctactataatatttttttttttatcattgacctttttttttctaaaaaaataaatcgttgacctagtatattaattt

SEQ ID NO: 174105 - DNA, 607 bp, Cannabis sativa
gagcaagattggaaggaaagcagagttcgggtatcatgagagaagtgaagacatgaagctaaaccatcttagttttgcggatgatgtgttgttgttttgtagaggagactttaaaagtatctatttgttgatgcaagggctcaaattattcacaaacacttctggtttaacaccaaacaagggtaaatctgctgtttttttcagtggaatggaggaaagcgagattaaaagggtgctggacatgacaggattctcgaggcaggatgcacctttcaagtatttgggagttcccatttgtgcaaggagaattgcagcctatgattgtgtcacacttgctcaaaaattaactaaaaatacaggtatgggcaacccgaaatctgtcatatgctgggagattggtgttggttaattctgtgcttagtacaattcatatgtattggagtcaaatcatggttcttcctaaaaaagtcataaaagaaatagaagggatttgtagatctttcttgtggacagggaagagcttaatggaaggagctggagctgttggttgggaaaagttgtgctacccgaaaaaagaaggtgggcttggtcttttgaacattgctca

SEQ ID NO: 174106 - DNA, 543 bp, Cannabis sativa
atgatgtattatgaaagaaaaaaataccttcaattgatgaggttatcgcattggcttgtgtttctcttgatcatggcaaaaagctcaagataacttgtttaacatctttatttctcgaaaataatggtattataaccgagcattggattaaatcagaaataaatcacatcatgatcaatgttgatacatccttatttcacaaggacaactcttatggctttggattagtagccatagatagtttcagtaaacttatcgaagcaaaaatttgctatcaaggaggaaatcacgctgttgaagtggtagaagctatgagaataaaggaagctcttagttgggttcagagtgaacaatggcagtttgtagagattgaaacagatagtatagttaccattcaagggattcaaaataatcaacttatgcactctgtctccatgttaggctatttttagcctaagttttggatcacattttatagttatttttcttctttattattgtttttggaatagaattacgcttgttttctttggtttcaggttt

SEQ ID NO: 174107 - DNA, 542 bp, Cannabis sativa
ggatttatattggatggtgatgattagcatagtctggagatgacaggagaagagaggagaggagagtgtgtactgttaaggtgtttttcaaatttaggtttacaattttttatatgttaaaacaagacacaaaatattcctctcaaaaaaaaaaaaaaacaagacacaaaataataatattgttcgtttgacatgagactaattaaattttaggttgttttacaatacacccatctatatttaatattttatttatttcaataaagaaaattttttaatttaatttttttttaggtatgttagaaatatttatggtataaataggttatgtttttatttttaaagtaatttagcttgcacttaaaagaactgctaatagtgacagaagtaataaaaaagtaatatttgctattattttttaatccataaaaacatatgaaaatattaggtatttattttaagaaatttgaaattatgtacaatataaaagacactgttaaacaatttaacatgcgtacaataaattatttaaactttatttt

SEQ ID NO: 174108 - DNA, 622 bp, Cannabis sativa
tttcctaaattgttatgaaattctgttgtcaaaatcagggttcgttacaactatgtttctaacgataaactatttgatcaataatttaaacaccataaaattattcggagtctaaaaaaattataaagtctgttatgactataataaacattatcataggaacagattaacaaataaacaataaaatttattaactacaagctttaaatggtatataaactatctcttaaaaataaataaataaatatttaaactgcgcgaagcgcggtattgttgtctagttggaatataatttgttttgtcccaaatatattcataaataaagttctactttaataaataataattttaaaaaaattatctaatattgaaattaaataatctaatgataataattttagttagtaaaaaataaattatacaaaaaaaagttagaagagacaacataaaagacaaagcataataataataaaagtagaatgaagagtagttttaggatgaaaataaatgacgtatgtatatgatactttacagggtaaaattattttggactatgtgttttgcaaaaattactaattggactttctgttttgttaaattataaaatagaccctatattttc

SEQ ID NO: 174109 - DNA, 588 bp, Cannabis sativa
ccctctcaggtaattaattcattatttatttatatatttagctatactaataataataataataataatatgggaaaattctttattgtagagatatatatagtgtacattttataagttttgtgataatttattgtgtcaaaaatatgatacaaatagtaagttgcatgcatgtatactaaattagtttattttatgtgtaaataaactatttgaatcttaatttagtcataaataagttaatagcaaaatacaacatacactgcttgttattagatattttttaaatgtttaatatcgcaatataagtagttataatttttcatgtttattaaattaaatttatttgatattgaattacattagtatgccaaaattttcagagaaaattaaacattttatggcttttaataatatggttttttttttcctttctaaaaatttgttttataagaaaattttaaaagaaaatttaaaaaatatatatgaaaaaaatagttaagggtaaccaattacttcattaaggtaactaattactttacactattctttccatattttttaacatttaaaaaaatatcatcaaat

SEQ ID NO: 174110 - DNA, 575 bp, Cannabis sativa
atgccttttaatgatcttaaaggcctcctcgcatttctctgtccattcaaatttcttgttgcctcccaatacattgaaaaatggtagacacttattagttgacttcaaaatgaatctgttaagtgcagccatccttcttgctaaggcttggacttccttaggcttggttggtgatggcatatatatcaaagccttgattttctcagggtttgtttcaatgcccctcgcgttaactatgagtcccagaaactttcctgaggaaactccaaaggaaaactttttcggcttaagcttcatattgtacttccttaatattttgaagcactccgcgaggtctgtactatgactttccactctttaccgatttcactaacatatcgtcgacataaacctccatgttctatccaatttgattcgcgaacatttcattcactagtcgttaatatgttgccccaacgttattcaacccaaatggcatgaccttattgtaataaagtcccatgttggttacgaagcttgtatgttcctgatctgggatatgtatttttatctgattatatccagagtatgcatcc

SEQ ID NO: 174111 - DNA, 547 bp, Cannabis sativa
atttaataaattatagaattttactaatgataatcaactaaaaaaataaggactcaaataattagctacttatttcccagattattcgataaaaaaaaaattaaaattaaaatcaaatcaaatgaaagagattatagtatcacaactaaccttaagaacatcttcatccaccgctcaaaatacaaaataataaaaactgttacaggaggttcgttcaacctcgtaacttgaacactcaaatattatgtaaggtacgtaatacttcaacttgttattcccaactacatacaacgatttgatgacaagctatctaataacaaataagaaccaataatgaaataaaataaaataaaacgatatcacactgacaatactaaaatgctcaaaactatgtcacatgaacaggactatatcactcaaaactatgtcacagaggcaagattaattgaattagattaacatgtaatcatctttaagcaataatctaaatgtcacacaggttacgcaaatattttcgtttcacataaaacctagattatccaatttt

SEQ ID NO: 174112 - DNA, 627 bp, Cannabis sativa
ttttggcagtcccccaaaaatattcgtgcacttttttttttttttgaaaacacgtatgattatattataatagttaagtctagacctcctgttcgttacataaaatgtttatcggtacagaattgatcgggatcaattcataaacctggtgggtaaaagcccacttagcgacattgtgagccgcaaaattacagttcctactaatattagaaaaggtacaacacatgaaagaaggagaagacttagaacaaaaggagacatagttctctcgagcccagtgagacgccttcccattgagagcgttgattactagcctcgagtcactctccacaataacataattaagcttccaatctagagctactgataccgccaaacaacaggcccccgcttctcctaccagagcttccgagaagtccaatcgggatgtgtgaatagtaatcaccctccccaggtgattcctagcaacaactgctgtgcacatactctccaagaccacacgaacatcacaatttaactttatccaatccagaggtggaggcgtccagatgtcctgcccgggcggcgaaggactaggcaagagagaagaatgtgcctctgcataagaagagcaaataaggtcaatac

SEQ ID NO: 174113 - DNA, 508 bp, Cannabis sativa
agaaagcatttatatcatttattggtcagtgtaaatagtattaatgtggtttttattcagcatttatagattagcgtgaatagtttaaattatttaaaagtgtttaggcaaacaaagccttatttcaattgacacgtatcctatttttatttgtagacatagacaatccgcttcccaaaggattttagagaataatataaaataatggagcgtttggtatgacgtgttcaaaataatttgattatagggaatattatgaaggagaatatgattatagagaaatgtgtaaactgtgtttgactatgtagggtaatatgtaatcatattaccgttaattgaattatattgttcgattgagtacatgaatcttatatattattttaaaaaattaaaattaaaatatttttttattgtgtccatataatgttaatttatacataaaaataaaataattattcattaaagaaatatatttattaattagaaaatattaaattttattgtattt

SEQ ID NO: 174114 - DNA, 571 bp, Cannabis sativa
  modified_base (194)..(198): a, c, t, g, unknown or other
gattaatttcctaaggcttagtttatttgggtgaaaggaaattaaaggaaaaatcacaaaatagagaatttcttctctctttctctctttcggctggggcaaaccaaaggggatcacctcttttcagttcattttcttctggaatttcagtaaggattcaaaggttttgtagccaaggtaagccctagcatctnnnnnccttagttcttgaatttaagtttaggtttttattggtttcaagttgtgattttgctagttgggggctgttaggtttgggaatgcttaaggatcgaattctaggcttaatttgagttggttttaggttctagcagctattattaatggttggaatggttgttgtgcaagtttaactttgagttcaaagctttgaactctaatggcataaattgattcattaggtttttctgtggaatactggttggaaaatattgtctatgcattgtttaggtactctcgaaagttttgtagcatttggtggaaaattgagcaagaggtgaagagtttgggaagaacttgtgcaaaccggctagccgattttgccagacctcta

SEQ ID NO: 174115 - DNA, 674 bp, Cannabis sativa
atggacttatccattaccaggacagaccacctcaatagttggggttccatccacgccaactaatgggccctgggccttactccaaaggcagaagggtacaggccatatctctgaaacttggccacactggccaacctgatgatgttcctcttctctatagtgagggacatgatgtgattcaccctatccctcatttgcaatgtagggatggagcacttgtaaaatggcactcgctggaaacaacagtgtcaaatctcatggatgtcctaagaaatgagtgttgggcatacccaccaactttggatgtaggcatgttgttggtgtcgcctaaccactgatgactgacctgattgaagtagaagtatccagttcggttctactttgggctagacttcatatcgaaggaatatccaatctcatatggagtaggctgaggtcaacctaactccgcatacaaaacaacatcactgaaaggtactttatacattttggattatttgtgttggacacatcccgaagtaagcagcgatgtctttgaagtatgggtgtagtgacaacaccgccccctgttgtaaatgacgctctgaccatgccatctaattaacatgagggtatctcacagtggacaccctctctagaccacttgctaatatctcgtcaaaagtctcaataga

SEQ ID NO: 174116 - DNA, 788 bp, Cannabis sativa
tagttcccgctcaacagatggatcatgctactcgacagagttatcattttcaaatctttcatcggatccaagtgcctgagtttgagggaggacaagatcccatggtagctgaaaggtggttaaggcagataaaaaaaaattcaacacaataggaacacctgaggaatatcaagttacttttgctatgtccaagttagagggtggtgcacctgattggtgggagaccttgtccaagacaatggaaactgatgggatgacttggcaagattttgagaaattttttagggaacaatattttagtccatctcacaggagggctctgataggagtattcgatggtttaagacaaggggatacaattgtgaatgaattttacatgaagtttgtagagctatcctcttatgcatatcctggtgttgttgaccaactattggtgattaaacagttcatgggtcgtttgaggcctgcaatgcgtggcccactagcccctttgacctttaacaacctgactaagtgtgtgacaatagccttgtgaactgaggctcatgtagaagggaatgagaagaagaacacaagcagaggaaaaggaaatgattgaaagatgaccaagaagaatcaaggacactggtcccaaagacaacaatttagtgggggtagcactagtagtggttcatctggaaagactcgtagcagactatacgggtgcttcagttgtggtcaacaaggtcataagaagaaagattgtccacaacgacaacaaagatttcaagcatctcacggaggaccca

SEQ ID NO: 174117 - DNA, 796 bp, Cannabis sativa
gggaagtatctatgcttcaaaagttagcccaaaagtgagttcggattgtcaaataacctccatgcttgtttggctagcattgcttgattaaaattaacaaaagactgaaccccataccaccttcaaacttggatttgcaaagtaatttccatcttttccaatgaattttggacccatctttgttagtgccccaccaaaaattggccatcatagactcaatttgattgcaaaaactcgttggcaagcgaaaacaactcatggcatatgtaggaatagattgtaccatagcttttagaagtacttctttcccacctacagaaaacagcttttcattccaagcatgtaacaatttccagattcgttccttgacattactaaacaactccttcttgttgtgacttgaatatgcaggaagtccaaggtaagtcatggcactcacagattggcattcctaaggttttgactgaagaaattcttcgcatcatctgaagtgttaggagagaaggacatgatagatttgttggtatttagaaactgtcctgaagcttggtgataaacctccaatattcttttgatggctgtagcagaacttggatttgcatgacaaaataggagactatcatcagcgaataataagtgggaaaccgatggagcatgtctcgtgagtttcagacccaacaaattaccaagctgctcttcatggtgaagtagtcttgagagaccttccgaacaaattaaaaaaagatatggcgaaagtgggtcaccttgccgaagtcctcttgttggccaaacatta

SEQ ID NO: 174118 - DNA, 720 bp, Cannabis sativa
gagccgccgcggccatttaaggaatccagaatggcctatttttcgagaaaatctggccgcggcgaggggacatgccgccgcggccatttaaactttacagaaacgtccaatttttcacgtattttggccgcggcgagtcttcatgtggccgcggcgagatggtctgacacgaatttaaaagccaattttcacaattcaaaaaaatcacattccctcattctcaaccctaacctccacaccgaaaatacttctcctccaccatattttcttcatctaatcccattcaaaaccattttcctataaatctaaccataaatcttcatcccaaatcatcctaaaccattatttctatcatcaatcactcattcccactcgaaatcaaccccaaatccctaaaacctcacccaaaaatttcaaaaacccttattcatctttttctttctcaagaacttcgagctttctacaatggaggatgattaaaagaggattctcattgaggtattaattctaagacttcctatccaatttttattgaagaatttgtgaattgttggagaattttggatagtttgttggatatttgggatttttgctctatacattgttcaatattatttgtgtgaggaagattgggtttgattgtgagggaattaattcccgggaagtggatttttaaggggaagtgctgccaaattttttttaaaaaaatcttgaaagtta

SEQ ID NO: 174119 - DNA, 513 bp, Cannabis sativa
ctgatcttgtgagaaaagagtaattgactcttgctgggctaaaagttctttgggtcgatccaattaaagagagtaaagaattctgtggctattttgtagttgaccgagtttttgattgactctctttggctgaccgaacctctaatggttctttgagtaagtaaaggttgacttgggctcaagatattgggcctcaaagaagattgcaaaaatttgtgagttataataatatcactttattatgactgcataatatagtgtaaaattagaaaaatactattttttttcttgcatattgtattaaatttgttattttaaagttgtattggacaattggtaaaattccaacagatactgtacagagaattaagacacacatggccattcaaaagaatcgagatggatgcagtctaaaagaattgttcacgtacattccaaactgtgtagcgtaaagggattatttgcttcatattgggatgggatctgatcagaattaaagatatgcccattctt

SEQ ID NO: 174120 - DNA, 757 bp, Cannabis sativa
aatagagcacctgttgagagtgttatgaggaaaaacaaaattcagtaacatattactaaatgacatgataaaaaaaataatagtaaatcaactatttctctcataatttgaagatgtatttttaacatttcttcttcattttatacacaccttgaggttaccttgtcatggattgagaagacttatggtcgaattggcttatcataaaaattttattttaatatttgtgataataccaccaaaaatttgttaataattacacataaatatcaattaaatgcaagctcgattctggatagagacgggctaagcccgtgcctagagcttacctagctaatttatccccttttaaaattactcattttttttactaattttgaaaaatatcacattttttttttaaataaagacttaaaaaaatttattttcctataatccactaaatttcaagacccactctaattaaattaggggtgttcatcaaatcgctcaaaccgcccgcaccgcacgcaccacactgcaaaaaaatgttgtttgaaattctttgcggtgcgatcgcggtttgaatttttcctaaaccgcacggtgcggtgcgatttgtgattttgaattgttaatatgcggttcaaaccgtaccgcactacatattataaaaataccaatttttatatttatttaggtccgatatgtgaaagtgcaacctaagcccactaattattgtattgttgaaacttgaaactttttttcatatttattt

SEQ ID NO: 174121 - DNA, 755 bp, Cannabis sativa
tttttctcttggtagttgctttttacttccttacaaatttgtctccatgaatttataaattgttctacaggtgcaaccggcaatgttgcattttggaagatgaaataaaagtgacttgtaataaataaacatgtacacaacacgttgaagaattatttaagaaatattctagataatgttaaaaaatatttatacaagagcattgtattcactatagtcaaatatacaagatctaagcatttatttagagcattaatagttaagaaaacataactctcatattatttatccaatcacattcacattgagccattgcaaaaatgtctaagtctaaacacactaacaatatgctagagagtgtaaagagataattgtggcgcaacccacttaatgtctaaccatgcaattaacatacactaatatatatgtgtatatattaaataaccctaaaagggttatgtagcttattggattaataaagattaattgatagtatattataatttaatggaccaattatagttatatgagtactcttatgtgcctttaaaataattaataattattaaccattccattatggttgttgagaaatattgtgcacctaattaatgattgtgattatggtattatattagtccacaaatgaataattttaccattctcccacttgaacaatataatcaatcaccataacattgtctatcacacataaggcaaccaaataaattgtacataatatcatatcgatagga

SEQ ID NO: 174122 - DNA, 647 bp, Cannabis sativa
tctcattattagtctcaagtaatccagaaccaatatgagttacggttagctaattaccattaccaaccacaagactatccttaccattgtatttcatctcttggtttatgttgctgccttctgctgctatgtgattgttcgcaccaggatctacctactaagagccatcatcaaccattttaggggtgacaataaaggtgcttgatcttggggaggcatttggttgttgacactagttggagcagatcccataaaggcttcatcgaacttgttgtagaagtaggtcacaacatgaccatacttaccacagattagacatgtgggttttggaccattgttagttctgcctcctctgtctctattgtttccaaattggcctccaccttgattattacctcctctgttgtttatgttctgtcctgcaccaaagctaggaccagcaccgtttcctttattagccaaattagcagtgggattagtggctgttgtagcaacatttccattcaatttgttggttcctgaacacgtgctgagcctttcgactttgttgtcgaagcagcgtaggatgtcttgtaactcctgccacgttgtggatgttcttgcttcaacctgaagaactattagaaaatagtccagatctagtccag

SEQ ID NO: 174123 - DNA, 594 bp, Cannabis sativa
cattatgaaattggaaaacaccatccatttatgatataaacacacataattaatacaaaatgggaaagttgagtttctatccttcatgttacactgtaccatcacaccataacaaaatatttatcacataatcttcccatttcggttttatttgatatgtcatatatattacattttattaaattatatttataaaatatttttatataaaattaattatatgttatattaaattttatagataaataaatatataatattttaatataaattaaaatttaacataataattatataataatatgatatataatctaatataatattataataggtaccaagtaccaaatgatcgcttcactctagatttcaaaatatccaatgttggcaaagaactattccaaaatacttcattccgacccttccaaacataatatactaccgcaactaccgatgtagcaaaaacttatcttctaaatctcgttgtaacgtcctcgcttcaagccctcattgggtccttacacccacgtaatgaatgactcttatacacgagtacgccactctggctgcttcatggactgacgactgacccta

SEQ ID NO: 174124 - DNA, 545 bp, Cannabis sativa
cccatgtcagcttcaattttaattttaaggtttatatattggctaaacataccattaggatagacaataaattttcttagataaaagaaactctctcaccaattttgtagcttttgttatctttgttattttaatcttaacgggttacaaaaaaacatatgctttcctgttataaaaaaaaatgctttcctcttttttttgtttgcaaggtgaaatgctttccaattcaaaagataatgtgtgattttcataattcattttagtttttttttttttttttgaataaataattcattttattttattttaatttcttttttatttttgtttttagagaatccttttattttatgattttttttgtgtgtgtagcataaaaggtattgctattggattttgttgttggaaggtcgtttagtacattttttaaaaaagcataaagttattttttttaagaaaatatgatgaaaaggtgttgataaaaccagcaaaacggatcagacactataacacgacttgagattcgcacgagagttggcggattt

SEQ ID NO: 174125 - DNA, 690 bp, Cannabis sativa
gatttttgtaattcgtgggggaattcaaactgattcagtcaacccgatgatgacagatccaagcgtgtagactcctaaaaatgcgagagatccaccaggaacaaccccagacaagttaatacacaaccactaacgtgggccatggagtgacttcgcttttagctgggttcactccagttatacaagaaactaggaataccagtacgacggccgaacaaaccacccctagcactgaaatctcgttcagcacaaacactcaaaggtcggttagtttaagcctatattcaagttcgagttccaatccgttgtcaagtttttcaaggaaggtgacacatttgttgaatagatggcccaatcttccacactccatgcaatattcaggtagccgctcatatctgaatttaacccagaatttgtcacgaacttgggacaaagtgatcactcttccacgcattaatggtttggtaacatcaatcttcactcgaatatgcaagaatggactccaaccttcaaaaagagagtcctcaaaaacatcaatgaacttaactatgatgcttccaagagcgacaaccaatcccttggtttttctcataaatgggagcctataaacttgaacccaaaagggtgagtaaatcaaatttgaagaagagacattttgacagacatttggtgtaatacccggaattaaga

SEQ ID NO: 174126 - DNA, 504 bp, Cannabis sativa
attgttggagaaataatgatacgtttagaattagatcttgttaaagacataaaattcataaatgtttttcttatcttttccaacgaattttgaatcgtccatttctaatgtatatatcgagaaatttatggctaaaatactaagaccactaaaatgtgacagtaggtgtgcgagctggtgtgtctttgtgcgagccagtgtgcgagccggtgtgcttgtgtatgagccagtgtgcctttgtgcaagtcgatgtgcctttgtgaaagtcgaggagcatttgtgcaagttggggagcattcgtgtgagttgtggagcctttgtgcaagtggtggagcattcgtgcaagtcatgatgcatgcgagacgtctacgcgagactcgcatgcaagtcatggcatgcaaggtgtgagggactcgcagacgagccgtgtgtggtgtgtgaagggcttgcatgtgagctgtgtgtgaggctcgtgtgcgagccgggtcgtgcgagacccacgag

SEQ ID NO: 174127 - DNA, 733 bp, Cannabis sativa
agaaaggagtttctcaaaaggaggaaaaatattcatcatacagctatactacagcgttgcagtattggcctatgaggccatcttggagttaggcaatgaatatgtagtgaggatgtcgcattgctttccattatggttaattgggagagtaaggagaagaccacattcaacaaggatgaagttataagattgttttcgaaatatgtaagttttttttacgctttgcagtcatatatattttattttaatttccacctaataatacattggtttttattttcagttgacagtgtactctatgttatgtctccgacaaaataaggaagagtttgtgaggactatcaccgacggtgaggggccgctatttgttgacttggaggaactagtgttgggcgacgatgggcaaccaactcaagatgctctgcgcagccaagcccaaaagcttgcctcaacattagaagagcagatagatgaagcccgaatatttagagacagtacaccacttgcaccatcttcaccatcagaggatcctcttcttggtctatcagcatctactccaagcacatcagaggctcgcgaaccagtataccctgccattttggcaaggttggagactatggagacggtcgagcagattgcattgagggaaggccagactgttctgttaaaaaggcagacaaagattatgggttacctgaagaccctaatgttgggaatattttacaaggatcta

SEQ ID NO: 174128 - DNA, 566 bp, Cannabis sativa
tcctagctggcctacgtactcccttcggctgactagacatggttctgtagctttttgatggctttcttaactcctcttgcttgttgcttgacggttccgccatgccttgtaaggagactttgttctattattgacaaggttgtattacacgtgtccttagtcttggcttacatggacatgccatgttagatggaaaataatttggataacatttgtcccccaagtctctattcggacatctggtcaaatagggacttcccagctctcgtcttacttgtaatagtctctatcaagcagccttttctagccaagtattgactttttgtatggcatgcttttagctcttctctctccatatatgcttcttcttttcttctttgacatctcttctttgaaattgccattgacaagttttaagcttttagaaactttgattctcacattaaattgtaacatttttggtattttcagttgcatgatagttttagaatgtataatgcatgatttcttgatggaaatattggaatttattttaccaggatcttagatctagtcacaagtatgtt

SEQ ID NO: 174129 - DNA, 518 bp, Cannabis sativa
gttaaaaaatattattggttcttatcattttttcttgtgtcttactattataagtagtgtaatttctttcaaaaaaaaaaaagtagtgtaattaaaaaacgtgtctcatataattttagattataattatactcttattattaggccaattatattttgaagttttttttatttttatactttaaaatattcttttttgtattttatcaaattttacataaaaactcttattgcaactagcgccgcaacctaaatttcaacaaaaaatcgtatagaaacttttattccaactagcgctgcaactattttagaaactcaaattataaatttaaaaaaaaattaaaaaaaatagtatataaaataatttcctttatatttttatctttaaattttaatgtataaaaaaaaacttatatctataaattattaaaattgttaaatttattttttaataaagaaagtgatgaaagttgaaagttgaatttagtacgtacaaaaatataatttattatataaac

SEQ ID NO: 174130 - DNA, 757 bp, Cannabis sativa
cttctctgcctccagccccatcccaactggtgaccgctgggaggtcctcgtccagtgcccttttaggcacgattgtcttgatagacgaggagggggaagtcgaggaggatcagggcgaggttgcggccgcccttgagcgcaagcggaagggcaaaatggttgaggctgagcctttcaagcggccccggaggaaggacactccggctgttagcaatgactccaggattccttccgaagcaggggagtatactgtgccgcatgacatcgtgctcaccccgatccccgccaacgaggaaaggcagatgctccgcattgccaaacataactatgccctggacgagttcagtcggggacatgctgaggtggaggccctgaagaagatcctgcgggaggagcagcagaacactttgcgcgaggacgcttttcgaaatccttgggaccttaacatggaccctttgacggattggttcaaccgctttgtcgggcctacccttgctcccttcacctcggtgatgaccagccagtttgtgtcccatctgactcagttcctagccaagagatacgctgcttgtgcctcagtgaactcggtttaccaagttcaggacatcagcgctgctctggccgcggtgagttcttgtgatttattcccttcttttatattttgtcaaggcatctgattacatccttgtttcttttcagattactgccgagaccggccgcctctccaagaccctgattgatcatgggttcgtcatgt

SEQ ID NO: 174131 - DNA, 664 bp, Cannabis sativa
tcttttccttactaatcttaatttgcaagataaaccttttattagtaagtacttaggtttgcctcaatgtcttgatagatctaagtatcactctttttcttttcttaaagacagagtttgttctgttcttcaatcctggcattctaagtgtttttctaaggctgggaaggaggtccttcttaaagcagtaattcaagctattcccgcttatgcaatggcttgttttaggttgcctgttaaactttgtaaggaaattgagggtgtaatggccagattttggtggggttcttcgggagattctaggaaaattcattggaaaaattggcaatctctctgtcattctaagtttgtggggggtttggggtttcggtctcttattcactttaatcaagctatgcttgctaagcaagcctggcgtattttcactcagcctgattctttattgagcttaactcttaaggctaggtacttcccaaactcttctattcttgatgctaaagttggtcataacccttccttctcttggagaagtatcctttggggtagggatttgttggtttttggtctggtatggaaagtgggtaatggggagactattgatactttaaaagatcattggatccctaattctagatataagcagaccctttgtgacctggaccat

SEQ ID NO: 174132 - DNA, 592 bp, Cannabis sativa
ataagtattattgtaagtcttttaaactaacgtccatcctaatagtagctcctaagagtagggcttacaaagtataaaacaatggaagaagctcatgaaataggaataaccttgactctagcccaaacgggacattgtatcagtttgttagaaatcttggaaaataattgaatatgttttattatggtattttggcaaacatgtttccttacttgttattttctgaatttatttgaaccaagtgatttgttttggtttattgatatttttagtgtcaaaaatgaagaatccacactccaatcctcgttattacatgcctttgcaaatgaagaactctatagtgtgaagatgtctcttggtcagagcatcaactcacacttgcttatgatgaacttaaagttctagaaagaaaatttgttggcaattgttctatcaagagagcaatgggttcaattcattctcaacagccttccacctgagtataacgaatttgttgtatcttacatgatcaacaattttgactcgtgtgacatggataagcttgacgttgaactgcgtgcttatgaaaagactttgtcacttgcaaggagtt

SEQ ID NO: 174133 - DNA, 793 bp, Cannabis sativa
tcgacaacaaacattccttcaaaattatagatataattaattatacgtgaaagtaatattttgaacttcaattattaataaagttgaattattttcaagtaatcacagttttattctttaaaattacttgaggggcatatatatatgtgtgtgtatgattaattggaattcatatggaaatacatgatatattgcaaacccactccactttaaattttttaaattttttttagataattgatttaagaacctttctcgcaagaaaggaaagtcaaaagtagtagttgtaaatgagatttaactcgtaaaaataacattaagctacatgcgaggctaaatgtcaaatgactcgcattttttaggaaagtattaaatgagacaccaagatgccttgagaaaatacttaaacctaaaatatgaatagaaagcctaactattcatataagcaatcaaaaatgtacaaggtaattcgcgaaatgaattatgtaaagtatatttaagtttgcttaaaacaaattataactgtttatgtgaagcataattaataaactgctcgcaaattgaaagcatggcagacaataactgctcgtgcacatagtagatagctaactacttaagcaagatcaaaggaaaataagagcgatagaaatgattcaagtgttttaaatttaatcaaggtataattgtttaatttatgagaaaaaaaacacaagtaaacaaatgtattaagttcgaatgcaaaaatacgaggcaataaataaaagataaaataaagagcaaagttggccatcca

SEQ ID NO: 174134 - DNA, 589 bp, Cannabis sativa
attatccactttgtaccatttaagctttatagcattgttaactattattgaaattttacgctaaatactaattttttttaaaaaaattatatttatacttacaaagaaatttatattcatactttctctacttaattgtttttattttttactactttttacttattaaaccttcaattttttctttcttttctcttctctttctatttctctcttttttttttaattctctcttttttttctcaaattaattattttttctttgtatatatataaatatagaacatcttttaatcggtattacttgggtactaaaaaaatttaactataaatattaattttaaaatattaaaccattagattttagtctaatagcaaataataaaagagaaattcaaatttttatacttaatttagctacttaattaaagaaaatataaaaaaaataatacttctttttacgctatatcaaaaatatatttatatgaaaaatatttaagtcaaattttaacttttttttatcatttttttacgggaaaacttttttataattattttttttcaactgatggaacaactctaactcata

SEQ ID NO: 174135 - DNA, 678 bp, Cannabis sativa
tgagtctattaaatcctatttaaacagagaaatatttattgtatcaatacttaatcttttcagtttgacacttataatatcatttttttgcggattaaatacctaaaaattacatttatgttacttttgtcgttactagatcgttagatcttattaaaacagactaagtaattgacacatgtaaactgtcacgactcgagccctaaaccatggcagatatgtaatatctattattgggatggtcaaagatcacactttgatccttgtaagaagataacgttttttaatgatcctttaatttatatcatcacaaaatacttatttaaaaataatagattaagtactcctatatcgataagaaaatattactaacaaaatgaggaccattcattaatataaaagaacaataacattctcacagttatgtagtcaccgaatagatagatttaataactcaataaaataccaaaataatatctagcatccattattcctcatttacataactaatttaagtcatctagaccattctattccagcttaactacaaaatcaattccatttggaagtttaacaggtagaataagactaaacttataacgactttcttcctcaacgatactatcttcatccactagcatcaaactgaattcttagaatgagagaaaataaggagtg

SEQ ID NO: 174136 - DNA, 659 bp, Cannabis sativa
caatgatctaaatagaaaatcacaaaaaaaaaaaacacaaaaactgggaagaaacttaaattaaacatttgatttcggatctaatcgttcaaaataactccctctagaatcgaaaatctagattcatgcaatgtagatctgtattaaacaaatctagagctccccctcgaatccaaaacaaggtatgatacgaatttttttaaaaaactaaatctatgtgatatacagttgcattctggttgatttctagtttacaatgggcaattcagctttttaaaagacaatagcaagatctaattctaattaaggaacgacatgttacctataagtctattttttattttttggcgttgccttacagttgtattatcgttttataatagtttacaaattatggaggaatttcagttgacgggtaccaacaaatatcagttatacaaggtaagatttatgtaaatagttgcaaattaataatagttggaaattgatataattcaaataaatctgatgaaaaatcacaaggataacaactatgttactttgagttaagtaccatggtttttcaagttgatttacagttgcatcatcatttcataatagtttaattcatttttttgcaggaatttattttggacataagaaaaagagaaaacacttgg

SEQ ID NO: 174137 - DNA, 792 bp, Cannabis sativa
gtggcctgaggcctttttagaacaatactatattttcagccctagggccttcatcttcgtatctttggccataagccctttgttattgaacaatactattgtttgtccctgttgctttgttatcatggattgtgtgactgaccaggcggtctttaatcctagttatcttcttatgtccttgacaagtaagggtccagaattacattcccaagccaaagtatacatgcacgacttagagataggtttagtagcttataccaaacgttaaaatttctttgcataagttctttgtgctagtttgatgggttgtacagcatgagtgcccccaattgaccatgcagacaagtctcttggtcactttctattcaccatgtttcacagactttgcctgggttctgtcttgcgagggtaccatagtacgcatgtggaactaagagagtaactttaagaagttagtctgttagcaagtggtttagacacaataaacaaaatacaaacgtcgttatttattcattaatttatctttgttgttgtgcaacttacataaatttaatttacaaacttacattacacaaatttagcttctagatgtcaagtggctactcctgcgtgcctactaaagtagaggccaccattgaagaatacgggagaccacaccaaaaaggccatgggtgctagcactttttgtactataatgatgagtaggtagaactgctactttggagtaaagttctgtaagctggttactgatagtatttgcaaaggtgaagtatcttggtaggagaacgagct

SEQ ID NO: 174138 - DNA, 654 bp, Cannabis sativa
cttacaaaaatactaaaaaataggaaaaagtttactaaaatactgttacatggaattttttacacttatactgtgctaactttataaaaatattctgtttgaagtttcaaaattacaaaaatattgtattctagtaaaataaaaaaaaataaaaaaaactcaaaaacaactaaaaaataaccctagaataacttaacaaataattataaaacaaaaaaaaaaaatataactacaaagcaacataagaataacaaaatattgacctaattgcaataagcaaaataacaaaaatctgtgtgtgcattttttatcgtttatattttcagtttattccaaacaatatgatataatttattatttaaaaatcataagttaaaaaatgatatttataataatattatatcattttacttaaaaaaaaaatttataaataatattatatatatttgaataagctagatatttttgtagaaatttaaaaaatacttaaaaagagatattttagcatataattttaaaaattatcatttatttattattttattcttaaaataatacttgctagcagctactgcggtgactttttcggcaccgacagtaaacttcagaaaagtcatcagaattggcatagtggccggaaaaattaccaagaaa

SEQ ID NO: 174139 - DNA, 555 bp, Cannabis sativa
gctttattttgatgaataaaactttcctcgtatttttcaaaaggactagatgggaaagaaatgatgatagataaatatgttaagtaaatattatatttcttatatttcctcgtataatatcaattagttctgagatagaattccatgcattttataattctaacacggtatcagagcaaaaacaaaaataacatcttaggattatccaatctcaaataaaaagaagtcgatcgaaacaaaagtagagccaaaaaaaaaaaaaaccaccaaatccaataatacaatacattatatcatatttaaaaagagccaccaaaagtctgaaaaattgttccaaaaagtagacccaaaagaatcacttgtaattcaaagatagtgagcaaaaaaaaaaaagaatcgtgatcgagttgtcaaagatggtaagcaaaaaaaaaaaaaatagcttaccttattgaggggatgttagagagtctcacattgttattgtgtagaaagataatagaatgtataagattcatgaactatactccttccgttactaattgattttgatat

SEQ ID NO: 174140 - DNA, 572 bp, Cannabis sativa
atcaacctaatcatggggtgagaataccatgaggcagaccttgcggctcacgaaccaggaggcaggagacatctcaggagaaccctctgaatgctcaggaagaacaacctggggaaactgagggtccttctgaaaatgaacaactatatccttctcacaaatttgagaatagaaggcgaccaaaaaccagggaacaagaaatccctcgtggaaatgagggaaattctgggactcaacctggagaacatgggtcaccaacaaggtactgccaatgttcttcccaaaccaatagggaaggggcacatacaaaccccagtggggggcacacaacgaaccacacctaagggagaagaatgggatgcgaagaggcgagtgttacctcgaggcgcacgagaactcacaaccgatcaatgcgaggaggagaaagtacttgtcgcaataatgattgagaaagtacatgcacaagtaaaactacaagtcactcaaggacaaggtccctgagccagatgaggttcatgagtaggacaaagtccgtgagttgaacgaggtcagcttgcaattacaatcaaccg

SEQ ID NO: 174141 - DNA, 512 bp, Cannabis sativa
cggctaccatttcagtagaggacagtatacttgtaactcgatgactataatgtcttatgtgagataaatacatacaaagtgttgcctcatgtattaacgagaaaccatacggcattggatgcataaggcgagacatcaacttcgttacatctgggaataacgaaagcgatgcatattaaccgtgaaaatacttagcgtataatatacaaactaagtataacagttgggtggattcaagacctaataagtgatgcgcctatctcgctataggaaggcgcgctcctgctactttcaccaatcaatttcagacatctttcagtgagacttttagtcttgacaagttaaaagctgacattcaaatgactgctgaagtattctctattactaagaactgcgattgtcaaaataaagcgctaagccttcaaacaaataagcaacgaggcatatatcgtaacctcagaaacataggggaaaagctctagctcgctatcaaggtcattggtattgagttc

SEQ ID NO: 174142 - DNA, 989 bp, Cannabis sativa
ttgatctagcttaagatactttcagttgaatgcagctctaatctcattttctttgagatatacaagtagttattaacctaccatgtcttttgcaagcagttattagtctgccttgttatacacgagtagttttaatctcccctgttatacgcgagcagttttaatctgccctgttatacgcaagcagtattaatctattatatataaatatatttctttaaagcaaacttaaaatattttaaataattcaccttaggaactattttgaatatcttttgattgctcatatgaatagttagatcttctatttatattttagcttaagtattatttttcaaggcattcttgtgcctcgtttataatacatgtcaaaacaatgcgagccgttaaatatttatctcgcatatagctttatgttgttttatgagtagatctcacttacaactgctatttttgatttttcctttttaaagaaaaagtttttcaattctttgattttatattgtccatagacaattttaatcaattattctttcctttgtggaaatttttttaattttttgagtttgcaatatagtatatatttctagatgaattccagttattatacacatatatgtatgctcccaaataattcgatgttgataagctgcattggttatttgtgactcattacatcgttcttcaagtaagtccaagaacaaattcagaagttcttggttttcttcttgattatagaattcacgtctgtgggttgcaatgttaacttctactgttaacattgctttcgagccgaatgccaatgagaatggagtgtgtcccgttgttgttatctctgttgttctgtgggcccaaagtacttgtggtagttctttacttatcttcctttagcaccgtccaacttcttcttaatagtatctcttaaggttttattaacaacttctacttgtccatttgcttgaggtcttgatactaatgagaagctttta

SEQ ID NO: 174143 - DNA, 652 bp, Cannabis sativa
ctctaaaggaagttttttggcttctacagatagagtttacttatctaaggaagagtttcaactattctaaaaaagataaaagtcatgaaaagaattccataagcatcaacagtaagaggtctcatgtatgctctggtatgcattagactagacacctgctgttgagtgggagttatgagtaggtatcagtttaatccaggaaagaaatattggaagacaatcaaataaatcttaagatcaaaaaaggaactatatgttagttgataatggtggtatattaatactcttaggctacaacaaatcaagtttctagacttgcgttaatgctagaaagtctacttatgagatggtgattactctggggtggagcagtgatttttagaaaagtgtaaaaacttatctgaagtctctaactctaccagtgagactgaatgttaaagtggcccagaaggctactagataattatttagcctataaaacgttctatgtaatttttggtgttattccagtaatggattaagtactagttttacttcatgataatacagatatagttgccaaacagtaaaaaatccaataccctaagaggagtaaatatatagaaagaaatttcacaatatcaaggaggtgtaatggtggagaaagtttgta

SEQ ID NO: 174144 - DNA, 543 bp, Cannabis sativa
gttttctcatattgtctccacctcgtctaaactattaataggaaggataagtgtcagattgagtttggtattatagttcatgatattttacatgtttggccttctttctcttctatttttcttattcattgtaaaatggcttgtaacgttatggctcattctcttacacgtttggctttctcccttgactcttctcgagtttggtggcctgatttaatgccttgcctctaatccttgactattttttattgagttttggctttgttggctttatgtcttttaatggaatttttctttgtagaagatttcagtaacttgattaactgttattgctagtttcatctagtgactagttaaatggagcaggtttgtgctgtcagctcccaaggtaattaatttcagttaactaactcgggcacccctcatattgagtttcctatataagcctttatgtattacttctttaggtgacgatatagagagaaatttagatgattattacgtttgtaatgagtgaggagggttgttaaagaggatgtgtgt

SEQ ID NO: 174145 - DNA, 562 bp, Cannabis sativa
ctatatattggttgtttttaatgggcgtatatgattacaatttcatttccttcaatttctttaaggtgttagaagtgagaaataaacaaaataattcattcttttcttcaacgaaggaaaacagagagagaggtgaaggatttcattcttttcctagggtttcagaagagagaaataataaaaaaaaaaaatcaagtctatactttgcctcaacgaaggagaacagagagagaggtgaagggattgaagttgtagatctcaaaagtttgatctggtatctaagaattgttttcttcttcttcggttttggctttgagggtgatcaggttttaaagtgcaattggtgaaggaggagggcattactcttctcagaagagtcacaatatttgggctgatgtttgtggtctggtttgttttttcttctctctctttttgtctttctattatgtataatatatagtcattattagaaattaatcccctcttctttcactcatcatcagcccagataatgtgtggttgattttgtttgaaatgaaattatatgtatgtataggaaggg

SEQ ID NO: 174146 - DNA, 625 bp, Cannabis sativa
gctaactccattcaccttgaatgcttggcaaaactcttcgaaattggcgaggtgcatgtttgggtcttctgatggcagtccgactgaagattggacgatctgcagtatggctggattgatttcaaaattgttggcatagatgcaggtggtcttatacaagatcgggcccctgtcaagttaggaagcaaatagtccctcaagctatggtcattgttgttgtgaccattagcttggttttctacagctccgccattattgccattaatggcattgtcagccatgactctttcttgttcaatctctattgcagttttttttttttttcaatttcttccttcttctattctttttataagttttctctatttcaggatcaacaggtaatctaacagctgcacattgacttcttataaactaagaaacgtgaaaagaaaagataagattctaaaacaaacagagtagtactataattgaaaagaaaaaccaaattagaacaaaatttgatttttaataatattaactatcaatccccgacaacggtgccaaaaaacttgtgatattttgcacatgcaagtgcacgtatcgtgacaagtagtaaactcaccaagagtgtggtcgatcccac

SEQ ID NO: 174147 - DNA, 642 bp, Cannabis sativa
  modified_base (603)..(614): a, c, t, g, unknown or other
ctgggatgtgttctgatgcaagcctacagagtcatagcttatgcctttagtcaactgaaggattatgagcaacgctacccaacttatgacctagagcttgctgctgtggtttttgctttaaagatatggcggcattatctttatggtgaaaagtgcgagatttatactgatcataagagtctcaaatactttttcacctataaaaatttgaacatgaggcagaggaggtggctggaattggttaaagaatacgactgtgaaattctatatcaccctgggcaagccaatgttgtggctgatgcattgagtagaagaggtctcgggcaggtttgcaccacgattttgatagcccctcaactagcttctgaaatggttagtgcagggattgagtttgtggttggaaatttcacaacttaacactgcaatctgatttgttagagagaattagaaaatctcaactagaagatcctgagctaatcaaggtacgagatgaggtaatggctagtcaacctagagacttttcaatctcgaataatggaatgttattgtacaaagtttgagttagtgttcctagtgtcgatgagcttaagaaagagatacttnnnnnnnnnnnnaccacaccttattcactgcatccgggaa

SEQ ID NO: 174148 - DNA, 583 bp, Cannabis sativa
tgacagaggcaaacaattggtccagagtctgcagctgcaaaaaatttaaaacaattacagctgagattcttgcaattacactaatacaacaacaaactatgtacacacatgtataccatctctaggcaggtgctccgacgtgacctcttatgcattacagaatacaacgagtctctaattttcactgttgtattatcaatggtcagattcactgcaaaccaatgcggagcactctcggtatccaataggggtatcaccatctgcgacaaagtaaaacaaacaacgtcataaaaaaagtaaactaaacaaatttgatactcttgctccttcgccatcctctccatactcatcgttcttccaagtaaattgctctgcacaataagcacatagaatagattacattttaaataaaaacatagttgagattgtattaaagcacatatacaaaatgttcatgtcaatttttaaatgtcgaagtttgtacagaaagtcttgtgggcataaaccaagttctctttgttccaatgccgttgcgcttcttctctcgaaaattcatgatttgagcaaagcaatcaatgacctg

SEQ ID NO: 174149 - DNA, 579 bp, Cannabis sativa
atatatataaagtaaagcatattagagttgatgtggcagcttaatagagttttttaatcccttatttgatttctcaaattttctcatttatatattttaatccaatcttatatgatttattatataaatgttgaccatttaatgatttaagcctaaatgatgacctttcagcaattgatcatcaatacaataagagtttacaacgtacccttcaatacaattgttactccatatactatatacgttaacactacattgattgtgtattatatgaccaagccatgataatattaataccgtgatgttttatattcccttcctcaacaacaataataataaaaataacaataataataaatattaagttagaacctttggactcacaaaggctttatcacttattgtttatgtatataaatatagatttgtttgtgggttgagtgtttttcgttgtataaaatacacataatctgtttttaggtttttttagtgcaacaatataattatttttgttctgatgatttgtttcttactataataatttgttagtttgtattgtttggtttaattattttgtta

SEQ ID NO: 174150 - DNA, 731 bp, Cannabis sativa
aggttgatgccttgctttgtacttttgacgtagaattgtttctcgtcaacgcgcgagacactagtttttatatccttatttctcttaagaatttacagtcagcaagttgtaaatatactctatcaactctgcatttaatgagctattccattttactatcttctaatataattattattatatttgttgattcgtattctcccattttgacacgtgtcctcctctgaagtgccagccaaattttgggtataacaatcgccccttaaaaagttctttttaatgaaaagtactttttaaattattgcatagggtatttttgtcataatcccttttgaaaaaaacgcatgtcctctgattttggcgattttgtgatttcgagatatcaacatttaataactatcttttccacttctctttcaaattctacctgttggatcaattgttttcctgatctaacagagattatcccaagagtattaaaggagaaaatgaaccacctttgcattacttttgccatttttgaaattctagaaacttttcaagcttttatgccgaaaaaccattcccaaatttgctcaaaatcttgcatgccatctttgtcattaacattttttctacgagtctcatccaatttaatttttgacttcaagcattttgggggatcttcacgccgttcgttgattcgtagtgttgggttttatggcctaaataaaaccctttacaatctgatt

SEQ ID NO: 174151 - DNA, 856 bp, Cannabis sativa
cgactccacaccacaaacaccattaaaaccaatagacgcaccatttaaaccagaaataccagcaaccacactagccctcgcaccatttaaaccaacaattgcaccatttaaaacagcaactgcaccatttaaaccaaaaaaatcagcaaccacaccagcacccgtgaactccaacagagcagctcctcaatcacctttagatgcgactgcttcttcccaaataaaactaagttcctgtcaaaccacacccaccaccacaccatagccaccaatgaaaatgctctcgagaaagatctacaaatagagccactaacaatttaaaggacttgaacaaagatgtaatagcacatcccagatatagggcacggtttaaaacccttgcctataccctgttacaggcgacagttttaaaccgttgggaagtccacattagcgacggtttttaactgtcgcctattttgcccgttttgcgacggtcgtataggcaaaggttatagaaaccgacaggaatactttaaacgactgtttaaaaacgtcgggaaaaactatttttgtagcagtattgtttacctgatgaacaaaaaattatttataactctataaaaaataataagaaccatatattatacaataaaaaaattgataatatatcaacaaaatataaacgaaaacatttacatacatttaacactaataataataaaaaaaaaaatacaaatcaaaagaaaatacttatgtataaaaaaaaagaaaccaaaagaactaaatcttcttattataatttttataaacataaatgtttaaaatttaagtatattgtatttggatattaattttataagggaaagctaaatag

SEQ ID NO: 174152 - DNA, 507 bp, Cannabis sativa
taaatatttatagtatctctctccgtctttttttttttttgaaagggtatttaagcatgttttttgaaagcttatacaataatatatatatagtgttcctttattgttgcaaacatcttctttttttttcctcaaaagtttattaaagtgttgtaatctctaattggcatctgcatataattaacaggtatttttaacaaaactctatatctttctaatacaatatgtatctgtagttttttttttattcgcattttgtataagttttggaagtattattatatttgtaggtttatttatttatacgtagtttattattattttagttagttaaatttgattagttcttccgcaattttaacgtttgtttatccatacaacatatatatacatatatttaattcgtagatattttgtcttgtaaaataaatacattgtcatttgtgaaaattttcttatagtgtgttggtatggccctctatatcactattaattcataattatttt

SEQ ID NO: 174153 - DNA, 611 bp, Cannabis sativa
attccataccactgctgtttaagcgagtttcagacaaaaaaatcatcccgggatgataatctttgacatgggacttaagagtattcaatgtccaagggttcccaagtccttggacattccaaaacatggccatcatggtgctcggcgacctagattacctaggttcgccgctttcaaattgttgtcaagggtcaaatccaattccttagaaattccccttgaaagagtaccccctccattcatagccatctgcactgtagaattctctgtctgaaccgctttccctttgatctttgttcttcttggagtcacttttctcctctttaatggtccgtcttccttgcttaacctctcaatcccaacatcataacttattggaatttccactaaattattataatcaacctcttcaccaggtctgctcttcctcaagccttccgaatcaaactcactctccatctccatagcagcaaagccctttaaagattcatgatcattcctccaagaaccattcctcttgcaattaacttgactgctttcccccttttccatcatcagtaacttgttaaccctctgtcttgtcaagttctcaaagtaattcccattagaac

SEQ ID NO: 174154 - DNA, 718 bp, Cannabis sativa
  modified_base (675)..(675): a, c, t, g, unknown or other
ctacaaagacattatttcaattgatatgtgtatctatatcttggcacaacttgatatctgatcgttcttttatccaatctcaattacaaaggacaaaactctctatctcaaaattcatcattattagagcaccgtatctttcttatttcttgaaacacaaaatcaaatttcatcattaatcatatgtacaacatgtgtcactatactaaacaagtaaaagaccataattgaaactctttaacaacaaaacctgatatgcaccatacagtcaactactgccctaccacaaaaattgctatgcaccattctcaaaaatattaattacattgcaatataacttgctatgtagttcaattaagacaaaaaggaaaattactttataactctcagaattcatcttcccaagacaaattcccatggcccaacaaagctttcaaaattgtcacatacattcctgttgatgaagaaggcttttaattcaaacagacaatctttaattttctccctaaggatgttgttgtattgtcatcgtgtcatggtctcattttttgcaagagtttcttccctactcaagatctaacaatctacatttgcaatcatttaaacaaggaaatgacccaatttagttgggattcacttggaaatgacagcattgtatctttagcttttgatccntctcagaatcccatacacatttctacagaattcaagttagtga

SEQ ID NO: 174155 - DNA, 542 bp, Cannabis sativa
aaagtgtcaaacggttaagtgctcccatcagatactttagagcatctccaatggtaatgttataaaaaatgcttgatgacataaatatattttattagaatgaaaaagaatgtcacaaaagaatattatactataaaatcttttatatcttctctttcttattttttttattattattttatttaaagtaagaaaatttatttatttaatatatattatgtagtgaatcactctcaccaacacaatctagcaaccaaaatcaatcaaaataaccaacacagtttgatcacaaattgttgataaaatcagcaatttaaagaaccattcaaagagaaaattgacaccaaggctatgtttggtgggagggagggagagtaggatggaatgatggagaggtaagagaggatggggagtaagagggatcgggaggattgttaaagatctcttttgtattgtttggtattaggtgtgaggtgggaaggatggagaaaaaattgattagtaaaattacgaaattgttcttttaaaaataaaattttatt

SEQ ID NO: 174156 - DNA, 688 bp, Cannabis sativa
ttgttcaaattatttgtactattagtatggtaataaattatattaaaaaacaaaaactcgtgtattatattattttatttttataaatgtgtgtgtatataatacataaatacattaaattataataaaataaagcaatggagaattgagactttaaatgaaaaaaataaaaaataaatttagtttaataaaattatatattaaatatgaacaaaaataattatattatatatgtatagtgtacaatatatatgtttggtcggcacttggtttaatcggtcggtttgccattgacacaaaaccaaccatgcaaaggcggttttaaccgaagacagttttttcaatttttaattttttcggtgttcagacgatcggtatactcaatttggtcaattttttaaaattttttgctcaggcctagtttagtagttagttaatttaagggggcaaagttatattttaaatagtacatgtcataaaaatgatctttaaatgaattaatgtacaatatatttttttaaaataatatttttatgttaaaatgtacatctagtcaattttattttccaagtatttatagtggactggtttatcaaattatatcaaatatctgttagacttttatttgggcttacattaaattttattggttttattaaaacttgggttgattggatagttctttgct

SEQ ID NO: 174157 - DNA, 555 bp, Cannabis sativa
gtaagtgattatgaaaaattatcataattctataatataaaaaatgttacaaatttgaaatgaatttctaacttatgattcacatttgataagggtacaattaggctagtaattgtatatgggagttataaaattaaatcgagatatttctaagaatttgaaactatcaaaatattcctttacatcagttacacaaaatttgggtgtaacgggtgttcatcgaactatccacaccatataaactgtccacaccacacgacacaaaaatgtaatttaaaatcttttgctgtgcggttgcaatttgcatttttgccaaactgcgtagtgcagtttggtttggtttgcattttaaaatttaataatcgcgattcaaactgcaccgcattatatattacaaaaatattaatttttacattatgatttctcttttgacatatgggcaattcatatacttacaaagtccaagccatacaattaaatttaggaaacattcatataaattattctcatttttttatttttttttctaatttcttattgctaacatattattat

SEQ ID NO: 174158 - DNA, 502 bp, Cannabis sativa
caacaacctttcacctgagtataacaaactttttgtatgatacatgatcaacaattttaactcgtctaacatggataagctggacgctgaattgcgtgctttagaaatgacattatcacttgcaaggagggcccgctcttgtattgcaaataaggacaaaagaaaagctaaagacattgaggatgattcctctgacaatgttgctttcgagttcaattttaagagatagaattcaaattgaaccggtaatagagacaatcaaagaataactgagaagatgtattcttctatgttctcactatggagagaagggacattttaaagcaagatctcccagatttctgaatcataagaacgaaggtaacacttttgtttttgaatcatgtgttttcgagaatgaaaaatccatttggattgttgattctggatctactaaccatgattgcccttcattgcagctgcttgaaacttgggattacttaaatctaggggagttgaagct

SEQ ID NO: 174159 - DNA, 554 bp, Cannabis sativa
gggactactgactgtcacatatagctcaactaaatccctattttgtgggatttgattatgtagtagagaaattcatggaattttatatttgaattcccatgccattttatttcttttatatatatcgagattcacattattgttactgatgatttagcaaacaatgcattcgtatttttctctaaatagtgaagtcatttcactatttaggggacccttcttttcgcattctaaaagggcagacactttacaaaaataattgtacgctttttgagaattattaagaaactcacctggtcggaccttgtgatcttgatagttcgtcataatcaatacaactaaaaggggagtaagctattacaattataagaggataaatctctataattattgtgtgttgtttataatttttgtttcatcattaacttctttacaattactatatttttaaagacacagtgtcgttggctaaaagggaagtcaacacatatttattggcactacaagaaatgtcacttttaccaatgcattttgcaaattgcgctggtaaaaat

SEQ ID NO: 174160 - DNA, 530 bp, Cannabis sativa
ggtgactcagtgagtcagggtgtgtgtgactcgctcgggaagtaaactctgttaagagttagagagagaagagctcactttgatctttccattattttgtgtgccctattgctgaagtcatatattcttttatttttaaaaataccatttttattgcgattcttacaaaaatattcatatcttctaattttatattttcactgtattaattttatacagacttttaacattatttttttcaccaattttataattataatgtacataattattaaaaaaaatttaactaaaaaattatttaagtacgaaaaaaaataaaaatatatcagtctagaatttttttcatactttaaagtgtgacaaaaaaaaaaaaaaatactaaaatgtatcaataatatctaataccatcttatatgtcaatatcgttattatctaaattggattttatataatttaatgtaataaattttaaaaaatttcactaaccaaaagaataattacataaagcacctttttttgtaaaatattta

SEQ ID NO: 174161 - DNA, 503 bp, Cannabis sativa
tctgggttgttttctctcaaacccaaaaccctctctctctctttacccctttttgattttcaacttgaattgttaaagaattgcttgaagattggttgttgattgaagcttttggagttgtgggttcttgagcttggagtttaggtaacttcttgctgagtttatgtagaatttaatggtgatttcttgctgaatttattgtggtaaaagcatgttttgaattgtgtttttctcttgtgattgcatgttcttaagtgttgttgtgatttttatgaattgagtgtgttattgcatgatttggttgagaattttattgatgagcatggagtaagaaaatagggtattttctagcttagaatcatgtgtttttatgaggattgttgctggattttaagggatttgtgtttggtttgagttcgtgttcttaaacttgaatcttgataagtttaagctagatttatgttgttttgagcaatctaaattttggtattgttatgaggatt

SEQ ID NO: 174162 - DNA, 549 bp, Cannabis sativa
ctctctctctctctctcactattgaatttttgaattctttatgtactttctctaaaaatcaatcctatagtgtattgagtactagcccaatacatttaaggtggtactcagatctcagtagaatattgtggaaaaagtatttgcaaattcaagaaaaagatctataggctcattacttggcaataccttactacatatcgaaaatcaatagttagaataattaaacagaagaagacatttaattctgctacaactaatgtgagaatttacaatcttttacattttatttactcgttttataaattttatattttaagatgtaagattattatgtaataattaaatatacataattagtaaattaagatcttggtgaaatgaattctaacagtaacaaccaaatttaacagtttaagtaacatttaatagcattaattagtctaagaaatgtatatgtaaatagatattagggtaaataatggcataagtacccaaagttttaaatttgtaagtggcataatcccatgaaaacagaggtctattacatgg

SEQ ID NO: 174163 - DNA, 717 bp, Cannabis sativa
taaaataaataaaaaaaaaacctttttagtaaccctattaagttgttgatacattaaattttgtttaagtttaaagattaattatttatttgttaaaaaaatataaaagaaactaaaatgcttcatttgatcttataaatcttctttggtgaaggagaaagatatatacttctcacatattaaaatgatcatcataaaaaaaattacaatgatataactcttaactctatttgggtagtaaaaaataattttttttaaaaaattgcaaaagaaaaaaagagagatacatgaagttggaaatttattataaagtttttttaaaaaaataataaaatgaaagagatatttagatgacactcaaaaaaaaaaagaagagatatttagatgctatgtactaagagaaaaaagataaataaataaatgaagtcagattgatagttgaataaaaaaatgagagttatttttaaaaaataataaaaaaattatatatgtgtaaagtttaaatgaaagtttatgaaagaaagaaagaatgatgaattttatccgaaaaaaaaaaatcgtgaataatgcactagtgacgagagagaatgccgaatatatatgtatatgactttcgttacttttatctatttaaattaatatgggtatccttataaataaaatataatttacgtgtttgagtgtaattttctcaaaatactttaggccggcccatta

SEQ ID NO: 174164 - DNA, 500 bp, Cannabis sativa
tgataatcttgaaaaagaaaaaaaatagcatttttttatagactgaaattatgtagggttttcttatttttattgtttgaattattatgtaaaaaacaataagcatataaaatcaaaatttcccttttaaattatatattatttttttggaaagtttacaccacttactgttttttcttattttatttcaattttactgctataaggaaaatattacatttttactgtattttttatactatgtgtactgtttttatttatttatttatttttttacttttttacatgtcacaatttgcctatcacattaaataaatatatatattatataaactgtaaaaaaacgtgtgggagtaggtttgtttttttgttcttttttttttttaattttcttttaattaaaattatattatattttaaatgtacaaaagtgtgatgtgacttgtattgtcactttagtgacatatatttttttcaattaaaattgatgataaaaatat

SEQ ID NO: 174165 - DNA, 582 bp, Cannabis sativa
atatatattttattttagagttgaatacgtggctgatccatgacaacaaaatgtgaaattagattagatgcaataccattggggagtgtgtatgtgtgggtcttttattctagatgttgtgtagtgagtgtggctgaactaaaatgccatatgtatctctattaatctctactgtcatctgtcgacgctcataaatgaaaccagagtgagagctgatcggaatggaaatggtacggataatgagtggggaatggaatgctgcctcgcctctctctctttcctgcatatttaatatttttcatctcccttggaacacacaattccaaattgatttgtttacttcaaaaataataaaaactatacataaattacatattaaaaataataattcaataatgtaaagtaggagaaattattcaaaaataaaaaatagaacataaatatatatactaatatattataaaaaatttataaaggaatatgtataataattaaaaatactattataataaaaaattaaaaaaaaaaaatcctgaagtatttttttttatttaagtgtttatatattacagtgtataattt

SEQ ID NO: 174166 - DNA, 544 bp, Cannabis sativa
tctttaaaaaaaacattttatattattggagaaaaaaaataaaatttaattgttattatggtcagcccaccttgggctgtgggctatatttaatgtaaataaataaaataaataatatttaaatttataaattagctttagtgacactccatgtatgttgggatatgtttttgcagtcccgcatgacgcatctctataactcagtatttttcatttaataaaaattaaaaaaaaatagatatcactctttactgacacttcaaatgtttagtgacccacattgtaggagattaacaaagattgattagagtctaattgtgcatgtcactaaaaatcactctcaactctatagtgacatgcacaaaattgcatgtcactaaatagtgtcactaaaacgtaaaattgtagtagtgtgaggtctcccacacttggggattcgaatggtccagtgtgtggggctagacggtagccgaagaatggttgccagggctatgccggtgatgggtttgtgggtttttttttttcttatggttggtctgaagag

SEQ ID NO: 174167 - DNA, 1070 bp, Cannabis sativa
ttacactgctcgaatggtatcgtctagggttttcctatgaatttcttgaagaatttgggagaaaacttggctgaaaatattttgctttggtttttgagaatcaaaatggctaaaaagattaccaagggttctaagtcctatttataagcaatctaaaaaattttaatcatttcaaaattcaaatttttgggtttctccccaaaagtagacgttcaacactgattgtaaggagcacaaccgtcaagcgtgttcaattatcaaactgtgattcgaggtgtagcagtcaataagccttaaatggtcagatattgaagagacccctagttagagtcacatcggatcaacatccatcatcaaggacacgcgtcacccatccaaacaagactccaggctgagtgaagtccacgtgcgactgggaaggtcctgcacagacttgggggaaattgttatcttattttttttaccttgacatggcaataagaattgatgacacgtgtcccatatttatgacacctgggtagaggaaagtattcctcgcaccccattaatggttatttaacatttgtaacactcaaatacccgaatagaatgctggagaagatgtccaaccaagatgcagacatgctaatgccaagcgaagcgtgtaagatggaaattccagagatcaatctcattatttccaagacacgaagataatccctataattgtgagattgagttagagaataaaggcaacacactttgctttcctattctttacatagtaattatagaattaatgtagtttcttattttattcattatagacaaaggggaacattcctcatgtaattagtccattaaatagtggcataatctcactatgaaaggaccaaaagaattgattcaaaaatacacccaagtgagagaatagtgatataagagagaaaataatttatagattcattgtcagaactttcgagaaaaagaaaactttattccttctctcaagttaatacaaatacaacaggagtaggttattatctgtaaagaccgcttagttttaatttagaaattagcagataattaag

SEQ ID NO: 174168 - DNA, 525 bp, Cannabis sativa
  modified_base (242)..(249): a, c, t, g, unknown or other
caagccaatattttctcaactagtgttggagatcataagcctatataatcaagcttccaataagtagattcaaaatttaccaagtaaatatctcaacttattaactcctcctaacttcactatagattcgaaattgtactcttaattatatagaacgctttatatgttccaagatatagatacgctattaattatctattgttataatccaaataatcaaagattctctatagatgatttannnnnnnnagggataaatttaccgttctacttctcgatgtattttatctttaaaagacttagctttctataaataatatttcaataaactaatataattactgaaataagagctctttcatttatctctattaagccaagctcgaatgaaatcatcatttcactactatgtcaattaaaagtgatagatttcgtatctatgattagcactctcactcaattgtactaccatgttctcaagatgtaagtattgggacgatctaattggtcagctttaacaaataa

SEQ ID NO: 174169 - DNA, 511 bp, Cannabis sativa
ttgttaaaaatttacatattattagaaacaattaagaataaaatatactattttttaattttattttcaaatttacggtttgggttattcgactaatttttatgtgggttactgtacagattttggtttcaatttaagttattgtattagttgctataggagtttctgtgtgtaatttcataaaaatacaaaaaaaaaattgttttgaagtataaaaataaaaaaaaataaaaaaacctacaattaataataggctaattaggatttttgccctctaaactttaacatgtactaaatcatgccccttaacttttaccgctgttaaaaattccctcaaaattatggagattgttggatttaaggatttttttttccaaattcattcaattttattactaattcagtgattatttatgtactaaatcatgttctccaaacttttatatctataaaattatgccccacgaattttgacgtgtaccaaatcatatctactaaattttcatccatg

SEQ ID NO: 174170 - DNA, 545 bp, Cannabis sativa
cgggaatagtgccaaccgattttataaagaaagagaaatacctggacgagttgaatccgaagataagacatgacctgatgatctccactgatgataacaccacctatgctaatatggtgggaataaaggcactgcgagctgagggagcagtggagtgcacccaggagtctcgagggactcaggttgttggtggggctcctactcctcctacctcaggttttagtaggggaggtagtgactcgaccattgaccagaaaagaaaggcacctacggcatccggtggctcaagtcagaacaagatgttccgagggaaccaaggttgaggaaatcgtcagggtagctccgaaacccaatacagttacccagaatgccccaattataagaagcatcatctgggtgagtgtagagggaaagggtacttccagtgtgggttgccaagacactacaaaagggattgcccacagtttaagaaagaagaacagaagattgctgcaaaacccgctccagctagggtgttcgcgttaactcaggcagatgtagaagct

SEQ ID NO: 174171 - DNA, 528 bp, Cannabis sativa
ttataaaaatacgttaacaaggaagaaatttattttgtcgttttgattttttttatttacaaaaatatatttttagtaaaaataataaactgttttttttttttaagtttatttatagttttattattgttgtcatgcatttattttatagttatttatagttgaattatagttgctgtaaagttgatttctcgattttttttttattttttgctaggaaaaatatatttttgtaattttaaaattttataagtgtatttttgtaattaaaaattttggatagtaaaattgtaaataaaacataaaagaagggcatttttgaaatatttttaatttttaattttattttgatgttatttgaatattgttttaattttgttattgtttttataaaatatagtaatgggtgattctaccacgcactctcttgaaagggatgtactgatgcacccttgacttatttcggtatccacaagaagttttagtctaatttttctttcataatcatgtacgttatagctatataag

SEQ ID NO: 174172 - DNA, 538 bp, Cannabis sativa
  modified_base (71)..(98): a, c, t, g, unknown or other
  modified_base (384)..(387): a, c, t, g, unknown or other
taatttattgacaataatttaaggccggggtaaataacagtaggttttgagttttattattattattattnnnnnnnnnnnnnnnnnnnnnnnnnnnnttattattattattattgaagtaaacctccacttacactgatattagactcaatacaataaatacaaaggacagaaaaggaattacaagtaaaagccctaagttgaccttcggtctctaaaattcctaacagaaattagttagaatggatttggttaaatccacacctaactaatttctgtaactacctaactatcacatgcagaaataaaaccagaaaccctagatctatatatacctgcactcaagcttagatctataaggttgagagttcacttcaagatccnnnngttctgagcttgaaggagaagaaggatatgacctcacatgtacaataaaaacaaacagagagttagaaattgttagggagagggattaaacacttaaacttgtaaaataaaagagattaccagtcagaaatttacctgtgacttggaatct

SEQ ID NO: 174173 - DNA, 585 bp, Cannabis sativa
accaattaaatcttaacacatcaaatgaaaattcgaactaaacaattaacaggctgtaacatatttcacactctttactttttttcctttttgtcttttttaatgaataattaataattttgtcgctttaattttccactataataattttatcccaggacttattaaaatttttccctcaatttttatttttacaaaaatttatttttaaaagcagaaaattatttttttgaaaacaattaaacttgtttggccttattttttgaaaacaacaaaataatagtttctattttaaaaaaaattaacttttggttagtattgtttttagaaaatattaaccaaatgcgacttgtattttgaaaacttcaaaaactattttatatgttctcatttctaaaaatacttttttgaaaacaaaaaaccagaaaacaatgtcaaacatgttcttagttcttctgttatgttccattctacaattccttttaaatgctagtgcaactttgtaaattaacaattttaccccataagctttaacaactatcaaatcgtacttccgcaaaataaaatgaaaaaaattcaacattt

SEQ ID NO: 174174 - DNA, 591 bp, Cannabis sativa
gtaaaataattccaacaaaatatacactgaaaaagaagatcccttatcacacctaaagtactttgaaatgcagatggatctgcaaggggtaaggggcgatgtacagtggagaatctttcttgccacactcgtagaggcttcctagcaatggtatttcaaattgcctttaggaaagttaaattcatagattgctttctcctcagagttccatgcacagttttcctcctcctgtcagcttccctcacacctggaagacctagtagaagtgaagcaaatgctaagagaacccctcagggcctacattagcaggtttatgaccaaagcaatgaaggttaaaggataactaaagagggaattttaatagcaatactggggggcattgagcctctggcagaattattgaaggacataaaaagattaattgtgggacaaatggttgaatttctagatcgagcagatggattcattaagcttgaggaagcaatacggtgtgtggacactgttggaaatattttaacaggatctagatttactaccaagtatgtatcattaacaacctcatatgaattctaaaacaatgacataaacaca

SEQ ID NO: 174175 - DNA, 956 bp, Cannabis sativa
acggcaagtgtctgtgctctatcctctgcacataatttagaacggcctcatcccatttcatcttgctcttgtcaccttcataaaaattccaatacatggagaatatctgtggagcagatgtgtccaaaactacacctttttgagtgtacacttctgggtagaggttccgtcttcttctcattaagtgcgccatggcatcaatttgctgtggtccaaaagaaaaaagtaagatatatatcgcacacaagtcgcataaatatcgcatgaaatcgcacaaaagaaaccaaaaaacagtgattaattatcgcataaaagtcgcacaaaagtcgcacaaattttacttcataataaagtacataaatcgcattaaatcgcacagaagtcgcacaataatcgtataatgatgaaaaatcgcaaacaaatcgcaataaaatcgcagtaaaatttaaaaacacaataaatttagtcagttaagaaataacttacagcatcgtcgagccactctccctgcaccatcagcttgacgaaccaggatcgattagctgggcgagtgtgaacatccctaggacggtcgttgtccctcgcgtacgtgatccacttctggaaaaattttaacagccgtgagtctgccggtttcaaagtgtccacttcaactggcccaggtcgttgtttcttctttccctctgtgtagtccttcaagaaaaccggcttctgttttctcctaaccctggtgaagtccaccccaggaggtggcccgttcaactcttccacatcctgagattctgtatcacccatggcaatgacaatggcccttgtaggagtacaaggaaccacatctacattgggttcccaatcttccggatacacatcatcctcatcaaaattatttttgggcggtgatggatgtatcgtccgcaatggctctgtcgggtctgatggatgtgtcggcgatgatt

SEQ ID NO: 174176 - DNA, 597 bp, Cannabis sativa
atgttggaactttgataaatcttttaataaaatataaaagtgttctagtgtgtgaaatgaaaagagttcaatatgggatatgaacccttatttataagggtatatatagtgcaactttggcatttgaatttgggtcccaaggggtatccagttttgtgcgaatgggtgaggactcacacacttgacccatcatatgcgcgcgtccgtccgagctgggttggtgtggtgtgacactttagaaggaagtaagcactcacacatcaacagacgaagggagttcgctgtttggtggtgttcagaaatcagttgacaaagtatattacaaaggattgcagcaaagctttagagtgagtctaaatttgtttaagttaattgtattttgtaattgtttgagactttactaattgatttcattctcttggtgtgaccccgtggattagtagtgtttgaaaaaacacttagtgcaattttcttgtgtcaagttttctgcacaatttatttctatttctgttctcttgagcaaactgctagcaaaaataaaagagtaacgatattaccgaatgaaaaaaattctaggttgagttgcggactatgtcg

SEQ ID NO: 174177 - DNA, 582 bp, Cannabis sativa
gttctgggggaaccagggtcaaggttatcgtcagagtggcaccgaaacccgatacacttacccagagtgccccaattgtaagaagcaccatttgggggagtgtaaagggcaggggtgctttcagtgtggcgtgtcagggcattacaagagggattgtccccagctcagaagtgaggcaccgaagactacagcgaaacccactccagcaaaggtgttcgcaataactcaggttgatgcagaagccagccctttagtggtaacgggtcagctctcggtcaacaactcttatttctctgtgttgtttgactcttgggccactcattcgtatttggcagccagaagttttagtaagttggatagaccgcatgatagttatgaaacagggtttggaaccctactgcatggcggagagttagtaatctccaaaaggtggattaggtctatgccggtcagaatagaagatagagagctgagtgctaatttgttagagatgaatttagtggattttgatattatactgggaatggatttcttgtccacatactcagccagtattgattgtaagaggaagatggtaatctt

SEQ ID NO: 174178 - DNA, 514 bp, Cannabis sativa
aatttccaatgcaatatatttcaatatatattaactctacaaattaaatttaatcgattatgctatttaaaaaaacatatatttatagaatatatataatacctttcaagggaagggaagatcaatgattggagattggaggaagaggaggcgaaagggagagagagtccgacaaagaaaagacatagagaaggaggcaaaggactagtttgaaatcatagaaggaaggaggtagagtgttaaaatagaaagttagttagtgatgcaactgatttctgttatttctgttttcgattgttattgttagttgttagttagttctttccttctctgttttgttgcttagatcatttgtatataaactctattggttctgtaataagattgagattctcttttcttcctttctctttcatttagcttttgttctcatcaatggctaaccagtttaacatgtcactgcttgtgcataaatcgatccaatccaataagaaccgaccgatccaattacaac

SEQ ID NO: 174179 - DNA, 537 bp, Cannabis sativa
actgttgcaagggttttctgtccttctatttcatgttggatcacttagcaagtgtccatttaatacatagagattgatttaattatcaatctgtttttacattgaatttcaacatttaaatcaattaaaacgtaaatataataaatgaagaacagtttcggcccaattaaataactacaacaacgtatgcggcctttgtggtgcgagttgtctgttcatattctcacataagctcccagactcaagatgtgtacaagactaatcgagtctcacatgcataagatatatgcgtcatgttcgagtcgcatatacgaatatcttgtaaaaggttgataacttaggacatgcgagtccttatcaggttacagagtttgttgggtcatctggaccagctcgctgagtaaagaatcgatctttactatctcgcaggaagatctttatagttattgcatatatctcggtatgtaaagtctttttttggcaagttagttgacaaaataatttttccttttatggtaagattgttgtgcatttata

SEQ ID NO: 174180 - DNA, 578 bp, Cannabis sativa
  modified_base (99)..(103): a, c, t, g, unknown or other
  modified_base (151)..(153): a, c, t, g, unknown or other
gagtttttatttctcatgagatgagaattacaacaatagactaagtataaaaaactttaaactctagagagaaagtctagagagagaagctctgacctnnnnngtagttttctgaatgtgaaaaataagttaagggagctctccttttatnnntgaaggaggcccacaaaaataggataaaaagagaaataagttgctttccaatgttgataatgatctaacgttgaaaatgagcttctagtggtgatggcaaatttttggtgcccgatgggtcccgctgcgggtaacttgaggcttatttttgtaattctcttagggatgaattttgatgatgatagctttagaattgcgactggggtgtgagacatgacttgatagagaatttaaatggcttcaaaacgcaagtttaatcatgcgaattggataaaaattgagtgagttatgaccgctttactaaaggtagttcaggtcccaacgcccaggttgacatcttacgtcaacctggatgctgggtaagtgtagaaacgtccaaggaatgtcctttaagatgcctaagtgatattttgacaccacttagt

SEQ ID NO: 174181 - DNA, 501 bp, Cannabis sativa
ctagatctctcttttatctttttgcaatatcttaaattgtctaatttcgagcaatatcgagagagttatggccaaaatactatcagttgacgcaccagaaaaatcactgtcgaaacgaaaccatgtagtgaaactccaacacgggccgcggcccagcccttgtggggtcgcggcccgcccctctaaactgcacaaaaatcatctttttctctcacgtgggttttgctggtttcccaattcgaataggcatttaacatgtgcgtttttatgtgtttttagtccttaaaagcctatataaagggtgaactggagttcattttagtcaaagcaatttagagaggaaaatgaagatgaatttcagagacaaaagtcaataattgaggcattctgcagagggttttaagtattattttactctttatcttcttctctttcttaaagttaatatgtgtgattttactttcatgaacatgtgttgctaaacacttgattagggttaga

SEQ ID NO: 174182 - DNA, 980 bp, Cannabis sativa
aaccaactcaacacctccttaatcctgataacttcatcaagaacaagatcaaccatcccatccagcttactgttcgagccataataagttgactagaagagttctgcgccatccaatcatagatatacttattctgattgctaaaaatagttgcatcaacattaattttaattatattaccaaccggtgcaatccagtgctcatgcccttcgccatcttgtaaagaaaacaaagaataatcagaaattttattttgaacacaactccattgatcaaaactatccttagcaaacaaaactacctctttaacattcttattcttattattccacacattgtcattgtgcacagtccagaacgtccaacaaagcataacaactctatgtttcatcccaaaatcccaacaatgaaatctattatgaagccatcatcccccaaaataattatcaccgatctatcaccaaaatactcgtcatctgtcaacaagcaaaagcaaacgaactcctttcaagacaatgagaaatagactttccaattcgtaagcatcttggacacaacaacgaggggagaggaatatgtttcacgcctaattggacacaggtaggaagacaattggaagaagccctccaaaccaaattcttgactttatgaggcactctcaaatacaactctttccaaaaggtcgagttagtgactccaactaactcacctttaagaagtcgaaacgcactcataacagagtatgaccttctatttacaatgatgttttgatgtacaaaacatcatctttgtgcttcaaacctgaaatgatcttaggtggcatttggttggagggaataaaatagaatggaatggaaatgaaataattttcatttcattcatttgattggttgtagtgtaaagtattggaataacattctaatggaatgtcctttccactattttagtagaatgactattctgttagactatatatatag

SEQ ID NO: 174183 - DNA, 601 bp, Cannabis sativa
aaacaacctaaataatcactacacaacttcagaaaacaacaccaaattaagcccaaacacacagcccctacttcctagccaaacatgcatcaaccctaacttaaactaaagggaaagacaaagaaagcaaagtagagtgatataccttagattgaagcttccaatcctcttaaaacttactgaattgagctgagaaaacttaatttccagctggtcccttggtggttcgaaagaaaagaaagaaagagagagcttaatggtgaaggaaatggtttctaggttctttcttgaaggtcaaaagctattccttcctctttgaccaaaataaagacaattaataacatatatatgagttaataatcagattatcactcataaaaagacaaagaagaaattctaagcaaattaccattttgcccctaattaaattcactaatagaaaactcccaagggtaaattggtcattactaaacccgaaattctaacacctccaatacctcactataatattctaaaacatataaaatgcgactctctaaaggcccaacgtcactttccgccgcttccgagcacaatcacgaacattaagaaatttacataa

SEQ ID NO: 174184 - DNA, 550 bp, Cannabis sativa
attaaaaataaaagttaaaaaaaagcccttaaatctgctgtcaattttatctattttgtggaacagtgaaagtctgaaagtccaccaccacaccgacggccatcttcctaactctctcaccagtccaagcgtggctggcacttaaaccttggcttgtttttcaatccatgcatggaatttattcatctgtccatgtacttatttatgtgtacattacataattacatttctatgtaatatccagtgcatattcaattgccaaagaggtttctgagcctacctcattttcacttgctcaatttttgtttttataaatatgaatgtctaatatctctagactttttttaaaactttgatgttttggtgcttgttaatattcctttcttattttaagcagtagattagaatgctatggttattctcaatatgagtagctccaaggttgtttgactttgaaaaaaaaaagtttggccggtttgtaatttttttttaaattgggcgggttgccctaaaattttagcaacctgaactttagactgggttagaaaat

SEQ ID NO: 174185 - DNA, 681 bp, Cannabis sativa
aggagattgcagatttttaggttgatctcgttcaataggaaattgactgatctcaatctaaatggaagacctaaaaggatttcgtgtcgtttctccatctcgggagttggaataggcctcttcataaccgaggtcaatacaaataagcagaatagttaagtgcctatagttagtaagttgaaaacgcaaaaccaagttttttgagacaaaggaatacttacgtatgatgcgaaaagcagttgtattgattagagcgaggccgaatgtctagaagaattcatccttgatttcagtcttgttgggtaacctcacgatgatcctttgatcattcgtttgggtcccgaggtaatagaaaccacctgctccttgcttccttgcgggacaggtcttcacagtgtaaaaaatataaaattttaagtgggcttggacactcccgctccaaaatttggtataagacctttaggtaggccaaaattctgtaagaactcggaattaactaaaagggggcaatttcgaggtaattgcaaaactccttgtaatagtctttcaaagggaatattgctccagctctgatgtgcttgaagctccaagcgccaatcccagacgagccactagtgctacaaccctcttctcggattattctttcagggggaaaacagctaaattcccattgagcgacag

SEQ ID NO: 174186 - DNA, 574 bp, Cannabis sativa
aaaaaaaaaaaaaaaattcccaaacaactataattcaaaaaatatttattcgttcttataaaaaaaataaaattattcgtttaagatgattaacgtttttatattataataattaatctcatacatagtacatatatttattactatataaatatagaatttttcataggtataaatataattaattaaaatttagatgttacttttttcctgaaagcagatattatttttatttatggcagataattttttacaataaaatagagatttgttgtaacatataaagcataaataaatgtttttttttttaaaaaaaatatattggggaagggtataaatactatttttcactttaataatattgtgcatcaattggttttttttttttttttttccttttttgagcgagtgcattgattgttttatttattttattttattgagatacagtaataagattatattaaaatttagaaaatatcataatcaacaaggtcgttgtagtatagtggtaagtattcccgcctgtcacgcgggtgacccgggttcgatccccggcaacggcgaaattttt

SEQ ID NO: 174187 - DNA, 768 bp, Cannabis sativa
agtatgctgcgagctcagttgtgaaccctcaattccaacttcggggggtagagggcaagaagactcgaggagaaccacctccgcacgagaaattgagaagttcacttggtgcaccgacccagtgggttgttcctcgacattccttgtagcaaagacctcaatccctgcagcagagacctcaatccctgcagcagagacctcattccctaccttgggagacttagcagcctcgatagtaagctggctcgaggatttttttcttgttggccttggtcttggtccttttgggttccttgatggaatccgcggcctcatcagcatggactaccctcttcttggatctcttgtcggctaggggaggacttttgaacagattctccaagtcaacgtccatatctacaaagcaagaggaactcattaacactaagttaaaaattataagaatgtggaagaactcccacttaggagggttaccatattcttcagaggatggcgaggaaggattataatattcactaaactccctagatcatgtgatcttaaatatgtcataagggtttagtagatctaagtcccagcttgaatctatgtgactcgctctatccaacatggttccatactgttcgacaatcccatagaaagagctgctacagccaatttgaacatgaaattgtgggtaccaactatcaaacctatgagagatgtgatctatgaggagagggttccaaatgaaaaaattataccgactatctcgaaaggagactaagg

SEQ ID NO: 174188 - DNA, 501 bp, Cannabis sativa
gcttgcacgaaggggaagaaaagaatgaagctttggttccttatttcctaagttattaatatatatccttaaaagaaaatacatttatcatttattcaacttaaaacacttaaccttcagcctattaatcactaaaagacaaataaaataaatccttaaaatgaccactttgcccttttaaaccttcaaacttaaaatataaacttaggggtaatttggtaattttaactaatctaccaaactgacattctaacattctaaactagttcggaatattttcaaaataatccatctttaagtgtcatgacatttctaaccacattatccagtttccacgatctccgggcctgaaaatatttaattttaaaaatggtatccacgatacccacacattttgatataatctccgtaattaataaattacgctttatacagttctatccaagaatacacttgggaccaagtaaattatattctaattgggaggttataactaaatag

SEQ ID NO: 174189 - DNA, 617 bp, Cannabis sativa
acttataaatttaaatttaaaaaagagaataaaataaagtatgtctattgagtttctaatatttttaatttgaaaactaaagacaacaattttattttcattttcaatttatttaaacagcaaacttgtgtccattctagtccttacaatatgagtgccttttttttcttttgataactacagttattttccttactttgtttttttgaatccttttgctaatgccaacgatcataattgctcgtgaattctaggggtgttcacggattggtttggtctggatttttatagtttttgaaaccaaaccagtataacgattttttgaatattagaaaccaaaccagaccaatgaacggtttggtttggttcgaaaccacgatttaagtggaatttataattattcttattttttttaagtaaatgtactatttttactaagtttttaattttatttttcaaaatatatatttaacttaataagtaaaaggtctataacatataaataacgattaaaagcattctcaaaggtcaaacataacataaaaattcaaaattcatgcaataaaaaaattgacacacaaaaaatttcaaaattatatatatagtcatatataaaa

SEQ ID NO: 174190 - DNA, 597 bp, Cannabis sativa
agctccttacaaacgaagctgcggggtaggttcgttcaagtgaaacccatatctctgcaatagtgttgaaacccacgatttgcccaagcatcgaatcgaaaagtgaggcgtagagccagctcattaaaagctgattgaagcggtgccaagttgtgaaagctgggtcgatttggttcaacgttggatttggaaattgcagaggacatgccacggtgccatcaatgtaaccttcaagaccatttgcaataataatgttctgcatttgcatcctccaaacaaagtataattagtgtcatctaattttattgagatagtttgattgaaggaagggaaatttggaggtaaggaaggagaagaagatgatgccgagaatagaggagaagaagaggtaggtggtgcggcgatagtggtgggtgttttgtgtttatgatggtagggttttgaaggaggttttgggtatttttatcttccactacaagaaatgtcacttttgccagcacatttttgtgctggaaaaagtcatgcgctggtaaaatagaatttatttgtgatgtgttggcaaaagggggttggcaaatcaatgttggtattagaact

SEQ ID NO: 174191 - DNA, 796 bp, Cannabis sativa
tacaaatttagtatcttgtattttgaataatgatgatttagtaccttataatttaaaattatacttatttggtaccctaaacaaaaatttgaggaacaaatttcataatattgactaaattgtccttagtgaacaagattaattttaataatatttttattggtccaactgattacttaaaaaattaattttaaacttataacaaaataataaaatctatttttaattaatatataaaattaataataaaaaaaagagtctatttctcttccctctgcattagatgctcacatcaaaccacaacctgaatgtcattctcccgactcgacgaaaccacaacctgaatgtcattctcccgactcgacgaatccatctcagatccaacccttaaaaattccttaaatctctcttcattatttggccagaagacaaaccttttcaaaaaattccccaaataaaagatctaaaaaaataattcttccggataatttgtagttttattcttcagtgggattaatatcgtcttttgagtttactacatatatatatatatatataatacttattggtattatcatttatatactcgtggtcatggacttgaagccgtttgtctctggttaggtgggcaagtgaagtgggatgagattaatgattggttcaacttgtttagttaacaagttgaaagactgtaaagcaaaccttggatctcttttaagatccaaacgaaagatagaaggattttctttctttttttttttttttttttgaatttttgttttttttaattaatttt

SEQ ID NO: 174192 - DNA, 725 bp, Cannabis sativa
ctttgtaaagctgcaacctccaactttctaggaggtactgaaataattatagttgatcaatagatgagtattatcacccacatccttgataatatgggggtgacaggaacagagagagtgtattgtgctgcctttatgtcataagatcatgcccgcgtctggtgggataatgtggggcagactcaagatgttagcacaatgacttggaatgagtttaagagtctgttcaaggaaaagttttataacatcattgtgagaacgtcacttatggaagactttatgaaattgactcagggaaagatgattgtggccgtgtacactttgcagttcgatcggctatttgaatttgttggtggtctggtgccgacggatttcacctggaaatagaaatatgccagatgactgaatgccacaatgactcgagacttaaagattaccactgctcacgacactttaaataagaaagtggtcgaattagccttgatagctgaggaggctgagcaatatgtgattaaggagcaagctgtaaaggatgccgccacaacatcgaatcctcttgggagtggtaatgttagaaaagggactgacgctggtaaccctgataaaaagtagaaggctgatgcttccggaacatcagggggtaatagaaatttttggggaaataaaggtggtcgtcaaggccgtgggtcttcattccgatcttatcccgagtgtcctaaatgcaa

SEQ ID NO: 174193 - DNA, 536 bp, Cannabis sativa
  modified_base (482)..(493): a, c, t, g, unknown or other
gggtattgctggtgggttgtagatagtacatatagaattggagatcatcatgggttgtgctcaaattggatatttggatcattcaatttcaagccacagttcaaccaaccccactattgaagttctaatataccaataaaagagtgggaatgagaaaaaggagagaggggagataactggccaaattgatgaggaagtaaaagagtgggctaaaatgttctcaaataaaaccctattaactttttaagtgcatgtttggcatcataactaaaaaactgttttttatttttaaaaacagaaaattgtttttaaaaataatttagcttgtttggccttgttttttaaaaacagttttcagaaaataaagttacaaaaaacaagaattttgatttctgttttaaaaaccaattcactttaggtcaatattgtttttaaagatcactgaccaaacgtgacttgtgttttaaaaacttcaaaaactnnnnnnnnnnnncatttctaaaaacaattttttaaaacaaaaaacagaaaacaat

SEQ ID NO: 174194 - DNA, 934 bp, Cannabis sativa
tacttatttttcctgtttttctaattttttattcactttatttaattagagatcattaattaattaaaaattaaaaaaaataactatacatttctatataataactaataaatatatatatatatattaaaaaaaaattaatgtacatacaattttttttacaaaaattaatattaactaatataatttatcaaaaaaaattattgactaatataccaaaaaaatcaaaattttagacttgattatgtttatcactctcttttccctcacataataagtactataatcgatcattgtttaatttattttatgtacagagcaaatcagaaatggtattaataatgattacaagtaaaatacggtaataacatcaactttaaatacagtgaccactacaaatgagatacagtgatgatagttgttttgaaattatatgatgagttttttatagatttattgccttccttctaatttagatctctattttgtgtaagaattgttcaatttttaattttcttcactataatgtacatttcaaaaaattgcgtcattttatatttatataaaaaaattgtatgataatttttttttgaattatttagtgttttttgtatagatttattattttttttaataaacatatatttttctttttaaaaatatacataaaaataaatttaaaattatttgataccgattttgttgttcaattaatatttatttaataatttaaccatcgcacgcgaagcgcaacctgtttactagttgttaataaaattattaaaatcctaaaactaatcattgttcaaaactgtaaagtcattttttggcaatctagatgccaaaatattttttattttatggtgagatttatttgcattcataaccgattttcttaccttgattttttggtttttattgctttttctatgtt

SEQ ID NO: 174195 - DNA, 659 bp, Cannabis sativa
ctattgagtaccagtagtgtctagtacccttaagatgtgtcgttttacaattggctagcgatacttcctaaaagttattatattaaactatatgagacccgatactaaattacaccaataacaatattgatacgtaagagggtacttgacactattagtaccttctagcatttctcttataggactaaagaagatggacccattttgagtttgcacataatgcaaattgcagatatggtttcacactttcaacccatctctctatatatatacatacatattcaatagtctaaactctaaagtccatggcaaaaaatacagtacatacaaaataatccaaccagccaacctccaagtcaaaccattcaacactcaccacactcttattattaatgtctcataccattttcctttctctaattcctacaccacaccttaatatttttcccaatgaaaaactctttctcattattccttcttctacttttcaatttcaatttcattttctataattactcagttaaagctgcatcagatcctcactacgaatcttgtattgtccccaaattttgtggaaaccaaacaataagcttccctttcttcattcaaggccaacaagaaccttattgtggttaccctggctttaatctcacgtgcga

SEQ ID NO: 174196 - DNA, 810 bp, Cannabis sativa
caagcaataaaacaactacacaagatcatgataaaaaatcaccattaaagagccaagcttgagttctaaaactcaaagcttgctcaatcaactctacagccagcaaatccaactcaaaacaacctatctaaccacaatttaacttcagaaaaacaaatcaaacacaagcagcaactacaatagctaatctcataaattaagcataagttcataacttaaaacccaagaaaccaaagaggaaaagcattagaaacttacctaaagcttgagatcacaagaaccttgctcaatattcctagaattgatgcaaaacaaaccaaaccctagttggttctaggggttcgaaagagagagagaattcattttttgttaatttttgatatttttgtaaaatgagatgaataaatgatttattaaactaataacaatctagtattcaacatactaatcctactaatgtccactaaaggacaaaacattaacttaggtaaatgaccattttgcccttcccataactaactaatcataaaattacttaggggtattttggtcacctctaaaatctcgactattcccgatattcccactgtctaactatactgccaagctatactaaaaatactaagatgtgattctaatagtcaaagactgcgttccaatattgtcgggcacaaaacatgcaaaattatgaaattccatatatgacatataaaatgcgttttgaattcaaataaattttcgtaaactgataattcataactaacatgaaagtttcataattaaccctaattatctactaatttccaaatt

SEQ ID NO: 174197 - DNA, 531 bp, Cannabis sativa
cgttgccaatgatgtatgcaatgttacaaatatcacaaggaaacacaaataacacacaattaacctcaagaagataaatttctgatgtggaagatcagttataaaccgcaaccacagagcatacttataacacgaagagattatgattttttttttaaatttttaatttttcaatttttttggtttgacttgttcccaggcctattttattccacttactcataacttaataaaaactccttggggttaattattaagtgtggatgggaactttgccaaatttcctttaagcaaaaattgcttatgctgaaagaacaagctttgttttaatttttttttcaagtattttcttaagcaaagtaaataaaattaaataaatacaataaaaaaatggcaataataatgatagatatttatattaaagttaggaggcacaaaatgccatcaactaactataataataataatagtagcagtagtaataataataataagattttaggaggtacaagatgtcatcaactaaaatga

SEQ ID NO: 174198 - DNA, 586 bp, Cannabis sativa
atttcctattgaaaaaactctaaatacacaaatacacaattaatatgagaatttcttaatatgaatatctaatagttaatcttactaatataccatatacgtgtatgcagttatgcttttataatattattgaaagatggaaatttttaatagatataataaaaggataatttcacaaatacacaaaataataaaaaaaatgaaaaaaaataataaaatttcatgaaattttaaatatgttttacgatttttttattttatttacaaaaaatacagtctttttatgttgtattcttattaatttgttgttgatttttattatctgtatgttattttttgttgttactttgattttattttcatggtacttttatgtagttttcttgttgtttttatggaaaaccgtaaaaatgtaaatacttctcaatgggtattatcattaatgactactaaataaattgaattataaatgttaagaataaaaatattaaatcaatagattttgatccgatggcaaataataaaagagaaatttgattttttttatgcttaatttagctatttaattaaagaaaatataaaaaaa

SEQ ID NO: 174199 - DNA, 621 bp, Cannabis sativa
agaggtgtaagaggaccaattgattggtttgtgtgtgatggtggtgataggacagccgctgaaaaaaccactcccaaaaaagagacaaaaatgcgtgataatgtttgcatggacattgggaggtgtttctttgagaatgctttgccttttcatttggctaagagtgcttcctttctcaatatgcgtcgctcgattggaaattatggtagggaattgaaacctcatagtatgtatgagcttaggacttggatattgaaggaggagataaagactaccgacactatggttaaggatattaaaaagacatggccatcaacatgagtatcaataatgtctgatggatggtccgacggtagaaatcgaagcattcttaacatcttgatcaacaatcctaaaagcactgtgtttttgaaaagtattgatgcctcctcatttagtaaaaatgtagaaaagttgtttaaaatgttggatgacgttattgaagaaatgggagagcatcttgttgttcaagtggttactgataatgctagtgcctacaaagtggcgagtacattattaatggagaaaagaaagcatctctattggactccatgtgctgcacactgtattgatttgatgctt

SEQ ID NO: 174200 - DNA, 568 bp, Cannabis sativa
ctcacgcccactatagcttctctctacaattgagattttccatctttgattccctctttgtaaccttaagagagctatatcagatcccacctatagtgatttaaatagtattatctctcagtcaatacaactaaaaggaaagtaggtcattacccaaaaactaagggggtcaaaccgctataaaaatccttgtgttcttttactttctagttctaattgtgtaacacgtgtcaagcatcagtttaatacaaccccgctgtcaattggacaatttttaaggtcaatagtttggtgctttcattgagagcaagttggtatcataactgataaaacaccatggttaacatgagaagaactctagttgcaccatgtgcatcatcgggtcttcctcaagaccctttaactgtagatctagatgtccatgttccagccatgactggaattcccatgaacactacagatgtggtcaatcctgtcaccacaacatgcactttgaatctggtcactacagctggccaaagtgacacgaacatcccagtggatttgaatagcaggcccttgcctccaa

SEQ ID NO: 174201 - DNA, 558 bp, Cannabis sativa
atcgacttgattttcaatcgttaataacgagtggacgataggtgaacgatttcagatgaacgatttcattttcaatcgttatattcaaaatctcactatcaactgaatgtgttcggagaagaagaagaagaagctttatatcgcatggagcccactacatatcgcatgaagttcgaaatgacgaggaagaaggtgagagagaaaatcaagattatcttcaacaattttatgcctatcttatgaaataaaagcttcaatcgacttgattttcaatcgttaacgatgagtcgacaacaggtgaacgatttcagatgagcaagaccagcacattcgcccaaattaaagcttcaatcgacttgattttcaatcgttaacgatgagtcgacttgatttggcaattcaagaatcagtgaaaggagagaatgcttccgtaagagtttcagacttgaaagcttatttaagtaatgtttccttaagtattggaacatcaatttttaatttatttttggattaacttaagaacatattttaattatcaagctttcttaaacactacta

SEQ ID NO: 174202 - DNA, 817 bp, Cannabis sativa
ataataataataataattgtgttgaatatacactttagcactataataattttggtcaatattattatactaaaaataataatcacaatcataattattattattcctactaataataatatgtaccaaaatcaaaccaaattgcatattcatttaataatatccagatatatatatttattaggcattacgcacatgccaagaaaaatcaaatattatatcatcacaaaacctcatacatatttaaacccataaatatgtaaaataataaaaatactctatgctaaaaaattacaaaaataccctttatgaggagttagcaggtattacaattctcactcatagaaatcgtgactttttatctttatatttaagtgattaatctaattaaatatgtaatttcgatatttttgttggtcacttactttacatttgttccaatttatttatttatttttaaaacgtaagctgaagaaaatatacatttttttttcagaatataaaatctatatatatatactaaaaaaaacctattaatgtataactaaatattttcgaaaaaggtggtttattaggtaacttataactaaacaaaattatagatttattgaataataataataaaaaaaaaatcttttaacttataactaaatataaatgtgtatatgcgttttgttgggactcaaattgtctgtctcaaatgcgagttccattacttgtcccaacaataaaaaattgacacttgtcttcttagttaattttcaactaagacttgtttggtataatcaaagagtaaaacatattaaatcatttatta

SEQ ID NO: 174203 - DNA, 618 bp, Cannabis sativa
gcagtccgtagtgctaagcgaaaataattcactgagttaatgcagactgagggtatgtaagtaactgagtacacaacgaaatttgatcgtctagccaagctcacctcgggtattatgcctacagactttagcaagaaggagaaatatctagctggtttgaatttgaaaattagacatgatctagtgattactacaaatgaggcaacatcatatgcagagatggttgaaaaggctctgcgagctgagggtgcggttaagtttcttcaggagccccgtgtgactctgagtgttggtgggacccccactcttcctactcctgtttatggtagggatggtggtgattccaccactgatcaaaaaagaaaagttaccccgacatttggtggctcgggacagagtaagcggttccgtgggaaccaaggcagaggtggacgtcagggttactcttacccttagtgcccacattgtaagaaacatcatccgagtgagtgcaaccggaagacatgcttttagtgcggcatggtgggacatttcaagaaagattgaacttaggcaaagaaagaagagcataagctagaggcaaaacccgtacctgctcgggtgtttgctatcactcaa

SEQ ID NO: 174204 - DNA, 636 bp, Cannabis sativa
  modified_base (74)..(74): a, c, t, g, unknown or other
gataatttattatatttacaaaaccctaatacttatttctctttttagagcaccctaatatatatatatatatntatatatatatatttattttcttgttgacaaaacactaatatttattgaaaagaatatattaagaaagaatttctatttattatgatgaaattattacatgaaaatataactattttttgttattacatgaaagatatgttattattactttagcataagcttttggaaagagtagcaaaaatgggcatatacgtgtttgggtaagtgtgtgactgatttcattttctcgggaaaataatgttcaacggaaaatcgagttggaaaatttacctgccttttcctaattcctacctaaattgcttcaagcatagagaaattttagctgaattctattcaaactgtgattgttaattcagattgattaaatcttccatctaaaagattttggctccaaaatcagttgtatttgatttcctaacatgggtaaccgaacccagccaaccaccggagctgacgaagacgaagacctacctgggctcgccaccaccgcctccggccaatcggtgtccatgagtggcagtgtgggttcaccctttagccgtagcgagcagaccatggcta

SEQ ID NO: 174205 - DNA, 580 bp, Cannabis sativa
cttggaagcttatcactgaccttgtcgacactatcaatctcccttggtgccttattggagatatgaataatgtaacttgccaaagtgacaagaaagggggacgtccatatccgaattggctcatcgatgggttccaaaatgtattgagtagctgtaatctcattgacatggagatggaaggatacaagtacacatgggaaagaggaaaaggtactgaaaattgggttgagatcaagcttgatcgagcccttgtcactccaagttggctggacaaatttcctactgcaaagctcaccaaccttgaggtatcaacctcagatcactgtcccattcttcttaccccggttgtacaaactacacaagcaactacccgtaccttcaagttcgaaaatgcctggctccgtgagccaatgtgtagaaagctagttgaagacgtatggctgctgcaccatgattttcctttagcaataaaaataaaaaagtgttctgaagttctcgctgtttggggaaaagaaattactggtagcttcaaaacccgaatttctaagtgtgaaaaaagaataaagcttcttaaaggcag

SEQ ID NO: 174206 - DNA, 908 bp, Cannabis sativa
ataacatgacatgggatgcctttcagactttgttttatgagaagtattataatgagtctattcgggtagcaaaggcagaagagtttatacgattaactcagggcaacatgacagtgacagagtatgctactaagtttgatcgactggcaaaatttgctttagatgaagtggctactcaagctgctagaaaagcaaagtttattcgagggttggatgaacatatcacacgagatgtgattgatgcttctaaacaacctggggttgttcagacttatgctcaaatagttgagttggccctagctgttgagggtgcagaagattagatacaaaagaaaaatattgctagaagagattcatggaagtacacatctggtgttggttctagaaggggtactgaccttgtgaccgcaagaaaagacctaatgaaccattagctttagcccaaaacaaaaggttctagggtaaccaagatttctgtcgtgatgggaacaaaaattgacagacttttcctgaatgtccgaggtgtaaaaggcgccaccagggcgagtgtcaagccagggcctgtttccactgtggtgtagtgggtcacatgaagaggaatttcccacagctactacgactagagcaaaagaaggatgatacacctgctcctgcccgagtatttgctctgacacaagtcgaggcagatgccgacccttctactgtgataggtcagctttatgttgccgatactttattaactattttgattgattatggtgcgacaaattcgtttatttcaagtacaataatttagaaattgaataggcctagtgacgtacttgctagaggctttggaactttattgcctactggagagttggttatctccagcaggtgggtgagatcccttccaatatttgtggaag

SEQ ID NO: 174207 - DNA, 526 bp, Cannabis sativa
gcgcaaataggtcaaactttgtaccaggacatgaattataaatgtcacaaacatatttgaggcatcacaatcagatttagagcactttcacttttgagcacccagagcaccaggtgcccaagacacctaacccctgggttgacatctagggcactttcaatcatcaaacttaataactatccagagaattttttcgccttcatccaaaacgaggaaacatgtgctttcaatggagaattagatcaatctagaggctagaatggggagccagtgcctaggttgacacttgggactgggcccagtgccgaagttgacattttgtcaacctaggccatttctaaggagtttttttaagaagtcttcccagcatattctccatttttttcaaagattaagatacaagtatttccaggaatcaaacacagccatttggtggccagaaactggaccaaacacccaggttaacacctggtgatggccccaacgcccaggttgacaatgtgtcaacctgggctatttccaatca

SEQ ID NO: 174208 - DNA, 547 bp, Cannabis sativa
gaaataatattttgaattttttttgtcggcattgtaaattattccgaattttttaaaaataagtaaattatttgttacagctataataaaaaatgtcatataaaaaaatgataaatactattttagactttatatttgcaatagttattgattgaactatctattttgttaaatgacaaattggatcatgtattttctaaaatagtattaaatagtatgaattaatttttgtcaaaatgaaatttaataataacctaatgtaaaagtgtaatgacaaaactggtatgttttctgtattcgtgtcaggaattatctttaagttggttatattataaaaaaaattattaaaattgagctcagtgttttatttataccattttaaaaattacaaagtttattttatcatttaacaaaataaaaaattcaaaataggattaaccttacaaaaaaattaagatataatttctcaagatccaaaaattaaaaaaaaaacatccttataatattagcattataattcaattttttttttattaacattataatt

SEQ ID NO: 174209 - DNA, 596 bp, Cannabis sativa
  modified_base (442)..(443): a, c, t, g, unknown or other
aaaaaaaaaaaaaaaaaaaaaaaaaaaaaaaaaataggtaaggaaaccgcgctacgcacggttgttgagaaatgatttatttatcttttaaaaattaaagtttgggaaaactctacgatacaattccttaacataagtgtattgatgtatcattacctatttcagtatttaaaaattatctagtctaaatttttttatggttataaatatagttatttaaaacatttgacaaaaattttgagaaattcggaaaaatttaacacgtcaaaaacagtgctcaaagagtatgttgcacgcgtgatttttttattttatacgcgtgtgaaatagacagtttaaacattaatttttatattataaattttttcaaatttctcaaaattttacaagatatcttaaataactataatgtacacgattatgaaaaaatttagactaaaannttcttatagataccgaaacagttaggggtttcatcagtacactcattttgatagggtgtaatatagggtaattctacaatacaccccttaaaaaagatgtactgatgtaccctctacttatttcgacatctaaaagaattttttagtctaatt

SEQ ID NO: 174210 - DNA, 503 bp, Cannabis sativa
ttcatttcatttttaataagttaaatttttgcatgaagttcttatatattttcatttttacactgataaatattttcttagctttgtcatcacatatttttatttgtctttataaatttatattttttattttatctttatctatttttatatatttatttttgacccttgtatatatatttgtttatgcccattttaatcaattttgtttgccacctaatatttgtagctgctccaccgctatttgcaaccttatataattgtaattatttataatcatatgcatggatagaaaaagaaaagaaaaattttcagtttgatttatttatggcacaaatatttcagtttaatttttatttgtaaataaataattaagtttaatttttaacagtaataatgtctaagttgtatttctagaacttccgtaaatacttaacatttaagtatcaagtcaatggccatgtggcagttcctcattagtctaagtcattaaatttttattt

SEQ ID NO: 174211 - DNA, 731 bp, Cannabis sativa
  modified_base (703)..(705): a, c, t, g, unknown or other
caaacgccaagcccgtgctgattttatgcttaagtttccaaatgaacatgtggttgtcatcatagaagattgaattgatctgaaagtaccacatggtgcaggttggactttatacgtagacagagcatcaaacagtgaaggcttaggtggtaggattacgttgacaagtcctaacaagttcaaagtccacgcagtagtaaagtttgtgttatacctgaaattcagttgttcattagagacagacatgtgtcctacaaaaggaatatgaatcaaattaatgaatataataattaaattgcattgttaaatgcgatttaaataactcgtcctaatcaattaaagttgatagaaatgttcaaactcgctgactacttagtcatatgcgagataagaataataactattaaactaatattattgatgagacaatatgtccatctcgagataaatagagtacatgataaaagcttacaagatgagacatcaagaagcttgtaactcattaacccacatgcatgagtagggtgaaaataactacactcaaaccatctcgctttctaagcgacgtagtagtcatctcgcatcatcactacaatatgagagcgctacgagaagaagcatgtctacacttagtatttttcctttagagacatataagaaggataactcattctcagcgagaaactattgggttttatgcccnnnataaaactctttacaatctgattagt

SEQ ID NO: 174212 - DNA, 503 bp, Cannabis sativa
atgaacaatattgtatatacacacgcataaataattcaataagttggataaatattgatgtttcaggaatccatcatccataatttagaagtccacacatactctagaagagttataataaatatatggtcataaataatatacggtgatattttaaaagtggtaataataatcttatgaggtatattgtcaccaaaataattatggatcatatgtgcataatggagagacatattcatgttacactctttttctcttagcaggttttgtcctattgagtttccctgacaaaatttttaacgagacaacttgcaaataattatgaatatgtaatatatatatatatatggcactctttgtttttagctcatattttatcctactagattttcctaataagatttttaacgaggcaattttaaatcatgctagcatacttgtactttatgaaacaaatagaaaatgtgtggaagtgacataattgacataacatattcagaaaa

SEQ ID NO: 174213 - DNA, 719 bp, Cannabis sativa
tttttttttttatttaataataaatatacacacaatcacattgtatataataattaaagataattattttccacaactctatcaatataaattaaaatggtcttatttattttttgttttttttttctttttcttgttaattattttaaagggcacatgtataagtttttttttcaataataataacttatacacacaattacattatatataataattcaaaataattatttttcacaactctattaattaatatgttgggattaaactcacttaacctctcaagtcagtatgttcatctatttgatcatcagatgaatatgaagaaagctgttgcaatttatagcagctggctttaataccaacttaaaaggggacccaccagcaactatatataggggttcctctattctaaaaagagaggtctgagtggagagggttctgatctctaatctccaatgctcatactttagattcagttgagagagaaagagagagagtccaagatcatagtgagtgtgtgtggagggatgtaaaaattgagtatcactcttgaagtgatttccctcaatgtgaggcatttctttgtaattacttgctgtgttgagttgtaatattgggctcaatctattgtgtactgctgactattcctactcaataaagatccactattcatccattattgagttaagttttctttgtcttatttcaattaagtt

SEQ ID NO: 174214 - DNA, 628 bp, Cannabis sativa
agtactcaaccatagtgagtaaggtagtggtaaccaacctgaaggattgaaagagatcccggctcagatcttgataatattctacgacagaaaggaacaagggttagagatctgagcgaaaggagtcattatattccgctgcaactaaggtaaggttttctaaactcttatgtgtttaatttcattattttagagacattaatatttaggatgttaatcaacatacttgttagtaaatctagatctcctggtaaaatatttcgaatagctccatcatccgaagagtccactttcaactcttcttcaacaaccccttttccctttccaagtgataacttggagaataggacgtggaacctcctcgaaaacctctctaatcaaaatatgcccctcaatcggagcttttttcttcttctttcttttcttctttcactctggtatttccaacatggtagtagaagccacgagcataggaacctcttcatcagtcccctcaaacgaatacaatccaaattaaatgaagttctccattatggccaatatagatatgttgcgtgccctgctcgacagctgaagaatgacttgtgccctttactttaaccccaaagttaaagggggacagtagtat

SEQ ID NO: 174215 - DNA, 869 bp, Cannabis sativa
aattcagttgtaggaaaggttgggattgaaattgctagtttgagaatttaattctgttgtacaccagttttattttttataagtatcctttgttatggatagatgtgatgttgaaaatttttaaggaaggatcatcttctctaggatcggtcttcgatctagttattaccaattgaagactcgaaaggaggatattcctaaaacagttttttgtaccgatgacttagtagttgtcttcattaatggtattttgatttcttcgattcaaagaaggcatataagagacatctttggatggtgttgtaacatctctagaagcataggttttatgctaaatataagaaacacgagtattgttgaccgtaaatttgcagtgaaggttagaggttttctgaaactagcaggatactacagaatatttgttggaggttgtctatacccttagcggaattaaatcgaaagaattgaaatagaggttaatcattatcttaatgtttacattgttagtcggtgaggagaaaatgtgatttgatgtgacacttctaaacaaggattagattgtgttcttacacagtttaggacagttgttgcctatatacctagaccattttgaaggagtatgagtagtggtatttcagtcatgatattgaattggcagtaattgttttacattgaaagttgggcacgttatttgtatggtgaaatgtgaagtctatacggatcacaaaagcctcaaatattgtttcttttggaagaatttagataggaggcagtggtgacagttagagttgattgaaattttaatggtgtgattttctaccactttgggaagtaaattagtgatgaatactttaaaccgaagaggtcta

SEQ ID NO: 174216 - DNA, 671 bp, Cannabis sativa
atttagtaacaagcactcgagactagatgttattccagatttacactactacaaaaaccacctttagaggcagtttttaaggcctttcagcatcagttttggcaaaattctctacgaacattgatcagggcgatattgtaaggttgaatacaaccgacgctatatatggcgtaggaaccgacgccatatatacccgaatttcaatttttttaatttatttaaattatatattatttaatttaatttaaatttaagttcaatatttatttttttaataggtaaattaaatattatttaaattaattttaagatgggccaaaatacctaatttcatttcataaaagtaattaaatattatacatatattgtaaattagtccaagtattaacaagttgataaatctaactacaagttaacctaaaaaaataacctagggaagaaaaattcttgggcctttcaacatcaatcgtccaagccatcgtgaatcacggccatcaaccgttatatccactgtcgatgtattggtaagaaaataatttttggattgtattgctacttatctccaaattgttaaaaaaaaaagtaaaaatttatattagcttatatctacattttttgttattatagaaaataatataatcaataattaaaacttacagctttttgatctt

SEQ ID NO: 174217 - DNA, 576 bp, Cannabis sativa
aaaaatgacaaaatttttacatttgtgtagatttagtatttttttttacatttttatggattttttttttacaaaaatatggagtattgtttttctactgtttttgaagaaacgttgttttgacattgctgctacgagaaagcaacatgatttgtttttacaactatacaaaatgttgttttatcgatatttcagaacaatgttattttgatgttgctacgtgaaagtaatatttttctctgaagaaaacaagtgaaaacctataaaaatgtaaataaaaaattcgtaaaaatatatataaaaaaaactatttttaggggtactatgtaaatttttataattatcaggtactagtctaatagtgtctaggggtgtgcataaatcgatccaatctagtgagaactaaccaatctaattacaaccgactgtcaaatattggatatccaattgtgattggatcggattagattctttttttaaatatccaattggattggatcggatgggggatggggggtctaaaaatcaaatacatccaatcaaactaattagtatattcatttagtttggatgagt

SEQ ID NO: 174218 - DNA, 629 bp, Cannabis sativa
catgtttgggttcgtgtcctagtcccaattctcatttcaattccgtgtttggcttcgggtacgggtccgagtcggtcgggtctgagtctttggtccgagttttgtgttgggtctgggtccaagttcaaatcccgatcttggtctgggtttggatccaggtctgagtccgagtccaagtcttgggtacgggtccaggtttgggtctgggtctcgctcaagatccaggtcccacgtttcaaacctagtctgggtatgggtccacgtctgggttcgagtctaggtttgtatctagatccatgtctaagttttagtctgggactgggattgggtcccaggttcaggtccgacatgatacctggaaccagaataagactaggactgggactgtaacaggactcaaacctaaacccaaactcagatcagaacccatacttggacttggacccaaaccaggacttgtgacctgggaactaaaccaagaccgggacctagacccaaactggaacctggacccagaccgggaccaggacctagaccgagacccaaaaaccggggctgaacccaagacccaagaacaagactcggacctagcacccgaaacccacacccagactgggactagcacccga

SEQ ID NO: 174219 - DNA, 500 bp, Cannabis sativa
tatggacattaaatgataaaattgtaccttatgcaatggtcatattttgcaggaaagtcaatcttagtcataaaaatttcctcaaaaccaccaccatctccacatttctcaaagcatttaagtgtcaaagtagcttcatcttgaagctgaaaggttgggtagataatttgtaaaattagattcatgtcttctacagcgtcatgcttagcttctataagctcttttttagcttttagatttaaaaaagtccttctagaggtgtttggataaaaaatgaaaagttcttttttaatttaaaagtccttttagaagaagctaggatttgtagcttctcccaaaaggacttttgagaagctactttaaaaattaaaatagtttatataattcttaatttactaacaaaaaaaaaaaattaatgatatccaaacactttgaaaaatacttttcattaaaaaaagatcttcatataatagttatccaacggtaaaaataagacaaag

SEQ ID NO: 174220 - DNA, 549 bp, Cannabis sativa
ttgtaactttatcaataagagggttgtagaaagcgagcatgttggtagcaacccacaaaaagcttcccgagtgatctcgagttaacaccgcaacatacatcgactcatttcccattttaacgtcacaattaatcttgatcgagtcttctgatggatgggaccaaaggggagcaacaccaataggaagaggagagaataaagaggagccataagcattttttagtttagacattatggatattgagtatgcaataatatgaatatactaatatgtactatgtatgagctattgagtatggattatgggtatggagtacgagtgtgtagaaagtcatctaatccaattacaatcgaccgattcaattctaactaatttaatcaaattggatatctaatcataattggatcaaatcagatgtaaattttgaaaatccaattagattgaatcaattgttggatgggacatccgatccaataaataatcgaaccaatccaattatatttatatatttttaaaatttttaatataattttatatatttaatatat

SEQ ID NO: 174221 - DNA, 516 bp, Cannabis sativa
  modified_base (60)..(70): a, c, t, g, unknown or other
aaaaatcatactaattcaaatataatcgatagttctgtaaaaaaagtgaattgcttaatnnnnnnnnnnntatccaacaaaaataattccagagtaaaattctaattattttatgtaaaaaatttgcaaacatcaaacaatcatcaataaacacatatatcaacatgaatcacatccaaatcatacatacatcgttttaagtccaaatttcttcaaagtaaatcatttaccatggctttgaggccatttgttggaatatattttaccaggacctagatttactaacaagtatgtttttaacatcctaaacataaacttctaaaacaatataaaataaacacgtaaaaggtatgagaaaccttacattggttgcagcagaattaaatgaatccttccactaagacatctaatccttgtatcctttttggagcagagtatgaccaagatctgagcccgacacccctttagttgtttggattcttcacagtcttaagatcggaagagcgtcgtgtaggg

SEQ ID NO: 174222 - DNA, 544 bp, Cannabis sativa
taaagaatcaatagataattagaaagataaagcagtattttaaccaactctaattatgaactaataattagagggtgagctacttatgttgattatatcaaatatcaatggactacaagtaagaattctgtaaatataattctatgtctgtaaatataattctatattgttaaagagtacaatttcatatttacagtggagtaataataaaattaataaaccagattattctattgatgagatttatagtaatcttagatttattggagctttgaaatataggtccatggtccctaagtcgcctctatacaacattgtacacgagaaagttttatttgttgaatgaatttcaagtaagaattaatttctatggaaaataaattcttaagggcaaaataataatttgtgaaattattgttttgattaattatggtgattatgaattgtatagttaatatattttaactatttagttttattggataaaaatttattaattagttaaatataatattattactaaataatattaaagagagaaata

SEQ ID NO: 174223 - DNA, 606 bp, Cannabis sativa
ttttttttttctctgactaggcctgccaacactccctaggcttaggtgtggcttgatcggagtttgtgattttgctactgcgattagtcttgtctatgtgacatatatttttgagtgttttttgtttaggttgatgtgattagtcttgtcactataatgtgattttgttttattttatttcgttgttggttcgtctttttgttctttgatgtctcgccatcaaattactgttagtggttgggagtaacaaattctctgcggttgaagggattgttaagggtacagctacgtaccttgcacaatagttgaatgttcaagctaagaggttgaatgaatttgttgcaacagatttactgttatgtcttttgagcaatggagtaaactaaatataaatgttcttaatgttaattgtgatactgcaatcttttttacacgagtttattttagtttattttgtaaaacgattcgaaaatcaagcagctgattagttgacttatttttttgattctaatcctaattgtgtttctaacaggaaagatgttccgattgggttgcagattgctaataaaattacatgatttattaaaaaaatgtatcacctactct

SEQ ID NO: 174224 - DNA, 632 bp, Cannabis sativa
tgaaaagattttttattcattatttggcctcaagattttcatgttcatgcttttggcctatagacactttattttcaaacagtactattatttagccttaaagccttttatcatggacatatgatcgtcctagctatcttcttatggccttgacatgtaagtatatccaaatttacttttctttatgtcaagccaaagtatgcctgcacttgacttaggggcaagtttagtagcttattctaagcgttgaattttctttgcataagttgtacgtgtttatttcatcgtattaggaaattcatatttagggtgttagattatagaattaataatcaaacatatgtgttagtaaatttagatccttgtaaaataatttccaacactcctctgcatttggttctgttatatattcccatgcttctggtcgtagtacatactcccaatgcatctagtcatagtacatactcccatgtttttgttcatagtatataatctcatgcatctagttgtagtatatactcccatgcatctcggtgtaatacatactctcatgcttttggtcatagcacatactcatatgcctctggtcatagtacatactcttaatccattgtagtacctactccacaatg

SEQ ID NO: 174225 - DNA, 570 bp, Cannabis sativa
caaaactcttcatgacactcggagtcaaaactccaagcagaggcggatttggggagccactatgcataaccggcttaaaatggtctggtggagaatattagcagactgccttctcaccaggggtaagctcatgtttattttcaatctcaatgatacctcttgtcctttatgctctcgacaagtggaatacactttccatatcttttgggagtgcgaagttgctagagcgctttggtttgggagcatctggaatatccgcacctcggaagtaaatgcatctaattgggaggagtggatcgaatggttccacatgggaggtagtaggctagctcgtactgacttcaacatgatactaagtggagctaccatcatttttgaaaaaatctggcaagaacgaaatacccgtgttcatcaaaacacgatcacaccgatacacatcctcctccaaaggatcaatcgaaggctaatggaaatgtgtgaggttcacaatgcgcagcctccaactcacaacaaatggcttcccccccccagcaggatggacaatgtgtaacactgacgtagccataggag

SEQ ID NO: 174226 - DNA, 559 bp, Cannabis sativa
acttttatattaaattatggagctaacttattctgttaaaaatgcctttttcgaaacatttgtatttctttttgcagtacaaaaatctttcaagaatttagagtaggcaggtatttgcttaatgacatctaagaaagggatatttatacttacttgcttgaatacctcaccctgggcaaagttttactcgattcttcaaccgaatctttggaatgtgaactttcatgttgactattttcattttctttcaatgagtctttgttcattttggcatcaggttgaggtatgtaatcaagtttttcaataatttttccagacctaaggatagaaattaattgatttagcttcctcagtaggtctagatgtacttacctcgtactaactctttagattgggaatgggttgattgggaagttttcccttttccctttcaggtagggcagtagcaagcttaaccatttgtgtttcaagctttaacagggattgagaatttgtgtgtaaagcttgttgggtggtttgcatgaactgttgtagggtatcctctaaagatagttttctt

SEQ ID NO: 174227 - DNA, 515 bp, Cannabis sativa
gccctaagatcctgcaaggggaaatgtacctactactcaaattgaaggaggtattaggagacactacttcaaaattagagactacgcgatctaatgggtaaggaccaacaaacgacttcatacttgaaaatactttcaagatgagaggggtgaattgtgccgttactttgcccgatcaccaatagtatgagtacttccctcgagtacatggagaggagttgaaactgagcaactagttcaattctcttcatacttgtgatccaaaaaagactacttttagggaagtagccactacaatgctctaaatgaaaactcccacaacaaatcatcccgagatgatctaaatttcattttggagacttcaccagtgttgccttcacaaccccatgatcaagagacaacaataagacccaagtcaactggagtccaagatcgactcgaaagatcaagagacctgcgtgacctcttgaccaagaaaaggatggtggaaatgggagcttttagaggagacccca

SEQ ID NO: 174228 - DNA, 552 bp, Cannabis sativa
acgagaccggagagataaaatcgtgcgttctcagaaggcccttccaatttccctttatattccaacacgcaaataaagaaactacagttgttagatcacaatagagtatcgtatcaagattaaagggaaaacttcttataacaaatattagcaactaggagtaaccaaacttgtgataactaggagtaaccaagcttgtggtatttcgtttgatccacatgggacaaccagaaaaagtaatgactatgaattagaaccgttattatgttccgtacttgtcggttatctccatgaacagtatattaattaaacttgttattatggtacaattcttatagattttttttttaaaaaaaaaatgtaattgttgtatacaataaaataagacgtgtgataagacatcaataatattttttatacattgaattcaaaaatatgaaatctgcacttagtgtaattaatatgttcaaaatgtgtactattaattagttcatgcatgttttatgtagatagtgtaattaaaataaataattaactgattcaaaaaaaaaa

SEQ ID NO: 174229 - DNA, 638 bp, Cannabis sativa
attaacatgtgtttatttgcataacaggcctttgtgggatgacttgaaccgcatcaaaacgccccttttgatcgttgttggagaaaaagatgagaaattcaagaaaatagctcaagatatgtgcatagctattgatggcagtaagaaaagtggtgacgacaacctgattgatgataatgttatgtgcgaaatggttgagatatctaattgtgggcatgcagttcacctagagaatcctctccctctcatcagtgcattagggcgattcttgcaaagacttgatcgataccgttcaagttcaaactgaaatgattgttcctaggcctccgatcgaatcatattttcatttaatgatttttaacaaatacattaaactttgcccgaaaaagaatgtacgatattatttaatgaatagtaatacttactataataggtaggggtagttatatttaccggtcggtgagggtaagataagatctattcgactaccaaatgtcccttcaactccctacgaataacattaaaatattagaagggaagtttaagtatctatgcttaaaagtagcacaaaaaaaaaaaaaagagaattactattaggcactagtagtgcctaccaccttttcgacatgtcgcgttgc

SEQ ID NO: 174230 - DNA, 518 bp, Cannabis sativa
agatagttagggtgttacacttcttatcggccttggtgtttgcttcagcacagtactatttgacccctttgatgttcttgtcaatcttttccgtggcttccttctttatattcttgatttgggcctccaaagtccgtcaagtggccaaggaaagatctagttggaccgacatagagcttacttctctacaagttcgcttcgcaagaatttccatcttaaataagaaaggaagactcagaaaaaggagtgatagtttatagcaagtaaaaaagataagtaaagtaagaggttaaaattccctaactgtatgctgcctcgcggagttagttagttatacgggattagtactgctgcctattacccactttttggtggtcaattcactcacactaactgctattttctccagcaggtcagcactgaatggcgccaattccctacccaggcgaggcacaagttgtttgttgacgacaggaaggtccattacgagtgcaaagtattggaatttattttaccag

SEQ ID NO: 174231 - DNA, 675 bp, Cannabis sativa
agagtaatcttcaaaggtctcttttgttctcgttctgtttcagcccaaaaatggcgcttatcgcaaggatggaacattacaaaagaagggggtcagggccggccagagggtggggcggccggggcataggtcgcaggccccaccattttggaggcccccgaaaaattaaattgatatatatacacacaaaagaatataatatataacttttagttcaacaaatatcaagaaaaagctatagcacaaatggtaagtaaggaagcattaaatggttgttgaggtgctaggtttgattcattgttgagtccttttttggttattttaaaattttttgtgttttacataatacatataagaacaaatacatagtgaagaattagtttaaatttgtaaggtttattttaattatttatttaaagtaagaatataatattttagaccaaatattatataatgtacaatagtattttaaggtacaaactggtacaaaaattagagaaaatattatatttagtatatttttttatgaaattactctaatataaaaagtgcagtagcatttcaagatacaaactagtaacaaaaaaattaacataattttttatatactattttttttttaacaaaagtgccaaaatatatagtactccgatagagatgttattagtaattaaa

SEQ ID NO: 174232 - DNA, 600 bp, Cannabis sativa
agaaaaatctctcttctattgacttcattggtacatcgaagagaacttttatattcaccaggttgaaactgactgcaagaccatcacagatgctcttgctgccaccaaggacgacatttctctcttcagagatctcattatgcaaatcaagtcttctttagctcactttcctaatgtctccatcacttatgttaagtaatctgttaacacttttatccacaacagggtcgtcttaaggtgatgagagatttagggggaaatttgaaacgaggccttttaatttaataaaagttaaaaataaattttaattaaattttggcacaatattaattttaattcttttatctctatgtaatagatatttgttttgcaacgtaaggtaactcgatcaaagtaatatttaattactaagaacatctatattgaagtgctatatattttagtacatttgaaaaaaaaaaaataatgtgttttaattatatatatttgagtaatttgcggtaaaaatacctaagttttatcccgagtagcagataaatacttaagtcgtatttttggcggtaaaaataccttccatcacacttttggaacttccgtagg

SEQ ID NO: 174233 - DNA, 850 bp, Cannabis sativa
gagccacacaaccaaaaccaaaccaaccttctcactcaagcaaagcgccatcaaaattaactttgatcttatttataacaggtgcaatccaacgctcaagcacacggtccccatcaatcaacggagacaaagaaagaccctttcttttttgagcagatttgtattgatcaagaagagttcttgctgaagcaaccacattcgcagcagtacgactcctttattgccaaacaaagttgttacgggcacgccaaattgaccagctaacaaccgcgacttcctccatctcttcttgcctgccacggctgaacataaccatcaaccgatagcagaatctgtcgttcaaagtgctgcccacttccaccatagttctatgccagcacgcacgagcaaaatcacaccccaccaaagcatcgtagatcgtttcatctgaagcaatacacaaaggacatatagaattaacaggaacatgcctgttcttcagttgaaaacaagtaggaagcgaacccgaagctgccctccatagaaaattactgacttttggtggaaccttcagatttcacagctccttctaaaaattcaaaccaccatcattaggtcgggcccctttcatttcttgcaaatatttataagcactcttgaccgaatactgtccgaggttttcatatttctaactccaacagccatttgtagcagttgcacttagttgaatagatagaatcagctcctgatctcgaacgttaaagagatctttattaatatcctcgtcccaagcacggtcgtccgtcttaaaaagactgctaatatactggttatgaagagcaggatgagttgaagagacaaaactattggt

SEQ ID NO: 174234 - DNA, 589 bp, Cannabis sativa
cgatcttagccacctccacagaaaagagctcatggatgagggctagcttccagctgcatgtagcatgtagcatgacaaagctctaaaatagtagctgcctcactaagcaaccccaacagagagcgaagaaggcttgtaatcatggaacccacttatctttgaatatcgaaattgttttaccattaccaacctaacaaatagccacaagatcaaagagttctttacctcaaagtatattttccacacataattattggtcctaataaaatttgattttgaaggttgaaatgatttattcatagcttttctataattaatattaaatgagaatatgaaggtattttgatctaatgttaaaataagagcatatataacattcctataactattaataaagttttataataataaacatatcatgatgcctaaaatttaaatttctctttctctcttttttctttttggtgaattttattttggatcttgtattttgtaaaaattacagaatagtaccttaaattaattttctgtcaaaacaaaatttaataataactcgatttaaaagtgttatgaaaaaacttgttacatt

SEQ ID NO: 174235 - DNA, 583 bp, Cannabis sativa
ttattattattattattaagagaattttcatataaatatgggaattaagggtatagtttacttttttatagcataaataaattacattatagagttatgggtttttttttcttattattttttttacattttgtgggttttttttatgtcatattttttgtaaaaaaaaatagaaatctcatatttgtaaaacaataataagttttgccggaaaatttatcggcactagaaagtcgccagcaccggaaaaatcacggtcaccgaaaaagtcactggaaagtcaacggaaaagttaacgtcgccgaaaaagtcaacgtaatagtctaggtcgctggaaaagtcaccaaagtaaatgtctcatatataactaaaaatataaccagttatatgaataaaaactaataactcaaactggttataattgaaatataaccggttctgtaacataataaataaatataaataacataaaataacttaaatcagttataattgaaatagaaccggtcctataacagtgttataatgaataaaaacaaataacacgaaagaactcaagctagttataactaaaatagaaccg

SEQ ID NO: 174236 - DNA, 917 bp, Cannabis sativa
cggtttacaagtgtatttcgaagatgatatgctctcggcttactgaggttctcccatcccttttccaaggaaatcaaggagccttcatcaaaaatcgtctgctggcccacaacatcatgatcttccaagacctcctaaagggatacacaaggaagaatgtctcggcgagatgtattttgaagattgatctgagtaaagcttatgatacagttgactggaagtttgtggaagacatgcttaatcagctttgtttcccttctagatttgttaattggataatgacttgtctgaagggaactaccatctcctaatgaatggtagaatacaaggtagattcagaggtaaaaaaggtctccgacaaggtgatcctatgtccccacttctgtttgtgctaacaatggagtacctatctagactgttgagcttctattcagagaaggaaggatttggctatcatcctttgtgcaaacaccttcgtttgacgaatctttgttttgcagatgaccttgttctatttagcaaaggcaacttgaattcagtaaaaataattcaagaacccttttctaaattctgtaatgctacaggattatcagcaaacaaagctaagtcacagatcttctttggtggagtcaaagaagatgtaaagcagaagatcctggagcttgtgcaaatcgaagaggggtcttttcctctgaaatacttaggggtcaacctccgaacagcaaagtggaaggcttcagactgtggtgtaattcttgacaaagttaacaggaatctgaactgttgggcaagcaagaatctctcttttacaggtagagctcaattaattcactcagttctgcttggaattcgtaattactggatgagcatcttcataatcccccaaaaaattgctgaagccatagacaaaagttgtc

SEQ ID NO: 174237 - DNA, 561 bp, Cannabis sativa
taggaatggctattaagttaatagggatattatcttaatgtatataattattacatatatgattataataaaaaaaaaaataagtaactaaagtattttattttataattttgttgcaaacgtattatttttaaccattacgtgtcaacttagaaacacataacgacatattattcgactatgtattaaataagctaaaaaaatatgtcgttatatgtttttgagcaagcacttaacagacttaattggtatttaacaactaaaaaaagtacgattgcaacaaaattgtaaaataaagtacttctaccaccattttttttttttaattaaaatcagatgtataacaattataaatactaaaagagttttgtcacatatatctcaagttaataaaccttgaaaggtttaccctttttcttttattttttctaaatttaaattttagagtaataattaaactcttaggggctgtttggaataggttaatcttagtaagggaatggtaatgtgaaacattaccttgtttgtttagagggtttagccttggaatgttattcccct

SEQ ID NO: 174238 - DNA, 515 bp, Cannabis sativa
aggtggaagtggtcgccttgggatcctcgtaggttgcttgagcagtgaagtagttgagaaacatgtctttggaagcacccaagtaatcaaagttttccttgggattggccttccaaaagtcacaaaaaatctcgagactagctgtctctaaggcattcacctttttccccgagcctcaccacctcaaatttttgtatttaacctcagcctcaagtccctcctccttagccttcttctcatcctccaaccttcgtaaaagagtctgtagaccctctcttttgtcttgaagacccgtaacgtccagagacaaagaagtaatatcaatctcgagctgctcgattaacaacatctcctacaattctctggtcagctcaacaactttggtctcagccactagaagtttcttattgacctctcccaactctatttgcacagccccaagttgaacccgcgcatccttgacatcctttttggccaagtccacttctgttcgcattgtgttggaaatggcaagg

SEQ ID NO: 174239 - DNA, 656 bp, Cannabis sativa
tctagaactaaaaatttgtgcgcaaatttaaattggatcttaattatgctttcacaagtgaattaacgatactaaataataaagaagtaattagaagggtaaaatgataatttgaacaaaactaattacgaaccgaggcaaagagggcaaatcattgaaattgattatacaatggacactacaataaaattcaataaatataattctataattactaagagttcaattttatatatatagtggagtaatcatggaattaataaacaagattatttagttgatgagattcaataaataatcaaatttataagagttaagaattctaggtccatggcccctagatcgccaccttaaaacactatcaaggggtgggataaaaattgtatatgaaagtttagaaaaatctattttgaattgtcaaaatagtaattatttattttgtaatagatattttattttttttcaaattaattaaataggaaaaagacataagttgttaagataaaagacacatcccttgtcttaaccaagacagaggaggcaccacctacactttgtccacacacagtgtaggcaccactattgtagggtgtccctattaattttgtatttttggattaattaattaatttaatagataaatatttgaatttaaa

SEQ ID NO: 174240 - DNA, 999 bp, Cannabis sativa
ctcccatactatgttcccataatcaaaagataagtagagctgagtgaagttaatattggtcacacatatactgattatatgtgatgaccaagtatatctctcctgcaattacataggtttaatccgaatgactaaagtatcgatgactcttcggggactcgcatgttccaagttgtcaatgcacagaatgtttgattatccgatcaagggtgaaggcaaacattcaacgaaataggcctaaaggcccatcctgcgagtacaacaacatagagcccgcgaactcgtgtgtatgaaatatggatggacaacctacgaattatcaagtagcataaattgctgcaattaagtcaagaacaaatgaaattgttctttatttattctttaaacgtttattttgatttaatattgtcatttattgtaaaaactgtctgatttaactatttatgtaatcctaaagaacatttactttttatataaaagggcaatctgaatcaaataaattaagctgaaactattacttaaagtgaattaagcagaccaaactctaactgcaccactataattctcttgtctcttctacgtttctactcttgtttttgtctatttcgtagcttatactttgattactcagtattctaagtgagtactcacgtaactgctagtgagtgttctaattttgtttgaatactcgcaatatttcgtattatcaaaattcctccgacaacagtcacctatctctattaggactgaacattttgaccgagtttgactcggacccggccaacccgttcggacctgacccggtcaacccgtaaaattaaaaaaactcgttctgttcaggagggtcgagtccaaccggtacactttcgagcgggttcgcgggttgtttgtttttggtcactgggttttgggttgaacccgaacccgcccgccaactcggtcacttttcattttttttttaattttttttattacaatatattaaaaataaaaaaaaat

SEQ ID NO: 174241 - DNA, 523 bp, Cannabis sativa
gactgtcattctcttatgctttctttgcctttaattaaaatctgttttgttaaacgatcagcaaaccgtctagcacatgttgttgttaggatgtcacgatccttctcttcatagtatttttgtgtctaatgctccagttggtatgctaaatattttgtactcaatatgttaatttaatgaagttgatatttcataaaaaaaaataccacaaaagaatgtcatatcatatctattatattttttttattattattttattataaagaaaatttatttatttaatatatattaaatgataatataatattattttaataattttaaaagacgtttattgaattattattaaataaaaagtactaaaaataatataaaaaaaataatatgtctttgttgggtaagaaaggttggcggttactgttgtatcaggattgtgggtcggatatataaggctcgatattttcctatttgtacattcttggaggccgagttgggtggcaatccgagttttatatggcgtagt

SEQ ID NO: 174242 - DNA, 768 bp, Cannabis sativa
atcatatatctattttaaaaatatcataactattaaaattctttaaaatctatccggataaatatacacttaaaattatttaattaagctatttaaattcaagtgacacttgttattattacatccttttgtacgttcataagtaaaattgcaagcataatcttaaaattagaagaataatttaaattgatatttactatacatatttggaaatagtatgtattatccaatcatagctataagaataacatagtacatattatactagaatgatttacattgtaatgcttcggataaagccgccttcatttgtttgtctgaggagagaataatagctctaaattcaattacatttgaggagttgatatcactgcatccacataaaattaataactaagaacttctgtctcagcattactttgcttactagtgctaactgaaattcctttcttagtttttattatttttttttttttgacatatttcatcataataggaagagatctatatcttaatttggtgtgaggttcttatggttcttctgtgagttttttaatttatttcaaaccatattgtccatgctgaaattaatactttctcaaaagcttttttttttttaagtaattttgatgcatacaatgacactcctttaaaatttaaattttcttttgggcttgcaagaaaagagaaactcatttgcttccatatacattaggaaaaggaacaccagaaaattacacgtgcattgatatcatttctaaaattaca

SEQ ID NO: 174243 - DNA, 554 bp, Cannabis sativa
gagcacattaaaatctcgagtcaatccttgaaaagtttctatctggataatcgcgatgaaacactgactgttatgattgagtcagctccacaatcaacatcatttccttatacaggtgatctccattttcgtatatcaataatttcgtcgcatcaggactctgatagactcaattgttcttggaatatggtaacactacacgttgacagtgtcgaggctcttatctttccaaaacaattgaaggggatatttgaaaatcgtattcctatggttaattgggagcatattaaagtatttactgaatgtaaagtagaggaagaatcaaaattgagagatacttagtgtatttggcatcataactaaaaaaaaattgttttttttttaaaaaataattaggcgtgtttggtcttgttttataaaaataatttttttaaaaaaaaaaatattacaaaaaacaagaattttataagcaacaaaatgttgttttctattttaaaaaataattcacttttggtcaatattaattttagaaaagtaatttacggtataaatat

SEQ ID NO: 174244 - DNA, 622 bp, Cannabis sativa
tatagcccccacattaatacaactgggtccgtccctggttagggtgtagttattatactttttatttttaatattgatattgatacttttgtgctttatctccatatctcatttattaaattattcttcatcttctaatttttttcttcccaaatttataatagtatcttttatataagtttagtcatatttttcttatgtaagttaggctattaattattttagtatatttattatattgttatcgtttactgtattctgccaatagtggtattttgtcgatttatgatatataatatgatatgctcttcaattagaagtgagattcaatttatgcaagattaattaatttgtgcttttaacatatacatcttccagttgtaattgatgttgtagaattgcaactgtgttttgaattaatattggtattagaataacatttgcataactacatttctaccttaccaaactctatagatggtcatctcccttttagatcatcatttttattcattcacatttctaacagtttttatttactaaggcgccgtttggtaatacttttttaatcagttttctgtttttaaaattgaaaaagtgaaaatatttttcaaaaatatgt

SEQ ID NO: 174245 - DNA, 534 bp, Cannabis sativa
ggtaaaataatttccaacaaaccgcccactctcttgccaaactatgtttttctcccttcgcttttttttttaaaaaataaataaaggaaaactagaaataacaaaatattttccacagatagcccatttaagaaaatctttcaagattaatgacaaaatacaataaataagatatcaaactttaaatggaaacatatcaaaataaattaatggagaataaatattgatacttacgaattaagcacaaatttccttagcccatgattcaagtcaccaatgcctccctctctttgctatttatttatttatttatttttttttaattttgaagaactgaaaataaaacaaaataaaataaaatatgtacaataaatataagaaattctaaaccaagaaatttaatcaaaaatcattacaaatgacaaaaatacatgttatgctttcaaaagagaatacctaattagtatctcaagaccaaaccatacttaatagatgttgaggaaaaaaatatgcatgttactaaaaattgtgaac

SEQ ID NO: 174246 - DNA, 691 bp, Cannabis sativa
tttccttccgatattgcctcagtaaaagtgtgatatctctttcgatgtctattcttttctagcaattctagcactgttagaaagataatttgacgatccatattttctttgaagaaaccttttcctaattcggggttcttactaaaaaatcagtattactcagctaggatatctcgttttaagttttgtttcagaaaaagtatccttagtaaaaactcaatatctctcttttatccattttaaaagatctttatctctttttaaatcttaagaaaagagctatattttatgaaggaagtattgtctgaatcgatgtgtaattatgtttaaaattattatttttgggctgtatccagaaatcggcatgatacaaaattttaaaaaaaccgtttaataaaatatacttaactcctaggttatatccttgttaactaagtgtcaagttaatcttgctaatattctcataacttaggttgataatcctgcaaattatttaacaatgaactttttgttcggtatgcgcctttagtgatcaaattgcagatgttttaacaaaatcttttctaaaagacaagttttactacttcaagaacaaacttcaagtgtttccaccccttttcgcttgaggggatgagaactaacaaattaattagtgttaattagttggtttaggattaatctttattcttta

SEQ ID NO: 174247 - DNA, 626 bp, Cannabis sativa
ttgttgattggaaatttcttagtgtctatgattgtcatagtatgattcatatcactctctctaaaaaaatatatataaaccacgtattaatcaaaattaaagattatagaaaattctgcacttttagatgcatctaggcactttatatctgctttcacatatagaagaattatttaattttttttgtatgattgtgtatattataattatttaagatatattgtaaaattttataaaaattcgaaaaaaaattaacacacctaaaataagattcaaatagtctgttgcaagtgttactcttttgttttatatgcgtgtgaaatagattatctagatattgctttctatatagtaaattattgtaaataattttgtacctaattttaaatatttttaataattttgctattttaaaattttaaatttaaatatatgtttttttattttaatttttaaaatattttattcattaatattaactcaataaatattaataaatttaataaatatatatattttaaataatataattaatatttaaaactgtcgtgagcgagtatattatttcgttatgttatataaattaacaattaacccaagatctatttgtatataacatagaacac

SEQ ID NO: 174248 - DNA, 664 bp, Cannabis sativa
aacactcaacaacattgttaatattatctatcaacaatgcacttcttttatttttgtgttttagcattaatccattgatcaagaacgagtctagccgaccgtaccacttcaaaagttgaacaagttttatcattccacaccaaattattacgaactgaccatattttccaactaataacagatgcatcagcagccactgagaaaattaaatatgtttagtaaccatcaatgagtattacccactgagaaaattaaatgaaaataactcataaatggttattaaacaaatttaattataaatattaattttaaaaatattaaataattagatataataattatcaaatttctcttttattattcgacgttgggggatgagaaattcgaactaggaacctcatgatttttatgagcagaagtgtggaaccactaggctaaacctatgactacaaaatttttatacttaatttagctacgcactaattaattgaaaaattataaaaaaaatatctctttttcacacaatatcaaaaatatatttctatacaaaatatttgagtcaaattcaacttttcttttatcttctttttgccaattttttttttcttaattttttagcggatggaacaaccccaacccatgtaatgtaatttttttttttttt

SEQ ID NO: 174249 - DNA, 713 bp, Cannabis sativa
  modified_base (398)..(398): a, c, t, g, unknown or other
tatgtttgacaaattaataaagtacgaactgatgctactacatcagtattagagtgttgagtataggttggtattatggtcatttgtacttatagtatggattgatgctatcatattagtacgactagagtactaaatataggctgatattatggtcaatcgtactatatcaattacatttgtggctcaattttaaacttgtgagtaggtgtatggacgtctagttacatgtcagttattgtcggaatatgttttaccaggatctagatttactaccatgtatggtatttaacatcctaaacatgaatttctaaaataatgtaaacaaacacatataaaatttcagaaaaccttacagtgggtgcagcggaatattaatgactccttccactcagatntctaacccttgtatcatgtctgtagcagggtatcaccaatatttgagcccgaatgtccttctcttgattctggattcttcatagccttacacactatgattgagataacacatcaagtgggcactcactctatcacttaaggtatgaaaatatgaagaaggaaagagaagggctggttcaaattcaatagaagaagaaggctcgggaaaattttaactgaaggtgaaatttcatcatatttaagtgtgagccatcactatctataggcaaccacttaggtttaggttaggatttattaggcattaaaataatgga

SEQ ID NO: 174250 - DNA, 1004 bp, Cannabis sativa
aaaaaaaaaaattaaaaaagacgaaatatcctggaaagcgattgtccgaacaagactcgacagtccaccatcacctgataagtctctcgcctctgccaggacggccttcccttttcccaacatgggagaagatggtcaagcaggtgaactgggctccctaatacaaattgcatgttcaacgggcctagactgtgctggaagtttcttcctccttttgagcggagtcacctagcctcacgcttcagttgaatcagctcattctccttatgagctccctcagcccgtccaacaccagatttcctcttcctccccttcactggcttaggaatgaaatccttcggatagagcccgtacttcacaaagttgtcctcggaggtcaactgaatgatattccggtcatcccccggcagctaagcaagctcttgagctctatctctaagagcaagagtgaagggagggcggtgatatgtggggatctggtggaaccgagtatgggtggtgcccatgccatccaccatgaagtaatcatcaacaaaacgcccaattttgttgatggccttatccccggtgcccgtcaaccagttgaagtccggttgagagaaatagaagtaccccgacctgccttgcttaggggtggacttcaaatcaaaaaactagctaatttcgttgggagaaggcatatcccacttctgggaggcgtaaaaaacgaagagggcggacagatatttaatgcccttgggagtaaattgggtcgggcaaaggcggaagaagtctaccacattcttaaagtatggatgcaaaggcaacaatgccccttgctgggcatgagcaccccaccatgcgcacattccgtttttagggtttgtggctcgattattgtgggtgggaatgtaatagtccaattcgcccaggtagccatcctagttgagatcctgcaggcgcgcctcagtaaccttggacggagggctcacccacctcacacccaaggtaccttgccttctatg

SEQ ID NO: 174251 - DNA, 606 bp, Cannabis sativa
aattacatttagtatgaatattaagtttctcatttttttttttttgataaaatttaaaagcaaatataaacaaatacacatatagaaacacacacacacatattagaataacacacacatatataaatatacaaatattcatataccttccacaaatttaatattagggtaatttttaatcttatgagttgcaaataattaagaaaaattgtgagataaaagaaaagaaagagaaaattttactaatcttaactatatatacctgaacaatgatgaagatgagtccggcaaaagtggtgggaatgtcgacaacggtggaggtggtgggctcatcgttgcgtggtcgaaacggtgggctagtcgacaatgaacaaagggaggtgaataagggttttgatattgaggatgaagaaggagagatgaatgtttgtggtcaaaaattttggggatgaagagggagacgaagagggagagataaataagaatactgatatatatataaaactattaggagcggaggtccgctggtaataataggatctgcgggtaataattaaaagtataatattttaaatattatttaatgttattagcggcggacttccg

SEQ ID NO: 174252 - DNA, 559 bp, Cannabis sativa
gagcgtttttcctggatttttttgtttgaaaactgaaactatactgaattataaaatcctaagcttctatttatagaagggtaaaacgactaatgtgaaattaaatttattacaaattacatgtgggtaaaaatgtaattacccaatagttgaatttggacctaccatgtgtcactctctcattagttgcgtgtggacacatggcgagaggagagaaagccacatggaaagtggctgggctgaagggcccggaccagacgaagggccacttgtgcgcctggcgcgtgcggagcacacaaggcccaggtggagtcgtgtggctcacgcgcgagtgggctgacgagggggacagaggcgctaacggcctgtttggtgcttctgccgagcgaataggagcctgccacttgttgtggcttgtcgggtggagaggattttgggcccatttggacatttgtctttggggtaggttgaaaaatgcctcttttattaatcaattaactaaatttacctttaattttatatttatttgaaacaaacctttttttatatgtattgtacc

SEQ ID NO: 174253 - DNA, 950 bp, Cannabis sativa
ggtatcgtaactttcttatcaccaaacgggaaatgattctcccgtcttcttccagccttgctttttcttggacgacctgctagttttttccccacaggaccccaactttcatgttgttgatgtgttctaggagaactaaattatcctcgtcaccagcaagattgatggtatcatcgtaagtcttcctccacgtatctttcgaataataagttaagaaaagcatgtacacactcgtattcgttttcaatgtcgcggtacatgcatgaaggtaagggagtttcaataacgtaaacacgccgcaagtgcatgtcctttcaactaggttcacatcaccacctctttcatcgttaggtcccctaccaacgttatacaaattggctccattttgttggacgtgcttgaacattctattttcatgaatttttgccaagtttttttcaaagagcgtggccaaaggggttgtacatttgtctgcatttttgaggcgagcaacgaaccaagattgtagtgtaaacctgataaattctactaaagtagttattggatatttctagaactcttctgtcacattgttgaagcttttggcagtgttgctggtcatgatgttgtatcgatcgcccaaacattaaaggtgagcccacttctcaaaccctatagtctccacatatgcaacaatggcatgattcatctttctaagcttctcaaactctctatcacattcgattttttaccatgagtaagcaacattatatatttggttgtgaaaagcatcagtcttgaacttggagttcacgttcataacaatgtggtgataacatgcatagtggactgctttgggaaaaataagttcaacaacatgatcaatgctttgatgcctatctgacacaaacactaaggtggcgtttggttggaggtaatgaaatggaatgcaatggaaaggaaacaatttt

SEQ ID NO: 174254 - DNA, 637 bp, Cannabis sativa
gtcgttggatacaaatggatatgtgtacgtaaaagaaatgggaaaaataaagttgtgagatataaagtaagacttgtagcacaagatttttctcaaaggtcaggtattgattatgaggagacatattctcatgtggtggatgcaataacattacgatatttggttagcctggctatgagtgaaaaactcgatatgtgattaatggatttagtcacagcttatttatatagatcactagatagtgatatttacatgaaaattcctgaagaatttaagatgcctgatgcatatagttcaagcattaatcgaaaaatgtgctcaattaaaattacaaagatcactgtatggattaaaacaatcaggacactttgaatatttattaaaggaaggacataaaaatgatcctatttgcccatgtgtttttataaaaagttcaagttttgagtttgttatcattgttatttatgttgacgatttgaatattattggaactcttaaaaaaaattagaagttgtggaatatctaaagaaagagtttgaaatgaaagatttagaaaaataaattttgtattggtttacaaattgagcatttaaaatgtagaattttcattcatcagtcaacttatactgaaaagatt

SEQ ID NO: 174255 - DNA, 513 bp, Cannabis sativa
tgtattgaagtgggcaagagaatcaaagcacgaggtgtcgtaacatgtgaaaaaatttactccattatttgtctcaaattcatttcccatagtttaacttgaaagacattcttcataatttttattattattattattattattattattatttgtaaacatgaaggtagattgaacccgattttgaactatatcaataacaagttgatgatccctcaaaaagtttaatttacaacaatttattatttaaattatgaagaatgtcttaatagacttcaaggacacttcatataaaagatttaagaacacttgattaattttaagaggtatataaattataattatatatagctttgatatgtgttacatccattatatatattgtattgtatataaatgagttatattataacctaattaagtggtcaggtttttgcaactaacctccaattttaaaattttggtggtaaaacctcctacactcgtgttctgttagcagtttaacatttccat

SEQ ID NO: 174256 - DNA, 566 bp, Cannabis sativa
taaatattattttaaatgtgaaaatgtttggtattttttttttgcagatttcatgtaaattggatacccaatctgatgactcaatgctgtgatttcattactatagaatttaaattttttgtaaatatttccgtttcagttggtatttatttcaatacttgtgatagaagattcacaatactattttttgtgtttatttctttagtgttgtccttgtatatataattggtgtttattaaatattacttgttttattattgtgtaagaaatactttgagatatatgtattatttacaatagttattatatatatttagactatatttgtttataataagtgaaattgtattaatataaatttaaaattaattaattatataatattttaaaaataaaatatcatttcaatattataaaccgcatgaaaaatcagtaatttctctttttttttaaatatacatataaaaatataatttaatgacatttgtataaatgttagtaatataatgtagtaataattttaaaatgtgactacaattatttaaaatattagaaataatgattta

SEQ ID NO: 174257 - DNA, 633 bp, Cannabis sativa
taaaataatttccaacaccttcccccaacgaggtcgcctggtttatcgacctgaagtctacccccaagcaaggcaggttggggtatttctacttctcccagccaggcttcaagtggttgagcggcacggaccacaagggcatcagcaaaatagggcattttattgatgagtacttcatggtgaaggatccgaacatcacccggacttggtttcaacagatttcgacatatcaccgtcctcccctcacccttgctcttagggatagagctcagaaacttgcgcggttgccggaggaaaacaggaatatcatccagttaacctccgatgataatctggcgaagtatgggctttaccgagaggacttttctcctaagtccgtgccggggaagaaggggaagtctgatgctggccggcctgaacgagctcataaggaggatgagctcattcaacttaagtgggaggctaagttgaaaggaggtgccagggccaaatagtacgctcaggagcccttaaatcctgaagatgaagccgaggctgaggatgaggctaagcaagtgaccccattgaagaggaagaaaaaactcccggccacgcccaggcctgttgaatatgcaattcgcataagggagccca

SEQ ID NO: 174258 - DNA, 559 bp, Cannabis sativa
taattttaatttttgatattaacaataagtaacttataattcttttttttctgtaagtagtgagctaaatcattatttatcattttttattagtatttttaaataattttttttttaaataacttaaactaataaattttaaaagattaatttgcgacataaatatctaagtttaactctcggttgcaaataaatacctaagtttaattttttacggtaataatacataagttatatttatgtaactttgtaggtacctaaccattaaatgttaagtcattattcacgtgtactttcaattaaagattgtcatgtgataatttacttaatacttaatagtcatgtacttacaaaaatttgagttaaatttttaggtattattatcgtcaaaaattaaacaaatatttatgccgtaaattaatcatttaaaaaaaatataatttaaccattattattattatcaaaaatcaaaattaaaattagtatttacctattattttatttttaaataaaatcaaataatagcaatgtccaaacctgtccaataaccgcctgagga

SEQ ID NO: 174259 - DNA, 609 bp, Cannabis sativa
aaaaaaaaaaaaaaaagagatattttttttgtaatgatttaagctctctatttgatgtattttttagtttactgtccaattttcctaaggcgtcccttattcatgcatatcattcggcctttatggctacgcatgaattagttgtgcacgcacttagagtggatggtgagctaatttgaatggaggatcttcgatctcttctttatgatgtactcaacgctaatttttttcctcaatgaaattttattcattgttcaaaaaaaaatattggtataattttttgttttttctttcttttacaggttgcttattccctaattcatgcggaattgcaaagtgtgtggctcttatgatgacattaagttggatttttttttttgctatattgctaatgtaattagtaccggttgcctagcaattacgtaagcatttatttttggctaattaagttttttttttcccgaactttgacatgtaccaaatcatgttcccttaactttttgggccgttaaaaatttcccctgaactattgagattattggatttaaggacttttgtcaaatttttagtaaaaaaattttaacatgaatgaaagttcagggggcatga

SEQ ID NO: 174260 - DNA, 668 bp, Cannabis sativa
aagctctttgtgtagtgataaggctgattgtgtccttgtccatttctttcctccctttatttgtaagcattgttactatttgttggttgtatttatcattattattattatcatcatcattttacctttaatggcagttctgcaacgaatatgcggtacctaaggacaagctagacaacttcaaaaatgtcacagcacaagatattatttgctctcaggttcttgttcaaactttgtatctgtccactttgaaagcatcttttcaagtcaataaactccaatctcttacatcaaatattttgtgatttacattttccagataaatggtggagttatacttagggaggaggatcttgtcgtgtgcaatgttaagattgatttgactcgtggaaggtacaatccatttgaaaagtaaggccctttacctatcccatgccactaaaaaattgaacagcatagattcttctgttactaacttttctcacccctctttgttttttttcttgcacgtctgttccagcatccattttttccaggtatgcatcaattttctgaattatgaatataatatacttctacctcattggaacttggttattatattttctgaagaaacttggttgagtctaggttctgtggatcatattttatcaatctttggacatggt

SEQ ID NO: 174261 - DNA, 539 bp, Cannabis sativa
cagttgggaaggacagagcaagttctgtaagtctttgtcctaacgagcgctgcctcctccaccttagattcgagttagaactctcgaccccctggtcaacctcaagtacctctgcgtgaccaacttttggatctacatcctcacgaggctgtgtggcctccttcacaactctgactctacccattgttgccaccatggcaacataaggatcatgtggaagcgctctacgacatgatagtttttcttctgggcatgactatcagtccagaatcacacaaaaaggagtaaggggacatactaaatgccctttctaaaaaacaaggctgacaagaccaatgggacaacatctgtcacctccccaaatcaacactcaaacttacttgcatagaagagacaagtggaggtgagcaacctgacaaagctacagataagttctagtcaactatacccaagagtaccttccaggtaaatcacattgtacaaggccgagtatctgcaaagtatcctctcaagtacatttacttagacaaatagtgagt

SEQ ID NO: 174262 - DNA, 565 bp, Cannabis sativa
agggatcattggtgatgctagcaggagggtcaactatgagatcgggttcatgatcaatagtcgatggtgacatatgtgtggtgcttgggaggacatgcgtgtctgttggggataaggttgctggtatgcaatattgtgatggatctatggaatgggcttctgtagtatttggaagagatggttgtgtttgtggtgtgggagtatgagttgtggggtctggtagagaaggcggtggtggtatagggaagctattgggagataaattggttgttgatatgggaggagagacatgtttgggaaaaagtgtatcatagggaaagctggtttcattgaattttacggtgcgggcaatatatattcggccagtagggtgcatacatttgtaacctttgtggctggggctatatccaaggaacaagcagtgagctgttcgaaaagccaacttgttggtttggtaagggcgaagtaaaggataacaagagcaaccaaaggttttgaggaaggagtagtcgggtttttggtgaaacaatacctcaaatggatttcgtagttgtaacacaggtgt

SEQ ID NO: 174263 - DNA, 608 bp, Cannabis sativa
ttatctattaattaaaagcttactcaaccatgattcgaacgagtctttgcagtccatgtacatatcaaaccagtcttcaggatctaaaaaccgtgacactctaataccatgttgtaacgccttattcaatagggacgccacgtttgtgcttttgtaaaattcttatttagatacgatataattagaccaaaagtgtgggtaattaaatttttgataattaaagctaagcatgtaaaaacttctttatagtaaaagataattaatgagaactatgggaacctcctgtttaaaaatattacaaactagtttattagtactttttcaacacaaactttgcaattccaaaatactatcaaaattgagcatcctattcactaggccgtgccactgcggctgataagtacattgctgcaacgacctcgaactcatggctgctcaacctttgccttccctttacctccaccacaaagcacccgtgagtcacagagacccagcaagaaaagtgaataaaacaataaccaataataatcattaatttaatctcatatcaacatgtttacacatttacacaatatcataaacacacaatcctggtactttataaagta

SEQ ID NO: 174264 - DNA, 513 bp, Cannabis sativa
tttttttttttttttttcattaaagtacatatttattgttatgaatatttatgttatgtatattatacatatattaggttgatgatatgcacaatgcacgtgtaattcattttttttttaattaagtttaattaggtaatgttaaatgtaatatatgtttaatttttttaattaaataatgtatatttttttaaatttttgaaatgagatttgagattttaatttttaagattttttttaactattgcggcaacattaatttatatatgcctcctatcaataattagtacttcatataatcatgatatatcaagtttgacttaccttataaatatagtttgacttaaaataatttcgattttgatattagaaaataatttatataaattatatttcaaggtaatgtgcctttaaaaaccatgtgaaatgtgtcgattgataaaattataaaaatcattaagtttcactctgcttatatattgatcgaaaaaaaaagaaaataaataaaatagt

SEQ ID NO: 174265 - DNA, 648 bp, Cannabis sativa
ccggaggagaggcgctagagtttccgaccattctcttcctcagagcgtcgatcatctgctgagacatgtctgcacagaacaaaaacggtatggttataagacagccatcaaaaacacaaggcatgaaaatcaagaagctcaagaacagaataaagtaaaatgcgaggtgaccgcccgcacaagactcagaagtccatcatcacctcacattgatcttatctcagacataacgactttcccttttccgaacacgggaggagatggtcgagcatgtgaaatgggctcccttatgcgaattgcatgttcaatagacctaggcaaggccgagagtttcttcttcttcttcagtggagtcacccgctcttcctcagattcatcttagcgattcaggctcctgagcatattgtttggccgtggcaccaccattcaacttagcctcgcgcttaagttgaatgaattcattctccttatgagctcgttcgctccggccaacatcagatttctttttcatccctaccacggacttggtacctcacaagattatcagtggaggtcaactagataatattctggtcttcccccggcaaccgaacaagtttttgagctctatccctaagagcaagagttaggggaggatggtgatatgtc

SEQ ID NO: 174266 - DNA, 796 bp, Cannabis sativa
cgaaatatacaaagaaagaagagaggggagtagtctgatgatggaaacttagattaattctctcttctcatcactttctttataaaagagtatcttagggctagattagatgagattaggctcaaaatagagacatgggctgaaatctaactctagggccaaattcctcatgagctttatagttagatttatgtcactttattttatttaaatgaaaaaccatgtcttttcctattttaccacttatctcttctaattatataaatactaaaattattttagtaattataactaattatcaaataaaatataatttaaatatatttattaattaaacccaataagtgtactaattaacaaataaatccctatttctcttttcttctcaaaaatgtccaaacttggtgaaaattctcaaataagacatagtctatttttgaattctaatttacttattaaatcaattagttgagtatacaagatgatattatccctaacaatgtggggaccatgggcctatgtaacctaacttattaattcctcttaactccactatagattcagaagtgcactcctaattatatagaatgctctatataccaaatattgatgcgatgtgaattatccattgttacaatctaaacaattaatgatcctatatagatggtgtacattgaatagtgacgagattaccgttttaccctttaatatattttatccttaaaagacttacctacttgtaaataatattttgggaaactaatataattactgaaatgaggactcaatcatttat

SEQ ID NO: 174267 - DNA, 553 bp, Cannabis sativa
ataaactcttgctaatataatagtggattaagattttagtattatatatatatatatatatatagctcagaggtatatcttttcaatgaggtatggtatatacaaacaatttatttttattacatatcaaaattactataatggcattatttgttagaaacaaacaataattgtggaggaacaaaaatcacagaaaaatattgaaatgcaggtaaaaagaacatttagatcatttttgtattttatgattccttcatggtatattttttttttttttgaaaataaaatatcaacttcattgaaatttagcattcatcatacaaaagagcttgaagctcatcaggaaaatcaatcctatgaatgctacgatcagtgaaaaatcgttatcgcctagtaacaaagtgggcaacacgatttgctgatcgccttacaaaacgaatactaacactatttaaagctgacaatagacttttacaatctctaataaccaaaccaaaagtagaggacataatttgattactaaaaattgcttgcaccgttaccatactatcag

SEQ ID NO: 174268 - DNA, 571 bp, Cannabis sativa
taaccacacattctcaaacctaaaacgagtacgggtaggagtggaaatgacccgagagttaggagcagtaaagactagcttaagaactctatgatcagacccataaaaacctaagtgatgcaaagaatgctcaggaaaaacatcacaccaagaatcagaagctactgcccaatcaagtctttctcgtatagtcttattagtccaagaaaatttgttcccagaaaaagtgagaggggccatattaaacttgtgaagaaagttatggaaacaatccatgaaaacctgatcaggagaactacccccaaccttatcagtattagaaagatagctattaaaatcaccaatgactaaccaggggagattagcagcattataataaatatcatgcaaaagtttccaagtaatatgcttctgataagtaacaggaaatccatagaaaaaagtaagatgccatatataactactagaaatattaataatacagtctatatgattagtagaatagttaataatatttacattaacatcatccccccacaaaagaagaagtcctcccccaaaatacttccta

SEQ ID NO: 174269 - DNA, 501 bp, Cannabis sativa
taattattttttataactctatcaatataaattaaaaggtcttgttcgttttttttttcttttttcttttttcttgttatttatttataaagggtacataaaagctcattttttttttataataagttatacacacaaccacattgtatataataattcaaaataattatttttcacaactctattgattaatataaattaaaaagtcttatttattttttgtatttaatttttttaaaatggacatataaattttttattcatataataatagattatatgtaataatctatacacacatgacacacatgtcacacaagatgacttttttataacactaaaattaaaagttcacattgatttttatttaccatttcttcttaaaaaaagtatatacttaaaagtttcacattgtattaaatttattaaatacaaaataaatatatatttatatatataaaagtattttgactctaaaatttgaaatgtggttactaaaga

SEQ ID NO: 174270 - DNA, 564 bp, Cannabis sativa
cttttttttttcttcagatttactgttttggttgcttcgggtatgttatctggtggtttctaatttctatgtaggttgctatacggattttggttgcaatttaggttgctccattaatcgctataggattttctgtgtgaaattccataaaaatacaaaaaataaaaaataaaaattattttaaagtgtaaaaataaaaaaaaaatcctatttttatttttattttttacaaaatgtgaacaaaatcctttcatatatattaagttaatattaagtgcaatatatatttaattatatttttagtttttattttaattatatatattttagttgtataattaattttttatgttatttaataaacagtattattttttattaaaacatttttcattttaaatgttatttataaatatatagaaaataatatttaaaagttgttgttaattataattttaatttaatcgcgacacttttaattttataatagtttaaattttttagaaatattatacattttttttaaaaaaaaaattataataacaaaaattacaatttgttgtg

SEQ ID NO: 174271 - DNA, 858 bp, Cannabis sativa
tattttggagctcctaaagttaacatgggcgcagggctacggacccttcccaaagttgactattatgatttgggacacttattccatgattgtttttcttcttgtcacatgtcaaatattgatgtccacatcatcatgattagtttttgggtaaacataagcactacacatcatatgctttaaaatacagattctctaaaatatttaaagaactaagagcacttacattagtttctctactctattctttaaaagacttcactaaaattatacttatttattttaccttaaacttttacattacactatacattagcttctttattttttctcaacattcatttaaatattatttttaacatataaaatacacaataataaataatgaataaaatattgattaaatattatttgaagaatgaaaccacactagcatttttaaaatatgagctaaagtagttcatttattgaagctcattttttgtttttttgttttttttgtttttttttgaaaatagctcattttttgttatttatttacatttctcttctttattttgaggaaaagaacactataactcgtctaatgtgagtgctctaaactaaaaacacgctatattatatgttttaaactcttattctcttattctattttaaagatctgttaaaatatattatttatgttttatatttataaaatattatttattttttttaaatatattttattaattgttaaagaatttattttatttttttaggataattagaatttttaccccttgaactttgatatgtactaaattatgccccttgaacttttaggtcattaaaaatgccccttgaattattgagatt

SEQ ID NO: 174272 - DNA, 680 bp, Cannabis sativa
  modified_base (409)..(416): a, c, t, g, unknown or other
atcaaaaggagaaagtaccaaggggagtaagacagaattcaagtagtccttccattctgggaaggagggttgaagacatggcataaccttagtgatctttcttgcacgaaaaacatcatgcatgtgagagtcacgttgaatttttacgaggaaaacttcaactttcgcgaaggaaggctaaagttgcataaaaattcaagcttagattttgcttgaaaagatcaaaaggagaaagcaccacggggagtaagacagacttcaagcaatccttccattccggaaaggagggttgaagacgtgccatacccccagtgatctttcttgcacaaaaaacattgtccatgcgagagtcgtgttgaatttttacgaggcaaacttcggcttccgcgaaggaaggctgaagttgcannnnnnnncaagcttagactttgcttgaaaggatcaaaaggagaaagcaccacggggagtaagacaaactcaagtagccttccattctgggtaggagggttgaagacgtgccataccccagtgatctttcttgcataaaaaacatcgtgcatgcgagagtcatgttgaatttttatgaggcaagcttcggcttctgctaaggaaggttgaagttgcataaaaattcaagcttagactttgcttgaaaaaattaaagggtggaagcatagatc

SEQ ID NO: 174273 - DNA, 559 bp, Cannabis sativa
  modified_base (507)..(528): a, c, t, g, unknown or other
tttgacagcatcctcatcattgaaggttatgttaggccttcttgcccatggaattttgggattcctttcttcgacggccaggataacttcttcttgctcgtgctgtgctgtttgggcatacctctcccaagctttgcccgaatctctagctatgtgcggacctccaatgataacttacagatgtccgtctagtggtggaggtagcaagtcttggttattgttgttcctctgacactgatcggtcttgacatacttctgtaagtgtgggttatttttctttatcaggaattcaatttctcgcttcagattgttgcattcattggtgtcgtggctgtagtcttcattaaatcgacaaaacttggtcatgtctctcttgctaacatcttccttcatgggcgcggggtacttatacagggctagcaactgagtggccatgcaaacactttctatatccacagtccagattgtaaatgcagtgtactttgcttgattctcccagggatcctnnnnnnnnnnnnnnnnnnnnnntcccttcttcccattcccttgcctattgttg

SEQ ID NO: 174274 - DNA, 591 bp, Cannabis sativa
ctacagcggtagtgatcggaaagctacttgcgtctttagttgtgttgttgaagttctcagcctagttactcgtcattacattataacttacccctaaaaagtacgaccaaacccatctttcaaataaaatttgctcaagatattgagcaaccgcaacattcattgcccgaatattctcaaattctatgtgaacttctaattttgaatacatgtaggcacacgtgtaaatatgattcgtgaagacatcagtcttgaacttatggttggaattcataataatgtggtggtagcatgcaccgtggtgtgcatcagggaacacaatctccaaagcatgaacaatactttgatgcctatccgacacaaaggctaagttctcaatgtcaccgatcgtttctttcaattttctcataaaataggtcaaagaattgtgcttttcactgtcaactacagcgaaagctattaaaaaaatatgactgactgcatccagttctactgcacacaatatttgcccaccatacctagtcttcaagaatgacccatcaatgcatacaacaagtcggaaaaatttaaacccacagatacaaggaccca

SEQ ID NO: 174275 - DNA, 659 bp, Cannabis sativa
gcaaaaacaagagtcgatggagacccgacagaagcgaccagtcatcctgccaagaaaactcaacatactgcaaaatatgttgatcagaatcctatcaatgaagatccagaggatgtgtaatgatgacacgattagaatatggtttagtaatacgattagcattaattattaatattttatgactatgcatgattttatttgttgtgggtcccatttttaagaaatgggcattagagttataatttctcaattctgaagattttattaaactctaagtgtattatttatattatatgtgaaatttataatttttataatttttgctcggtaacggtggaaaatgcgacagatggtcggtagagtcacatgggtgagtttagaaacttttatttagtggggtattcatatattaatattgggagtatcgaggttaggcggggttatatttttggaccactttacccctagacctataagttgcttaagtatgaagtaaggggcaaaattagaatttgcccttttattgagattttatcttgtagtggagttagtagaaacttccaaattttgttttatgctgttcgtatgatctagtttattaagaaaatagaattatggaagttaagagaaaaaccaaagttatctctctctctctctct

SEQ ID NO: 174276 - DNA, 552 bp, Cannabis sativa
  modified_base (482)..(488): a, c, t, g, unknown or other
aatggatctatgcgtgcttgttgaagatgatgatgaagattgagtcaaagagaaataaataaaaaagaataaggaaataaaaaaatattaaagttatttatttatttatttaataatttatttattatttaaatcattttaaattattttttaattgaaataatgagttggcccaataatatttaaacacgtggcatttttatcagcatttaacaggtctgttaaattgagtaccaatggacttacgaaaatagtgaccttagggactattaccgtcaatttttgaggttggggacttatctgtaacaaagtgaatattttggggacttttgccgcaaattccctttatgtaatatgtgatgtatatttgtatgtatatgtgtgtgtatatatgtaatatatgtatatatatttggatgaatttttaatggataatactcattaatgggtattaaaaaaattgatgaggtggcaatttagtnnnnnnntaaagtaggttaccaacaagtttttttcttaaaaaaattatattacttttttaattatagagaa

SEQ ID NO: 174277 - DNA, 858 bp, Cannabis sativa
  modified_base (784)..(800): a, c, t, g, unknown or other
tggtggcgataataatggagaagaaggaaaatgggaattagggtggtgaggattagagtttcaacagagaaaacaaaataaaagaaaattatatttttttctaatttttaaatttttaatatttaaaattatttttaataattagtattacgtggaccactaaaaatttactacgtggacaatctattgtggtagacttttagacatgggtgtaataagcaaaacataagtgaggttcaaagagttttactatcgaaaattggatttgtggagctaagtgtaactaaatgtgtagtttgagtagtatttgttagaattttttatcactaatcatgatattaaatatgtaatatcatgatttaattctatagacaaacatattacatattattataagtatgaaaaacatagatttaaagaatatctttgttgattcaaggagaagaagccaaatagcggaatcgtaccttaatccatagatagtgatgatcttaatccatcttgtagagatgatctttgtggtgatttcgggtaatgatcttccaataaaataagacatggttttctaattttctctcttgatggggggaagattagaatagaattggctcttgtttctttgggaccaggaccactaccaatatataacctcatagctaggttataattttaagtatttctaatttagtccctcaaataaattagaaatatctcttaaggtatctacacatttagtttatgacactttaataccaagtgactcacaattactaaaatgatcacnnnnnnnnnnnnnnnnnttaaaatagcaatacactaatatacatatgagcccatattgaggattttaatccaaca

SEQ ID NO: 174278 - DNA, 525 bp, Cannabis sativa
tgactaaattgcccttggaaagttttaaataatttatttatttaggggcaaaagggtcttttgttgaaaaaccctctcccttttcatttgtcttttgtggggttatatgctgaatatgggggatttattttagtaatattaataattttgatagatattagagaaagagagagagttgtagaaaaacctagaaaaagaaaacacctttctttattctttttcttcctctttcgaatcactctacaaccagccaagattttgttattctcaactaaaattaagggattcttagtagggttgaagctgaaaccaaggtatggggttttgatcttattctctctaagttttctcaattcaagtttgatgttcatgtgtgaattttgggaaattggtagctgtttgctttggaattatttgggatagttttctggtgttaaatagagattgttgttattattttaagctaagaaaggtgggttttttaatgcttgagtcaaaatagagtttatgagctcaagttggagc

SEQ ID NO: 174279 - DNA, 645 bp, Cannabis sativa
ttgatctttcagattttccaccacacacaaggtctagtgtgggctagtaggataatagtgtatatgaagttattgtattctcaacacatgagcaagaacaatcttattgtagtgatggagacaaaaaagtttactgattaatcttttttaggctttcaaaataatatgaaaattcttctattctattctttgtttagaatttgatttatatggtatatttaaataaacacaataaatattttatttaattaattatttaaatttaaatctatttattaaatcatatttaattatttgaataaataatataacagaattttattacatatatttatattttaaaaccaattgagagaatctattaaccacttgagagaatatctcaactacttttcaaattcaaatatttatcttttgaattaattaattaattaacccaaagacaaaactagtgaggacaccctatataggtagcagatgcactatgtttggacacagtacatgtggcgcctccctttgtcttaattaagacaagggtgtgccttttttcatgataacttttgtcttttcccaatttaatcaatttaaaaaataaataattactattttgataatttaaaatagatttttctgaactttcatata

SEQ ID NO: 174280 - DNA, 584 bp, Cannabis sativa
tgtcaactgaaatggagatagaatttgaagatatcactgttttctatgataatcaaagtgccttgcatctcatgaaaattcccacgtttcatgagaggtcaaagcacattgatataaaactacatttcattcgagatataatcaattcaaagcaagttcaagtcaagaagattggaaaaaatgacaaccctgcagacatcttcacaaagagtactacaagtgacaagtttagacattgtctaaacttactcagaatcaactaaagccatgtcttctcatggagacaacctacattggaattagaaagcagtcttcccattggaaatcttttatagaggtattcaagtgatcaaaccaggtggaattgttgaggtttgacctcttgaatttggattcactgtcagttttgacagttagtaacttcccaaactaacttaactgatttgacagttaaggttagttagttgctaaccgtatatatatattgaaggcctcttactttgagttaggttgagacaaaaattcagagagttgagtaaggattgagagagtgttttgagagctgtaattggtctctcttaagt

SEQ ID NO: 174281 - DNA, 558 bp, Cannabis sativa
cgacctaggcccatgagtttttttattgtaatttgtttttgaaacaccaactacttatccttcactttaagaaagcgtaagttgaaaaataacacttttattaattaattactaaaatttacctctaattttatatttagttgaaacatacctctttctatatgtattgtactaaaaattccctgacataagagagtcacatagagggtatcttaaagtgacaggggcaaaattggtactgtatttaaaaaaagaggtaaaaatgaaagacttaaaaaaaaaggataaaaataaaagaggacaatataaaaagagtatagagggtaattttctcataaaataatatttatttgttttccaaaaatagttgtgcgtctatagctccaaaaatggtacttttacaaataagatgttaaagtggtttaaaattcaaaagagagggtttttctgaagggataattttagaaatacacaaaaataataaaaaaaattacaaaaatattattttacggaattttaaatattttttacgtttttttttttatttatttacagaaa

SEQ ID NO: 174282 - DNA, 545 bp, Cannabis sativa
gcctagtgcccaggttaacaatcaattacttggtgtgttgattttgaatgctcaaatgtcaaatctaattcgaccaatgaattaggattggttaaaaacggggtaggagacctcgccctcaagttcaagaactttgaaagtatcaaaacgaaatcctgggagctcaaaaatagggaacccaacgctcaggcatgacaaatggcttagtgcgctgggttctgcttatctgattctcattccgttcgaccgtctgtctaattttttacaataactaagattcgtgaagtcagagaagtcaatttacatcttcgcatttctcatttccagcatgggaaactcacacggaaatgaagaattttgagtcactcatttctgcagaacagtactaacatctctgagaattggtgaccagcttcgccagaacacagtaacagactaagtggtgtcaaaatatcacttagacatcttaaattatatccctttgacgtttttatacttaccgatgggtcatgaatgtcttcagtaaaacagccataactcactca

SEQ ID NO: 174283 - DNA, 504 bp, Cannabis sativa
ttcagagaacaagtgaggcagttgtaaaattagagcgcgaatgctcggggctgaaagtagaaagaagagttatgttgatccaaagtgacaggagattaattttaagattagagatatggtatttttccgggtatcgcctatgaaatgcatcaaatgctttagtaagaaagggaagcttagccaaaggtccattggaccttttgaaatccttgaaagtatagggcaagtagcgtacagattggctaagcccccaacgctggtagctgtacatgatgtgttccatgttttgatgcttcagaattatgtctcagattcatcccatatcttgagttttgaagcattggaactatagtcagatttatcatatgaggaacaactggtgcgagtacttgatagaagagacaaagtcttgagaaacaagaaaattgcactggtgaatgtattatggaaaaacagtaaagtggaagaagcaacctgggaactcgagacggatatgcaacaaaa

SEQ ID NO: 174284 - DNA, 860 bp, Cannabis sativa
  modified_base (835)..(835): a, c, t, g, unknown or other
aaatgctcctctcttagtggcaaagtcccatataaatattgcaatttaatattggtctatttattttaatttaagataattagtattttttttccctataaaattatgtctctgagattgttaaatttaatgacttttgtctaatttcatttaattttactatttcagtaattgtttatgtactaaaccatgctccttagactttgatatctagcaagttatgctcctcgaactttgacgtgtattaaattatgactcctgaactttcatccatgttagaatttttcttactaaaattgaacaaaagttcttaaattcaacaatctcaatagttcaagaggtatttttaacgacctaaaaagttcatgagacataatttgctacatgtcaaagtttagggaaaagaaatcctaattagcctttaatttaataaatattataaggaattgttaatgaattataaagacgtgataccatagagatactaaattaagagtacacccacgtagaagtgaggtgaagcagtcgctcctttagaaaaacttggagatatatttataataaatgagatatttataagcataatagtataatgaataagctaaattgtaaatagactagatgttagactatctctaatggaagatctaaaatgtacgctaaatttgacacaaaaaaatgagtttgtgctatttttagctcattatttacaattgtgctccaatgcacaagatgtaaaataaggaaaaataattaattatattgagagttatttgcggcaaaacctctttaagtggccaggtttttgcaactaacccctaattctaaaattttngtggtaaaacctcctaaacccaagt

SEQ ID NO: 174285 - DNA, 606 bp, Cannabis sativa
  modified_base (495)..(525): a, c, t, g, unknown or other
  modified_base (575)..(581): a, c, t, g, unknown or other
cacaaatttgtcctgaagggctatgatgtcgtgggccatgacagcaggatcgatcacaactttcttccctttgtcctgggcagttttgtgttgcttttttgacgagtcagccacttgcataggagcagcattggtttttctcttctgcgggatgaccagagaagtcattgcggttccacccttaggctttcagttgaatgttggagcctgctttagtaaagtcatttatgtgaaaaggacataagataagaagactcactggacaaaaaaagaaagtgtaaacgtcaaatgcgttacctaatgttagtctcgatgtctgtttagatagtcgtttctctattctttccttttatttcgcaggagactccttgtgtactggttctcgttgaaggttggcattctcgggcatgcatttatgttctcgcaattttgcagttgtgcacaacagtcgccaattgcgatcttgaacaggtaggtgttgggttttgtgccctnnnnnnnnnnnnnnnnnnnnnnnnnnnnnnnactaattaataaagatcataaatcccgttttatgttgcatgattcacatnnnnnnnttcatgattatgtttaatgtataaa

SEQ ID NO: 174286 - DNA, 560 bp, Cannabis sativa
cctagacctcgaacccagaccccaggcccaaacacggaccccaggcccagaccctaccccagacccggacctggccctagaaccgacttaaataacatcaaaaaaagaaaataaaaataaaatttacaaaaaaaacttttgttttctatttttaaaattaaaaaataaaaataattataaaacgcatttttagttttcaaaataaaattttaaaaacaaaatttaattttgtgattaaaaaattttaaaataaaattgttaccaaaaacttcctcaacattcattatcttatatttagttatcctcttctactacgaaatcgacaacatttcttattttttcggaaaataaataaatagatgatcaaagactcagctgttttagtggtgcttagcagatatttttttttttccttgaggagtactaccgtcaacctcttagtcaacttctacacctgaaaaacatatgtcagaatatttttttaaatttttttttcacgggggtgctcgttatgcttacaacatcatccctataaatttttgaaaatttttgaatagttt

SEQ ID NO: 174287 - DNA, 690 bp, Cannabis sativa
aatgttggagggcctgtgcgacaattcctatgccatacttttcaaatagttgaagcagatgaacacagtacttatcttggtcttcctaacactttgggttggaacaaaacatcgattctgggttttctaaaggataaaatcagaaagagaattcagaattgggatggaaaagtactatctcgagctggaaagaaagtactcataaaaacagtagttcaatctctcccaacttttgctatgagtgtctttttcttcttcctatggaggtgactaagaatctggagtggtccattactaaattttggtggcatacaaataactctcaagataaaggtattcattggatgcgttgcgataagatgactaagcataaagactcgggtggattgggatttagagattttcacgactttaatcttgctatgttgggtaaacaaggttggagatttttaactcagccaaataacttgcttagcaaactatacaaagctcggtatttccctttgggtaattttttggaggctagtctaggggataatccaagctttattcagagaagcatttgggaggccaggaatctacttgctgctgggatgagatgggcaattggttcaggtgatagtgttagcattttggggcagccttgtgttgggttttatgccctaaataaaactacatttcaatgtaatc

SEQ ID NO: 174288 - DNA, 589 bp, Cannabis sativa
ctattacattccttacatttataggttcccttaatttttgaggcttatgttcacgtgtcatgtccatatttaatgctcaaaatatgggcataacaatttttctttcatatttatttcatttaagaaactttctatatttttcatgaaataccatttttctattctaattatttaaataccaattttatcgatttaataattataaaacaaaattactatttaaatatatttattaattagacccgcaaaatgtcttaattaagaaataaaatatctcttttactttcttcttaaatttgtcattctttagtaaaattcataaataagacataattttctttaaaatcctaattaatttactaaaccaattaattgagtctacaagacaatattttctcagataatatggggaccatagacctatgtaaccaagctcctaataagtagatctaaaatttaccaagtaaatttcctcacttattaattcctctagactccactattgatttagaatatcactcttgattacatagaacactctacataccaaatatacatacgctataattatctattgtttcaatcacaa

SEQ ID NO: 174289 - DNA, 966 bp, Cannabis sativa
ccaacacctctgccagcttttccttccattctttgtgttgttgaatagatatagaatctctaccccatttggaatttcgaatttgactcttacaatcacttattctctttcggaaattcccagttatgtcccgaccccatcttcccaagacttccccacaatgatgaattttctcttgaatatgaactaaacccgaaccccgccaacaaccctcaacaagctgctcacataaaggttctcgaatgcaagcattttcaaaacgaaaggaacgaaaagagacaaaaggagtgttacctttaaggattagcaacaatgggcagtggtcacttgttgagaactccagattgagtagagacgattgtggaaacagagataaccaagagttggtaaccagagctttgtcgagcctttcttcaatccactcattactatttcttcctttctcccaagtgaacgggtaaccgacaagaggcaggtccatcaagttgcagtcgtccaaagccttagtaaaaccctcaatgagccgatcggggtacttccttcctcctttcttctcaaagtgagaccccaaattgttcatatcacccaacagacaccaagggagatgactgtcgtttttaagtgaacagaaaaggtcccaggcctgaaaacgaagctctcttttcggctctccataaattccagtaaaacgccaaggaggcagccccaccatttgcaccgtagcatcaatatgatgaaaggagaacccttgaataacaacttcactcgtatctttccaaagcagggcaagaccaccactgtgtccacgagcttccaccacaaaacaactttcaaatcccagatgggctctaatattttccaaactagacttattacataaagtttcacaaagaaataacaaactgggcttcttttgagacacaaggtcccttaagaattgtttggcccgcaggttcccaagcccac

SEQ ID NO: 174290 - DNA, 647 bp, Cannabis sativa
tcagtccttattaatggtgaagtcagcggccaaattcagcctaaatgtgggattcgtcaaggagaccctctctcgccttacatgtttcttctttgctcggaaggtctatcttgccctatccaagtagcggagatggctgataggattcacaggcttaagtttggaaaagagggtataaaattatcccatctcttcttcgcagatgatagtttcatcttcctgacgcatctccatcagagtgtagaaagttgaaaactatccttgatgaatattccttgctctcgggtcaaaaaataaacttcacaaagtcggaattgtgtgtgggcaacaagattaaaaaagaggatggtgagtatcttgcggctgagattggagtcaaattagtggaatgccacacaaagtacttggggatgctggcaacaattggaaaaaggaaaaagaaagtttttgaatccatacgtactaagattagagccaaactacaaggatggaaagctagtctattctctcaagcgggaagggaaatacttctcaaagaaataatctaagctatacctacttatattatgagttgtttctgtcttcctaaggaattaataaaggatattcatgcaatgatggcaagattttggtggggctcctcggac

SEQ ID NO: 174291 - DNA, 625 bp, Cannabis sativa
aaatactcaagtttaatttttggtggcaatattaatacttaagttatatttctagaactatgtaggtacctgattattaaatattaagtaaattgccacatggctttccttaattggtccaagtcatgcatttttaatttttttttaaaaaaaataatttatatataccaataagaaaatgacacgtgtatactgatttgacatttaatgttcaggtacctacagaattttagaaatataacttaggttttattaccgccaaaaattaaacttgggtatttatttgtaactgagaattaaatttaaatatttatgccacaaattattcttacttaatactgttttcaaaattttttatttacaaaaatattttgtagttacaaaataaagtgaaactaggactagacagacatgtgaaaatgactactttagtgcatgcaagtcggaacaacaataaaataagttctctcacacaaatctataactacaaaaaaactaggctaattagtagttttttctcctaaactttgacttgcagtaaatcgtgctccctgaacttttttggccgttaaaaattccccccgaagtattgagattgttaagtttaaggacttttgtctaattt

SEQ ID NO: 174292 - DNA, 540 bp, Cannabis sativa
acagatttgagctttggtttcatggtctttttttcacttagttttcatccagcactgaattaagtttgagctttactttaatacgcaaataatagattgtgaattttctctgaagtttgaccattacctttgatattcaaatagatcgtaaagggcatcgatgcagtcacaagagaacagttggtgcgtacaatggcactccttggacttggaaatgctacccctatcttcagtatggcccctactttcggaccattcaaaccggcagggcttctaccaacagtaatcgaagaagacaaagttatattatgaccaatttgtttgtatcaaaggttgtcttattggagtttattgcagaaatctgagaagggtctgtagccaaaaggtttgagattgctgccaaggttgtgtaaggaggcacaactctgaaagtaatgaaaggttgacatgttctgtttagatcattgcagagtagccaagagaagaggttgagttatcctttttttcacattcagttgtgtcttctctcacatatggctg

SEQ ID NO: 174293 - DNA, 655 bp, Cannabis sativa
gggcataaaacccaacaggcttttactactcggatgcaaaaaaataatgcacaatttcaacaacctactcatgttgcaccatatagtgaaaagccaactactactgagctgattgaaatgttagcagctaattccttgcagtttcagcaaagctgtcatgagattgtgtagagcacccgaaattctttacaaaagttagagaatcttgcggagtcgatggaaacatctatgagtgagtatgaaattgaatgtataaactctatgccttcacaagtagagagtaatccaataaagaatgtcagtggcatcaccatccaaagtggtacacagcttgaatcattaccacaccaagaagttaatgatttgattccaagtcatgaagtcaaaaattcatcccttgaagagtcatctccaccaaaggctgaatctcctacgttagttggtccaccatcactgaaaaagccatacaatccaatattaccaacttatgtctctcctccaccttttccaagtagattgaaaaaatccaagaaagaggagcccatcaaggagatccctgagactcttaccaaaattgaggtaaaaattccatgtcttgaggaaatcaaagaagagcctccttgtgctaacattcttaaggagttgtgtccaaatg

SEQ ID NO: 174294 - DNA, 636 bp, Cannabis sativa
gctgcaaattctaactccattagacaagaggatgctttctcacacaaagcattagcagaatcacagccgcttggtgctagctcacaacaccgtccctacatgatcacgagccataacaacgtccctacatgttcacgagccactactgtcagtattattttctcctccctaattgtcacattgcacttaattttggtccagtctacatgcggaggagtcctttcaatggcaacatggttttgaatgtcttttttttaagttactgcgattagtcttgtttctgtgacatgattttgttttgttttatttcgttgttggttcgccttctttgttctttgatgactcactatcaaatcactgttagtggttagaaataataagttctctgcggttgaaggagttgttaatgatgcagttatgtacttgcataatgattgagtactcaagtgaatgggttgaatgaacctgttgtaacaatttatactgttgtgtcttttgaacagtgaaggagattgaatatatgcgttcttaaggttaattatgctgctattatctttttctttaattttttttggcaaataatctcgaaattaggcagctgattagttgacccgtttttctgattctaattcttat

SEQ ID NO: 174295 - DNA, 657 bp, Cannabis sativa
  modified_base (630)..(631): a, c, t, g, unknown or other
ttgtagttcagaatacggtattttcaaatttgaatataagaattttgctagatgacagttttaggaattctttgctatttgaaaatttggaaaaattcctaggtataaccttttatggaattttgagatgtgtgttttataccattttacggtatcgtgactgcgcttagtcttagcaactaagttgactacatatcctcttataggaatcaagtcaaacgtagtttcaagaatgttaaaagattttgtatcttcaataactttgtggagaattaacttactttgatattttgaggtaaatgaccttacttgggatttttgaggtgtatgacctcatttagaatttttataagggttaatgaccccatttgaattttgttgaggtgaatgacctctttgagaattttagaaattgtgattgtacctaattttggcaattaggttgcctacgtatccttttaaaaggaatcaaatcgaacgcagttcatagatgttcaaagatttttgatcttgtattctttagagacattgagtttattttggattaaaactctttctttagtctcgctttagcgaattttgggttcgtttggtatgccgtattatatcgtattgtattgtatagtattnnattaaattgtattttatgcaatattt

SEQ ID NO: 174296 - DNA, 841 bp, Cannabis sativa
  modified_base (311)..(338): a, c, t, g, unknown or other
gctagacccgaatctaaattccccgacgaccctggcactgaacccgacctctgactcgaacttgaatctgacctcagaccaagacccaacttaaataaaatcataaaataaatatataaataaaatttatagaacacactttttttttctgtttttaaaattataaaacatgtttttaaaaaatattttcatttttttcaaattttaaaatagagatttaaaattagaaaacaaaagtgttaccaaacgacacctaaatatctaaattgctttggcattggaataagttttatctattattattattattnnnnnnnnnnnnnnnnnnnnnnnnnnnnttattattattattattattcttggaaagttatctgttttctgtttcagataggtaacatatcaattcagaagaagtctcgtgaaatgatagttgccatccagaagggagttcccaattgactatcatgtccacgccagatgtagccctcagaaagctagccttcctctaaaaaggagttctggatggctagttgttcctcctggaaaggagtcccggatagtcgactttagttggctctttcctatcctggaagttccttcagcaagtaccttggtccatgattctagaagctctcatacatgctcccggatgcgctcttacttatgctgacatggagatctcgctcataggagagttggttaagttagttattgcctaactaacttaacaacctaagttcttgctgccaccaactttaagatcttgatcctaatcctttatgtactaccaacaaatatcatttcaaaaagaacgatcagattgagttgagagagagagaga

SEQ ID NO: 174297 - DNA, 625 bp, Cannabis sativa
ctattgtggttgaggcccaaggtcatagtgggggtattgcacttttgtggaagcataaagaggaggttcaacttatagactactctagtaaacatattaatgttaaaatatgcattactgggcagcctatatggagattagtagggatgtatggtgaagctaatagaagtctgaggcataatacatggagacttataagacaacatgctcaagatactcgatggccatgggtcataattggggatttaaataatgtcttaagtcaagaagataagcatggtggaagaccatatccaactagtctcatacaaggtttcaataaagttgtgcaagattgtgacttagttgatatggatttaattggccattcctttacttgggaaaaatgccgtgggacttcaagatgggtggaggttcgattagatagagcagttgtgtctaagaattggttagatgaatttaattgttcaaagctctataatctgaatttttcttcttctaatcattgtccaattttgttggagccaacggtagagaaaatgcacactgggccgaagcaattcaagtttgaaaatgcatggctccgcgagccactttgtcagcaggtggtaaaagatgtttggga

SEQ ID NO: 174298 - DNA, 605 bp, Cannabis sativa
  modified_base (207)..(210): a, c, t, g, unknown or other
tatagcaaagtaacaaaacaaagaagaaaaattcaaagtaatataaaattatcaaaatcagaaaattgaatgtacattcattttaaaaaacttagtaatatgaattattagcatttatgcacaactattaatccatcaagtaattcataacagaaatagggtgtaaatctacaactatttatgctgaaataataataataataatannnntaataataataataaatattactaagtgtgttttaataataataataaacaagtatttcagaagaatacctatattgtaacacaactattgataggatttccgtatcaataccaaaataatgtcgaaaattgcaacaaaccgaaaagtaaaacaaaaaaaaaatccaaaaagttgcaaaaaaaaaataataataataataaatcacaaaaagttatgtcttctcattactctgaataattccaaccattacaacaatcctaaatggcatgaccattcaaattataaagaatttcaatataaaagtcaataacatacacaatattttacaacaaatttaataatataaacagcagaagtggtaatttcatggaagcaatgttggaaattattttac

SEQ ID NO: 174299 - DNA, 542 bp, Cannabis sativa
ttagattgtattaacatgagaacaaagaacaattctctctctgaagttcttctttcaatcccttttcagtgaagctagatcactatttatagggccttactgcatgagggaaggtttcccttttgcttacaatgtataaaataggaaggaatattcattacataattaaaatacacaaaataggaaatttgaacaggtggccttattcctcgaactcaatcccatgattgcagggattgtcttagtgcttggacatcacgagatcattttgaagtagctaagtcctgacaagtagtctggaaagtcaaacttcctcctgcttggataacctaccttccaccatgctcagataacaagcagatgtataatatgaagtctattcgggacatccatttccatccagatgcaaataatgcaggacacgtgtcacttgtgtattctgccacgtcatagtgtaaaaaatgagatacatttgcccccaagtctctgcgggacttatgtggtcgcacgtggacttaactcggtctagatccttatctgaa

SEQ ID NO: 174300 - DNA, 580 bp, Cannabis sativa
taatgtacattgggttcaatgtaggtaatgatgaaaaatgctttgatttagaggagggaaattaaaggccatctcttcgacttcctagccatcagatcgattcgtaatttttgttggggcaatctaggtcgttgatttcaagtcgttcaattcgatcttggctataaatagacgtaaagccactcatcttcatttccaccattttgagctttaaaacttctcttgctttcaagaacttacaccataacttttcttctagaaaccagatagaaaaatctccaccctttctgacatgctcactaggggatcaacgagagctttgaattttttatttattgtcttcttcgaattggaatatgctatttcctagacgcactgaccctcgatctctacccaacccacccccagttaaatgaggagtttgacgttcaagtgggttgtgaccaagttatcaatcggacaggaagcttttgggccactctcaacaactatctctctccttcaaattgcatcacaagtaagtgctctagattttgtcattttttttttattttatgctaggataaaaaatcatattttt

SEQ ID NO: 174301 - DNA, 621 bp, Cannabis sativa
  modified_base (407)..(407): a, c, t, g, unknown or other
gtgtaccatatataattaaactatgtatggaaatggaataatatttaaagtgtagaactcacactttataataatgaaaattatgagacgatgtgacattttctttttcttttttttttaaataatttatgttttcaaatttatagatttttctaatttaatttaccattatattttctcttttttagcaatttttatatttttattatagcatatttactattaagcaataagaattaatggtaaggaaattacatttgtttatttaatttattaaatttaagaaagggagagtttgattaaataagagagagaaaaaaaaaacttgattaaataatggagaaaagaagggagaacgtactgttaagcatttatatagattatgaactatccaaacacacattaancattattgctcataatcattaaatccaagatcgatactttatttagagcatcaaatatgataaacacatacctcccatattggcatttttcattgttgctatgacaccaaaatccttctttgtatctccaagatggtagaagatgagcttatgaaagcaaaccctttttcttatcaccacacacacacactctactcatactaaacacatatta

SEQ ID NO: 174302 - DNA, 594 bp, Cannabis sativa
gaatcgcatgttcaacaggcctgaacgagaccggtgtttcttcttcctcttcactagagtcacctactcttcctcagcttcatcttcaggattcaaaggctcctaagcatactgcttggcccttgcacctctcttcaacctagctttgcgcttaagttgaatgagttcattctcttgatgagctcgttcggtctggccagcaccacaattcctcttcttccctgtcacggacttaggcataaagtcctcgagatagagcccgcacctcacaaaggtatcctcggaggtcaactggataatattttggtcttcccccggaggccgggcatgtttttgagctctatccttaagagcaagagtgaggggagggcagtgatatgtcggaatctactggaaccgagtacgggtaatgcccgcgtccttaacaatgaagtactaatcaacaaaatgccctatcttccttatggccttgtcgttcgtgctttgtcacccacttgaagcctggttgtgagaaatagaagtaccccgacctgccttgcttcggggtggacttcaaatcaaagaaccaggcaacttcgtgaggagaaggagtac

SEQ ID NO: 174303 - DNA, 1013 bp, Cannabis sativa
ttatggcatgggctcacatgattaagtaacgtgatgtatgtgagtgccaggttatgttacatgctttcctgattaggcaatacaatgtatgaaaggttatggcatgggctcacctaataaagagacgcgatgtatgtgagtgccaagttatggcacaagctttcctgattaggtgatacggtatatggatgtcagctcataacatgggttcacctgattaggtgatacaatatatgggtgccaggttatggcacgagcttgcctaattaggcaatgcagtatatgtgagtatcaagttatggcacatactttcctgattaggcaatatagcatcgacttgcttgattagacaatgtgatataatgaagatggttactttatgaggtaatggatacaatttatattattaaatgagtactggtatatcattaaatgtttatagtaatgttaattttgaatgaatgtttgtattgacttggatttatgcatgagagtaatgtatgaatattgattaaaaatactttattaataaataaaggtgacttctattattagcacaatgattttatattactgaatatctttatattgacgtttatttgaacagatattagtagtgatttggatttcatcttatgagtaatgtgtaatcgtttgattctgattgtctgagtataaatgatgatatttgaataataaattatatgattgttattatttctttttttgccgagtccttgtgactcatgggtgctatgttgtgtaggtaataggtagagatgtttggacaaccatgaatcaggaatcttttccaacaaatgtacatatcagcttatttggcaagtggtgctgagttattaggaactacatttttaatgttctaaacttttaaatgtattttataataatattataaacgcatgtcttgtaatattttaaataaggaatccccaacagtaaaaagatacgccataatttaataatttaaattagttggtaaattttttattaaa

SEQ ID NO: 174304 - DNA, 709 bp, Cannabis sativa
atgtgcaactaatgtaagtgaatatattgtctaattatatgttgtgatgttatttataaaattataacaaaacttataagttctcgattgagaactgtactgctagacctaattttttagaatcagagtggatttatgcaggaagatatattgtctacaacattatagtatgccaaaatcttgtgagacatggaagagctaattccaagcctaattgcatgattaagctggacttaaaaaagggatatgttacaatagaataagagtttattgaagtactacaagattttacgtttcctcaaccattcaaattgtaataatttgtataaaactctcaagtttggcctaatgataaatgagtcactgcatggatattttgaggcttaaagagatttgcggcaaggagatctaatgtcccctcttctctttattattggcatagagtacttatcgagaatcatggttagagttcgggtgagaaaagatttcaagtatcatgagagatgcagaagcctcaaacttattcatttatattttgcagatatggtgtgcttctgttttgtcatggtaatttcaaatccatatacaggctattattgttagggtttatgccttgataaacttgtaaagatatttttgattataaataagagttgaatattttgatatatggatgaatgttaatttattaatatttaatattgaataa

SEQ ID NO: 174305 - DNA, 670 bp, Cannabis sativa
atgtggctatgtaataaaatttttcgtttaacgagatttttaattttctacgttaactttaacataatatctcaattacttaacaaaatattctttattaattttataatattgttatatatatttaaaaataaaaattatatgtagatattttatgtaagaaaattaatttaattatatatatctttaaaaataaaaattacatctatatataaaatatatatatatttaaaccttaatttcatgacaaccttttgttttaaaaatgattaaaaatatgactttgtttctaataatttgtacactttattatgaccacactctcctaactacaaattaataatattgtttctatcactattattattttttaaaaatatatgtttggacataatatataaaatgtattttgaaagtaatttattctttaattaaacttaattttatcaaaatattttctaatataatccttatatatagagatatcaatataaaatacataaaacaattaaattcattcttttatatatataatcacatctaaatagcacactaatgtaagtgcaatagctaaaaaaatttttcaaagactaaaatctcaaatcttattttaaaaattatataaaaaaaaaatatattatttaattaaaaaaaattgaacatacatgta

SEQ ID NO: 174306 - DNA, 580 bp, Cannabis sativa
gcttcatatttattaattgttgttacttggtcatcacactacaataaaaggcaaaattcgcgacggtcccaaaaacgcttttttttggggcccgtcgctaaaaaatttatgtaagtgttaaaaaccgttgcctataatttattataggcaacaatttaacactcgtataaagaggcatcttagaatttgtttttcttggaacagagttagtaaaattgacatcatagtgattataaatagaaatggaaatatgtgttggctaagctgaaagatccataaaaaaaaaaaatacaaggagcactagagatttatagccacatatattttactaattaatatataattttttctattttgttttgcagggtaagagcaatctgtacacaaatgacgagatgaatcttccgcgtgatcagtggattaaatacgtccgagcacaggcagggcgacaagggctattatgataattagtgtttattttttgtttatactttacactataaccaactacaatcatataactaaagattaattaatatttatactttatgtttgatatgtttgagtacgtagtttgtat

SEQ ID NO: 174307 - DNA, 699 bp, Cannabis sativa
  modified_base (641)..(659): a, c, t, g, unknown or other
atgaaaaattaaagggtaaattgtagtataaatacccaatgttttagattttatacacttaaatactttatctttattttggaggcaaaaatatctaatgttataattcttttacatctgttactaccacttctgttaactcataaatatagacacatggagggttcagatacattacatttatttttttattttaaaacttaatattcttaatatcagaactaaatgctacttgtttttagaaaaaaaaaaaactagttcccataataattttcacattgatattgacacttcaattcgataatcatatttccatatactgcattggtactcaactatggtattgcatctctcttatttttttttaaaacaagtagaatttagtttttgatattaagaatattaaattttaaaataataaataaatgtaatgtatctggaccctccacgtgttcatatttatgagttaacggaggtagtaacggtgtaagagaattgtaacattaagtatttttgtctctaaaaataaataaagtatttaagtatataaaatttaaaatattaagtatttataccacaatttaactaaaattaaatttcccatgtatatgccaactcttttagggctcgtttggaacgcnnnnnnnnnnnnnnnnnnnttgtattgtattatattaaattgtattttatgcaatattt

SEQ ID NO: 174308 - DNA, 551 bp, Cannabis sativa
ggaaggagcccagtttttatcaaaccggtagtggcaaactgatgccgaatgaccatatttcaggcatatttgacggattaatcgagcctggggtggtatgtagggatgatttgtacctctgcccatggttcttgcattaaattgagaggcatttcctcgagcagctggtgggggaaagcgagaatggttggatcttgagtcaccaagtgcaagatttgcttgcattttaatagagagatcagtcatggcattatgatgctccaaacgacattcatgagacatgaggagggcttgaacttcttcaattgataaagaatcactacgggaagttatacccgataccacagggtcaaaggtccaagaccgttgagaagttgaagaacaatatcttgggagcttaaagatgatccagcaatggccaaagaatctgcaagagattggactttgtcaatgtaatcagaaattgacaaattacctttctgaacatgggagaattgtcctttgagctgcaagagacacgcacgagattggctagcaaacttctgttcaag

SEQ ID NO: 174309 - DNA, 829 bp, Cannabis sativa
tcagaaccggtcgaccggttctgaactgggaacagcaatttgatccccttcaattcaaaccaagcccaaactcttcaaaactttccagaacacctgcctataccttaataagttcaaaccaagcaataaaacaccataatcaactcaaaacttaaaaacaccattggagactcaagatgaacattcaaacctccaatcttgcataaatcatacaacacctaccattaaagcttagaaccatcaaaagaaacctaaactagattttaacaatcacaaataaacaatcctcaacccacagcaccaaaaacccaacccttgcatcaaaactaataaaaacaaacaaagaaatcaaagggaaagaaagctagggtaaaataccttgggttgaagcttcacaaatcaactagaattacacaaaattgcttggagagagttggattctcagctggttccttggggttcgaaagagagggagagaaagacttagaaatttctaggttgcttttgactaaattcctttttcttgattttattttatcccttatattaattaaaattaaacataatactttactaaaaagatatatattcagccccccaaaagtcataaaatccaaataataaaagcaagaaaagacctatttacccctaactaaattaaaaaataaatattaattaccaagggtaaactagtcatttccaaatcccgaaaatcccataccgctaaagcctaagaaagataccccgaataaattctaaattatataaaatgcgactctctataggcccaacgtcgctttccacggcttccaaacacaatcacagaaat

SEQ ID NO: 174310 - DNA, 863 bp, Cannabis sativa
  modified_base (475)..(481): a, c, t, g, unknown or other
  modified_base (714)..(725): a, c, t, g, unknown or other
aattttacaattaaatagcttaattgtaaaaataattaagctaagggacttatataaataaaaaaattatgtataaattttaattgctcaaataggtcttcttaaatatttatttaattacttaaaaaatagttaattataattaattaactctaaaaattaaatttttatttattggtaacctgctattataggtaaaaaaaaatgttaccatatggttacaataaaaatataatcattgaatagtcacccattatattatatatttacattttaaatatgccttattttgttttgtttactttttaatttcatagattttatttaaaaaaaaaacaatgtgcattatttcaatcatcactttataaaatttgacacaaaaattgatataatttgttagaatttggagataagatgaatggggttctatctcaaaactaatttgtaatggaaggagtagcccattcatcttatnnnnnnnaatttatttccacacattagtaatgtaggactaactctaatacaccctcctcacgtttggacctaaaaagtgtgggtataacgaacgatctttaagagaccacaggaccgaacgtgacatttgaaagaatcccacaaagccaaacatcaggaaatttgtgagtgtacacgtcgggaaatttgtggattttgaaacaggtcaaagacccaacacttgaaactggcacattggcnnnnnnnnnnnnatggaggttaaaggggagacagcggaagtatctgtttggaccggcaacactttggctcataacaaatcacaaacggctttttggaccggtggcactttgggctcacaacggatcacaagtggctctgatactatgtta

SEQ ID NO: 174311 - DNA, 724 bp, Cannabis sativa
atgttgcatcatattatctaataatgttttaaactattgaatttactgtgtcaatacatgggtacattacttattaggatgaacacaatctatatttatataccgaatagatttgaatggttacattttttatgtaatggttacattttattataatttgctatataagattacaatatgacatcattcaaataaaaatctatatttagaagggtgtctacacatctagtaccttgtattttatgtaaatacatgtttggtaccttgtgttttgaataatgtttatttagtattatgtacgtattttaaaatcatacctatttagtaccctaaattcaattttttttattgaattttattaatacaatcaacagtctaaaattttatgaattctaaatttaaatttaattatttaattacatataactgagaactctttgcttaaattattaaaactgtattgatgaaattttacattagggtactaaatatgtacaatttaaaaatatatggtaccaattaagtattattgaaaacgcaaggtaccaaatatgtttttcatgaaaatacaaaagggaaattatagtaaatggccccaaatcataggattatgttagtttatttcctcatttcaaaagaatatagcaaatgaccctaaatcataagactatgttagtaaatgtcctcatttcaattttttttttttagaataagaagcaaatta

SEQ ID NO: 174312 - DNA, 536 bp, Cannabis sativa
cgccctccttgcagtgtttccaccgagcctgatctggtgtatttgctgggcgtgcgaccgttcgaggatgaggaggcagattcaatatcgttgtcttcgtctcccggctagggtctgctgcgaggattatgtcgctcaggatcctcctctgtttgcgcctcctgattgaggttccttgcggattggtccctcgatgtcggttggttcaaatcgagtccttcctgatttgccctccgttccctacgagtaaggttactacgacgtctagaattggttacctgagggttgtctgtgcaagtagcaggtactcggggaggacttcgagccctatttcgtccatcgaccttggcctgcagagcacgtagctgatcttgaattacagtgtattgataagtagttagttggatgatagcttcggataccactgccggtgtgataggtggaaaatttcctgttgtggctgctgttgtagacgtttccccagcgtgagcggctggagtctcagggaatatattaagaggcgtcacattgccccg

SEQ ID NO: 174313 - DNA, 690 bp, Cannabis sativa
ttatttacatggctataagttacaggtatgattgtagtataatgacttatttaatagtttgaagttatctaaaatcaagttaattgacattaaatatatgaatggtagctttaagaatgtacatacataatctagtaattaatcattagattgttatttatgtatttattttttatatggactcttgaattaggctagattaacattatgtctatgtcatatcaataaattattttaaaaaatgagtagaatacaactgcatggggatatttgcaacaatttttataattcaatgagaattttgcaaaagaaaaaaattcaaaggcaaaattctacaagtgccattgtttattgtttagggaggataaatcatatttactctattttttttttttttcagatctattcatagtagaaactgcttttagattagttatgttaagaaaaaattaatgaatattgaactgagggtattattttgcacaattttttttttaaaaaaaaaaatacaagatttaattagttattaaacaaaactgaaggtttgaacaataatttttataaaatacagagtttaaaataatatttattttattttcaataatacatgtatttgatacttatatttaaatttgataaataaaataggctaattaggatttttttctcccgaacttttacatgtactaa

SEQ ID NO: 174314 - DNA, 721 bp, Cannabis sativa
  modified_base (414)..(415): a, c, t, g, unknown or other
actatttagatacttcatggtactgatagatgcatctagcagatggtcgcatttatgtttattgtcaagtcgcaatatggcatttgcaagatttttggctcaaataatcaaattgcgagcgcaatttcctgattatacaatcaagagagttaggcttgacaatgctggtaaatttacatctcaagcattcaatgattattgcatgtcaattggtgtttctgttgagcattatgttgctcatgtacatactcaaaacggtttggctgaatcattcataaaacacctacaacttatttctagaccgctaataatgaggacaaaacttcctgtagaagtatggggtcatgcaatcttacaggctgcaatgttaattcaaataagaccaagtacatatcataagtattccccattacnncttgcacttggtcaagaacctaacatactctcctgtaatggatgcaatcacatttcgatatttcatcagtctaacagtctctgaaaacttaaaaaatgcatttttatggatgtagtgacagcttacttatacggatcgcttgataatgatatttatatgaaaattcctgaaggttttaagatccctgaagcactaacctttaagaaaacaaaatcaggacatgtaattattgttgtctatgttgatgatttaaatatcattgggactgataaagagttacatgaggcaatgttgtacttgaagaaa

SEQ ID NO: 174315 - DNA, 771 bp, Cannabis sativa
gaaaagtttgttaaatgggaatagacaagacaagtagtacctatcataatcttcttgatattgaccaataatattaactatatatatttttgtatccaaaattagatcatatttatgcaaaatacatatacataactaatataatctaaaccctttgaagggttctcaaagtttcatcttcttctttatgttgatctttctcaatcaccttcttcttgttattgtcactctttttcaacttctcatcagtcataggctgaaaatgagccaagtcagcaagtttttcaactgatttaactgtgcttttgatcctcactgtgatttcaatcaacaaagatgttaatgtcaccaaaggaattatctccatgagaggaactgagactggaactgaggctgcaacattactcgaatcatcatcattcgcctcgagttttggagttgaattttcgggaagtggtagaggcagaggagttgacacaccaggaagagatttcaagtcattttgtagctcttcaactgaagtgttcatttgttcaactaaaaaatccaatcttgatgatttcttcatagtcttcaaaatggtagctagctctttcataacacttgttgagtttgagcttacttctaaacaaatgttgctcaattgcttcttcagttgctctggtgcctgtttttttcaaattcaaaatttggttaataaattgtttcagtcatttatacattacaacaaaaagttacctgtaactaaagcatagtatttaaatataagtt

SEQ ID NO: 174316 - DNA, 517 bp, Cannabis sativa
gctctttttaattaaaaagaactgattaagaggcaattgttatacccaaaattcgataagcacatcagaggaagacacatgtcgagctgagaagaacgaagaactcaaacaagcaaacgaaaagtacacttagcatggaacaactcgttggaaacataattcgtagggtatgtgtataactcggctggctgaatagccttctgcgagacagaaacgtacgaactgctaacttatgtattgacgagaaactatttgggtgaacgtgtgcatgacaaggcctcaacctcgttgcgtggaagagaaacaataacactaaaaacacttagcgtatattatacgatatataaactgagtgtagatagtgtggcgagtcaagataacagacaaagatgcgtttatctcgctagaggatggcatgcatgcaaggaagatcatctcgacaccagaaaatatagttataagagttaaaataatattagtctcgggaagtcagatgacaagcaactgctcgctatca

SEQ ID NO: 174317 - DNA, 502 bp, Cannabis sativa
acgagatcaacgaaaaagaagaggaagaggccttctagtcgtccgtcgccagagatggactgggcagagatcgaaagaagaagaagccagaagaagaagaagaaaaggccagaagaagaagaagaaaaggcctgaagaagaagaagaggcgagagagagagagagagagagagactacctagggtttttttcttttaagaggcgagggagagagagactgactatataagtcagttttcttacaattattattaatttttttaaatgcaattattattaatttatattccatttattattatttcttattttataagtcagaatttttaataaataaaattaaaaaaataagttaaaaaactgatgtatattgacaggttaggtgtgactaagtacagctattgccgcattccatgcgcgtcactatattaaaactttaaatttatttaaaataattaaatatataattatgatatagtgacacactatgcatgtgggcata

SEQ ID NO: 174318 - DNA, 659 bp, Cannabis sativa
cttgaatatgttaggtgtatgatttaaatgctcagccaaattaaatttttgagtaaaaatcgagtttatatgttcgggtgtaatatagccgttggacacgaaaaaagagactgccactgggcaatccggttcaccgtttgccaaccgttaaattggtttcaggagaaccggttaaccgaattcctggcagtggcaaaaagtctaattttttgcactaaaatggccataactctccactcaattattcgatttcagaaattttaattttgttctcttagttaaatgatatgtgatttaaaaagtcaattgaaatttattttatatcattttgtgagaaaacttgtcgcacaagttagtgagccaaaatttgtacttaaaacttttttaagtatggacttgaaaattactatacaagactaggaaatatagataaactttcatggactcttgtttgagttctttgagtcttggtatccacttcgggtcacttttgagaatttcgataaaattaccattttgcccttagagttaattttacctttatttgtgctacaaaataaacaaatttgttatcccaatttttgcactctgacgtagcatcacacaatggtgacacgtggaatcgactccgggtatctgctcgcaagatacaggccgaa

SEQ ID NO: 174319 - DNA, 545 bp, Cannabis sativa
  modified_base (359)..(359): a, c, t, g, unknown or other
aagatggccaagaatagtttcggactatatattcaaaattgatcaaatttattagcttggccaagaatagtttcttttcctagtgcttggttttttacaggaatattcaaaataatttaatatatttatatatataacaattccaaactaaatctctatccgtttctagagccttttttaacaagggtgtgtgcaattacattgttttctccgggaatgtaacaaatcttagcactaggaaaaaaagataaagattccaaaaaatttccaaccaaatttgataatggagatctatccttccaattgctgttaattctgtttactaaagccaaacaatctgagtgaatggaatgcaaggnaattttaacagcatcacaccattggtgaagagcttgcagtagagcatgagcctcagccagaagtggaggaagtgcacctattttagatgaacatacaccagctatagtctgacccgtccaatcttgaacaacagccccaaatcccatcttggagtccaactaagagagggttgcatcagtatgaag

SEQ ID NO: 174320 - DNA, 647 bp, Cannabis sativa
gaaccggaattccggttggcttccgggatttcctcccataatccgaattccagttgaggaaccagtctaccggttggggcaaatttgggaaacctagttcttcccatttttttgttatttagggtattgccatgttatttctcgatagggaaacttctagtttcgagtttaagtccccaggaagtgatttagcgtgtcacttatctgtgttgtgattattatgatttaggagcttgtaattcgccgagcagatcgttccactcaggttgaccggcacacctgaatttggaatcgaggtaagattagtataatgtcttgcatatgcttatacatgtttagcgtacatgtcagttgccataagattaacatattagatatatgttaggaaaattttatatagccgtcaaattagcatattaggggaacagtgaggtgtacatagagttgaaccgagatgccaacagatatatgctaggctatcagttagtataaattaactgctaccagatcgatacggctagagtacagagtataggttggatttgttgttaatcatgcgttgtcatggacgtccttgattcagttagggttatggtcaggtgtatgggcgcttggttataactcgggatttagtatgttttattata

SEQ ID NO: 174321 - DNA, 740 bp, Cannabis sativa
tgaagcatcaggttttgataaaatttgtctcagtggttgatttattaagactttaattggatgcgcctagaaatatggtcctaatttgtgagatgcatgaattagacaaaatgcaagtttttcaagaggtggatatctcgattctacccccagtaacctcttactgacatagtaaatacgttgttggttcttaccctcttctcacactaaagctgcattgatggcatgctccgagacagctagataaaggtataaagtttctccagttatttgttaggccaaaattgggggtgttcacaaatgcttctttatgcctttataagctttcttgcattcttctgtccattcaaatttgttattgccttgcaaaacattaaaaaatggaagccatttatatgttgactttgggatgaatctgtttagtgctgccattctccccgtcaaagcttgaacttcttttagctttgttggtgaaggcatctcgatcaaggcctttatttttttctgggttggcttcaattcctctcacatttactctgaagccctgaaattttcctgaggaaaacccaaaggaaattttctttagattaagcttcatattatactttctaagtatatcatagcatttcgcgagatcctttatgtgatctttactttttattgactttactagcatatcattaacgtaaacttccatatttcgtcgaatctggttctcaaacatgccattcaccagtcgt

SEQ ID NO: 174322 - DNA, 762 bp, Cannabis sativa
tgggaatggcaatgggaaagggaagcggaataggaatgggaatgggaatgggaattggaatgggaatgggagtgggaaagagaatgggaatgggaattggggtttggggtttgaggtttggggtttgcggttagggtatggttttgggttgggttggggttggggtttaagggttagaggttagggtttggggtagggttgggggtaggggtaggagtaggggtttgggatcagggttcaagggtcagagttcagggtcagggtttagggtttatgggaatgtgaatgagaattgaataaaataaaatttaaaatgcataaaaaaaatttgataaaattcatcaaattttttctcatgttacatgataattgtcgttccttccatttcaaaatagaatattcattccaccaaaatagtggaaagggcattctattggaatgacattctaatacattaaaatgaaactaaacaaatgaatggaatgaaaattatttcttttccattcgatttcattacctctaaccaaatgccacctaagggtctgtgtttaagggttagggttcagggttcaaggtttagggtgttgggttggggttagggtttggggtttgaagtttgcgttttggcgtttagaatttagggtttagggttttacagttcgacggtttgagggtttaggggtttaggggttttgggtttagggttcagggttcaggggaatgagaataggaatgaaaataatataaaatttaaaatgcata

SEQ ID NO: 174323 - DNA, 518 bp, Cannabis sativa
  modified_base (262)..(281): a, c, t, g, unknown or other
ttttctttttcaaaagtgtatatttaatgtgtaatgttttttttttagtttttttattttaaatgtgtatatttaatttgtaattgttttgtatcagtaacaataagcgttagattacataatataaagcatatatcagtaacaataaatgcatggttgcacaaatttacccattttcaaatagcttcttggaaatttaattgttgtgcttcaatataattagaaaccaaaaatataactcaaataataataataataatannnnnnnnnnnnnnnnnnnnaataataataataaaacaacaaaaaattaaataatattacaactcttaataaaacatacacataaatatgagatgaagaaaagattacaactctaatctgtctgaaataaaacaataatcctgaaattttattattttttttttgccattttaaaaataaccttttagttacttatgatattgataagacacaataagttattctttcataaaaaatatcatttttatattatataa

SEQ ID NO: 174324 - DNA, 604 bp, Cannabis sativa
taaaaaataatcttacattttaatgttcaaataaaaatttattacaaaagtaataattgatttaattaaaatgctaacatcttgaaaaatacaaaataacaataacaataacaaaaatattaatattaatattaaataaaataaaaataacataacactaagttataaaattaaaaagaataacataaatgaaaataaacaaatcaagaatgcaaatatcaaataaaaatgttagtttctaatatttttctggtcgacatagacaaatcaaggatacgaatattcactatgtttttcgaagtgtattaattgatcatatgtaggaacactttaataattaaaaaaataaaatatataatatttaattgatttgataaatatttttttattaatttattttaaaattttaaattcttattagtagtcatcatataattatgttataaattaattattttggttttttttataacataattatatgatgactactaataaaatataggatgattctacaatacaccctcttaaaatagatgtattgatggaccctctacttgtttcgacatccagaaaaaaaatttagtctaattttttttttcat

SEQ ID NO: 174325 - DNA, 502 bp, Cannabis sativa
gtctgagttcgggtccaggttggattcttagtttaggtctgggtcgaggtctggggttcgaggtccaggggtttgagtccaggtctgagtctggggttcggtggtccgagtctgggtccgtgtttggggttcgaaagtccaagggtctgggtccggggtccagggtctggggtcttgggtttggggttcaagggtcggggtctgggtctagggtcggggttagagtttggggtcccgggtctagggtcagggtctgggttccatggtctaggttattgggtctggagtttggggtctggggttctaggtctaggtttcatggtctggggttcggggtcgaggtctagggtctggggtctggtgtccgggtccgagttccatcgtccgagtttagggtcaaggtatgtgagcaaaaatgtaaaatataatatattagagaaaaaaattatttttgaaaattgaaaactacattttgatattttatgttttctagttttttaaa

SEQ ID NO: 174326 - DNA, 500 bp, Cannabis sativa
ggcattccatgtagtcgaactataatttatctacataaagttgagctagcctggtaagcttataatcctttctgattggaatagaatgagcagacttagttaaagtatcaacaatcacccaaacaacgtcatgcttcaaaggtttcaatggcaatccagtaacaaattctactgtaatcttgtcgcacttccattctggtataggtagagattgaagtaaacttgaaggtctctgatgctcagccttaacttgctgacaaactatacaattatctacaaatctagtcacatcacttttcataccttcccaccaatattgtctcttcaaatcttggtacatctttgtacttccaggatgtacatcaaacttggatttatgggcctcaatcaaaatagcctccttaagatcagggatatctacaacaactagtcttcccatatggtataggtgttgggctttgtaccctaaataaaactctatttcaatgtaatcttttcta

SEQ ID NO: 174327 - DNA, 624 bp, Cannabis sativa
gcaccagtcactcggacaaggtgacatgcacgcgcgcatgagggggaaaatcccgagtctgaagccccaatgtcccttgttcgacatcctcacctgtgcctgctgatgctaatagtagccgagtttcctcggcagtccaccctgcagcttcttctcttcgcgcgcacatagggttgtttgcagcctctcaaggctgcacgtgcagccctgctaggaagcacacccaaaaatacgatttttgtttgatttttctccaaatttcgaatttttgcaattttcaaaccccaaaattaaaataaaataaaatttttaatatatttaaacttaaatatcatttttaaattaataatatttatttttaaatagattattattaattttatgatattttaaggtttaaattttaaaattgaataatttatttttttttaaattatggtcagatttattattttgttaatttctttaatgtttatatattatttaattataaggttaatttctttataaagatagcattatctttttaatttaaaatattatattaaaatcaccttctatgataaatcaaaaaattaataaatttaaaattaaccttggtatttttatagatattcttaccat

SEQ ID NO: 174328 - DNA, 553 bp, Cannabis sativa
caaatatggtggccttttttaatccaaccgtgacacatacctgcatcaaatataatgtacagtatactgtatacaccatatatattttttttatttttcggctgaattcaaatttggaatttcctcttagtaagaagaagtataaaatcgttaaattatgtctataatcacatatttactattggaatactttttaataggtacacatatataagtgcacccatatatatggaacacttctttatatatggaactcatatatacaatatgtacacatatattttttttttaattattattttgattaattgttgttaatttctatatatatatatgaaataatttaggtttttattttattttttccattgcaattattgtggatttttttaaaatttattttttcctacctaaaataagtatgtctagtagaaaatgtccatctaataatgattttttttttaaataaaaaatttaattaattctcagagaggaattgtaatgaccgctctagtaatgtggattagtaaagacaattagcactaatttttat

SEQ ID NO: 174329 - DNA, 666 bp, Cannabis sativa
  modified_base (630)..(637): a, c, t, g, unknown or other
aaacaatatctcaaaaatcgatctcgatcggaaggatctatttgtgaatccgttaacgaagccttaaccttttgttcaatgtacttctgagaagttaaactcgatttaaccgtcaagatcgaaaatagtgttgtcctcccaaataatcctgaaagagaattctctgtatttaagcatgttgggcgaccaattggtcagaggaccatcgttactttaccaatgcaagataaactaaaggcagagtgatacattctgaacaatttaatgaagttgagaagtatatcacgtaagatattttttgcatactcaatttagttatcttcactgatgacattctctaacattttctccattttgtgtgtagtaagcataggaacgagctacaacctaggagtgatcaaaattttaacacaattcaagagaatgagttttctagttgattcaagtctcgagtaagtaatgctttcaagcatgttgcgttattcaaatacagtttattattctagtattgattaaatttattaccgaatgatagatcaatcaacttcgagcagataatcctacagaattatcagatgagttgtacgccatcgcaaatccctctaatccaacatgttattgttatcctgnnnnnnnngttaacggtgttaaattcttagttgagga

SEQ ID NO: 174330 - DNA, 529 bp, Cannabis sativa
aggggtatgctcagagctctcaggaggtgaaacctgaggaaactgagaaaagactaggggtacagcctgggatacgtgggacatcagacgaaaattgccaacccactatttagtctcataagaatgaaactcgtgcaaaccctcgtaagaagaaaaaagtgagttagaccttgagaggaagggcagggttcggccacaatcatgacaagagtgatctacaagagcatctgaacctaaaaaagcatgacctccgttgattcaagacaaaagaattcattccatttgcgaatgagcaggttagagaataagtccagagtacatcaaatcacgaaacccaggagacaactggggcacgatactgttggaaaacttgatttagaagcctcaggatcaatgaaaaaagatgattctaaaacgctgcctaatgacaagaaacccaacaagtatatccctttttatacagaatacaccgagctcaatgaaactcgggaaaagatctacctcacatatgtacaagaagccgtttttg

SEQ ID NO: 174331 - DNA, 558 bp, Cannabis sativa
ttagcctttttttttttttaataagtaattttgatttatttttttaaaaaaaaattatgaagttcatcattcatcatttttcttcaattcctatttatttattggaacaatattgtcaagaaaactaatgaaatgcctacaatttacagacaaaattgacacccaaaactccctatgattattctcaaattatcatccatgactatcaaatcaatacaaagttatcctattggtaaaaaaaaaacccttttaatactatttattccaatgatatggagattcctgaaattttaaaaaattaatggtgcatttacttacaatgactaaaaaaagaattaatcatcaatcaaatgaatgaataagaataaaaaaaaattgtttacttgcaagaataaaatccgaataagcaactttctcaacaatgcgtttacatttctttgaaaacggaataaattatttaaaactacaaaaatactcttgattaaacttttatatgttgtaaaactttaaaaagataataattaaataagaatcaaaatgtatttttataattaagaa

SEQ ID NO: 174332 - DNA, 673 bp, Cannabis sativa
attttaacttatcttttcctgtccttgcagagataactttcctgaagcaagcactggttctcaatcgcaagccaaagactggaacagcgacgacttctcctgtcgttccctagaaaaggaaaagtgacatcgtgattactccagctgctgacacgtccaagaagctggcgaggccgtcacaagacaaggggaagaaagtcgtgattgatccagctgtttgagctcgcgattttctagttcttcaggagaagttcgtgggcgaggagctcatgtcaaaggttaagaggactccctctgaggaacttaagcctcgctctgtagagttggcttcgcagttcatgactatgttatcgaaggcctttgttgctggttccaaggaagtcgagcttttaaagaagcagaatgcccagcttcaggagaacgtcaagaagttgaagcaggaagcgactaacaaggacaaagagcacgaggaatttcgtaagaaaatcaaacttgaagccaagaactctaaggcgaagattgaagagatgtctcgccacttgaaggccgagaaggagaacggaaacaaggaccaagcggtctttgactacatatacacaactctttccaagattgcagacttcgacttctcgatccttggggcagaggcggctgagatggctgaagcttttcg

SEQ ID NO: 174333 - DNA, 989 bp, Cannabis sativa
gctcgctcccctcggggagggagtgctcctctagctagcgaaagggactcctacaggtggttggccagccaaaggttggataacgggggttgttgctgagcctaagatccctggttggctcccatgccgctggttgccaggatatgactgttctcatcgtttgacctttgtggcaaggtctgtcctccctctagaaagggaagatctatcctagtccctgaggaaccaggttggtcagcttgttaatagaccctctctgatctatcaaccagtcttccttggagtggatctctgatgagatcttgtcctcttccgtcaattctctggttgaaccaccttatcaggttgctggcctctctattacagtgatccaactccatttggtgaggtcgaaggatgtactcttggtcatccatccacctcaggaatttgcgtctctgttgagtgaatatatcgcagtcaacagcgagtggttcttcagttagggcagcttggccgacagcttctctaagtctggctaacttgagatcttctcccaagtctaaatggggctcaccaattgtaggctggccaactcctggtcctatctctccagcatagtaccggagacgagatccaattattgttcctaagggttgtcgcccatgtgtccttccttcagtgggagacaccaatggagggtcctctcttggaggcaagggcctactattcaaatctactgggatgtttgtgttgctttggcaagctgtagtggccagacttatggtgcctattatggcaacaggattgaccacatcagcagtgttcataggaattctagttgtggctggaacatgaacatcaagatctacagtctgtgggtctttagggagacatacatatgcagacggtgcaattgaagttcttcttgtgttatccatggaatttgatcagatacaatatccactcgctctcaatgaaagcaccaaactagatcggaagagcggttc

SEQ ID NO: 174334 - DNA, 885 bp, Cannabis sativa
  modified_base (669)..(683): a, c, t, g, unknown or other
cagatgttaagagtggtagttgtaatgcattgggagatccaattgcagaatttagtcgggaccccaaaacaactcaacacgtgatccacaaactaccaactaagcttatcatcagctttagtaaggtcaattttgatggcaaagaacccctctcttcctttttttccggttgaaggtatgaataatttcttgagcaattacattattgtcttgaatgtctcttcctggaacaaatgccttttttaagctactctataaccgtttgaactatttagtttatgatgtattagagaagttttttgattatttaattttatttttattatgatccgttttgaagattatgttgaacctgaattttagtggtttatttgttttagttattacttttttattccttgtatggtagtagatatatgtattaggttttgtgtcctaaataaaacccatttcaataaacagatttactaattaataaaagaacaaaaatcgttttatattgcatgattcacatgatttatctcatgattatatttaatgtatgaattctattaagtccagaacatatgtaaatatatacatatatatatatttgttcatgattatagtgtcgttagcacagtggaatataatcatgactatatgttcaaaagtttaattctcatgatnnnnnnnnnnnnnnnatttagactgacatgataatcgacgataatgcatacttacaccttggataagtcttatgttctttccagtgcattggcaaagtttacgagtatatgatgtatgaagtatacattggaagggaccgatgttgatcttagataagatatcataaacttactgttatatttttctaagtcaataacaatggttgatcttaggtct

SEQ ID NO: 174335 - DNA, 639 bp, Cannabis sativa
gggactactgactgtcacaatgtgaaactcaactatacaaagttattcactttagagatatggacaattctgccacgaactaacgattcttcgagtaaaatactttgtatgagatatcggtgatccaacttattggtgtgctttcagactctatagctaagataaggtgtggaatatggaaccgtcggctacagacgacaatacccacatggaaccaccacatgaaggagacatcgcagggggtgcagttgcggataatgacgcccaagctaacgaagaaagggatcgccaagaaaatgattcaggcgacgtggatgaaatgcgattgtagttctttgattccatgtctttagaactagaagcagacttcgagctcaatgttgaagtagttagcaaaggtgttctggccaccacctttgatcgacgaactattgctagaggacgtattaaagacatactatccaagattaggtcactctcaggaaaatggcgcatgaaaactttgaaacctgggttattgggtttttattttgacctggaaactgataaaagggaagtccttaggaagtgaccctggatagtcaatggactcctcctcaatatcagagaatggcacgaagatggaagatgggaagaggt

SEQ ID NO: 174336 - DNA, 1002 bp, Cannabis sativa
ggctagtattgactgtaaacgaaaaatggtgatcttcccacccgagggagaggaaccgtttgtatttgtgggatcggttcagggatctcggattctagttattttagtattaacatccagaaatttgttacaagatggatgtataggatttctggcagtggtattggataccacacgacttgagacagttcggccagaggatatcagggtggttcaggaatttctagatgttttatctgatgaactcctgggtttaccaccgcagagagaaatagatttcgttattgatctagcacctggagcagaatcagtttctaaggcaccatactgaatggcttcggcctagtgtctcaccctgggaagctcccgtattgtttgttaagaagaaagacggatccttacgcatgtgtattgactaccgaaaattaaatcaactgactatcaagaacaagtatcctttacctaggatcaatgatcttttcgattagcttcagggaaagacgatcttcttaaagattgatctccgatcacgctatcattagttgagaatctgagaggagaacattccaaagactgctttccacactaggtatgggcactaggaattctctgttatgtcctatagactaaccaatgctcctgtaacttttatggatctgatgaatagagtattaaagaattttcttgatatctgtgttattgtatttatcgatgatatccttgagtactctcaatcaaacaaggagcacgagcaacatcttcggatggctctgcaacgactacgagaacataatttatatgccaaattcaagtgcgagttttggctatctcaggtgtcttttctcgaacatattgtcaataaagatggaatcaagcttgatcaaaggaagattgaatcagttagggattggccgagaccgaagacaattacagaagttagaagtttcctggatctggctggttattatcgtcgatttattgagggattttctaagatctcaa

SEQ ID NO: 174337 - DNA, 654 bp, Cannabis sativa
actaaaacactcaaaatcatgtcaggcaaacaagactaaaacactcaaaagtcaaaaccatgtcacacaaagaagactaaaacactcaaaattatgtcacagagacaagactaatcgcattaacaaaaatcgaatgacagtagcaaaacacaacctcaaacaagacacacctaagtccagtaaaggtcgtggacctggccggagaaaaaagacaacattcgatagctatagatttaagaatgaaaaactctaatttttttcttatagatatatatattcaatagtatttaagtataatgattaatcctaaaaaataattaaatggctaaatttaatgataaaatattaaaaatggcacaaaagtgaatataagtagcatatttattattgtgatacaaattttacatcatgtcatattgtgatttaaatttgaatcaactttgagcacattattgtagcaaacttttataagatgattactaatttgtatctctaatagagatactcttaataagtataatttagacgtgtaacacaccttaaaatatttttttagaaaaaaaaacttttatcgattttaccctcacttatatatttacataattaaattagaatttaagataaaaatccttttaataaagtttaattaattgt

SEQ ID NO: 174338 - DNA, 801 bp, Cannabis sativa
gaaactgatttttaaagttggtatccttttttaggttataactttttgcatagtatgtttttcagtatgatgttgatgaaattaatttttttctgctgcttttaatgaaattattattctttttaatattgatgaaactgatttttaaagttggtattatttttacattattattatcattttttatgaaacttatttagtttgtgattctcttggacatatttaccctgtattgaatgtttaaataaattctaatttttgagcaagcaaataagagattaaatgccaaaataaagtatgaagttagaaattggggtattaggtattcatataattttttatatatttttttgaaattatataaatttatatgttagaaactgatttttatagttagttttatttttaaattattttttttgcattgttttttttttttcattatattgttgacgaaattgattttagtttcggattccctttgttatctttaccccatgttgtatgattaaatcaactctggtttttgagaaagcaaattaagattgaatgctaaaacaaagaatgaagttagaagtttggttattaggtattcatatagaatttatacgttcgaaatttatttttaaagtttgtatcatttttatattataatttttgcattgtatttttttcatcatgttgatgaaattaattttttttttcttttacttttaatgaaataattagtttgttttaatgttgataaaactgatttttaaagttggtaatgtttttagattataattttatacattgtgt

SEQ ID NO: 174339 - DNA, 647 bp, Cannabis sativa
gcccaagacccaagcttgcacaagcagacctttgtactagccattctctggtattgagaaatttcctgaggctgggaatgaggtctcggttgcaggaaatgggatcttctgatgtggagaatgaggtctatgcagaggtcgagaccttttacgtgtagacggtctttctctgagcttatcaaccctccttgtattttttgtttaggaagacgacttaatggtttgcccctagtggcatttttgtaaagacaagtttgtaaaccaacttggattttctcttatcttaaatgccttgtacttttttcgttcgaacttaatataattgtgtttgcttacatttttattcacaatgtaaaaactatattttgatcaaatataaagtacttttgggctttgccatttcttgtaatcttcctattttaagtagttagttatctaccaaacttttaattttcgagcagttgtcaattctgcctcgctatggcagttataatctgccttaagaaaacttgaatatactttcaattattttatcactttttatatttttgaatgctcgtatgaatagttagattatctatccatttactaggtttaagtacttttatcaagacatctcgatttctcgtttagtactttcctagctc

SEQ ID NO: 174340 - DNA, 770 bp, Cannabis sativa
acccttggccaaactcaacatcaacgcccatgggtttgaatttttacacttttgcttccaaaagcaagacaatatttttctttcttcaaaaatgtcatttatctattctaattaattacatgctaattttatctatttaataattataattaattattaaaaaaaattaccatttaaatatatttattaattagactctccaatgtctcttaattaataaacaaaccatgtattttgttttcttcttaactatgcccttccttagtaaaattcataaataagacacagttattatttagaatcttaattgattaaataaatcaattaattgagactacaaaataatattatttcagttagtacgaagaccatgggcctatataaccaagctcctataaatagattcagaattgcactattgattacatagagcactctatataccaaatatagatacattatgaattatctattgttacaatctaaacaatcaatgatacctctacagacgatttatattgagtagggacaaatttactgttttacctttcaatttattttatccttataatacttagctacttgtaaataatatttccgtaaactaatataattattgaaatgagggctttatcatttatcgcgttaagccaatctctaaaaaaactatcatttcacttataatagttatagaagctatatattccatgtctatgtgttgaccgagattttcggcaactaataaaatattataaaattattgagctgta

SEQ ID NO: 174341 - DNA, 593 bp, Cannabis sativa
  modified_base (535)..(537): a, c, t, g, unknown or other
gcctatcaatagacggtaagcaaatcattgcctgcaaagggaaataaaaatcaaatgatgactatcatatatgcaactcatgcgccaggggcacgtgccactgtatttattaaggaccagaggccgcatacaagtctcatttacctatgactaaataagacttggggggggggtaaatgttgccccatgtttttcccaatatacgtggcaatagcaaaatatgacacatggaccaaaaggacatcttactcgagaattagttgagtcacatgtaggcaaacaagtgtagttcgaggagtgagcccccttggatgtgcaaaggcatgtccttcctctccaggagctagaaatatgataaagcatctctaggggaggaggacatattcgaacaatcacgttgcatttaatgcagcatgggaaaaaagtctaggaatgcccataagaggacatgttagatgacataataagcctcgtttacgacaattacacaatattcaaaggagctagtgacaactccattatgaagaatcacatnnntcaaggaaggataaagattaatctcacctaatccctatgatacctacgacataggt

SEQ ID NO: 174342 - DNA, 518 bp, Cannabis sativa
  modified_base (482)..(492): a, c, t, g, unknown or other
tcagcaagcaaatcaattaaaacttagtaaagaatctacctcacttcaaattccaagccaattcaagaaattccaagcaccaagtctcaaaatccccaaaactcccaagcttttcttcaaagttcaagattaaaaatcaaaagggtaagagagggagagaggatcgggttgagggaaagaaaggccagaatattactttgtttttctcttgaaactcaatcaaaacttaagatatatcaacaatagttaaaagacaaaaatgcccttaaggccagagcatacatatccaccctcacaagggtaaattagtcaatccatgcataattaattcacaataaattcagattatcactcatcaaataaaatgccaaataaaccaatccatttcacatttcgggcctgaaattccccgttgtgactataccgcgttgacctgtcagaacacacttgaaaagacaacacaggcatactatataataatnnnnnnnnnnnaagcacgtaattaaattaatctcatc

SEQ ID NO: 174343 - DNA, 876 bp, Cannabis sativa
tttaaacttctgggttttaacttgtttttgtacatcttcatcgctttaatctatcgagtactcctagtcggcatatttgcctctttaatgtttgatatcccgaccaaaaactcatctcgtgtgttgtcttttgtagatgaaccctggtgagttttggggaagcgaacaccgaatcgaccaggacttgcttcaagttctgtacgaggatcaaccttgtatttgggccattccatcctctttgagtgacagactttctaattcgagctttgaagattgggaggtgagtagtgatctctcacctactccagaacctgtagtgcaacaccattattactctgagcagatcgccggagaggggtatgaccacttcctttgaatttgaagaaaggttagaggccgttatatctcgtccaactagacatatattgtccagccaggtgttgctgacgctcttcctgttggccgtccaagttcgggtaactttggcatcccaattgctgcatctgctgttacggttgctcgaaattaacattagtgtccatctagaaggaggatgatggcccgagcgaagcagaggatgcggaaggtcaacgtatctgatcctcatgtggcccagctcgccacattaccaagtgccgaacaagatctacccatcatggaggagggagatcacgagggggacattgagatccatgaaattgaggagcaggacgatgtctgtcccggcagccctttcgaggtcgagaaggaagaagtggccaaacctccaaactttggagggtataatgatgtcggggagtgggtgtaacgtccccgcttcaagcctccattgggcccttacacccacggaattaatggctcttatacacgagtacg

SEQ ID NO: 174344 - DNA, 514 bp, Cannabis sativa
tctcgttgtttgactggtttggcctgtgagtaggcaagaatttttagtctggatgaagttattaggtataactccacccaaatagcagccatgtaagatctggtcgtctaccgcttgccctacaggttagacctatgaccggggattgggcggctgaccattatgagtttgggcactatgcctagtagtaatttcttatgtactgcccagtggaatactggacgtggcagctagcaactggttagcaacttgataggctctccatatcagtacggttgcctaccttgcacggtcatcgatggctgcttgttgggccttcaatgtttccatctccctatccctccactcaatgaactgacaccgctgctcatcgaatgcaagcattatagcagtacggagaccctcctgatcatggtgcaaggcattagtatggccttgcatgagtctgaggacatcacagaggttttggatctcagtgtcatctcttactgtcctttgagcattattagtggac

SEQ ID NO: 174345 - DNA, 687 bp, Cannabis sativa
  modified_base (109)..(122): a, c, t, g, unknown or other
  modified_base (211)..(224): a, c, t, g, unknown or other
tgtaccatttcctgaattatagggatatgtcaattgtagaatattggttttatattttacactcaatcatgagcatatatattcccatatgggtgactattcaatggtnnnnnnnnnnnnnnaaccatcatggttacattttctttgacatgtaatagcatgttaccaataggtaaaaattcctatattataattaattaattataattannnnnnnnnnnnnnataattaattaaatatttaacaagcatcaagctaatcaatcgataataaaatttgtatatctatctatctatatatctatatatcgatataattttaattttctaacatctcctttttttctccttttaaacttaatacatacattcattgcctagtttatcattaatggttaatctattcggtaatttagtcttatctccctagctagatgttattcttactaaattttttacagtttgaaagatttgtcaagttttcacttgaccataatttacaaaagtttgaaatgatattactttaaatgtatttatttatttaaagattattgagtatttttctttctcgcatcatatgtctggacaaaattttttctacgcacaatgtagttgaaccatcactctcacattattttcttcatactttatgctaactttaagattaactcaaatatatattgaaata

SEQ ID NO: 174346 - DNA, 511 bp, Cannabis sativa
tttgtgtcgcttttgggaagatcatgtccccttattttttcacttagttggtttctgagatcacctccacgtggcctcgctttttcacttttatacctttttttcttgcgtccaatcgtcgacaaacgtctacagtggaccagctgcccttagaatgcccatcatttgtccttccatcctggttaacagaatcattagggtggttcttccaccccttggacttaggtaccattgtactgtgcccttttggcacgactttgcctctaggagcaaaatggtgtctaggctcgaaagcactagtggccttctgcgtcctcgaaggctggctgatcagacttatgtctttccaaggaggtttaggagcagactcctgtggaggctcacttaccttgcatttacctttatccttgcgagcattcaaggttttagtctcagtttgcctaagagcatgttctttagccaatacttgcaccgaagggtcatcgtcagactccgccaagtccttgaactt

SEQ ID NO: 174347 - DNA, 1176 bp, Cannabis sativa
ttgtgaagtgtatatatttattaatatatgtattttatgttttattttaggtgtattgataatttttagattgtatttgatttaagtaattttttttgatatgttaaagatattatattatgctggtaaaattttattaacaataaaacttgtaataaaatttaaaaaatttagaatattgaaaaaacaaaaagtataatttaatataaatttttttattgaagttatattattaattttatgagttaaataaaaaaattaatttaaatttttataaaaaatttaaaattttaaataataatttttttaaaaaaaattggttaatttatatttatttattttaaaaaataatgttagtaatttattatcagttcttatatggaacccatcggactctcttctgctctgcttaaattttgctgattttaggatatttgggagttcatcgcaggagagcaacaatttttttcgactcctattctcaatcaagctcagctagagaacctaacacttggtttatcgttaggttaaccatatgttttttctccgccacagctgttgggatctccgaatgataataatgtgtatcaagactttataacccgagaccttaataaagattttatggaataattagtttatgcttttaataatttagtttaattttgagacattttaataatattaatgttgaacattgttatctagtttaatttgagatatttttatagcattaataaatattgttcgtttgttccaaaaaaaaaatatattgttggtgttaaattgtaatatttgtaattggtttaattatatttaatttttattgatatatttataaataattatttatattattatttatagatttatatatttattaatttatttatttttaattgttattgcggtgggatcctcctgttaacgcatgttgctattaatattaggctaattaggatttttgctacctgaactttgacatatgtatcaaataaagcactttgaacttttaaggttgttaaaaatattccctaaactatattgagattgttggatttaaggacctttgtgtaatttcatttcaattttactatttcagtgattgcttatgtactaaaccatgctttcagactttgatatctactaaatcatgtccctcgaattttgacatgt

SEQ ID NO: 174348 - DNA, 875 bp, Cannabis sativa
tcagagctcaacatctgtccgcccactctccccgactgccaccagatgtgacgcataggacagctctcctcagctttttgtggcattttagtcactatcttaaagtatctccaataacaaattttaaaagatttaaaaagacactagtagtacttaatatatatgttaatatatatgtgttaatattattaaggataaatatatagcatattaaatttttttatttttttacttttatactgtgaggtagaaattttttaaaaaatagtgtatattgtattaaatttttactgttattctacggttgttttttaattattttactgttatttttaattgttttgttttgtgttctactgttattttataaaaacacagtaatattaaaaaaaaattccgtatgacaatatttttataaaaattagttcaaattctagtattttattttatcttacttttacattatttttgacactcgtatttttaaaaacacttcaataatcttatacattattatttaatatattatttattttaattataaatatactatcacattaaatttaaataaattatataatactatagagaattaattgcggtaaaactctcaatactcgtattctgttagcagtttaccacttccatccaattttaattgttaactatcatgctagattaataacgtgtatacaatatacacatggcacaatcttattagtccacataattacattattttaaaaaataaaaataataatttaaaattaaaaaataaaaataaatcatatgaaaattaaaaattaaaaaaaaattacataactattttttttttcttctctctccccaaaatcactcccaccataaccaccatt

SEQ ID NO: 174349 - DNA, 903 bp, Cannabis sativa
  modified_base (584)..(588): a, c, t, g, unknown or other
  modified_base (738)..(739): a, c, t, g, unknown or other
tactaattccaaatttgtgagggggtgtaaatggagttagtttaaatgagttaagaagttagttaagggttttagatttctattatggttgttatgttttcggtctgtgatagctgtctttgatatgcagtctgttattgtatttcatcttgtataaaaattatgtttagatagacaattcttttatctcaatctttctgactctttctttctactcttttctctcttctcttcttcttcctttcttgtctttactcttatcatgtgagaaatgtacaatgtatcgaataatatgctacactataatattacaatagtttttaagtaatatgagactttataatccaattcaattcgtatccgcacttgtgcgaattggattggattgaaaaatttaaaattcgctcttgtgtagattgaatgttgattgacatgtaaaagtaactaatacaatccaatcgacttatatttacaagaaattaaaaaattatatatacaaataacattttaatgtaaggaaaatagtaatttaaaagtctaatacatatattacaattatttttcaaaacttaatagatcaaatnnnnnttctattcttatatataattttttctgtatacattttaaaataaaattaaacatttatttatacatacaatttattttctttctttgaattttttatttattattttatttattttaattatttgatagagacataaaataacaataatnnattttattttgttgttagttatgcaatttttttttcataaatattaaataattttaatattataaagcaaccaatctaaaataaccgatccaatccgcactttttcggattggattggattagatttgagcaattatgctgattgaattggatctaaaaaataa

SEQ ID NO: 174350 - DNA, 1109 bp, Cannabis sativa
tatggttgcgggagggtgatcgtaattcaaaacattttcatgccaaagcaacatctagaagacggtccaacgtgatccagcgcctgaaaaatactactggagagtgggtgggctgggaaaccggacttcctgatactgtggtaaattactttcagcatttgtttcatgattcagctactgatttttcttctgtcattaattgcgtccctcatttggtcactgaagaccaaaattctttgttgcttgaggaagttacccgtatggaaatcaagaaagctttgtttcaaatgcatcccgataaggctcccggtcccgatagaatgacttcaggcttctatcaaaaattttggcacttggtaagtgatgatgtggtgcggctgggtcaagttttctttgctactggtgagtttccttctgttttgaatgaaactaatattgttcttgttccaaaaaagaaaattcctgagcgaatgggtgatcttcggcctatatcgctttgtaatgttctttacaaggtcgtttctaaagtaattaccaataggatgaagtctgttttgccatcagttatctctactaatcaaagtgcgtttttgccgggtcgtttaatttccgacaatattatgatctcttatgaggttatgcattacatgaaacggaaaagaatgggaaaagatggttttatggcagttaagcttgacatgagcaaagcttatgatagggttagttgggcttttcttgaggctatgttggttcaaatggggttcaactcgagatttgttgctctcataatgtattgtgtgtcgactatgagatataatgttacttatggtggaaagattatgggaccgattgtaccaggccgtgggatacgtcaaggggaccccatatctccgtacttatttctggtttgtgctgaaggtctttcttcgcttttaactctttatgagcaacgtagatggttgactggttgtaaagtggctaggagtgctcctcaggtttcacatatgctatttgctaatgatagctatgtgtattgtaaagtgaatgtgagtgaagctacacatgtgatgcaccttcttcaaatatatgagcaagcgtcgggccaacag

SEQ ID NO: 174351 - DNA, 833 bp, Cannabis sativa
ggcggttccgcagtcgacgattacgccaccgtcacccgattcgtcgacctgaaaaacctcaggtgaaacggaaatggccttacctcctacgctcattcccattagctgtacgtagtaaaacgtcgtcgttttaccgtttttaagtaatggagcggtgattgaatcgctgggaagaggtgaattaaactcgagtgtggaagacgcgcctgcctgatcacgattcacgagacagtacgaaaacgatgacgttttggtctgtgaagtgagtgataatgggccgccgccaagcccaattaggcccgcggatccaacgaataagccttcgttatcgtggccgcatcccaaagcgacgccgtttattgaacctgacttaccaaacgacagcgtttcggtgacgaaatcaccgacggtgtaagaaccgtcgccataagcgacctggtataaacacctgttgtttctacaggcggaggtttcgagggcgacgcattggcgtgaatcgcaggtgagaggattgtacgaagatgatgattcgggttggaatatcggatcggtttcttggtagcaatcggagcaaggttcgcactgaagccagttaacgtcgctacctgtgtcgatcgccatgtaatattgatttgccggagtaccgactccgatccgagcgaagtattcgccgcttccctgacttacaccggagattatgggcgttgagagatcttctggtcgaatctcggtctccactggtcggagatcagatttacggatgttgctgagtttcagctgaagcttggcattgagcgagttgactcggtttgagtcgcgggcgagtcgagaga

SEQ ID NO: 174352 - DNA, 533 bp, Cannabis sativa
cagtgttatcacaaagcaaaactactggattttgcattccagggacgacactgagtcctgtgaagaactttctaagccaaacaagttcttttgcagcctctgcagcagctatgtattctacctccatggtagagtctgaaattacggtttgtttagcacttttctaaaccactgctccacccccaagagtaaacgccatcctagatgtagatttcctgtcatcaagacatgcctggaaatctgaatctatatagcctatgggattcaaagcactacccttgtagactaacacgaattgccttgtactcttcaagtacttcaagatatgcttaacagcattccaatgttcctatcctggatttttctgatacctgctcatgattccaactacataacagatgtcaggtctactgcataacatagcatacattagacttccaactacggaagcataaagaacatttctcatgtcctctatctcttaaggatcagtaggacactattccttagatagacagataccaaatctagaa

SEQ ID NO: 174353 - DNA, 923 bp, Cannabis sativa
ggggtgtaccacactagtagagattgagtatctttactcggttaaggccatttcgtcgaggaagaacgccgcggtgggcttctactacctcggtactcattctagcgagcctaaaattattgtgaacttcccaaataaagtatcattcaaggataacttcttctggacatctggcctttcccccattggcacgaccacctttcgtaaacttcgtaagtgattgtattcttcttgctcattataccaatccttgttttccaagtttctgaccaatgttttgtttgtttttacagctctcttgatgaggcctactcctacccccgagatggtaagtcggcacatgcacctgataactcttccttacggtcttcggtcatgcgagttcattttgaacgaggtcaacttgcgatcgttgggccttctcgctgacaaggaatatacttgtgatttcaagattcccaagtattcttcttggcagcagattattgttgcaaacaaggataaggcctaggatcgcttggctcaagcacaatatcttcaaaaacactgcccctcgggaagccgatgaaggagcatctcgaggtaatcaatgtggttggtctcctacagtacttagggccgatcgtatcacattagtcaccttccaagactcccactttaatttttacatttgggattcccttctcgtagaccgaattgctcataagtttgacatctggtaccctagattccatgtctagattaactgtcacgagtcgtattatgtatagctgagcaatacagcactgtggaagatagggcaggtcatataagatgcgagctggaatttagatccaatcgagcattttgatatattcaagatcacaggctgtaaggattttagtggatattatggtccttctaccccttcgtctagtgatagc

SEQ ID NO: 174354 - DNA, 853 bp, Cannabis sativa
attgatttatatacaaccctaattttgatagtaaatataaatgagcataaagaaattaagtgtattaataattttttttttggtaaatactattttggactttgtgttttataaaagttacatattagactctctattttgttaaatgacaaaatatgccatgtattttctgaaatggtacaaataagacactaaattaattttttgtcaaaataaaacttaataataattcgacccagaggtgttatgacaaaactagttaaattttcagcatttgttcgtgctaagaattatctttaaattagttatattaaaaaaattattgaaaaattgaacttaaagtcctatttgtaccatttaaaaaatacaaggtatattttattatttaacaaaacagagagtccaatctataacttttacaaaacacaagatccaaaataaaatttacatttttcttttcttttctaaaaagggaatatactcatttaataccttgtgttttcataaaaaacatatttggtacattgtgtttttaataatacttaattgatacctcatattttttaattgtacatatttagtactctaaagtaaaattcaataaatacaattttatcaatttaaccaaatagatatcagttatatgtaatcaaataattaaatttgaaatcagaaaatcataaattttagatagtttgattgtattgataaaattttatcaaaaaaatttgtaattagagtaccaaatatatatgctttttaaatacaaggtactaaataagtattattaaaaatacagatacttaatttatatttagataaaacacatcataaaaaataaaaaaaaaaataa

SEQ ID NO: 174355 - DNA, 514 bp, Cannabis sativa
cattgtttgtatttacctttatttgttttttattgaggtgtcttggggaccataaattgaataattaaactctttaattatatttgttaatttattaattttgatattcctccgctttgaattcagaattaaactctttatgttatagatttacttttacataaatcttttcttaagttgttcattgattcactagttcaaccctccaataaattgattcataaattagaatagaagaattaccattttactcttctaatttacttcttactctttaagtaccattaattcactagtgaataattaatctatatcatgattatagatttgagctcaaatcatcgaggtgtttattggatcacatccaatatttttaggccaatccaaattcgacgcaatcatatatcagatgttagattttaccatccgacccaatccaattaatttctatcatccaatcgatcaaatccaacatccaatggatgttggccgattggatgatggaaattaattg

SEQ ID NO: 174356 - DNA, 554 bp, Cannabis sativa
ccgaaaacacttagccatagtatgtcctgtgatgccacaatgagtactgaccattttagaacgatgaggctcaatacttccagaaaactgaactgagttggagcttgttcctaatccattgccagatttgttcttgtcattttcagctggaacaatagacaaacacctttggctctcttcttgaatgacagaggcatacgccttattgatgtttggcaatggatcttgcatcaagatctgagattgagtactggcgtaagattcattcaagccaaacaagaactcaaggactctatcttcttcctggtaaccttgaatcattttcatagctccacgagtgcaaatcggttgtggtcgatactcttgaattgaatcccaaagagatttgagtctagtaaagtaacttgtaacactattggatccttgtgcaagagactgcttcgtacgaatagcttcaaaaatcctaggagcattttttgattgaatcgttcttcaagattcaaccagatctgagtggcatcatccatgtacataacactttcagctatctcgtt

SEQ ID NO: 174357 - DNA, 692 bp, Cannabis sativa
tttaggtactcataaaagttaatatcgcttctagttttacataaaaatatagcataaaatataattaaatataatataatacaatgcagtgcaatacggcgtactaaacaaattctataaattcatattattacgtactaatattccttccttgtttatatatattatataatattatcttctattacttcatgcacgtaatgtacctacaaaatatatacatgacgttgatatatttatatactatattgggttgggtggaaatatgtaatagaataatacgatgcatgaataataattaagacaactgcaacaaccatagaatatgaaaagatgaagctggttaagcatgaggatgttagaatatatatatatatatatataaattatcggaaaaatttagataacaccaaatagtgggagtattcaaacacatcaagaatactcactagcaattatgcaagtactcgcctaaaatagcgagtactcaaagtataagttacgaaatagataaaaacgaaagcataattatagagaagacaaaagaattatagtggttcagttatgttaattctatttttggcatatttaattaaataaaatattttattattctttgtatatttcggctggcatatattgatatggtttccctatttgtgtatatctaaacttggaaggaaagttgacta

SEQ ID NO: 174358 - DNA, 507 bp, Cannabis sativa
ccgtgcttctgagaggcagggaacattcttcttaaaacaagatcaccaattttgatttttctgctcttgactttagagttgaaattcctggcaattttattttgaaacatctagagttggacctatgagtgctctcgaagttcttcaattaaatctgaaaattcttgaaggagagtgtggttccgagttaggtcataggtatccctaatatgtgtggcacggtggatttgacgattatgtgggttgatctaatcactaccagggggaaaatgagatcaaagggggcatgagtcaagctatgacagtcagagccccgcgatccgaaagaaaaagaccagaagctatgcaatcccatatagcctaggggagggtcgtatgtgatgattctaagactatgtaggtatgggactacataattgtaggggacttgaatggattagttgggactacctatattaacaaggttcatcttgttttctggtagcccatcacgaaagaactccacgg

SEQ ID NO: 174359 - DNA, 562 bp, Cannabis sativa
tagtgagatattccatgataagcaaaaataaaagaggagagataaaggatcacctagtcgaagccctttttcacctttgaagctgccttgaactcttccattcatcatgatagaataagtagtagcccaaatacaagtcatattgtatttttaatgttttgtttgtattgtattgtattattttttttgtttgtttgttaattttgacatgtttaaaacttttggaaacgtccaattacagttgttatgatgctaaaatttttgtagaattaaaataaattttactaaaaatacataaatattaaaagaaaaagtgttaaacataacacaaataattagttactagttgtaagaaactagttagttaattacaacttatataactagtaactatttacaattaattactacttatcatgtcaatatttaaaatgagtaatataatagtatgatctaaactaaaaaaagaattagggtaatatataaatattaaatagttgtgagaatattatttagttacattattgttaggttatttttagtattaattttagattaagtt

SEQ ID NO: 174360 - DNA, 547 bp, Cannabis sativa
tttagcaaaaggagaagaagaagatgataatgatcttacaaacatcaattgagcgacaatggtggaaaagtaagggtgagggcttgagagttcggcttcaacaaaaaaaattgtgggaagaaaagaaagagaaaaatggttatggaaacttagagaaagagaagaagcgagaaaaaaaatgaggaaaaaaaaaagtatggtaacatcatcaatatttttgtaattataatactttttgaaacttaaaaaggtaaaaataattttgtaaaaatgtttaaaagattaataaacattaaaaatgtaaaaaaatagccaaatttgtcacctagtgtaaaaatcaaaaaaaaaaaaacgtcctatatttcaacaatatgaatatcaccaaccctaacaaaaattaaaaatacaagatacaaaacagttcaactcaacataaatagcgcactttggacaacgtacattaacaggacatttattttatttttactacttttcagacggtaacacgttaaaaatcaagacctatggacaaattaaacctacaata

SEQ ID NO: 174361 - DNA, 513 bp, Cannabis sativa
  modified_base (380)..(391): a, c, t, g, unknown or other
gcattttagtaattctagccattccgtcaagtccacaactaaaaattctaaactagtccgaaatatttctcaaataatccatcatttattatcgtgacatttctaaccactccgccgagcttccacggtcgtcgggcccgaaaacattttatttcagaaatagtatccacgatacccacatattctaaaataatctcagtaattaataaattatactttatttaatcattaataaattcaccctaattacaccaagtaagatcataatcttactccattactaaaataattacatatttaatagaatatgtctatttaaatactatattaatttctaggatattacgatctaagaaacagtgtcccactgatcctcaagnnnnnnnnnnnntgagaagggttccttatgcttcagtagttggtagtctaatgtatccaatgttatggactagacctgacatatgctatgcagtaggaattgttagcagatatcagacaaacccaggagaggaa

SEQ ID NO: 174362 - DNA, 774 bp, Cannabis sativa
tgtaagtataatattttttataatagaagcccgacatagttcatataacacgcttctgtatatatctcaattatttaaaattattctcatcattatatatcacattttgttatcaccgtactaactcgctattattttagcttatcaaaaaataaatcaaacaaagagttaatattattaatttatttttatacaatttttctttgaataattaatatgataagttaggtgtaagagaaatagtttaagaattaagatatacacatttatatatttagagatcgagagaaagtttaattagtaagtgattgaaaaaaatgtgggagttattatttttaaaattatgtaatcgatcgatatttaaaaaaagatatagctaataaagaaaaaaagaaaaatcgtgtggtttttttaagtgattttagagttatcattctttaaatattatgtgatatttgttttttttttttttttaaaaaaaacttgaaagaaaaatgtgagttaattatcgtatttgaaaaaaatagcttataaagaaaaaaaattgtttggtttcaaaaaaaaaaaataattttagagatattttttaaattacgttatacttgcgtctgcaaaaatctttaaaaaataatgtacaaatatataactaataatttgaaaaaataaagtggtgatagatttggaggtattatttttcaaaataataaaataaaaaaattaaaaatcaagacaaaaataaatagagatatatatttttaaagctaataaaaaatt

SEQ ID NO: 174363 - DNA, 619 bp, Cannabis sativa
ttaagaattttgtattaattctctcatctaagccaaaaaagtttaataataataataaaaaaaaaaatcgaagaaatagattttgtattctctaactacttttgttataatttattacatgacacacttgtaaaatttaaccaattattattattattatttttttttttttaaatttagtgagcaccgatgcttccatatctgttttctctctctctgtctctctcttgccacttcatacacacatgaccaactttttttttttgcaacaaccttgggcaacgcccattggagaagccctaacaaagttttgattgaatttaaaaaagcccttatatatatatttttttttttttggtttatgtgtatatttctttaggtattaattttttggtttgtgactttgtttttttgaagtgattgatgaataaaatagtttgtggtagcaagaaaatggatttcgacattaggcaagataacaaaaattgatcaaaagacaaccaaataattgaagtgatcaagatcacgtatcgtagtcttagattcactacaagaaatgtcactttaccagcacatttttgtgttggcaaaagtttggtattgcgctggtaaaatagaa

SEQ ID NO: 174364 - DNA, 531 bp, Cannabis sativa
ttccataattatatgactcccccaccattcaatgaatcaaatttgtgtggctgtccgatcgggacaaacatcgtttgtccaaaaatcagaaaatgacatcactcgtagttttgtgttactttagttttatctctcaccgtttgcaatatttttttaattaattttttattttttattaaaaaattaaaaatattttctataaaattgtttttatttttttaattttaattaaaaattaaaattttaaaaaatttaaaaataaaaaaaattatttcacaacagtttttttcataattaatattcttgtcttcgatcttaacttggatcttgagacccgaactctagctccaatcctagactcagaccatcgccccgactccagatctggacctggacctctgacttaaattaaattaaaaatgaaaattataaaacgcacttttactttctacttttaaaattaaaaaaaaaaaagtgtagttatagaacatattttttattttttaaaaatacaaattttactttcatttt

SEQ ID NO: 174365 - DNA, 645 bp, Cannabis sativa
gaacacttacattactagcagagaatattagaatatgatacatttacttgtttaccaaagtactaaaagataatattttttttatttttttcatttttggtgagaaattaagctattattaattaatggaaaagatcatgtacaataataggggtaccaaaccgaattagtatcactccagaagcatatttaactaaaccatgtacggttaaatttgtaatgcagcgaacatgattaagagaaaatttagaaaaagaggataattgatattagtacattaaattaatatactttgagagtttctatcccattaaaagtgataagaccaatttaaactagtctctcaaaaaaatcaatataaatatatattaaaaagtgttattgtcaatcttctattataattttttagttaatcatcgttagaggtgtacgccggtcggtttggtcgagttataacatatttttataaactcaatataaatatcggattgtaaatatttaattgtaacccgcctaattaaaaattaaaaaaagtccaacctgtctaataattttatcggtttagtcggattaacccgtccaaaccgttctttattttttttttataattattattattaatttctagtatttaaataattagat

SEQ ID NO: 174366 - DNA, 512 bp, Cannabis sativa
  modified_base (186)..(186): a, c, t, g, unknown or other
ttcttttgtgaggggttcaagaaagtcgtttgagagtgattcggttcggatcaaagacgttctccgtttgagatttttgttttcatttattaatttactattattagtttaattcgaattaatgtttttatggcgttagaattatagagagttcattccttaattaattttaatattgtgatcgtntttatgtgttgaaactaatttagtttttcctattaatcttgtcttttgacataattctttagtcttttccttttaatttttcctattattagtcttgtcttttgacatggttttttagtcttttccttttagttttttctggttcgagtcttctcttttggcatgggttgtgtaactcagaataatcatagtgctatggcaacagcattcaagaagggaaagattggatgtgttcagcccgaaattgttgagattataagcattaaagaagcattgagttagattgcaacttattcaagggatagagttatgttggaaacaaatag

SEQ ID NO: 174367 - DNA, 676 bp, Cannabis sativa
  modified_base (298)..(301): a, c, t, g, unknown or other
aataaagaatatgattttagtataactttttgtattgtgattggaatagaaaaaaaaattagtgtcaaaattttatcattattgtgttgatttaacactaaatttaacatttattattgaaatttccttaaaaacaaaaataattttattttacataatatatatttaaggataaattgcggcataaatacctaatattttaaattttatacacttaaataccttatctttatttttagaggctaaaatatttaatgttacaattctcttacacccgttactaccacttccgttaacnnnnaaatatggacacgtggagggcctagataaattacatttatttattttattttgaaatttaatattttaaatatcacaaactaaatactatttgtttaaacaaatgagagagatgcaagttaagaacactgtaaatgtgtatatagccctaattaattcaagagaatcaaacgataagattaaggaatagcggaagcgtaccggagtccatagaatcgatctttaaatgatctttaattggtatgatcttccaatttgtagtgagttctttctttgtaaactttgtctcttgatgatggggtttcaagaaaatgaaaagatacgatactgcaaattggggaccattaccgtttatattaccaacagacaaaactgt

SEQ ID NO: 174368 - DNA, 558 bp, Cannabis sativa
cctggcatgttgtaaacttaccccctagctgcaaaactataggttgtaagtggattatgaaaaagaaattgaaacccgatggaactgttaaatacaaggctcgtttagtagccaagaattttagatagagagagaatgtagatttctttgacaccttttcacaagtcaccaggattacatccattagagttttaatttcactagctgccatacacaacttacttgtgcaccaaatggatgtgaagactgcattcctcaatggtgacttagaagaataaatttacatggatcaacccaaagggttcgtgatccctggccaggaacataaggtttacaagttggataaatctctgtatggtctaaagctggcacctaaatagtggcatgaaaaattcgacactttagtcatttcaaatggctttaaagtgaatgaaagtgacaaatgcatctattacaaatctgaaaatgatatatgtacagccatatgtctatatgtggatgacttgctcatttttagctctaacattcatgctgtgaacactgtaaaatcactgttgt

SEQ ID NO: 174369 - DNA, 512 bp, Cannabis sativa
agattgagatgttgtgattgaagtacaccagttcttgcatctgtaaacttctggtgtgattggcttaagaacgatcatgagctgggcctgagcttgttgttgtgttatttccaagagtagccatgttagcactaagcggaggaaagagctctgataccatattgaaccgtctagccattaacaaagaaaccgagaaccaaagaaagagaagaaagggaaagaaagagaaagaaaatagaggaaaaagatggagaagaaagagtatctcaattcaatatgaaagatcagagtacaacttatatacaaccaacataaacgaaaataactaacaaccatatctctaacagacacactaacagactgccttaacaagccccataatgttttcttcttcttttttttctttctcagagtctataaatgaaaccaacatacacttttcagtattgatattttatttcataaatattaattatgaagatccttctttgcaatttggactatacgatata

SEQ ID NO: 174370 - DNA, 1105 bp, Cannabis sativa
ctatcaccaaagaatttaaaaaagttccataaagatgaaaccctgaaggaaagaattaataaaactcgaatccaagctactttttaaggaaaagtcttaatataggaagatgaaataaataattgaataaactatgtcatgttcataataaagagtataaatgtatattaagatacacatatttccacagcctcaacaccatgccatgccacactactggtctaaatagaataagattgggcacccaaatccttttggtgtgtaaaaagtagcaaagtataatataaatattctgtcactaaccagcttttataagtatagtaacattgctcactcatccatcgagtaagtgaaaaagttaaaatatggggtttcattagccatatatatcgattcgtggactacaactagagttaggtgcattgagcaaaccaagatattctaatattaaaaatgagagggattgtctttgttgaggaatctatctaggcttctatctgttttttattgattagatgaaaaaattaagggttcccaatgaaatgttacatttcttaaggaaagacataatttgttttataacatactctaaatatataaattaaactttagaatagtggtgtggtgtggtcctatttttcattgaatgtgaggctatttttcccatacggttaaacgtcggttacaggaaaaagacaagttacatggccaccatttggtacatttgtgcagtgtgacattatattcggaccttaaaaattcgaaagaggaccatgaatgataaagtgatctattaattaaaaagcactcataaagcagccaaaatgcaaaattccatagttgctctggtaacaattccaccaacataatgaaaaagtggaagctagtgacaattcattcgtttctatttgtattcttcaagcaccaaaaaaaatacaatgtggtcaacaaatttgtcattcttttatgggattctcttatataatgtacaaactacaaacccttgactgttaagctagaatctaatgataatccatttgaattcttagtacttcaaattgcaaaataagtgtcttgttgttccaaattcttggtagttttggtg

SEQ ID NO: 174371 - DNA, 572 bp, Cannabis sativa
aaattaaaaataaattaataaaactaataatgagaaaatgtgaaagatttataccgaaagtaattaaattaatattaaaagtaagaggtgtgctaataaaattctcttttgtactctcttttagtaataacaaaaaaattagtattaaaagcaatcagagacaaaagtgaaatagagaatgaaattgaaatctaaatcccaactagtaatcaaaagtgttgacaattgattatcttttgccggaaaatactaataaatatgataagaataaataatataattaataaaagtattaatataaaataaaaatattaataaagaaagcatttgagtagaggtaaaaatcggtcggttatggtcggtgtttacaaatttataactgaccggtaagttacagtttttattttacgaaaaccataactgatcgtttagaaattataactgtataaaaccgaccgtacggttttttggcagtttttaatggtttttcggtttggcagttttggacagtttttggcggttttagcagtttttttagtttaaccattttttttttatttcaaaaaccaaaa

SEQ ID NO: 174372 - DNA, 527 bp, Cannabis sativa
aaaaataatattttttaaaatatttaatagtataaatgtttatatttacttgtaatataaatatttattttaagtaattttaatctaaaatagaaaaattccacaaataaaaaaggttatactatcttcgattaatcacacttgatttttaaaagtaattgcttaatattttaaaaaaaattgtattaattttgagtattaaattattctcttttttattcatttatttataatagtttaataatatttaggaaaattttgattaagaatcaattttagttcataacttttttttcaagaaaaattgaggtccaaaattaaattttaaaaaattagttatcattatactaaaatataaggtcaaaaatagtataattatttttataaataaaagtatattattgattatatttaaaatattttgacattatgatgctaattgtaacatttaaaaatataatgtctaaaataaaattttaaaaaatacatatccaaactaatttataattcaaaataatatacagctt

SEQ ID NO: 174373 - DNA, 596 bp, Cannabis sativa
ttagtagttttaaaacctggtgtgaaaaaaagaatataatttttaattttttaaaaatgttgatttattgtttaattattgttgcttaactgttgtgctacattaaaaatagaatttaatggacatactgttgaattgcagacaaaattgcatcaatacttgtactacttcaaagcaatggacattgggatgagaacaaccagtacactggttttgaagctactgggatatgcatccaaaaaaattgcaagtatgcagaactagtggacagactgatgaaaaaacataactgcaacagaaattcaagtaccctacaaatgcagtttcagatacagtctggatatccagcattaaagatcacagatgatgaaagcctggagttttacttgcagttgaaatcaacagaaatggacctgacaaaacatcctttgtgcataaatatactccccaacacaacaacaacatcacaaatacctttttttttatagaggttgacaaagaaaatgaagtccacatgcttgaatatgggagtcaatcagggggaacaccaacacatcaacaacaagaaaaccaaaaagcagataatgatgaatttg

SEQ ID NO: 174374 - DNA, 546 bp, Cannabis sativa
gaagttgtctttgggacatgcttttctgaggtctacgaagtcaatgcacatcctccatgtgccattgggcttagggacaaaaacttaatttgctaactagacagaatatagagcttcctataggaagtcatttgtagaaacttatcaacttttgcttttactgcttctgccctcactagatctaatggtctttgcttttggtgaactggcgttgcatctttgttgatgtttaaggcatggcagattgtgttgtgatcaatcccagtcatatcaaaattgctccatgccaacacatcctaatttctcttgatagtatttatgatgctttctttcactgctagaagcaagtttcttcccaccaaaatagttttggtggggtattttaccttgatttttgcactctgacatgacgtaaaacgatggtgacacgtggaataaattttatgtacctgctcacaagagatatgccaaacagagcaccacatatattcgttcgtgagtcacagaagaaatccctataattttgggatcagatgacagagatat

SEQ ID NO: 174375 - DNA, 504 bp, Cannabis sativa
ctacacaaagtgcacagccccatgttcgtgttgagaatctgtgtgagcggttgatggagatacaacccacccagtgctctatttgcgcgtggcaagatatgtaagtaggtttataatttaatatatataactatagatcgattagtgaatttgaccaatcattttttattatgtgtagtaatcactggatgttggtgcccatccagtccgcaactcagaaggttgtatatctagactcaaagaatgaacgtactcgtgaagttgttagggattgcgtggaaatgtaagtgctacaaattttaacttagtattatgtaactaattcgttcacaaataaccagcttctttttggtgtagggctctgaagcagcataatctcttgacaaatagagagaacgtgggtgaaccaacaatcatcgagcataaatgtccaaggcaacttgatgactatcaatgcagttactgttggaaattattttcccaggatctagatctactcacaag

SEQ ID NO: 174376 - DNA, 519 bp, Cannabis sativa
  modified_base (490)..(494): a, c, t, g, unknown or other
caccacatactgaaatttctaaatcttttactttttttactgtggggctgaattttttttaaaatattgtgtttttcttttcaaaaataccgtgtaagttttatactatatactgtgttaagttttcactgttgttctacggttattttttagctgtttcactgttgttttataaaaacacagtattttcgaaagaaaaaaaaatcatgtggcaatatttttgtaaaaatttacctaaaatttaatatttttgtaaattttagtcattttgaatcgtttctaaaagcctactgggagtgacttgtcccggctttaatttaaccttaataggtcattattaacaaggatactaatattgcccttattactaaactagtcacttctaagaggaattttaccaatgctattttttttttgacaaagcgattaaaattactcatgaatttacgacgcccacgtccgccaccggcgctggaacctcctcgaaccnnnnnagctcatcgtctaaccgcagagcat

SEQ ID NO: 174377 - DNA, 869 bp, Cannabis sativa
tgtgcttgacgagtggatcttcttgtgagattatctcttcaattaggaaattggccaaagcttggcctttgattgatgttctcgggtggtaggtgatatcaaattgtcctagctcgattgaccattttatcaatcttcccaaagcatcaggttttgataaagcttgtcttaatggttgatcagtcaagactttaatgggatgtgcctggaaataaggctatagtttgcgagatgaatggatcaagcataagaaaagtttttcaagagggggatatctcgattctacccccaataaaccttttactaacatagtttacaggttgctggtgtttcccctcttcttgcaccatggatgcactgattggactctctgagagagctacttaaaggtataaagtttctccagttattggtttggaaaaaactagaggtgttgataaatgcttctttatgcctttaaaaacttccttgcattcttctatccagtcaaactttttattgcctcgtaaaacattaaagaatggtagacatttatcagttaattttgaaataaatctgtttaatgctgccattcttcctgttgaggcctagacttcttttgacttttttggtgaaggcatctctattaatgccttggttttttctagatttgcctcaattcccctcacattaactatgaaaccaagaaattttcttgaggagactccaaaagaacttttcttcgggttaagttttataatgtattttataagaatttcaaagcattcttcgaggtcttttgtatgatcatcacattttatcgaatttaccaacatatcatcgacatagacttccatattttgtcaaatctgctttcgaacatcccatcc

SEQ ID NO: 174378 - DNA, 650 bp, Cannabis sativa
tcaaaatgattgggtggatgttcataaatgttcaatttatgtttggcgtttttatttattttttattaaattcttaatttgttttgttgaaagtttcctcatcaacttagaatataaaatataagaaaattttacaatacacccctttaaaaaggatgtaccaattttatttttgtattcaatataaatttttagtcaaattttttcttatggttatatatgttatagttatttaagatatcttacaaaattttaataaaaaatttaacatgttgagaaaaggattcgaatactgtgttgcacgtgtgattattttattttatttttttttgacgcggtgatcaaaatcacacaagattatcaagacagcaattcacaatcggcgacagcacctcctcgaaccaggaatagttcattgtctaaccgaagggcatgctttgccaaaccatgcactgcagaattctcatcttgagctacggggacaaaactgtccccggaaatttagacaataaagctataacgtcttcaaacaacaccacatcacattaaaaaaacaccttctcattattaactagttgtctttagagcaaaacgaaactgaaaaaattgcaacaccaaaataaaattacacttatattagaatgacaatc

SEQ ID NO: 174379 - DNA, 1001 bp, Cannabis sativa
  modified_base (213)..(216): a, c, t, g, unknown or other
atttagggcacaaaagccaacacattcttcctctattttggtgatttattcacatttgtacttattacatgtgtttgattggccaccttatgcatgatctacgatctcaatacaaaatctgaaaagtgagtattgagaatgctttaaaagaataaacataggttttgatgtgaaaggagagtattcaaatagcttatgtgacttttagattannnnttaatgcgaattgtatgttgttctatctcagagatgtagtagttggcatgtaatttaggaactttatgatttgaaaagagcttaggttaatttataagctctcatcacacaggagaaagaagaatggttaattagtgtttataattggataatcaaagcaattgaaatcatatccctaatttcacatccattgttaaaccttttatttatttgttttatttaattttgcttagtttatctagttcaaaatttatttattcgattgccaaatataaataagagtttaattgatcggtacttaactacagtcctcgtgggaatggtctcacaacaagttttttgcgccgtagctaggaactattttagttaatattaatattgtggaattctattataatttgatttccttttatttaattttactaatgttttattgaatgtgttggatctgcaaggtaaatccaaatgctataccttgtgaattttgtccaacaacccaatgagccattctattctgcttgggggagatttaacgagctcggagagggatgttatcctaatttctcaagtggatgttttattctattcttttacaatggacataatgatgaaataaaaagttggctagattatggagtaatggtaactggagagcctttgttaaggagagtccatgaagcaataaatcaaatgaatgatatggcagattttgattacgattggcattgggatacatcacttcagggttggagtcaccaataccctccttattgtccaaactcacc

SEQ ID NO: 174380 - DNA, 794 bp, Cannabis sativa
  modified_base (332)..(332): a, c, t, g, unknown or other
actagctctactgtttcaacacgttacatttagtatatttagtaaaatatcgttttagatttttagaataatttttgaatactgaactgttccacttagatagatttttctatttttttcgttacatatgaatttgaattattcctccaaattttctataagtaaataataagtattattttgttatgactaatatatacccaattatattttaccaaccaaatataatagcacaaatattactttaataaaataaatcatttgcatgatcatacctttagatacaatctaaataaaaaaaaaaagaattaaactttaaataaaactaatanttacgtgcctcggcacgtaacttctaactagtaaattaaaaggtcttattcgttttttttctttctattttcttgttatttattttaaagggaacatatataagctcctttttttttaataataagttatacacacaaccacattgtatatattaattcaaagataattatttttcacaactctattgatcaatataaattaaaaagtcctatttgttttttgtatttaatttttttttttaaatagacataaagtttttattcatatgataatagattatatgcaataatctatacacacatgatacacatgtcacacactcacacaagatgattttttttataacactaaaattaaaaagttcacaatgatttttattcaccatttcttctttaaaaaagtatgtacttaaaagtttcacattgtattaaatttattaaatacaaaatatatatatatat

SEQ ID NO: 174381 - DNA, 743 bp, Cannabis sativa
aagaagatgagattcggagactcatgcaacgagacgctcctgttgagcttcccctgcaaccgcctgttgcggttcctgcgatgccagcagagcaataagttgctggtaatcgtatggagcctttctatgagagattcaggaagcaagcgcctccagtatttctgggaggccctgatgtacttaaggctgaacagtggctaactattatcgaaagaatattgaatttcatgggagtggtcagaaatgacagggtggcatgtgccacgtttcaatttcaggaggatgccttggtgtggtgtgagatggtatccctcacgaaggatgtgccagaatgacctaggaggaattccgggatttgtttaatgctaaatactacaatgaggcggtccgcagtgcaaagcagaaagaatttgttgagttggtacaaagtgagggtatgtctgactgaatacagaacaaagcttgatcgcttggctaagttagccattgggatcgtaccaacggatttcagtaaaaaggagaagtacttggcggggttgaatgccaagattaagcacaatctggttatcacaacaaatgatactacaacctatgttgaaatggttgacaaggctcttcgagctgaaggagctagcagttaagttcttgcaagaaactcaggatactcctggtgctggtgggaccactactctccctatttctagccctggaaaagagagtggtgattccacttttgagcaaaa

SEQ ID NO: 174382 - DNA, 631 bp, Cannabis sativa
ctaatagatgtttttggtgtgaaaaatctacaaaagtgattattattagtactaatggtaggtagtgatgatactattgatggagaaaattggtgaacagccatacaatgcatttttttttttttttttttaattttatgtataatttttcgagatgaaaatttctgcattgtacctcttgtatttatatatctttatgatggtgaattaggcaagaacattaattgaaacatttttatttatatatcttaaacatagtatatattaaataatactaatacaatctaacacaataccaaggccgtttcaaggtgttgagaggcctagggcaaaatttataagaagactttttccttttaaaaaaaattaaaataaatattctttatttattaatttatttgctttgagatattatttattatttaaattttgacacaatttaatttaggaaaattacctcacatactattttttaactttttttttctttcaaatttacagtttaagttgtgttccagtagtttttccggtagtttctatatgagttgctatgttgattttgattgcgatttaggttgcttcgttagttgctatgggagtttctatgtagaattctgtaaaaataccaaaa

SEQ ID NO: 174383 - DNA, 742 bp, Cannabis sativa
tagatctgctcggaaaattcaaagggtaaaccatcaggcaaattctgagagaggaaaatgcaattgtagatgttcttgcacggttagcaagcaggacagcgacagataagtcaaatctagtactaatccagttcctaaagaatccaaacattacctgctcaaaagagattgaaatgctaaatactacctcaaattggatgacgccaattgtaacttacctaaacacaggtgaactactaagtgatagaaatgaagctcaaaaactcaaagaaaagtcgtgcggtacctaatagtggacgaagtaatgtatagattaggcttttccatgcattttataaggtgtgttattaaagaagaagttgcacgactattaactgtagctcatgaagggttttgtggcaaccatgccgaagggcagagcatgtctaagaaaatattaaggcaaggttatttctggccgactatgatcgtttagtaaaaatatttttatttttgtaatatagtagatataagtaactacatttttcttacgaataaatttttaatcaaaacaactttttctaaaaatgaggtttaccagctttagcttttagttgtaacaactttaacttttagttgtaacattcatataaattcttcaataagttgttttttaactacttacgaaatacctttttaatgttgggattttatgccctaaataaaatccatttcaatctaatctgatttgttatcaatagaa

SEQ ID NO: 174384 - DNA, 702 bp, Cannabis sativa
atatataaggaaaggtaaaaataagaggtaataaaaagtgagtatggagtgcaatttcctcaataaattataatataaatatttttatttatcggtctagattatagttattttgaacatcacaccaatttttgtaaaattttaaataatttatagtattaaaagctgacttaaaaaactataacaccagatctaatctatttatatttatgtgtttagtttagtgacaaagagatgattgcatgtgcctgatatttttccaagtgtaagtatagtatggtatttttgcaaattacaaagaagtatgacattataggagaattatttacaattggtgataaggcccacttcgaattctgtattaaggcttgggctgaagaaatttgaattcataaaattttaatagattaagtttttttttttttttaatatattgtagatatttattggaataatttgataattatcattttttattacatataaattaaatataattataaaataatttaattaatcatattttttataattaaagtattaaatataacctcatataacttattaaaattaaaatcactaacatatataataagaatatgacctataaaactggatataaatttaagagtaataaaaaaaaattaaaattaaaataaaaaataaaaagtgaatataaaatgtaatttcctcaaatatttt

SEQ ID NO: 174385 - DNA, 683 bp, Cannabis sativa
tgaggatgggctcaagctggctcggctggctagaccaagagtggtcaaaaacttggttccaatttggatccttaagccaaacattctcgaagtgaaaacgtttgttattattattaaggcgagtgcccgggggattggaagtgttaagttctagggcgcggtggtcagagccgtaaaatcccagatgggcaagagtggcatcagggaagatatctgcccagtggttattgacgatgccccagtctaatctttcttgaatgttttttggggatgcgacattattattccacgtgagcaagggaccagaggggtcaagaggggagagatgaaatgagtcaaggaaatgtctgaaatccgaggaagggcccctatcgggatttcccccttgtttatcatgggaaaagagaaaagcattaaagtccccaataataagccacggatcccgagggttacccctaccaattcggttaagaatattccacgtatgaggcttaagagaatcaaccggagagccataaaaacaagtaagatggaaggatacattagtaatagaacacgacacgtagcaatcaaaatgactgatagattgagaaagcaaagtgacaattacatcattagtccaaaataaaagcaagcccccacttctacctatcctaggcatttccaaacccgaatcaaaatgg

SEQ ID NO: 174386 - DNA, 512 bp, Cannabis sativa
gaaagcaaattaaagactaaatgcgtttcaaacttggatcacatgattggatgtataactcaacagcgtagttgaaaatccagagacgctgagacggacaacgaagaatgagcaagattttttcaaagagaccacgttattaaggctctattttttttccattcaatatgtgtttttataaaatttgactttttaatcgctgaaaaaggttacttaaaactcaagatatgctaaaaatgaatttatgtatgcaaatgtgtgctagctcgcgcacgtgttgtcaatttttatcaaaattgacttcgtaaaaagaaaacttacataatttttcctaatctttcaatataaaataattacataacaaaattcatattattttatatagaaaatttacaaaaacacaatcaatcatcaatgcatatatcacttaacatgtaacatctaaatctcacataaaaatacataaaaaattgttttaaatccagtttacatgaacaataaaaaattaccac

SEQ ID NO: 174387 - DNA, 571 bp, Cannabis sativa
tctctctctctctctctcatcatttcagtagtaggagcaagactctattttgttcatgttttgtcactatcatgtatctaactctgagcactatctttaatcaataaaggcaaaagtctcaaagcagttctacctaaggagtagatccaagtttccagtatgtgatcgaaccttgtaatccaaagtgttcacactctgttttatcattttcgtgctcatctggttttagttctctttcttaatctttaatttttgtgtgtttgttatgttcttggagagtaattgaatcaccacaaaagataatatttttgtaaaaaaattcgcgtgatagtaaatttataaatttttatctaaaatttaatatttttgtcaaaactcctaaattattttagtcattttgtaacgtaaaagtcagagataaataggaaaaattgtattttggtgagacattttaaatgatagtagaatgcagggacggacccaagtgtattagtttgggggctatagcccccactagcaaaaatattgccttttaaaaaattaaatgtaattttttaaatttgataattat

SEQ ID NO: 174388 - DNA, 504 bp, Cannabis sativa
aacttcaatggacaaggcaagttttgagccgttttaatgctccaaagcattgttttattctctggcttgcaatgcaccaaagactcaagaccagagactgattatgcaaaatgaagatcatcaccgatccaatgtgcttgctttgctgtgatgaggctgaaactccagagcaccttttctttgattgtttgagaactaaggaatgtttacaggaaatcaaaaggtggctgggttggagaacaatacacacaggtcttactaatatcattaaatggctaggaagatcaaaggagtcaaagttcaagctgcaagtgtacacatctgctgtagccggtctggtttacagcttatggcagctgagaaacaaggtttttatggaccaaagaggagcaattaatcccagtcctactcaaggaattaaaagccaacttgaaatttagaattgagatgtttttggccaaaaaaagtttcaaagagagatacacaatggtttcaaagtctgta

SEQ ID NO: 174389 - DNA, 608 bp, Cannabis sativa
ccacaccatgctcagatttgagattgggaccacaacgatatcgttccagagcttttcgccggaggtcgagatttgaagaccaatgaaccggttctgggttggtttttgtagtcgatgagcagagcctaaccaccttgcgaaatcgaagggacccattgttggatttggagttggtttcagtcatcgacaaccaacctctacaaataacagcattgcaagtactctagttagtatcattctgtaaccagaatgccatcagacatgtgaggcagtgatacatagtaagaaaagaagaaaacaaaatttgacattattaaaagcttggagtgcaacaggagattcaaccttttaaccattacagtccattggagcaatggttttgatgccatcatcatgatggtgagtttgtgagagatttgtgggtgatgatttagatctaaatatcagttttttttttactgtaacattgataaattctttgaagaagaagaagagaagaatcggggtgggttggattcggggataaattataggattttgttttattttcttagataatggtttttttaattttaataaaagaaaaagaaaataaataaattttatag

SEQ ID NO: 174390 - DNA, 546 bp, Cannabis sativa
cagcatattgtgtcaattaaaaaacacgaaaaaatttatcattgtattttaataaaatatgtcaaaaaaataaattaaatatatgtatctacatatacaaagcaacacacatacaacaaaaaaattgtccagaataaactaaaaatatacattataaaaaatacacaaataaaaaaacaactaaaaaataattgttcagtaagaaaatatttttaaaaccacttaaaacagctaaaaataacaaaataaatgcacatatatacaataaaaaaattatctagaataaacaaaatatacataataaaaaaatgtacacaaactaaacaactgtataataaaaagacacttaaaaataatataaaaacaattatagaacacctaaacaacaacataaaaataattataaaataacaaaaagacgactataaattaacaaaaataacaagatatcaaatatacaaattatttagggctttttttcaattttaaccaaaaaaagtaacaatattacaaaaatactttcagctggccaaataaacaaatata

SEQ ID NO: 174391 - DNA, 933 bp, Cannabis sativa
tggaccaagccccgtaccccgaactcgaacctcctaccccgacctagagcctcgaccccaatcctgaacccaaacccagaccatagccctgataggtttaatttataacgcaagtatacatctcatttcaagttataatagtgtgtaagcacgagtatcgtctcacgaagactattaccaagtaccaataattatttttctactttctatttaacaaacaaaaattgagggaatattattaaaactaggaaaataattttactataaaattaaagtaggcaagcaatgattatgaatatcaataaatggaacctaggatatcaatttcatcaacttgtcaatctatttattttactaatctgttctacaattccttcttctaattttaatagcgggttaactaaaataaatcatattctttttcaagatatgatacctcaatctatatgaaaattttctatgtatctgtgataaattttaacatataaaaggtattaagaatgaaaaacttatttgctacacaagtcatacgagtactctcgttcaatatgaaacctatgtctatataactataacatactcaactctcatctcttgaatctcgaattaaaattagaaaaacatgcaaatagtgaccaagtatttacaagcattaagcataagtcatatagattaaaataaagaggaagaaattaatagaacatcatagcaaagtaaaataaaaattaaagtgactccattaacccctaaaatcatgttcataactgaaattctttattttaatattcccaatttattatttaattaaatgcagaataataaaactggtactaaaacagttttaactccaaaataaaccaaagaaacaaacaatgcataaaggtaaaaacacacaaggtttttgtatgtggtttcaacaatcctttcagattg

SEQ ID NO: 174392 - DNA, 619 bp, Cannabis sativa
aacaatggtggaaactcaaaacaatacacgtcagccccgttcagctcaagatgctcaaaacccagaaggcgaagaagtggcctcacgagtaaatatgggttctgaggaacgtgatgaggcgaatgatgaagaatacaaagaaaacctcgaagggtacgacacctacgacgaaggtagctatacgaaactgctggtcttgaggaaaaaggcggctgatcatgaagccgaacttgctgctcaaaaagaacagaataaaaggatgcaagaggtaatggtggccatgcaaaaagccatggaaacaatggggatacatatacaccccaaggccatcctagcgggacccgagaaaacaccgaaagaatcctcaccgagtactcagaagcccaaaaccagggaaccaagccctatacggtacccttccgaggaaaaccttgagaaaaatctaacttcgatcccagggagacagaagaaggcgcaggatccgcgaaaagtccgctcagatttcccgaaagggaaaggtccgtagaggggcaagctgttgagatttttatgccctaaataaaacccattcaatcaaatctgatttgttatcaataaaagattagaagtcatttatgtt

SEQ ID NO: 174393 - DNA, 601 bp, Cannabis sativa
agataatactcgacatataataagagcctatcgctatgattcatgtgtttattatgtaatgagtaacgttgggttaaacactactacaaaaataacttttacttcagttttaaagtaacacataaaaaatttgcttcagtttgtgtaacctacgttattgccgtagacgcaaatatttattttttttgcttcaattttgaaccgatgctaaatatttttttgctttagttatgaaccgaagcaaaaaaaaaacgttttacttcggttcataaccgaagaaaaaatcaagtgaaccgacgctaattagttttttgcttcagttatgaaaccgaaataatttttttttaaaaaaaaaaatcagtttcatcgcaccaccaccactaccactatactattatacatctcacaccaccacatatatacaaagacttgaataaccatttaaacccaaaatcaacaagtttaaaccaccacaccaccaccacttcaccaccaccaccaacatcgcatgccaccaccacaccatcacccatggcgaccgcaccaccgcaaccctaaaaaatcagccaacatcaaatgagaaaaagagagagagagagag

SEQ ID NO: 174394 - DNA, 723 bp, Cannabis sativa
tttttttttttttttttggagtaaactaatttattatatttatatattatttaatattttaataaaaatactttcacatctaatactttcacggtatattaaaaataatagtaatttgtggcataacttctataagtggttagtttatcataactaacttccacttttaaaattttaatggtaaaacctcctaaaaataacaattaccacatattaatgtgataaaatatctaaacaatattatatagtaatttattatattattttaaatttaaattgatttttaccaaaacaaaattgcccagtacaatcctttcaataaaaaacaattaacgagcatatatataagtttgttaattagcttattactaggcttgtatacaacctataatttttactttgtgggggcttatttatcataaaaaaaatatttatacctacattataatcaccattactatatttatttaattttgtgggagctttttttactattttgatctataattatcaaattaaaaaaattacatttaattatttaaaaggcaatatttttattagtggggcctatagcccccacatattaatgagtggatctgtccctgcttatatattatatttgctcttttatagctcactagcattgtatttttttagcagctaaaatatttgtagtgacataatatacattaaatatagtaatttggttttatattttatcgt

SEQ ID NO: 174395 - DNA, 738 bp, Cannabis sativa
tatttaaagccacttggtaattttccttgatgcctcatgttgtacaaaagaactaataagtgacatttggttgggaggaatatgaataagaatagaatggaataaaatttaaaataaaaaaaaaattaataataaaatcgttaattttttttttcatattatattggaatggtttttctactcattataaaatggaatagtcattccaccaaagtgatgaaaaaagacatttcattggaatgatattccaatactttaaaatgcaactaaataaaagaatggaataaaaattgtctcatttctattctatttaattacctccaactaaacgccacctaagtgaagattaacttagaagttcttataattgtttacctaatgataataataattatctttcggctgttataaaataattaaaatagaaaaagaaataagagaagagagcagacaaaaagaagaagaaaatgagagtgaatgaaatttttctctgactagaataatgagaaactaaattaatgaaataaagggaaatataatcaagcatttatggtggtaattaatgcattgatttggacatccataataatattttatgacaccctcctttggatgtccataaaaacgtctcattaaaaatcttgctaaaaaaactcggtcaaaagaaaaagagtgtattgtaaattaactccccatcatttagttattcatagagatcttctaatcgacgaatttcga

SEQ ID NO: 174396 - DNA, 704 bp, Cannabis sativa
ttatgggtgatattcatgatgttataataagagcaataaaagggtatatcctatttatttaatttgttttatttcagaatttaaggtatatcctattttgattgttacaataagagcaataaaaaagatatatgttactttgtaccacttgtacacaaagtttttatctttaaggacatactaaattcggaaaaatcaaaaaaaaaaaaaaaaaaagcttaaggagaagaaaaaaaagcggatagctgtgaatcagcctgcgataataaatacaatccttaagggcccgtttggtacgcatgactggattggattagacaagttaatttgtccaatctaatgtttgggcaagtatcccatgcaggtaagagtttcttttatatagtttttttaattttaattttattaatatattttaaattcaataagaatttaaatgaaagaattattgcacatttatttatacatttttttaatcaaaaacttattcattaaaattaataaaaatatataattttgaattattatacataaatttttaaaatttaaaatattattaattaaagaataattacttaaattgattttaagacaaacaatatgataataaaactatatattatttttaaattactagaaaatttatataaatattttaaaaaattaatatttatattaactaattttatattattcaagtattt

SEQ ID NO: 174397 - DNA, 569 bp, Cannabis sativa
agagtaaatttgtgtgtttgtcccataatgtataataatttgtggtgttacatccagttgctattaaattttaatcttatgatagaattttataattaaaaaaaataatatttagtgtgattttataaaataaaaataataaaaaagagcaatgctttcttgtggatcaatatattgatcctataatcaaagttgtttgatcttggagatgcgaatttccatgtaagtgtaaataaggatcatcttcaaaattaaacattttttatttcaatattttcaaactttagactagaaacttttatgtcctcttgtcgtgacgactaccataagttaactcttctttgacgagtggattctaactagtagcgcaagccaaagttttctcctcttaacactgcttcatcttgaaaaaaaggctacttcctactactctaccactaacaacatattctagccatctatttagagggaatataacaagaataatgcataattaaatgtaatttctataataccactactacaatgttagcttttagaggcagttttttcaaccccatttataaaaa

SEQ ID NO: 174398 - DNA, 517 bp, Cannabis sativa
aaaaaaaaaaagaagaaaaaagaattttgggtgcaaaggcaccttctctgaattccaaggttgcgtgcagcctcatccatgcgcgcaggaggctgcttgcagtcttggtattcagaatatggaggctatagaaaacatgggcttcagacaaggtgcatggaaatcaacttgtctgaattgctgcgcacgcagggagcaggtgctcgatagccaatgcaccaaaattttaaaacctcataactctctcatttttaatcagaatcgaattttttaaaaacaaaactttcttaaagtttcacaaagattctaaataaaatatttccagaacaaaaataaaattatttttcatagaaaaatattgtaattaacatttaattatcgaatgacacataaactaacatgaacacatccaaattaactaaacatcattttaaatccatattttatgaaaaataaataattactatggctctgataccagttgttggaagttatttttctaagatctagattttct

SEQ ID NO: 174399 - DNA, 661 bp, Cannabis sativa
ttctcattgaagaagctctcgtcttttgaattgctgtcacaagatgtggaacttcgactgaatcataagaccctatggttgcgaactctaatgtccaagtgccacctgccatgaccaatccaaccctgactggccagccaccatgtttcggccagctacccgaaacttccaccattgaggtccagccaaaagagaaagtttttgctagacccactgtccagcccacaactgagactcttggcacgagagtgggaccttgtgtttatgctagtgagattggacctggggttggcaaccctagcattgatgaaccccacatggacctagcggatgatactaaacttgtcaggctaagagaggctacatgacaagtttagggtcatacaaactaagagaggttgtaggacaagtttagggtcatacaaacctcttacatcatgaccaacaagaaacatatgctgctatggatgatgctttcgctcagcagagacgtgaattccaggagtggatggatcaacaggccgtgatcctccaagcccaacaggcagagctgaactgctggaatagaaggctaacaacctaatcaggtcattcaatgagagatttggatctcaagttaaagagccctccctcgtaagggatccctataaaggaaaaggtc

SEQ ID NO: 174400 - DNA, 798 bp, Cannabis sativa
ttatctcatactgctcaactttattgcccacttgaataatcgtctagaggcgtatggtttttgcaatactttgcgcagaggttggtcagtgtaacccaaacaggatgagcttggaaatagggcctcaacttccttgtggctaagataaggcagtaggtgagcttctgtatcagaggatatcatccctcaacttcaatgagtcatttgctaatatagtagactagatgatggattttgttttcttcctttatcagcacgacacttacaccgtattcggtgatagccaagtatattcccaattcttctctatcgaagggttttgacagtacgagaggttttgcgagttgctttttttaattcttggaaataatcctcacattcatctatccattcaaactttttattacctcggaggatgttgaagaaaggaacacacttgtccgtggatttggaaacgaatttgctgagttcagctatccgaccagttaagctttagacttcctttgtttttgttggcaatttcatatcaggagggcttgtattttctctggattagcttctattccccaatcattgacaataaagccaagaaacgtactcgagctgaccctaaaggaatgctttaagggattgattttcatgttgtatttcttaagaattttgaagcattcatctagatcctctatatgccccctaagggtgagcatcggtcaatttggtcggtttttttctatataaaaatttagaattcagtttttcgtcgggattggtgcaatccaaaaaccgaccgaccaatcc

SEQ ID NO: 174401 - DNA, 643 bp, Cannabis sativa
aattttcaagcataatttattagtttgttccttactttatcatagtactatttatttaggtgaggagaatttcagaattaccaaagattttgaaaagacaaattacaaatttgtaacaattaatacaagttgtcagaattgttacaaattattacttatactttataattgtttgttttaactgtaaattgcatatatataattttctaaaagaccgtgtgatttttattttgggattttttcatataatatctaaaatgatacttttattttatttttcagttatatttttacggaaaacaatgtaagaacaacagtacgtattgttctaagaaaaaatcaaagtcgtaaaaatattgaggaaactgtagatctggatttttcttaggtgagagtatcatttttctctcacccataagagtattttttagtagttttgattggttgagaagtggaatgtatggagttataatgagttgttaaacataatatcagttattttaatattatttcatttttatattattattgttattattttttttaaaaaaattaactttatcaaaatagttaatttgtgagatcttttccaagaatcttctcaatcgttttttcacagaatcatgatttttttttttttttt

SEQ ID NO: 174402 - DNA, 540 bp, Cannabis sativa
  modified_base (232)..(238): a, c, t, g, unknown or other
atcttgaatggttacctctgtagcaacttgagttctgatttcccttgaattccttcttggggaattttcccttaacaaagagtaatccttccccattgatctcatctttctcatctcccttcttctgaatttctttcgaattcaatgtagccttaacctctgtcatagtcagagtttctttgccatacaagattgtatcaacaaagtgctcatacatcttgggaagtgaacnnnnnnngattatagcctggtcttcatcatcgattttcactccaagattatttagatcaagaatgattctgttaaaatcatctagatgtcttcttaattcctttgactcatccattcgaagtgtgtacaacttcttcttaagatacaacttgtttgcaagagatttcttcatgtagatcgatgccaacttgttccaaagacccaatgccttgtcttcatctgaaaattctctcaatacctcatcaccaagattgaggaggatggcactatgtgctttggcttcaatctcaagtttcttcttgttgtctt

SEQ ID NO: 174403 - DNA, 985 bp, Cannabis sativa
atagtatttttgggaaaaaaatcttctctccccaattacctgtcacattcatgtctcttcaataaatagttgtcatgtgtctttctcttttcttacttaaccgattcaattttcaagattaactctgttaattctatctcttcttctctctcctcgtaactaattattttctaattactgagtatattaaaaaaaatacatattctatgacattttaatatattcctcttaaaaattatgatattttcgtataaataaagtttctatggtatatggaaatgcaattttaagaaaatttatttaaaatatttcatagcctaaaaaattaaataaatggctaccatattaatagaaaactaaatattatcatttgagtataaaaactaattgtattatatacaattcatttaattattttcgaaaaaattgctctaagacctttttttttattttgcaatcaaaaaaattatagacaatcataaaaaaaaaattataatttatttacatgcaataaatatacatataatcagtcatacctaaatttttattttgtaaagacttaaataatgtaaaaaaatatattgtatttatatatttactataaataaaaattacaatacagtagaatttcaaaaatatatgtaattaaagtaaatttatttaatttttcgggccttaattgttataaatatatatttgcgggaactttttatttattattttgatgtaattatcaaattaaaaatgattttattctttttaaaaaataaatgtacatttttttcaataggacttgatcttagccaaaaggccgagaaaggtatatatatatattttctttttaataggactaactagagatggaaatttatactgcggggagccgcccgtaatggggtggggattccccatcttggtggttaatggggcggtggtgggagacaatttcaatacccgaagcggggatggggcgggggcggggata

SEQ ID NO: 174404 - DNA, 585 bp, Cannabis sativa
agcttttctccataattacaggacaaattcttttcgagatggggggcaatgagttcatttacttcattttgcatcttcccgcatagaggcaccgggtgactgttgaagttgacatagagttgtggaaaattaacgtgtacgactgtgattccagcatttgttattggaccaatatggcacccatcttgaagacttgggaagaactgttgccctcattaatctatgcaactggtgattctccaagattgcagtgtgaacctgataaattcaaccaaagtagttattggatatttcctgaactcttatgtaacactgttgaagctttcggcagcgttgctggtcatgatgttgtatctatcagccaaacaataagggtgagcccacttctcaaaccctatactctccacatatgtggcaatggtcggattcatctttctaagcttttcgatctctctatcacattcagtttttgaccatgaataagtaacattatatattggttgtgaaaaacatcagtcttgaacttggagttcacgttcataacaatgtggtgatagcatgcacagtggactacttcgggaaaaa

SEQ ID NO: 174405 - DNA, 599 bp, Cannabis sativa
aaaaaaaaaaaaaaacttcttttcattttctatttttttaagagaaaaaaaatattagaagaagctataatatggatgttagttttgacaaaatttgtatctctttcagtatttgcaagagttttttagttgattttattttatgatggtatacgttaatattttttagttattgaggactatatttaaatttttaaaaaattatcaatagttaacactgttaaaaataaaatttaaataattattcaccacatatataagaaaaaacagtcatttttacaaatgcaaactattcaaaaattttaaaaaaatttgtaagtacctaaataattataaaatagactaaaaaattctcttacatggtaaaataaataaaacatctaccaaaacgtcgataaattataaacttacttgttagttttatcattttgttgatagaaatcttgttatttagaaaaattatataaatacataaatatataaacatataacatgatggttttaattataattattgtagatattttattactttaattttgaaaaaaattaatattaaataatttatgtaagatattttaagtaaaatatatttattt

SEQ ID NO: 174406 - DNA, 800 bp, Cannabis sativa
aggtgtttaggactgcctggtggtgccaactcaaagctctccttccccacgattaggatctaatcaatcttgggaatccagaagagacgctttcgaggaacttgcattatgccctcatggtaaatttactgtattaatctatattattttttctttcttttttctccttgtttcttatattcatttgctcataattcttcagacttctttcctctctttttcctcccatcggcgaatgctggagcggctcaaatacatggagggcgaggtccaaaaatcactagcccaacgcgaggtcgtgattaaacaatggaacgacgctcaacaggaaatcacccgtctaaacacaggaagccgagaggtcgaaggaacgtcttgaagaagccaagaaggctacaaagaccaagactgatgaatgcaatgaacttaagaaggtgctcgcgaagaaagaggctaaactcaaagggaaagaggccgaactcaaaaggaaggaggccaaaaccacagagcgatgcaacaaggtcggccttcataccgtttatcgagccttgatggcgaatccaaacatggacacaagcttcttataggaggatgaaggggaaactttggcttactgtgaaaaggccaggaaggaggaggaacaggtcgaggcagcgaaagaagaagatctatccaagtctcccacaatgtaggcttggtttttatttatttccttcttttttttttataaggaaatggccttagagccgagacaatggttttcgaaggtgggtgggcaactttgtttttttttttttttt

SEQ ID NO: 174407 - DNA, 633 bp, Cannabis sativa
gatatagctcaatgaagaatgtaagtacccagcgaatggatgctcaaataagcaacaactactctatacaaatcaaatataaaaagaggaaagataagaataaactctagtatgcctataataaattaaaactttaaatttaagaaaaatttttggcgggtgtgtataaatcgatctaattcaatgataattgatcgatccagttacaattgatcgtcaaacattgaatatctaattttgattggatcaaattagatgtatatttgatcaaatcgaatgttggatgtggtgttaaaaaatctaatacatccaacatccaatcgaaataattcatatttttatttattttgaacgagtaattaaattttatgttgttatacgtataaaagatatatatataaaaattaacattaaaattttatttatttatttagattggttggatctaattccatccaatagatattggatctaaaatattgaatgaatctgattcgtttcaataaatactaagtctaaaatataaggtaaacctaaattataccaataaatatacatgaaatacatcaaatggatgaaccgatccaattcaatatccattggatgtttgatcgattggatgactgaaattaa

SEQ ID NO: 174408 - DNA, 619 bp, Cannabis sativa
acttgggaaagaaagtgcatgagtgttggaagatttaggatccaatctcagattgtgcaatgcattgtatatttaaacgcttcaataagaaagaaaaaattaaagataatttttagcacaaataaatacaaaaaatatattattgtaacaactctagatttgattattattaacttttattttaacaaaaaataagtttatggtaatattttgtactattttagaaaatacaagatttaattttttatttaacaaaataaaaagttcaatctataatttttgtaaaatacaatgacaaaagataattctaaattaagttataaataaataaatatagtgagactttatttaaggatgacaaacttagaaccgactcttaattaaacatgtcaaaaactaaaactcaaacctaacttgtttataaacagattgatatgatctgacgtgcttatatagtagatcatctatctaagaatacagtgtgtttggaagtaattgtgtaattactaggtagggtaatcactagggtggtaattacacatatagtaattgcactatattttaaaatgcaatgtgtatgtggatatgagatggtaattacatatgaattcctaatatc

SEQ ID NO: 174409 - DNA, 517 bp, Cannabis sativa
tttttttttaataaacaccaattaaagtgttgttatagtcatgtgtgaagggattttaattttcataatccctcaaacactataatagaggtattttgctcatttgtgaagatactaatttctatcaagaaaggatcttgctagaaaaatctagaaagctattttcattcttttcttttccctaagtgttgtggtaggggaaaattaataagctttttgacaaatgtgtaaaattttgttcacgtttggtgatttctctattatacacttatggtgtatgtgatgtgagattacttagttctcttatatatatctatatatttaaactatttactttatagttatatatataagttatttatgttattgtgttttgtgtgtagtttattattttgagttgtaattctttttattatttttatatttttttattttatgtgtatattttatttagtattataatattgtttaagttatgattttgtctttgtattatttatcataaagttataatctt

SEQ ID NO: 174410 - DNA, 885 bp, Cannabis sativa
atcaagattgggggaataacaaaggtacctaaaattaaagcatcctcacaacgagcagacacttccatgaagtagaaaaagtcttttcaaatgttttcttctctttgaatctgccagaggaacgagcgtggagtgagcaccaactcaccaaactcttcttcttcaacatccatatctagttctaaaattttaggcaaatccacacctaaaagttttcttcataacatccaacgacgtcaaaccttgcttcttggcactcggagccaccactttcttcaatcgccctttcttctttgcaccctacaatatcctaatgagagagacagagaggagagagaaactctcttttgatttattttgataaaaatgattattagtgcttgaaaactacattttctctccatgtgtctgattgaaaagtgatagacaacggtcctggcttcttccctgtgaaatttcataatttttcgtgatgtgtagggtgatattttcagagaacactaatgattgtaagagtaagaaaaaaacgtgttaaaatttaccctacaaagaagaatatattcaatatttgaattagggggctattttaaccaaatttaacgtgaaacctatctacttactcatgtcttattagtatgaattcattatacctagcggagaaaaatattctgagattggtccgaaccacatttcacaaaagggtatcattgttagaattgtgagatttttcctatgtcaataaaaattatcattagttcttaaaaactacattttctctccacgtgtcaaataaaaaagtgatagacaacaatcttggcttcctccatgtataatttcacgattgtttgagatgtgtatgctgagattttaagagaacactaacga

SEQ ID NO: 174411 - DNA, 713 bp, Cannabis sativa
agagagatccgagaccaccaaaaccgaggaagagaacaatgagagagagagagagagagcgtgtgagatctagaaacagaaagagatgagagtgagagaagtatctggggctattgggctcggtctgatagtgtaggggcgacgacgggtgtcatgagccaagccttaggccgtggcagacagatatgtaattgagtgatcaaaggtcacactttgacccttctagaaagatcacacttataattgatcctttaattaatatcacaaaatacttatttaaaaataataaattaactcctatatggataagaaaatattagtaataaaacctggacctctcattaatataaaaaaacaataatattttcacagttatgaaatcaccaattagataaatttaataggtcaataaaataccaaaataatatctagcatttatcattcctcatttctaataacacttagctaatttaagttatccaaaccatccattccagcttaaatataaaattagtttcattgaaagtttaataagtagaataaaactaaactaataacgactttcttcttcagtggtaccatcctcatccactagcatcaaattgatcagttcctagaatgggagaaaataggaggtgagcttataaagcccagtaggaaaacaactaatatcaaaggacccttgttttaataaaattcctgcatggttagct

SEQ ID NO: 174412 - DNA, 548 bp, Cannabis sativa
ataggtcatccgtgaacataatacgaaagggtgtcaaaaatcacttattgtcccaaaaatttccccacgtacatgacactcctttgacatgatctcaaaaaatcaagcagcttgtcctctacgtcagaccttagaaaggctcacagcaaaaaaacaaattaccttttttggacagacaccaactattctaatatttttttatttcccacgatggctcacgccccacctatcacaatcaatagtttcaccaaggacataaagcaactcaattcaaattgggtttcacctacccgacctaataactcagaatgtgttgtattttaccctatcaatggattttttgaactaaaaagaattctaatgggttcagatttgtctaacccaccaataatttacctataaatatggctttaactagggctgaacattttgaacgggtttgacctgaacccgagcaacccgcccgaacccgaactagtgaacccgtaaaatttttttttaaaaaaagtttcgggcgggttgggttcaacccagtacccttcgggtgg

SEQ ID NO: 174413 - DNA, 521 bp, Cannabis sativa
gaaatattagaacaagtgaatgctatatttgaatgtgctctggggaaatgaaaaagaggcgacactgaaaataactggaggaaaaaaagtattttttatgaacttgagtattggagttcaaatgagttgaaacacaacatcgatgttatgcatgttgagaagaatgtttgtgatagtatcattggcactctcttggataacgacaagtctaaagacaccactaatgcaagacaagatttgaaaaatatgagaattcgttaatccttatagattttcgaagatgctcgtaaaagattgctaaaaccccatgccccttatgtgttaactgctaatgataagcacgtgttttgtaaatttttgaaggaagtcaaattgctagatggattttgttcgaacgtgaagaaaaaagtaactaatgaaaatattgttggattgaaatcccatgattgtcatgtcataatgcaaaggttacttccagtttgtattggcaagtttttgtcgaaggaagtatcaagcaccat

SEQ ID NO: 174414 - DNA, 735 bp, Cannabis sativa
caccatcctcatctctaatttaagataattttaaatttaattttaatgttatatatatatatatttatttttaattattttatttatacgggtatgaatgtatctgcatttctatatatatgtatgcgtgtatgtatgtatgtgtatgtgtgtatatatattggtctgtacgtatatgtatatgtctgtgtatatatagtggtatgcatgtatatgtatgtttttgtatatatagatatgtatgtatatgtatgtgtgtatatataggtatgtgtgtagatatatgtttatagttgcaacaacataaattgaattttttgagttctcgttctatcatttctcgtaatgatattcaaatttgtgttacatctatagaacaaaatctttatgttcttagaccagatgaatcatttgcgcttaataacgaactgtttaagatagccaaatctagaaactacaaaaaacaaaagatcgataatgaaaatgaaacacatctatggctcttacatcttggtcatataggttgatagacttcacaggttaaccaaaggtggtccatttgaaaaatgtcactttaggtgaattaccagtttgtgagtcttgcctagaagaaaaaatgacaaaacattctttctatgtaaagggagagtgtgccaaaggaccactaggaatagtgcattcaaatctttgtggaccactgaatgtcaaagttagaggtggttatgagtactttgt

SEQ ID NO: 174415 - DNA, 551 bp, Cannabis sativa
ttaacctatttatttcttctataccgaattctccaaaggtaaactatgagtttttcaaacatgatagtaagcatacatcttacaaatatggtagtacaattaagtgggagcgctaatcatcgatataaaatctatagcttctataatgatatagaaataaaatgataattttctttgagtttaacttaacagagataaatggaaaaactcttatttcaataattatgttagtttactaaaatattatttataggaagctaagtgttttaagaataaaatacattaagggatagaacggtaaatttatctctactcgatgtatatcatctatagagaatctttgattattttgattgaaataatagataattaatagcgtatttatatttgaaacatataaagggttctatgtaatcaaaagtgcaattctgaatttatagtgaagtcgggagaaactaataaattagaaaatttacttggtaaattttagatatacttattgggagcttgattatataggtccatgatccccgcactagttgagataatat

SEQ ID NO: 174416 - DNA, 573 bp, Cannabis sativa
taactgtaggaatttttattcctagattgcccctacacactgcaatagattaatcaaaagcccaagtcaaattcgaccttttaccatcaaagaccctatgttgactcctaatattaaagcaacaaaaacgacagcccctttcccattactacaggtcgtttatatcactcaagcaaaccttaaaaaacagtcgacatatatattcatcttttcattcaaacacacaacccagccacaaatataatctagccgtgagcctccttcttcaatgttcttctctgaagaacatgaagaacaccaacccagaaataaagcaacccagaaaaatcagagaacaaaaacccctagcccagtttgaatctaaccccaaacaaagccttcgtcttcgtggttcttcactgaagaacacgaagacaacaacaacaaaaataccaagaaaaaccagaaattaaaagccttcccaaactgattcaataccccagaaaaacacataaacaatatatataaacacaatattatgaatcgaaaagaaaaataggagaagaagataccagattttatagaggttcccca

SEQ ID NO: 174417 - DNA, 584 bp, Cannabis sativa
gtcaaattataggctacaatttattgtcacaagccatataagaaaattccttcaaaaaatttagacaataaaattataacaaaagtaaataatttttacgtatcatttagttactttatacaacaaataagaatttatattttaagtaacacataatttaaagttcacaaacaaaagacttaatatcaattaaggtatgcattggtgttttaacttgctcttttaggcaagggtggaggctgtttactcaaccaaactctctagtgggtggagttcgtcgtagtgtgggttctggtttaagtgttagtgtgcttaatccttggttatctaatgtggcaaatccttatgtcatgtcttcgcatccaggtttggttggaaaaactatttcaagtcttatgagaatggaggttcgtgaattagatattggtattattcgtgatctttttaaagagcaaggttgggagttaattttgtctactaaacttgtttcttccattcatgatgattgctgatcttgacgatttaagagttttggcttctatacggttaaaagtgcttacagatatttagatgagttttagaat

SEQ ID NO: 174418 - DNA, 552 bp, Cannabis sativa
acatttttaataaaacaaatttatctttattgaattgacactatcacattttattattatcttttatctttgtcaagtatttattaaataatctaataaatatttactttgatttttcatctttttatcttattaattattctttagaatccattttaaaaaaaaaattatttgtttgaaattaataaatatttacctattttcttactctatatataattaaataatctaatattattttttttataatatatatttatataaatataatagaatatataattactgttgataattatgatcgatgctattcttaatatcttactattataaaagtgtggtaatggtgtctatattagtataccaattttacctctaacaactttgtaaaattacaataataaagataaaaagcaaaataaaacaattcaacaaagactttgacttttctaattactatattaaaaatctcttatcagtatctatattaaatttggactattttacctttatcatctaattttatgacaacttgactattttacccttatc

SEQ ID NO: 174419 - DNA, 699 bp, Cannabis sativa
gttggacccaaccctcgtgatctaacttgggcagatatgtacaattcatctttaaaaccctcaaactcatgcctaaactaacctcactttactaatacatgcacattagagcatccacgtgctaaggcctagcaagacagagtaatataatacagtatgaacaatcataataattacacttcatatagtacgccattgcgtatatactgtgccaccgcactttacatcacattattccatatatattaatgtcactataatctataattaatgtctatgtaacatagacccacgtgttacactcacacatttcttttacatttaaggccttactaaggtttgtctcagttatagttaccgattctaacctatttatgccttacccacataactctacttatatatacataatccatacatcatgctctcacagtggttcatcctgatgatgtttatcaagcctaatctggttaaattttatacaaataactcttgatatatatataaatatatataaatatgcatacaacacatttaacatatactcaactattcaaaatcttagggtaataaccctaactcgcatattatgttcattcattcacataatacattattgcatgcttaagacatacatatttagggtaataaccctaattcaccatacatatattgaaggtggtaatcctaattcacaat

SEQ ID NO: 174420 - DNA, 1040 bp, Cannabis sativa
  modified_base (676)..(682): a, c, t, g, unknown or other
agcatagctttaaatggctctaccttcccttcgacatttctcttcttcatgaaaatccacttacaccttataggtgtaatatcctcaagtggagtttcatatttcctgaattttttggtgcgaatagaatctatttcttgatccatgacattggtccacttgtctgagtcagggtcatccattgcttctttgtaagtcaatggataattcttgtctatgttagagacaagaacatgtgctttatgttcatagcagacatgctaactcagaatcctcccattatgactatgtactgggatttcctttttaggaataatggtgatcgttgttggtcgtttacttaaaggtactgaagttgatggttcagaaattttctcatttctgatttccacaataaccattggactgcgtggtttgtgacttttcatatagtcatgttcaagaaaaagagcatttgttgatacgaatactttattgtcatgatgactatagaagtatacacctcgagtttcctctgaatatcccacaaacatacatacttcagttctaggagaaagttttccaggacttaagaacatgagcaagataacaccaaatacgaaaatatttcaaactgagtttgtaacaccctaactagcataggcgtgttagggtgattttaaacgtactgtgcagnnnnnnnctaatcaacgaggttattgaaaatagtgaataattaaaattttcttatttaattaaaaatataaagtaatacatttataatatttcgggatctcgttacaaaatgtatttataaaagtttgctagtttaatacaaaagttttgtcgcctagcgactgtcagcaaaagccttgatgtcccctaagatcatacgcttcaggcctaactgcgccgacatgtacaatcttcacctgcttgttctcacagctcctcaactttgccctttcctacacatggaaataacacggtgagtcgacaaactcagtaagaaaagcataatataaacatactaataacccgggttataacctggcgcccat

SEQ ID NO: 174421 - DNA, 591 bp, Cannabis sativa
aaactttcaattctttcaagttaacttccgcaaagggtgtagaaattttagcatcctaccgaccccaggaaaaattctaacctcatttgcagacctggccaaagccaattctaaattgcttcaatcatcaccgggtctatcaagatactatctatgttcatctcatgtactaagaaacttacttggggccggtaaaactcgcgtttctagcatttagcaaaagcttatgttcctagagacgttgcaacaccatccaaaaatacccctcatatgcttcctttgagtcagaagaaattagaattctattaatgaagataattatgaagtcatcagatacaaaaagctattttgggaatatcttcctctcgaatctccaactggtaataaccagatcgaagattgatcttagagaagacggtctttccttataattgatcaatgtatcatctatccttagcaaaggatacttattccttaccattaattcatttaactcacagtggtcaatacgcactcataaggtttcatccttcttcttcacaaacaaaatcgacgtaccccaagataaggtactcggtctagcaatttcaa

SEQ ID NO: 174422 - DNA, 530 bp, Cannabis sativa
atattatatatgtatgtatatgtgctcatgaaaaaaatactttcttttcaacaaacaagtgttttttttttaatttatgattgtgattctaactaactatctagataggtgtgtaaggaaagatatgactctaataagaaatatgggttccatatcaaaatcaattggtaattggtgatgagtggatgagtggagtagctttttttcttatataatatatgactcaatatttttacatttaatccatataagacaatgttctccggtaatcttgcactactagatgccccacccagcaatgtatctattatgatgatagtaatctgaccttgaagcaattaagtttcaattaactaggtgtgtttggaattaattatatgaatttctaatatcttgttttgcaaaacagatagtaattacaccggaaaataatagtttttaatagtttatacttaaaatggaattttgttagtaattacagtgtaattacacttaattcttatggaggccatgagaattagagagtgtaa

SEQ ID NO: 174423 - DNA, 685 bp, Cannabis sativa
ccagaccgggattggagattcagaattgtacccaagtcccacacctagattggtgacccaaacccgaaattagaactagaatcgagacccaagattgggactgggacccaagacccgaccccggtctcggtcccagacccagacttggacacggacacgaactaggacctaggatctgaatcggaacaagatctggacccaagattgggatctggatctttacccacaacctaaagcttggacacaacccgtagtcagtgtctcgatcttttaatcgtaccaagacccgaacatggaaccatttctagacgtggacccaaacccatgctcaaattcaggaccttaaaacaggaattggacctggacacataactagatctagacacggaaccgaacacgaacgtggacctagattgggatcgatacccagaccaagacccaaacctaaacctagaattgcgccaggacctgggaccctgaacatggagccgaggacccgggacccaggacctagactagaacctagacccaaaccagaacccggacccagacccagacccagaccaagaccaagacctagtcccaaaccgaaaccgaaactcggacccaaacccaaacccagactcatactagaattcgaactcgaacgtaggactcagactcaaacccgagactcagacccgga

SEQ ID NO: 174424 - DNA, 905 bp, Cannabis sativa
cccaatgttcttcctctctctctccttctcttcattgctagctttctctctctcaccatctctccgtttttgtaggtggttggtggcgcatggtccgagcaacaatagttggtggcggcttctctaaaaatatttgatttgtgcattacacaatatatatatgataattttcatgtaatatatattgtgtaatatttgtatttacacaatatatatctgatttgtcttatttttcatttgatttgagattacaaaatgtatagtttttatttgtataatatatgagatttgtgtttatttttatttttgattgtgcttagatttgggttcatatgagttgggatgtgaggtttttttgtgtgactctttagtgtgtctgttataaacagacgggatgagtgtaaaaattattttttataattgtttgcgagtgttgaaaatctacgaaagtaatttgaaacgacgattgataaccgatgcaaatacagacatttttgcgtctactatatacacgtcggctggaggaaccgacgaaaaaacttttaataatgtcaattaaaaactgacggaaaatgtacttttgtagtagtgtatattaataaaattacagttttttgtttctaattttatagctatcggaggttgtcttttttttttctaatcaagcctgccagccttccttgggcttaagtgcggcttagtcggagttgtattttgctactgcaatttgatttttgctactgcgattagtcttgtcactgtgatatggttttgagtattttagtcttatctctgtgacatagttagcatttttatcttgtctttgtgacatggttttgagtgttttagtcttgtttgtgtgacatgattttgttttgtttcgttgttggttcttctttgttctt

SEQ ID NO: 174425 - DNA, 614 bp, Cannabis sativa
aaaagataaatttaaagaagtctctcctctcccaaaaaaaaattaactctttttttatttaattattatttgacaaaccaactctataagtaaagttggtccaatgcaaagaatcatatactccataattgacatattcacttataacctccttttaggttcattaaaatttgaataatactttcacaaaaatgttgaagtactgttatggcatgattttgttagttaacacttttgtagtgatatatgtggaaaatcacatgtggtgccacatttgtataagtgtgagtttcctaatagataatacaattagattttatttattataatttaattaataaaacaattaaagtctatatggacaaattagttatggcaaattgttggtattattaattattatggcaattaacttagaaatccgaaacaaaaaaaaaaatgtaaaacatttcaaaagtattatgctgctatattaatattaatattacccaaaatttccagcattcatagacaatggaaatgattttttctttgatgaaatttccctttataaaattctggtaatatacttataaaattcaataatttttctttctttctttcttttctaatat

SEQ ID NO: 174426 - DNA, 641 bp, Cannabis sativa
gtgagagagaagcaaaagaggaaatcaatttaaaatttttgaaaaaaaaactaccagcccacgaacacaaagaaactgccccactctatttccaaaattattttttaaaaaaaataaataaaaggaaactagaatacttaagatactttccaaacataggcaaattaagaaaatccttcaagatcaaagacaaaaaacaatgaatatgatatcaaactttaaaaggtaacatatcaaaataaatcaatttagattaaatgttgatacttaccaaacaaagcataaaattttcttagcccacaagctaagtcaccaatgcctccctctcatttttttatttttatttttgaaaaactgaattaaatacacaaaaaaaaatatatgcacaataaatataaggtattctagagcaagcagctaatcaaatttcataataactgacaaaaatacaagttaatactttttaagagaataactaattagtatctcaagaaccaaccatacttaatagatgatgagaaaaaggatacgcatgttacaaaaaatgtgaactaggattttttattcatttttgtagaggagacttacaaacttgtacacacttgtcagacattagtgtgtgcagtgaaaataggatcatt

SEQ ID NO: 174427 - DNA, 518 bp, Cannabis sativa
tccaacttacgattattcgccctctcggatgccaagcattagaagtaaagcaccatccttgaaaaacatttgagtataaggttccaagcttggcaaccttaactctagtttcgagaagtccaaccaaaccgacactttggcctgctaggaactgttttactaattgttgtttgtgctggttgttgacccctcaaacattccaacttacttattttatccattgggaacaggaggcactccccctcctcctgtatccataatgtttactgcttcctgttggtcatttctttgctgcaggtgtgtctgcataagctctgcttcaaccaattcttctttctgtagcgaggcatatctgttggttactgttatggcagcaaccttctgtttgatcttttggtttctctttctgttgacttcgttagccaacgacaatgagtcttttttataagcgataaacgatatgtcgtaataataatatgtaataaagcaataataagacacagaaattttatagaggt

SEQ ID NO: 174428 - DNA, 530 bp, Cannabis sativa
acttgatttaatttacttcaaaattaaggactttaatataaatttaatatacttttttactttttttaaaaaatattattattattattagagtaatttacggtgtaaatacttaagtttatttcttgattataaataaatatttaagttcaattttagaccgataataatacataagttatattttcagaacattcgtaagtatctaactgttaagtatcaagtcaatggtcatgtgttaatttttaattaaaaattataccaataagaaaataacatgtgaataattatttgacatttaacggttatgtagctatagaagttccaaaaatataacttaggtattaaaaattttaaaaattaaatttaagtatttatatgcaaccgaaaatcaaagtatttatgtcgaaaattattattattataaagttttatatatcttcttgatattaaaattgaatgagtgtttacataaactcaattacttattggacacctaaatgtgtccataaccatatgaaaatatgtgg

SEQ ID NO: 174429 - DNA, 746 bp, Cannabis sativa
tcatagtttttctagttgtaggttattgcagacatctccatctgtctggcttgcacaacaatcattcattacagcaaaaagatcaccatctgagttatatgtgtcatctactactgcatttgagtcatttgatttttcttcttcatctttgtgcttcttcttcttattttttatctcctaacagctcttgatcaaatctcccactttaccacagtgatgacatttcttgatttccttaggcgttgattttgatcttgaatgtcctctaaatcttgagttgttcctccttggatttcttcatcgagcaaacaaaccttcatcttgtcttgatatttgtctgaaaacctttttctaattcaattctgcatctcttgacctatgggtgctcataacattttccagagttagagtatctcaactgtacatcttcccgaaagtactacattacattaattaattcaaaggtgtaatcaattttgacactttttcttccaaaagtgagacaatcttttctatttttaaaaatattatttatttattctaatttcttaaataatagctttatattataattattaaacaaaattactatttaaatatatttattaattagaccttccaaggtctcctaattaataaacaaaccctgcattatcttttcttctcaattatgcccttagtaaaattcataaataagacatagtcttacttagaattctaattgattaaataaattaattaattga

SEQ ID NO: 174430 - DNA, 704 bp, Cannabis sativa
atgatttatttaggcatgtaataactgtattaaattttttaactatgcatttaattatatattatcaaatttatgtaatttattatctaaattaataaattttaaaaaatctatcattaattacatatttatgaatttacatttaattaattatcatacaataattgatttttgtagtacaataatttattgtactacaaccctatcctcaaagccaaaagtccaaattacccttaattaatgcttaaaataataaaatggcttaaaggtaaaatggtccaatactataaccccgcctaatcctaatattccaaatatcacttatatttgtcttactaaacaaaaggttctaaactcactcatgtgactctaatggccatccatcgtatttttcattgtgctatcctaattttggcactctgatgtggcatactggtgacacgtggaatcgacttcacatatctgttcgaaagagatatgccgaacagagtatcgcacatatctgcacggatgaagccttccttgccaggcagtagacggtccgaacaacgtgccaactcttagcgacttgcacacttgcatcgtgaatcacagaagccatccttataattccgggatcatatcgctgagatatggcaagctgtccaaatcccttaatcagtgtattctgtatttaatgtgtaatcttaccaattatagacatt

SEQ ID NO: 174431 - DNA, 722 bp, Cannabis sativa
agtgtagtaagactaatcctaccctggcaatctaatcttgccctagtaaattcacaaattaaaaaactggtgtagtcatcccctaaaaagctatctgaaggaagaaaccaactcgaggtcaggtaggaggaatggtccaaaatgatccgcacaggagtaccaaagcccatccgggacctaggaaatgacttaagttggagaaacaaaagcttttggcgttatcgccccactgggaatgaggcatctaaaatttatacaatctcttatcaaattccactggccttaacttagcgtagtcctagacagaaggaacgaagtgaatatttaaaggagacttacaggctctgaaggtacttgcacaaggggctccagaattcgagattgggaacaaaaatttgggccggactggagtcttttctttccctacctcctcacgggagaccctgctggaggcagcctggaggcgagcgtacgcaagctcctgctccctcttgtatctatacttgttatatttatcttttgtggaaaaaataatgtccgccatgagcgccttctcactctcgggattccgggcgttgggacaaaggaccttggacaagtttaaatcattaacagattgactctctaagtgttggaattatttcactaggatcttagatttactaacaagtatgttatttaacatcctaagtatgaacatctaaaacgatatgaaataaaca

SEQ ID NO: 174432 - DNA, 652 bp, Cannabis sativa
gattatttgttgctcttaaaattaccgcctctaatactctctcttttttgtagtgtctatataggttgaggatgtcaacttggacgtcaagtgaaaccctaggtgtccaagttgacttttaggttgctggttcatgtaatttcagttctcgaggcttgaattaggttattccatgtctttatggtacaaaatattgaaagatattgagttggatttaagttattgaagttctaacttccatcccggagatcccaaagtcaacctgggcgtagggctagggtcccttcccaggtcgactgctatgactcaggtctactcaacttcatgacgtcatcctccatgccacatgtcaatcattgatgtctacttcaccaggaaaattttttgggttagcatttggcccccaagtcaactttacacgtgaaccgagcccgtttcgcttgaaactaccagatgagcatcaattttgacattcttaggcacctgtattatttgttcttcaagcattcataattgaattaggactttaaacacatatgcttaatccttgaaaatttcaaaaattaattaacaaagaaaaaatgagaaaatattatcttttttttttcacttatcttttatcttttttaaaaaatttaaaattttctcacct

SEQ ID NO: 174433 - DNA, 690 bp, Cannabis sativa
atatatatataaatatataatgtattcggacatgtcttagagaaacttaaagaattaataaaagagaaaaaaataaataaacaaaccaattcgttaaagagttgtacaaaaattcatataaataattaaatcaaaacaattcccacgaataatttgttgatcaaatttttaatttgactgacaatcttcaactttaaattctttccctttacataaatttataatttacttcctttcacaatgaaatattatatttttttaagacattgaaaaaaaaaattccaacaaccactgaattctatacaaacaagctacctaaacaacataaaaaaaataagaattgatcaaagtaattacatctttctccttttattatgattagaggaacaactctccttcgctcttgcttttaaaagccacttaaacactagaactaatggccttaatagcattagaagcactaatacaaaaagtattgttcccataaaaaaaaccaacaccaaaaccatcaagccctcatcttttaactgaattgataataaacatggcagatttaacatcattcttggtgaacggtctaaaaagattcagttgctggttgatatttgttgtgaaaacaacaccccagcaagaacaataaaagacaagaataaacaatgaaaccagttagagattagcgaggaatgacac

SEQ ID NO: 174434 - DNA, 520 bp, Cannabis sativa
tttcttcttcttctgccattctcttcttcttcctatcgagagataaaaactgttccatgtatataaaccataaaccaaaactgttccatgtatataatatttacgatcttgattaacaataaaaaattcaaaattaaattaattttgcattaaatttcatcacccaaattgatctgtcaggaacaatcgttatggaggtaccgttaaaccagttgtgaaacttcgtcctctgtaagttggtctccaagaacccgactccattccttcgccagcttatccaggtcagggaccttccaggccggagcagcagtcccaatctatttacggtcaagccggccaggggcgaaaggtgagaatttgggggattctcagaatccgatgggttccacggagggattagactccgaatatgtaacacccgtattttaataataataaactcggaaattaactttaataatttatatattaataaccatatggatcgggatcccgagtatcaaaatttaggttaaaagta

SEQ ID NO: 174435 - DNA, 607 bp, Cannabis sativa
tgatagaatcaacgataggtggccttatacacgatctggaccctatcaggttaggaagcacatagtccctgaggtgaggttgattgcgaccatccgcttggtcttccacaacacctccattattgccattgtttttgacgttggcattgtcagccatgactacttcttgctcaacctctatttcagctctttccaatcttttcctccttctgttttgtctacaaatcttctcaattttaggatcagcaagtaatctgacatttgctctttgacgttgcataaattagttgttcctaagaaaagagaaaaatttcaaacaaacagaattagtaataatattgaagaaaaaaaacaaagtagaaaaaaatttaatttttattaatattaactaacaatccccggcaacaatgccaaaaacttgttgtggtattttcaacacgcaagtatatgtattgttaacaagtaatagacccacaaatagttaggtcgttcccacaaggattgtaattatgtactttaaaattaaacttttatttggttatttgaatttaagaaggaattagaactagaatttaaaacaataaaaatataaaaaactaaaattata

SEQ ID NO: 174436 - DNA, 647 bp, Cannabis sativa
actctagagagtatgttaatactcaagccgattcatcttcaactaaccttttagattgtagtctaggtgggattattattttgccttttatgtacctcgcaaatttagtttctgattttactcatttctcttggttggttttgcagaaataattaacttcgcagaacttctctagagcccgactagtcttcccgtgaaaaaaggaaataaaaggagcaagaaagatggagaaggatcctctaactctacaatagttctaaaatattaaaaatccaatccccctgttgaaactatttccaatgaccaagcaggcctcttatcttctaaaaaccttctagtttccaaccaaaagcatgccttggacgtagaggctgatttgaaaaaacttgaaaaagggaaggaaacacttaattttgataaactagttgtttttaatgctaagaaattgaaagttcaactcctcgattccactcttcctttggattctttagctggcattacaagagccaaacttgtttctgagcacctcactaggcaagctcgcctttttcatggtctagagaaaggtgattggaaattgttcaataatggaaatgtctctgaactcatggacagagcaagaacctaatgtacatggtaagtttatt

SEQ ID NO: 174437 - DNA, 530 bp, Cannabis sativa
gccaagggctttcatcaacaagctagtttcgatttcaatgaaaccttcagccctgttgtgaagcatgttactattagggttgttctaactctagctgtcacacaaaattggacaattacacaattggatgtggataatgcatttcttaatggtgaattgcaagaagagatctttatggttcagcctcctggttttgaggatccacagcatccaactcatgtttgtaagcttaccaaagctttatatgggctcaaacaagcacctcgtgcttggtttgagaagctatctggtgcacttactgatctcgggtttacctctgctcagtcagatcactccttatttgtgaaattcaacaacaacaactgcttgtatgttctagtatatgtggatgatatactaattacaggcagtagctcaactcaagttaccaatctcattgctgccttgagtagcaaatttgctctcaaagatcttggtaatcttgattatttcttaggcattcaggcacttcccactgctacagggcttct

SEQ ID NO: 174438 - DNA, 577 bp, Cannabis sativa
tccgatctattatactctcacattcacattacctattacctaattaaggaattaatgaggtataaagctttatagttgtcaggtagttttcataattgtctaatcagcaatgctataattaaatatcttattgtgcccaataccatatccatataacacgtagtttacggttttttatattatttatataaaaaaggttaaagagcaccagtggtgcctagtaccttcttatgtgtcaatatcgttattggtctaattaagtattgggtctcatatatttaatataatagcttttagggagtatcgctaactaatcgcaacgcgacatatcgagaaggtgctaggcaccagtggtgcctaatagcaatgctctatttattattaaatcaaaatatgtattcgaaccaatattaatttacactaatagcaatatatgtcaccttattgtggtacttgaaaacataaactgccagaccgtcactacaaaaaactactacttttagtgataattttttagtcacggcataatttttttgtgactaaatgtgacttttagtcacaacaaaatgttacttct

SEQ ID NO: 174439 - DNA, 542 bp, Cannabis sativa
tagaaactcttattgcaactagggtagagaatattatgttcattttcgattatatatatatgtagaagatatgaaatattttttttcatatatatatgacgattgtagttagagtagaaaatattatgtccatttttcgataaattctgaataatttaagatgtttatctgttttattttataaactgactttttttaaattttatttaagatattattataaattatttaaaaaaatttaaaaatatataaaaaaaaaatgtatacactgttataaaaaaaataaagactttttcatttttacacttcaaaatagtttattttttatatatatatatattttacggaattctacatagttactcttattgcaactagcgctgcaacttaaatcgcaacaaaaaaatcgtatagaaactcctattgcaactagcagtacaactactttggaaacccaaaccgtaaatttaaaaaaaaaaaagaaaaagttaaaaaaacagtatatgtgataattttccaaaaaaatatataatttcttaatg

SEQ ID NO: 174440 - DNA, 657 bp, Cannabis sativa
aataatattggctcatggactaaaattctttaacattccaaccacttaaaatatctcatcttgtccatttataatcttattttcttcaacttaatcttcttttagtttggtttctaaaaaactcaataaatatcttggttgtgatagtcagtagtctcgtgatccgtagagagaatacgggtaagctatgcgatcccacatcacttgggggaggtcaagtgtgatgattctaagattgtgtatgtatgagactaaacagttgaagaagatttaaatagattggttggtactacctatatcaacaaggtgcatcttgttttatggtaacccatcacttaagaactccaaagttaagtgtgctagacttggagtaaaattaggatgggtgacctcctagaaagtcttcccattaagcgtacgagttaggacaaaacacactagaaatacttatgttagtttgcagggccagtcgtcaagccaggaatcaaccaagtggtgtacccgtgtataagagtcattagtctgtgaggggaagcccaatggaggctttaagcaaataccacgtaattcgtgcaatctcacatcgcttagcaattttctctacggggcattcttttccgtgtcggtggcctcggtggtatttggtacgatagtgga

SEQ ID NO: 174441 - DNA, 764 bp, Cannabis sativa
ttggtcatttttatggtatatttaagttttaaaattatattataatatttttcatgacatttttgtgtaaattcaaattttaaaacccacacgtttagataaatttattttaaaatatatatataaaatctcaaaggtacttattcttctccattaaagtacctgcctatacctatctcactcctcaatacctcatctactgacttacattcactagcgacacatttagcaaccgacaaccgacgactcaaacgaactctgaatacgagatctctccaccaccaaaacattaaaggatcgaacagattttgctgcagttggagatctagaaaccttaaactgaaaaccctatttcataataaacaaattactactacaaaaatgatttttctagacacttttaaatagtcgtttaaagtaaaacgggtagaataggcgactgttcaaaaccgtcgctaatgtagacttcccaacgattttaaactgtcgcctataacagggtataggcgacggattaaccgtcgcctatagtatatggcatggtttaaaaccgtcaactataccgtgttataggcgacagttttaaactgtgccttataggcctggttactttttaaagttttttcagcgacaatttttttcagtcgttacattggaaaaatatggaaaaaaacaaatttgctgcaattttttccctacattaatttttaaattttttacaaatctgtatagtcattatatcttttatacactcatcacttcta

SEQ ID NO: 174442 - DNA, 631 bp, Cannabis sativa
tatccacttcctgcttgagtgccatttatctctcggaatccagggttcgcctcttctggctcttagctgggtaatttagatcgacatttaagtggtggcagataatcttacggtcgatccctatcatatctccatggctccaggcgaactgatcttggttcgccctcaaaaagctaattagctgctatttcaattgttcattcagggtcttcccaatgtatacacactttgtgggatttcctggatctagaacaacctcttccagctcctcaattggtttcaataaatttctttcatcttgaattcaaggatcaagatcttcacctttcttctcgccttcttcagtcaagactaccattagctggtgaccagccttactatgctgtagctctatgcaatagcactcgcgagccagcatttgatcacctcgtactactcccacacccattagtgtttgaaatattagggagaagtgcttaattgaactaactgcccctagtccaattaatgatggtcgtcccagcagtatgttgtaaacatatggcaagtcgacaaccaaaaagtctcacattattatggtggataaaggtgcttcgcccaatgttaatgggagctcaattattccttgact

SEQ ID NO: 174443 - DNA, 1242 bp, Cannabis sativa
aattggagctatctaatatgtggttatggataacttttgtaatcttttggaatgcatactgattggagctttgtatttattgaagctttctaattgtatgcattgataaccttttgaaatcttttgcaggttttaccacttattactcttttggatgttaccattatattgctaatgttaaaattatgtaattatattaacactttgaacataattataattatatagatatataatatcactgtgtggtgattaaattaaatagatgaaatttgtgttgatactaattattagatatttatatgtaattttattattttattttttaataattagatttaagaatgtgcatattattatcacgtgataaatatatttgtttgctaaaaatattatttattttttcaatttataaaataatggtaatttaataaaacaaatatcatttttgaaaagtaaagggtaatttgggcaaaataataaatgttctattccattccatacaataccaaacataataattcttattccattgttaattccatagcctttaccaaacaaaagaatagaaattccattccattctattcctattcctattcccattcctattcccattccattttcacttactaaccaaacgccaccttagatatttatatattaaattgattaaatataaaagactaaactaccccttgaaactagatattttccatcagtttgttgggatattaaaggcctaattcgtaggtagcttgctgtccacattttgggttctacatagaatcctgctagtttaatcctggccgcccatagacttacagggtgaggtctggccacccaaggcctgtaggatgaggcctggtcgaccatgctcctgccacgtcactatggccataccaaaaggaggccagccttttgcaagttgaggacaactttgtacattgtttcctcgtagaggtcaaattcccttggtcaaaggaaagctcccttggtctggaagtcactttttggctggccaacttgtgtacagatcctggccggtctataggctcaccctggttggcctataggcttctcttggctagctagggatgttggtacaactcccgagggcttgcttcactccattcagttattgtttgacggttttgctatatcttgcatggaggccctgttctgctactggcagggttgtactctacctgtactctgtttttggcttacgtggacatgcca

SEQ ID NO: 174444 - DNA, 798 bp, Cannabis sativa
attcaactttataattttaattttttaaattataattttagggtgtcctatatcaaaataatatataaaaacagcgtataaatattaaaaaaaaacaatattacaattaaaaataacaaaaaaatcaaaaaaaaaaataataatacgaaaataacacgaaaacgaaaataatatgtatttttttaaataaaaacttataaagtgtaaaaatatttaaaaattttgtaactttttttatttttttggtatttatgaaaatgtcccttaaaacatttgggattatttcataaatactcaaaaatgataacaatttacattttcacaaatctacattttcttttatatttttatggattttaatttttttttcataaaagtaatacacaaaaaaggattttgcagatctttgtgtgtatatcaaattaaaataatatatagtaagtttaaaataaataactctcgtgactattagggtatcctcgaaacttcttgtatgttgtatcttttaatccaagtgatgagaatgatgcaattggaactcacactagtgtcttccaaattgtttcaccacacacaaagaatagtgtcggctattatgataaagtatatagagttgttcttgttgagttttcaacacatgagcaagaacagttgagataaaataattgtgttcttttcctctctgtatttcaaaaatactatgacaaagtgttagtttgatttctcttaaaaccctttaattaaattatattttattattttaataaataaatatcgggataattgcggcaaaagtcc

SEQ ID NO: 174445 - DNA, 528 bp, Cannabis sativa
  modified_base (464)..(465): a, c, t, g, unknown or other
tctgttctcctcaaagtttgtatctgaagttgcttagttggtggcggtgtctatatatatatggaaaaaaaataataaagttaataaaaatttcattaatcagtaaacacaataagttaagtaaataaattaagaaatattaagtattttccaacagtgtaagatagtctttcagccatgctatgtaactttttatagcttaaccaactgttgtgaatgcatcttgggctatggaacacggaagaagtgcattctccacattgacttcttcgatgaatacccgaggataatcattgtatatgtattcatcattgtgaatcaagaactttctatctttcaaatatttatccttcataagcaaccttcagtaccatcccactaggttccaaccaacagtgcatccaacacagtgcatatcctgttgaacaccacaacacgtgaaaaacgtaattactttattattnnaaaagcaattacaccaagacttgaacactttaacttgaccacaatatacaccaagcactcact

SEQ ID NO: 174446 - DNA, 588 bp, Cannabis sativa
aatgagatcttatttggatgattacaggaatgctcagaagaatgttcttcctgctgcttgccaaccaccgtgtgttgcacaagaaccccttggttttccctatatatagcacaaggttcattcaagctttgtacatatgtaattatggactccaaaaataacacgctgggattgggagttgtagttaaagatgagaatgagaatgttgttgctggtttggctattccagttcgaagggctttagactcaacttatgctaaagcaccagcccttaagactgctctaaattagtgtgttgccattagatttctgatatcagttgttgaattagatttgaagttacttgtttataaagtattgtgtaataaagtggctttctctgtattagcagacatggttgtttatatttgtaattttttgtcaaatttctgtaatgtaaccgttagatatactcccaggatgtaacgtcctcgcttcaagcctttattggacccttacacccataaaatgatggctcttatacatgagtacgtcactctggttgcttcctgaaatgacgactgaccttacaaatcaacacgagtgttt

SEQ ID NO: 174447 - DNA, 960 bp, Cannabis sativa
cacttgcttcttcacgctctattccttcctcccgagagtgctttgtcgtattccccccatcggggcatgtacgagtccacgccctatgggtttgggaagaacattgatgatttctagcaggtgatcttcgttctcgcggttgagtcccaagatcctcctcattttcatgagggatttctcattcatcaattttttgttgtctcccatctagttgttcgtccagatttttagggggtgtcgcattttcccttggttgttcttcccaggccttttcgtgtctcctggttcgtgagccaagaagtctaccgcgtggtcttctcactccacgttcaagttgattttgagcattcttcccctgtgccgccctagccgaggctgcctcacgttccaactcagcatttcgatgttgcgcttcttccaaacagcatctcaagcgacgactttctatttcataagttctttctcccacagattgggcacatcccggattgtgctcttcattcctcgatctggggttctgacccttcccacattgagttctcctcgagcgtgttgtccgtgtactagaaccaatgtcgggtcgagttctttgggattgcgtggtccgcgcagtggggccaccctcaagttaagccctcctagaatgggtggtgcttctggactgggggttggtagatctttttggagcccatgggctctttcccagaacgatgattggtttcctcatgtggggtgttaacattttctggattttcagccatgaaagagatgatttttcttcgaaagaatggagggtttcttctgagctatttcacagaggccctcaatgagagcacgaaactgctaatgcagattttcgttaactaaatttgagcctaacagtgatgatttcacacacaacaaataaaagctatagaaaagtaaagaatatgaacacagggttttttacttggttttgca

SEQ ID NO: 174448 - DNA, 568 bp, Cannabis sativa
aatttgttcacagaaaaaatcccattcagctagaactagaagaacatacatacatttttttgaccattgttcacagaaaaaaaatcttgttcacaaaaaaaaaaaatcttgttctttaaaatcacactcatcaccattcttcattgaccattgttataaaaaatcaatctaaccttcagatacgcgaacaacttctgggcgcacggctggtggcggcctgggtgggcgcacaactaggctggtggttcacgttcatggctgggtaatgggcagtggattttttcgcggctgggcacaactgtttattttgtgtgttaggacttagggtttgatttgaatagagagaaaagaaaatgaaaatgaaatatatatatatgtttaggatttttcttatttgggctgggatagtgggatggggccggctagtgcatatatatatgtgcatatttttttttttggctgggcagtgggctaaacggtgcgggttgggttcattgggttagaaaaataccaatccgaaaatcaacccaatagcagcgggttatatttttatcaacccatatgtatt

SEQ ID NO: 174449 - DNA, 697 bp, Cannabis sativa
ggctaaaaatagcctaacatgtaggtctggtacaatgttgaggcatattacccgagtaggtaggagcaccctgagagacacggcacgccttcatctgcccctgaattcctttccccctaggggatttccccagtccaacgttcctctgcacagctgcaccttgtccctcgtcctgtgtgttatcactatcaccttccacaatttccgttttgcccttgttgcctatgaccacaagagctctttcaccagagctacgactgttgatagggacgttcatcctcagaatcgatgggtcaaagcaattccttatcggaacacccactttaatccacacaccataaagtggaactgcctttcccacaagcggtaagcaaactccatcggtcggtcacactttccatacaagtgagctaaatggccacaactaaaacatatagccgaaagtttgtgattgaaataaaaattacaatagagaaatatacttgacatgctcttaaaaaaaataaaagtggtaagaaggaaatggtagaagtatgaaaagtgtggagtgaaatggtgtggaatggagaagtgtttagggttgaagagatgaagagatgtagagatgttttacgggtgaagagatgtgttttgaaattttcttccaacaccatatttataggtaaaattagaggattaaattaatcaaaataaaata

SEQ ID NO: 174450 - DNA, 524 bp, Cannabis sativa
gacctcccaagtagagcttcaaactctgtccattaaccttaaaggtttctggaccttcatctttcaattctacagctccataaggaaacaccttgaccaccatgaatggtccagaccatcttgacttcaacttacgaggaaacaatttcaaccttgaattaaaaagtaaaacttgctgcccgggttgaaattcctttctgactaagcttcaatcgtgccgcttcttcattctgtccttgtagatcttcgcattctcataggcctcatttctaaattcttccagctcattcaattgcagcagtcttttctctcctgcagctgctaagtccatgttgagggtcttcatagcccaataggccttatgttctaattccaccagcagatgacaggcttttccgtacaccaacctatacagtgacatccctatatgtgttttaaacgttgttctataagcccgtagtgcatcatctaactttcgtgaccagtccttccttgatctctgcactgttttctccaatatcatc

SEQ ID NO: 174451 - DNA, 637 bp, Cannabis sativa
  modified_base (418)..(419): a, c, t, g, unknown or other
caaatattgtgcaagtagttatagatccaaaagaaccaacacacatatatagtgtaatataaactgtctaaatttgtatttcttaaatttattttgataaagggactacaatacaaacgtcaaagtggaggtaatttcgatcaacaaactaattgttcaagtaaaacgtacacagagttcaagaaaaaaaaatatacaaaattagaataatctataaactaagcgacctttaaaagatcaagttactccgtatagtattccgttgtttaaaagcatagtatttgtagtcttttgtaccatgttgtacacttataaaagaaaaagaaaaaaaatttaaataaacgtgttattttagagtaaatagcggcataagtacctaaaattttatgtttgtaaacgacataaactcaatgtttanntttagcggcataagtactcaatatttataaaactgtaattttttctctaattttatcagtataaactctgttattgtcttaaacaaggcacatataaagcccgaattctacatcattggttctagatagaaacatgcagtatcagttacttctaaatgtttttttaataaatttaaaacagagtttgtattgacgaaactgaaagaaaattatagttt

SEQ ID NO: 174452 - DNA, 1105 bp, Cannabis sativa
aaccactataatatcagggctcggattcagttcactccctatacagattataggtctttcacctacgggtgagtgcacacctgatctacctatgatgatacagagactagaccgtgagacaataatatgcacaaatcatgatcaacataactctcatcaatataaccaaaagcaggcaaaaaataataagaataacaaaataacatatttctttttgttttctagaaaattcaatagcataacgactgtattttgaataaagttaaaaattataacctatataaatatttgtataaaaatatatttggtactcagtgcccgagaacagtctagaaaaatgtgcagattaagttttcaaatttacaaacaatttggaaaccataaaaaaattagaatatgtctaatattattcaacacatataaaaatcaagtccaataatcaagttgagtccctacctctcccaagtctttaaactttgtccaaaagacggtcgtaagctctcaagtcccgagctccatttgtttagtccaatcttagatattactctcacctataccatcaaatggctaaataattatcatcattgtattttacattcaaaactgagtccaacgacatataatatgactatatttaaagtttagagtttcaaagcctcacctaagcagtgcacattaactatcggtgatggtaaaaattggtgtactagaaatgtcaccgaaaataggagtagtatatatcaaaacaaccacctcaacgagtagatcacacccatgctaactatttgtcaaaacggtatacgatatcgtcgaaaagtctcgagaaagggacggagctacaaaatcgtcactgaaaaaagtagcgggttgggcaaaatggcttagtgtaggttattctccttaacgagttgggtctagtggacggtgtatttgacgcttagcttaattttgtgattatttatggtctctctactttgtttatacatttgataatggcgatgagatattttattttaaaaactaaccatgcaggaattttactaaaccaatgatcctttgatattagttattttcctactgagctttataaactcacctcctattt

SEQ ID NO: 174453 - DNA, 676 bp, Cannabis sativa
  modified_base (88)..(94): a, c, t, g, unknown or other
cttaaaactttaaactgctcaaacgacacaaagatcatgcataaccatggccctttaagctcttgaacaagagcttcatctctaacannnnnnntaaattccagccatgaaaacatcactttaaacatgaaattccaacctagaaataccatacaatctctgcccaagctcaacaacaaagcatacaataaatagaagctcaatttccaagggattaacatcaattcactcatcatgcaacaagaacattcaaaactcaaagaacatgcttttaccctaataatatcagcaagaattcaacatttaatttcaaataattcagcaagaaactaccttgattctcaacaaaacaagagcaatgatcttcctccaaactcaagcttcaatcaaaccaaaaaccaagctttttcttcaataattcaagttttgaaaaacaagagggtaagagagggagagggagagggtaagagataaacacaagcaaaaaaattcatttcatttcttaaaattcatctcttttattaattatcaaataaaagtcaaaatgaccattttgcccctagggtttaaatgcacacatacaccctcacaagggtaatcttgacatttcatgcataaataactcacaaataatttcagattatcacataataaataaaatgccaagtaaatcaat

SEQ ID NO: 174454 - DNA, 1277 bp, Cannabis sativa
ttaaaataaaaacaattttttattgtatctgtttaattttaatcatacataaaaataaaataattatttattaaaggaatatatttattaattaataaatattatttttctgtattttttattaattaaaataatttttttatatatattttatcataattatttatttttgttcgctatgttatttatgtacaccatccacataaaatttatgtataatgtatatatatgttattgttcaattaaaaataaaaaatcgatttcacatactaaatatatatcgtaaaattttttataataattaaaatattgatggtatttaaatttatttattaattaaaaaatagtttttaaaattatataatagaagggaataatttaattctatcatttcttaagtcatcaacattattttctttaaaggtaattatattagtaagggaataagattgtaaagttaaattcttaaaataaataaagtaatgttaacattactattctcttgctagcattaattcattttaaaaatctttaactatattatattgttatgactgttgtgattaaatattaagttttatatatttaatttaataattattaagttttatatatatatattcttcgattttcgagttggtgaaaatttatattgtaagtactttaatgtttctctgctcattaaaagaatagttgggtgatctgatgactgagttatggggttttgaaattgttattgtttttaagtataattgttttttcttttttggggcaagaggataattgtttcttcatctttcataaaaatactcactacaattttctatttgtgttataagtaatttgcagtgataatatacttttacttttgaaatttagaagagtttgttagtagaattttgtcggagtaaatagtagtataaatatttaaagttttaattaagtttataagtgatataaatttaatatttattttagcgatataagtacgtaaaattatatatgttttttttttaattttgtgattacttaccctgttgttgttttaaacaatacacatctaagatttaaattttagatctgagtctagacataaacatatggtatcagttacttttaaatattcttttaataaattcaaaataaaatctgacgaacttaaaaaaaattataattttataaatataagtacttatatcgctaaaaataatttataatattaaaataaaattaactaataaaatatttaaattttatattctaaaatactcaaaaaa

SEQ ID NO: 174455 - DNA, 697 bp, Cannabis sativa
attgccatcgtcatgagtacttctcatggatcttaacatttttattttttgaggggatgtgtgtgtgtctgtgtgtgtgctaggtttgaagaaacggttgtgtagagaaaattgtgaatgtatttataagctaattagagagaggtgctttttttggtaacgtatatatagtaacctttttaagagaagggattatagaagaaatgaattggatatatagtatgtgatttttttccttcttttttcttaaggacctagcaaaatgttatttaggcctacgtgtttccaataataattacctaaaactcattttatactattgttgtttttgtttatcaaatatatttgaagatacacccaaatctctatagttggactaaattcaattatttgtcatgtatgtatattgtaaatatggaagcattaatttgactagtttacacgccaacagtatcgtttatatatacttattagtcactccatatgtaataccctaagattaagagaacggattagcgaaccctaactagctaaatgtatactattatggaagtatattattatataatttattgtatgcgagttaatatgataaatgtagtgttaagacccccgttggtgagctaggggcatttcgtaattttaacccgagaagggtaaaactgtaaatttaatttattttcgtgcttatggacta

SEQ ID NO: 174456 - DNA, 683 bp, Cannabis sativa
  modified_base (65)..(75): a, c, t, g, unknown or other
  modified_base (557)..(558): a, c, t, g, unknown or other
  modified_base (649)..(658): a, c, t, g, unknown or other
tgctatgttcactcaagaactttacggattgtgaaaaacagagtttttgcaaatgccaataatannnnnnnnnnnataaaactgtatacgtctgcagaaacagaatataattctattatcgcagaaactagttttgcagcaacaaaatagaatagacagaatataaaaaataattgcaaaaaaactcacttgacacaagagatttgtacgtggtatcagtgttcttttgaacactcctagtccacggggccacgcccagagaaagaaatcaattaataaagtgtcaacaattataaagataattgacttaaacaagtttagattccctctaaattattgctgcaatcttttgtaatgcactttacaattctgacttcagaaacaccttaaaacagcaaactcccttcgtctttgaagtgtgcgtgcttacttcctcccgaagtaatgcttgaacaagtcttctcccgaagacctctctcttgttcaatcaagttgttctaacaaaccctaagacagagtaagaacagatatgaaaaacactagaacctagatgaacnnctaggttctcacaaaaagaactctctctttataaatgagaaaaattgcaaaaaaataaaaactagaagagttgattcgaatggctgctctnnnnnnnnnntttatagaacatagaaaccttagag

SEQ ID NO: 174457 - DNA, 599 bp, Cannabis sativa
caaacactttaatattgaaaactaagcacgagacaataaattattttagtttgactcatctttttaaccatattaaaatttggtaagatgtaattaaggtaaatgagattttatttcaaaattaattaataatgttaattatatggttaattttattgacttatttattaagtatggcggtatcaatggagttgaaattgataaagaaagtatgttattttaaattgatcatatgttgaaaataatttcttaccacactattggatttattgatcatgccaatttagtattttaatatttgtgattatgaatgtcttttgttgatttaaaaacaatatgattgtcatagtttaatatcaaatgttaaattggactggtatattaagtaactatcaaagaactatctcatttttaaagtgaccacaaatattattttccttgttcaactcatgagtggttttcaaccaaaactataatgtatatgtattaattgaaattaatgtagccaagtgaaagagaatgttagactttttatttgggctcacattaatttttattaattttattaaaatttagattgattggataggttttttgtt

SEQ ID NO: 174458 - DNA, 644 bp, Cannabis sativa
caaatcgatgatctctttgatcaactaaaggagaagacagacttttctaagatcgatcttcgctcaggctatcattagctgagaattcgagaggaatatatcccgaaaactgcgttctgtactcggtatggacattatgaattccttgtgatgtcttttgcactcaccaatgccccgacgacattcatggatcttatgaatcaggtgttcaaggattacctagatagatgtgtgatcgtgtttatcgataaaatcttggtgtattctgaattagaagaggaacatgagttgcatctcagatcagttttgcaatagttatgagaccacaagctgtatgctaaattcaaaaagtgtgaattctggttatctcgtgtttctttcttggggaacagagtatataaagatgggatcatggtggatccgggcaagatcgaagctgttcgagattggccaacaccaaaatcagccactgaagttagaagctttctgggcttagctgggtattatcgtcagtttgttgagggtttctcaaagattaccgtacccttaatggaactgacccaaaagaacttgaagtttttttggattgatcggtgtgagaaaagttttctagagttaaagtagcgcttgattaccgctctagt

SEQ ID NO: 174459 - DNA, 553 bp, Cannabis sativa
gcttcttagtttcattgtgttttagtccttacaaattacaattgtaataataatgttatcttttttctcctttattttataagggaagtcctctagatgatgcacttaaaatatgttataaatgtaaaaagcccagtcacttatcccgggactgttaagagcatctgggtgatgtgtcacaaagtcttgtgagtaaagttgaagttcctcatgtagccttggatgaaaatgcttttgagatggacaaggtagtcatggaggaggatgacattcatgagactggtgaagaagagaaagaaaaactgaatgatgttgattacttaactgggaatccactgcctcctcttatataccgttccagtctgcctactaaatcataccatatatatttatcaaacaccgtttcacatctcattccattggtagtgaacaattctccattgagtgagtgtggcagtaaacaattctccattgagtgtgtgtgatatatatatatatatatttattagaattatatttattcaaatgtcttgtttataatagtattatatat

SEQ ID NO: 174460 - DNA, 687 bp, Cannabis sativa
ctacacactataaatgtaagtgtcacctaacagtataaatgtaatattttagataaattttagtggcatttggttgaaagtaataaaatgaaatgaaatgaatggaggagacaatttttattttatttttttatttagttacatactaaggtattgaattgttattttaatagaatgaccttttgatcattttagtagaataactattctatttcgaaatgaaagaaaaaatcattctaatgcacgatgagaaaaaatttaataattttcttatcatttttttattcactttaaatttatttaatttttattcctattctcatttcaatttttattgttatgtttttcatattcctccaaatcatacaccatcttaatgttttgtgtaaatttacctttattaattaaatatatgttggtgcgtcaaaaaaaaaattagatatatgttgggcctatctttttgaaagggattatttcacaaatagataaaattaattaaaaaaattataaaaatacgattgtacgaaattttaaatatttttataattttatttccaatctagtcttttgatgtattataggggaattttacaaaaatactgcttttggaccaaaactttacatttatactgggacacggcaaaaacaacatttatactgccccagcccaatttcattacttttgta

SEQ ID NO: 174461 - DNA, 500 bp, Cannabis sativa
attttgtaaaaagattgactaaaacaactttatcgctaatgttttcaaaactcaaagaattgattgcaaaagtaaaaattgaaattctcatgccaaatactaagggaaatttgattttaagtcaagggacactaatgctaaaaaaatttaagtaagccaaaagtatatgggctcgtttagtacgccgtataaggatcgtattctattaaataataaataataaataacactatgtttggataaaacaatgtatttattaattattacgactaaactttttaatacaatgtatgctgtattatttaatacataataaatagtccgtattaacttgtattataatatttacaaaggattcggggtcaacaccaatctccgacccgaacccgggacccaggacccggaccgggacatggacccggaccccggacctagacccgaactcggacccaaactcaaactggaactcggacctggaccccggacccggacctggaccc

SEQ ID NO: 174462 - DNA, 523 bp, Cannabis sativa
ctattttatagtgaaaatattaatctttttgagaaattaatgcaatatactatatgttaaaaatgtattattgaaatttaattttatctttttttataaataataattagtatttatggcataatggaaaaaaaaaaagttaaaaaaaataccccatcttgctattgacagcaagaaccacccgctgacaatcagagaaggcagtaatcaccgtataccccatctgcatgcagcaagaaagcccatagagcagagctttggcttcggcaacgtgcggtttcaacaatcccgcgcaaggagccgcactcgagaataagacatgccccatacgattggaaaccaaagcccccattcctatttttcaattctcaacacacaccccagcatccacaaaaagattgaactcaccaagaaccatatcagtctcagttgaggctagtcgattacttgcattgccagagaccggacctatagaagctagctcaacattattagcatcttgatatttccataaataatccat

SEQ ID NO: 174463 - DNA, 597 bp, Cannabis sativa
aagagaaacttaaaaattactccacaatggcaaaaaaatctatatttcaacttttagtatactattgaataacttttaaatataaaatcataaaataatttataataaccataaagtttgtttgtagttaaattttgtttaatttatagttcaattactttttgataatagaatataaaaaaaaatcaaaatgttgctttttaatttcgattattttttctattgatgataaaaaaaatatatataattttcacatattaaaatgactatcttaaaaaataagatctaatgatattacttgtgagaaacaaatgagtattttttctttagaatcttatcaaaattactctaaaaaaaaggcttatattttagttacttttaaatataaattaacacattactttttaataacttattaaactagttggtacattaaactttattcacattgaagtttgatcattattttcttaaattaatataagagaaacttaaaaattactccaaaatggcaaaaaaatctatatttcaacttttagtatactattgaataacttttaaatataaaatcataaaataatttataataaccataaa

SEQ ID NO: 174464 - DNA, 500 bp, Cannabis sativa
agtggataaaaaggtgtagatattcaaagttcaagagagaatattttacggctataataaatactgctgtgtataaaatttgggaagataggaatattgctatgggaggtaaagatgtataaagtttcaataattgtaaatagagttatgattgaaatttgtgataaaaattttctgttcaaaaaagacaaaattagtaaaggggatttaaattgttttgataagttaagaatttgtaactaatttgtatagatggtaacaatttggtacacttgatattttgagcagtacatttacatatttacccaaaaaaaaatgacattttaatttttcaaataaaataaaataaaataattatatatttagctaaatttaaatcatgatagaaaaaagaataattagcatttttccgcatgaacttttggcattatctaattttaccctctaaaatatgcagcttgttaatgttgggttttgtgccctaaataaaaccctttaca

SEQ ID NO: 174465 - DNA, 510 bp, Cannabis sativa
gggtttaggtacatgcgagtacctatctttaatggagtgagggtggtaggggtgttcatcaaactgtctaaaccgctcaaaccacccgtaccgcaccacatcgcaaaaaaaaaatgcggtttgaattttttctaaaccgcgcggtgcagtgcggtttgcggttttaaattacttatatgcggttcaaaccgcactgcacattataaaaataccaattttatatttatttaggtctaatatgtgaatgttcaactcaaagtccactaattattgtattgttgacacttaattgtttttatatatttattttcaagccttatggtattttgacaagttttgctcaaagtttgttatatttgtaataatttaattatttagtgatagtccaaaccgcataaactacaaaaatcgtactgcaccgtactattttttacggtgcgatttttgcgggtttttagtttcgcggtgttggtgcggtttgggaaattaaaaaaaccgcatgtgcgggtt

SEQ ID NO: 174466 - DNA, 1226 bp, Cannabis sativa
  modified_base (869)..(873): a, c, t, g, unknown or other
ggattctgaacccttaataatatcaccaaatatcactcaaaatatctgtttctcacgcatttctatgggttcgacctcgttcttcacaatctctatactacaataaagattcgtgcgcttgcaagttgataattgtaaaacgtaacactttcggtcacaatgagtttttggcgccgttgccgaaaaattgcaagaagagaaactattttaatccagattattataatttttctactaattattatattatacatattatattacgtttcttaataatgaagtaagatatattattattattattagtataattattaaaaaaacttacgtattttaagaaaaaataatatatataatttattattattacatataaaattaatatattattattataattatatataataaaatatatattattaattataattaatattaatatttataattctgtcaaaatatacatattatttatttcccgctatcttttaaattcagcctttatttacacacttatatagtaggcactgcctcctaatttttcctattcttttaatctttgtgatacttggtatatgatttgttgagaacgaaattcaaaaaattgtttagtcaaaagtaaattatcgtaggtttaaattaagactaaaaattttacatcatggaaccaaatcaagtaaatgtggaagaaaaaactctcattgatcattttcttgaatatctgctaatcctccatcatgcattatttttcctataacaaattctacacattttgagcttaaagctaccgtaattcaacttttgtcatctttttatgggttagatagagaggatccatacatgcatgtgaatttttttttagaaannnnntctacttttagatttcaaaatttttatgatgaatctgttaggcgtagacgttttccattctcattaaaagataagtctaaagcttggtttaattcactcccagcccgatccatttctacttgggatgaattggttaataaatttttgtccaaattttttcccatgtctaaaacagataatattaggagagaaatctccgaaatttatcaaaaagatcacgaagaattttatgaatgttgcgaaagatttaacaatttattgctaaaatgtccacaccatggttttgaaaaatggagattggtaaaatacttttatgatgaattatctccctcaaaccgacaaatggtacaatc

SEQ ID NO: 174467 - DNA, 566 bp, Cannabis sativa
taaaaagcaagcggttgtttcaaggtcaagtaccgagtccgagtatagagctttggctcttgtcactgctgagattacttggatcgaatcattattgaaagagttgggatactcactgcctgaagtctctgtaacctggtgcgacaatatgagtgcaagtgctccagcttccaattcggtctaccacgcacggactaaacacatagaactcgatgttcattttgttcgtgacaaaattttgaagaaagaacttgaagtgagatacattccttcctcggatcaaatagcagactctttaagtaaagccttgtctcactcaaggtttcatctgctcacttccaaactcggtgtgactgcttccccccttcgtttgaggggtggtgttgagaattaaggttcattcatcccctgctactcatcacagaggagtcctgcccatttgtctgcagtcagcattgtgcattggggatttagaatattccttctgttatttgcttttcttgtgtaatcattgaattgtactagagtatcttttcggttatgcattctcctattgtatattgcca

SEQ ID NO: 174468 - DNA, 970 bp, Cannabis sativa
  modified_base (256)..(276): a, c, t, g, unknown or other
cgcacgcgtgcatgtgttcctcactttatatattttgtttttaaactttaaaaaatcataactaattcaataaaaattaaaattaagttctataaaagcttaaattcattaatttttcatctactttccagaaaaaataattctagtacaaaactaaaactatgttttatcaaaaatttgtaattaacaaacattcatcaattaagcacataaaccaacattaacacatccaaatcattgttttaaatccatattnnnnnnnnnnnnnnnnnnnnnatggctctgaggccagttgctgggaattattttaccaggatctagatttattaacatgtatgttaactaacaccataaatatgaattctctaaaacaatagaattaaacacatataaagttaagaaaatcttacatttgtggtagcagaataatatgtttccttcctctcagatctctaacccttgttcctttatgttgcaaagtattattaagatctgagtctggttctccttcaagtgttagattcttcatagtcttccgaactatgattgagtacttgacttgaatgagtgggcatgtactcaatcactaaaggacaaaatttatggagagagagagagagagagagagaggactctttcttaatctgacaaatttgattaaaaggcttatgttattagtatggtgttaagttaagagcctatcactatctatttataagaattcttctaggtttaggtttgaattatatggaattaaaaaatgataaataaatggctaaaatctccttaattggccaaccataggatgtgggccccactagctataattttgccattttattcaacaatttataatttctttcactaatgccatattttcatatttcaatcccttaaatgtcaaaactatttatttaataattaaaattaattataaaatgaaattgtcatttaacttatttattaatta

SEQ ID NO: 174469 - DNA, 537 bp, Cannabis sativa
  modified_base (488)..(494): a, c, t, g, unknown or other
ccatgtattccattgccacatcccaaatattgttcctagtgaagctcttcaacacatgcttcaatcgaagaattttttgcaccaaaccaacaagcccaatacaagtaataggcttagtccagctgtccatgacaccttgatcaaaccccaagtaagtagaccagtggttcccataacgaaacgatttcaccccaacattgttaagcacttggaactgaataagacataagtagtggtcagagacaatatcccacttaaagcaagcttttgtgttagaaaattcatccaaccaaatgttgttggtaaaaactctatcgagtttagaaaaaatctttcaccaacctcatgcttgttattccaagtataaaacgaacccgaacttttgaattcctcaacttgagccaaggcaagccaagattgagcatcaaggatatctaaattgtgaatttgtctcccccaatgtctgttgtaacaccctaactaacatnnnnnnnttacgtgatttttaaacatgatgtgcagctcgttgctaatcaa

SEQ ID NO: 174470 - DNA, 515 bp, Cannabis sativa
tgcaatttgagactaccgttgaggttgaatatataattattgatggagaaatgctaaagggtactagttaggagtgtacataaatttttgtaaatcgtctaaaccgaacaattcgtccaaactaaaccgagataacccgacgaaaacaaatcgaaaaacccgagaaaaatacaaccctgtccaatctttatattgggcaggttgaaaataataccaacccgcataataatcaacccaaactaactcgactatacccgattaagagggtttttttatatatatttatatatttttattatacatatttatataattatataatttatataattatttaaataattataaagttgaaactaatatatttttttatggtagttgatttgaactttaaatttaatctatatatatatgtctcattattacaatttaactaagatataataattgaatgtaaaaaaaaatataaatatatatattagtgaccaatttcattgggcgggttactattttct

SEQ ID NO: 174471 - DNA, 737 bp, Cannabis sativa
aagtgttgaaagagaaaacgtccttaaattagagaaaactaggttcaaggagggaggattgtggaatggtaagtaaccatcatctgtgtcttaggtgcattgtgtcaacctactcaaaagccatgttaaggcaatgtggattaaaagtcagggaaactgcagcctcacctaaacatttaccacttttgaactaatcgacaaccaccaattaaaaaatattgaacatattcctgtcacttatatatggacttgataaacaaactcatgaagttatatctatatttagtgttaaaaagagaagatactcataaaatccattgaacatcgctcaataatcatcccatttacccaaagcaaacaaagcatcgtattaactattaagtattataatccgaagtacggtgcttcatcatttggattcaagatatcataacttaacctcagcatggatttcataggaagttgaagaagaaaggccaggtcgccgcggtccacgaaaggaattcacatgcaatgtttgttgcgcgctgaaggaattcacatgcactgtttgttgtgcgtggaaggaattcacatgcaaagtttgttgcgcgcagaaggaattcacatgcactatgttgcgcgtgaaaggaattcacatgcaatgtttgttgcccggaagtaattcacgtgcaaaaaaccatccaaaaaactttaaggttggatggtttgttgcaagtaaattgatagttgaggag

SEQ ID NO: 174472 - DNA, 722 bp, Cannabis sativa
atgggctcctgtgcggtgggggcctttcgtcttagctcaagatcggccctggttatacataatttgtaatattaattaggttatttatgatgtttgtccttcgaactatgacttatgtatattgtgttcttaaatttttcagtctgttaaaaatagttcttgaactatacacactattataaattgatcattttgttaagttttattacacgcgagttgcgacaaataaaataatcgcataactgtttaaccaattgccacacattgagattgtcacatcatcacatcatcacatttatatgagaattgctaaaaggtactacttatgcttagcatcctcctcggtgttagacccaaccctaggcatatgcggattagacttgtaccgacgactcacctaatttcggggcccaagaataaaaaatcccttttaaaagtacacaatttttattgattttaaaaaatattagattttttttaaataaggttctaaaaatatatatatattttttttcttatgaatcactaaattttaagtatcgagtaccatataacttaagaaaataattttaatttagaaaatatcgttaaccaatcataaaatactacctataaaatatgttgcacacaccactgatacccaaaaacaatattacctttacatattagtctatttatatgtacataggtggcgatgagtacctagttttcatttttaaaag

SEQ ID NO: 174473 - DNA, 716 bp, Cannabis sativa
cctattcatttatttataataaaattaattgtcatgtataggatagtttttaattttaattacaccataaatttgggcattaatcctttgaatgattcctatgaaaggaaagaaagaaagtgatatactgaatttactaataaaaaaagaatggtaattctcattgatgaggctgttaaatgacacccaatttctaagccttttttaatggagaaaataatctaattttaacacaaaagtcattagtctattggaataataaataataataataatttgcagtaaattgtatgctaataaaataagtagaagcggaaaagaatagaaattaaaggaaactatcaattgtttagaatagatgctctagtagaaaggaccgagttgttcgtcctcatcgtccgagcacaaaaaattcgggacctgagctgcttctgaagcttgattcggtggcagacccatttctatggcacgagattaacccattggtgttgtaggtaggggaccaatggatcccgtatgcgactgaaccattggtcttgtaggcagggaaccgatgggtcccgcatgcaactcacccattgggtgaaatactgctaaacgcgatagacccattggtcctgcaagctcatttgggaaatgactaattagtgttccagcacagtaatagtatattggcgaaaagggagaataagcagtttgtgggtgcgggagagaat

SEQ ID NO: 174474 - DNA, 866 bp, Cannabis sativa
gtttttttttcttcttttctttttgctcttgatttccttttcttttctttttcttatttttttcaagaatttcgaaattctagcttactaatgatacaaagaaaatggaaaacaaagagacaatctttgtgaaacaatttgggaaaccaatgagaaacaaatttgtgacacaaatagggaaactagaattaagcaataacaaattagagtttttttatgaatttttgaatttcgataacaaaaagggaaactaatgacagagaaaattttggaaacaagaaatcagccaaaaataaagaattttcgattttctaattgttctttttaaattttttatttttttaagaagaaaagaaaaaaaaataagggaaacatatgacagtaaagacacgatgtttgacacaggaaaattatcataatatggttctaacagtttcagatttcacaaaaaaaaaaatagaagagatgaaacacaaattgacaagaatatagaacacaaattaaacaagtttatagaacaacaatggaatagaaaaaaaaaacacaaaagatagatgggcgaaacccgatgatcctaagctttgatactaaatacgaaccacaccaacagttgtgatgaaacatgacaccaaatattgtagactctaagaattctcaaaatttggaagtagaactgcggcctaatgcttagttaagcatgaaccttggtatgaaagaagaggccacaaacggtcatagaaatccgtttgataagtcaaattgaatgccacaaggaatactccttgataagtttgaatagttctctgaagaactcaagaagaaaacctctcaaaattttattcaaaataatctaattttccaaagtg

SEQ ID NO: 174475 - DNA, 637 bp, Cannabis sativa
tggccaggaggatgaacttgcttttttaatgaggttgtcaaatggaatgagtaaagaacagtttgaactgtttatggttattacttggagcttgtggaatactcgaaatgcttgtatacatggtggttttgttccacagccggccgagatggttgaatggtgtcacaagctgctggaggattttcagggagggagaagtcgctcccaggatgtaatgcgcagggaggctgctgtttggaaggtgccgaggcctggagaagtgaagattaacgtcgatgcgggtgtgaagaagggggctgggtactcgggcttgggttgtgtaatccgtggtgagcaaggggatgtgctctttgcctcctcgactgctatacagcgggaatgctcgcctttacagttggagctgatggccattttgaatgggatacaagttgggctacagaggcatatacgacattttagcatagaatcggactgtttggaagccattcaattaatccaaaaaaaggaagatggctgccgagatgttgattgtttgctagaacaaattagagtgttgttgtctcatgagagtgtgattggtatctcttttgtatttcgtgaggccaataaagttgctcatgttttagccaattatgct

SEQ ID NO: 174476 - DNA, 719 bp, Cannabis sativa
  modified_base (274)..(277): a, c, t, g, unknown or other
gtagacattacccccaaatcaatgccatcttaagccatggcaaactaagtaccccagtaaaaaaattaaaaaaacaataccaaacataggttgggtttcatttccctattcccatgctaataaaccctcataccaaacggcccattaaggcttacttaagtcgttttagcacggttgcggccagggttagaaatttagatgatagcacgcaacttacagcccttcaggcggggatccctactgatccactaactgcagggggtgagttgtgggnnnncttacaaggacgtccagtgagaagcatcactgagttcaacgaaagggctcaggtgttttttcggaaagaagaagcccgaaaggaaatgaatttattgaaaacaagctcgggaggcaaacccagcaatatttcaagaggaacagtttccacgagaattgataactcgggggcttctatttcgaagagaaaggatggagttaaggaaccgtcgaatgataaaaagaaacagaaaaagcatgacaaatatgtgctagtgtatattattataccaagcttaatgaaactcgggagaatatttacctggcacatgagcagatggtggccttcggcaaccctgagcctatgaggaattcgaggagcaaaagaaatcctaacaaatattgtaaattccataaggatattgggcatacgaccgatgaatgtccccaattgaaagatgaga

SEQ ID NO: 174477 - DNA, 520 bp, Cannabis sativa
gttgaacaaggaataagctccttttaattggttgttggcttctttcttctttggcttatcactctattctttatttatgatactttttttttgttaaattgtaatctaatgttgtttaagaaattgattgtagtaagaaccataattccataacaaatttcgaaatatgtgtcataaaaacctgttgaaaaactatcaaaattgtattaaataaaattgaattgtgaaatatttacaaataagacattaagacaacactcaacaacggtttgatacattatacacataagtttataataaattcattcaagaaaaataaccaatctatgaataacatggattatgaaaatttttgttgactcaaaatatgtaaaatagttttgaatattcttgtaaactccaagtgtgtattatttgcaactagtagtagtgctcaatccaaaacattcatttagaggaaattacattgtatatttattttattttactcattttaattttaatttttatttataaaata

SEQ ID NO: 174478 - DNA, 530 bp, Cannabis sativa
  modified_base (216)..(223): a, c, t, g, unknown or other
catgcatccataattttaagaaaaccaagaacaccttaattcattaaataacatctgagattaataaatcaaaaaggctaaagatcattaccacaagtttctcaagttcttcccaagcaagaacatccacaaagctacaccaaatcaagcccttttttttttttttttctcaaaatcaagatttctaaaagaaagggttagagagagagagagagnnnnnnnnagagagagagagagaggtcgggtgtgaggaataaaaagctagaaattcatttacttccctaaaaaaaaatcagcttttaccaagtatagaaaataaaggtcaatgaccattttgcccccaaggccaattttcacctattcacacatacaagggcattcaaagtcaattcatacccaattattttcaaataaaaattcagattattccatttcaaataaaaatgccaaataacaaatccagtttacatttcgggcccgaacccggttcgacccgaaattcccgtttgtgactataccgcgctaacctg

SEQ ID NO: 174479 - DNA, 764 bp, Cannabis sativa
ccccgcaaggatatcttggtaatccgggaacgaacatctaatgagaagagccattcgcaacacaaacagcatcttcgagacctggcggatcccccgttatatccaattctaagagaacctggagcctaattgaagtaaatgatctccaggtggagacctcccatggagtggtcccgggtcgcaactgtagtatcaaggccaatgaccacattagctccatatagaaattgatttataggcggttacacctttttctaacacaagatctgatcttgtcccccatgtcaaatcatggtagtgcacgtacgcacctctagacatgcctttcgcccaacagtatagttgtattttgaaggagaaacttttgtgaaacacatgtcctagtacacccaaaatccctcactgtagatatacaccacacgatggggagcttcttatcaaccaatggtcagatcgttctattgtagtaccagcccttgcagcgtgtagagtacaaaaccctaggtgggcaaagggtatgcccttacccacatatgtgcatataaatacctctattttttatgaacaaggggtgaagaattttacttacaaaaactctgtcgaaattcctagagagctttcttcttcaagagaaacgagaggaatataatcaagcttccaataagtaaactaaaatttattgagtaaattctctaacttattaattcttccttgcgccactataaattcagaattgtactttcaattatatagaacgctctata

SEQ ID NO: 174480 - DNA, 904 bp, Cannabis sativa
ggctaagcacccccaagattgggtccttcatccctcactccagtattttggccatttccatgttgaatcttcctcgaacgtgttgttcatgtgctggggccgccctcaagttgggtacttctggaacgagtggtccgagtgcttgggccaccctcaggttgggacctcctggagtgagtggtacgagtgcttaggccaccctcagtttggcacctcctggagcgagtggttcgtttagactgttaggttgaaggcctcctagagcccattggctcttttctagaacagtgaggagtttcttcatgtggtgtgtcaacgttctctgtgttgtcagccatgaagaaatgtgttttcagcaaggagggttttttctgagctttttcacgaaggctcttaatgaaagcaccaaactgttaatgcagattttcattaactagatttgagcctaaattgtgataaacttgcacagaaaatttaaacaataaagaaaaaagtaagaacacgaaggttttttacgtagttttgcagttaaaattctgcatagtccacgagtcaaccttattagatttctgatacagttctagggccttttctcttatgagttttttgatcccttttttagtgtaacatgcctctatttataattacatagttcggcagttaattacatagttgactgatatctttacaacaattatcccctgaaatcgtggggtttgattacataccacgtaaaataaatgcgattattatttgaaaatcatacaactgtgattagtttgcttttattgggtcaatacatacgtgtattaaatacgttataaagggtatcgttctgggacatctcgctaagagcatagcaacaataaccctggcagcaaactagagcttttcccatgtcttt

SEQ ID NO: 174481 - DNA, 521 bp, Cannabis sativa
ctctctctctctctctcccccccttttatgagagcctccgaaattagacacttaatatattatatatatatcaatgacgaaagagaaactatatacttgaggattgtttaaaaggtgtaaaagcaaagtgatgagaaaatgtaattaatggtttaacttcttctttctttcgaatattacatagtactctggcataatgtaagactatgacgttatttaacatgctttttaatgccaatttttctctaactaatataattttgttatggctaacttattgaggtagacttgtaatatattactcattgtttttatttttgaatactattacacaaatcagacaaggacacttacggcaacaaacttgtgaccgacatagttagcgagatagatttggtctttgctagcagttgaagcccatcggtccatgctcaactcaagcccattgtcactactataaatatcagaattcgcaacggtccttaaaacaatttttttcggggaccgtcgctaaaaaaatt

SEQ ID NO: 174482 - DNA, 608 bp, Cannabis sativa
  modified_base (333)..(338): a, c, t, g, unknown or other
tggtagacttatttgtatatatatgtccttaataaagataaaaataccctttaatttttcttttgatatatataggatatataggtttgggatgtagttacttctttttattggtccccaaacagttcataatattgttgaagtagtttagaaatgaggtttctcaaaatttcaaattttttcattttttactctaggacggaagtttttttcaaaatactgtgttttttttttagaaaaatattgtgtactgtgttaagttttcagtgttgttccacgtttgttttttaattgttctattgttgttttagttgttctgttttgttgttttannnnnnttttataaaaagacattatttttgtaagaaaattctgtgtcatagtaaaattgtaaatttttgtccaaaattcattatttttatgaaaatctctataaaataggctatttaggatttgtcgcttaaattataattaatatataattatgcatgttcttcagcccgtaattatttagggttttaaaaaaatggctgagatgtaaaatggtctattttcaaaaaaaaaattaaaaaaaaatgactcaatataataaattagcaaataaaaat

SEQ ID NO: 174483 - DNA, 663 bp, Cannabis sativa
  modified_base (261)..(267): a, c, t, g, unknown or other
ttggggcttgttgtcataaatttgcgttgtatactcttttcatattgggtggttaatcatgttatcaaaagagaaacttacaaaaatacttgaatttggattaatttttataaaaatactatcatacgaaaatttttcaaaaatattgtgtttttataaaacaacaatagaacacaaaacagatcaactaaaaataatagtagaacaactaaaaaataaccgtagaacagtgaaagcttaacatagtacacagtataaaannnnnnnagtatttttgaaaaaaaatttaccctaaagtaaaaaaaattaaaaattttcagtatgtggtgtaaataatcctatcaaaatggtggtgtatatatacatatatatccagggccgatttaggcataggcgagctaggcccgtgcttaaggcccacacttttcgggaactcaaattaaaaaataaaaaattttattaaatttttatttaagtaaattaaatgtattataaacaataaatattcataacttagttgattggagtctatgataaattatataatgtcatggttcgaatcccataacactcattttcaaagggtaagttgaaaaatgtctcttttattaatcaattaaccaaatttgcctctaattttatatttatttgaaacatacctct

SEQ ID NO: 174484 - DNA, 573 bp, Cannabis sativa
gtgttttatgtacttgttcgagtttgggaaaatatatgatattagagaggaagtaaacgagtttatgaggtgcgccgatagggaacttatgattgagatgtttcaagagttgcttactgtttggaagccgccttaataaccgaaacaaatgcatatttgttatggtgtatatttttactgtatatccttaacttgtttgaaccatgaaaactttgttggagccataattatgtaatatattggcaatattatttaaaagaaaggaaaagtcattgctgttaggttcattcattattagctataaaaatcttatctttaagcgttggacttttgaaatccatacacttgttatatcttccaagatctgaaaccatggcgaaattaatggtgggaggagatttcgggtttgatgaatgttctctttgataggcttgcttctaaagatgtccttgaattctttcgaggaaataaggaagcgaatctcaaaaagttgaagagtatgttgtggtattctgatgttctactaaatgatgctgagcaaaaacttggagatgacaatgtgaagaagtggct

SEQ ID NO: 174485 - DNA, 559 bp, Cannabis sativa
  modified_base (497)..(505): a, c, t, g, unknown or other
ttttttttttctctttcaaaaatatcatttttctattctaattgtttaagtgctagttttatctatttaacaattataattaattattaaataaaattaccatttaatgtattattaattagacccttcaaaatctcttaactaataaataaacgctaaattatcttttttttctcaaatatgtcatctcttagtaaaattcataaataagacattaaatatctcagttagtgtggggaccatgagcctatgtaatcaagccctaataagcagatcttgaaatttacaaagtgaattttctagtttattaattcctcatgactccactatagatataacatcatattcttaattacatagaagttctatatatcaaatatagatacactatgaattatgttcaattgtttcaaacaacaatcattgatcctctatagacggtttacattaggtagtgataaaattactgttttgcccttcaatgtattttatccttnnnnnnnnnagctacttgtaaatgatatttcgagaaactaatataattactgaaatgaggcct

SEQ ID NO: 174486 - DNA, 518 bp, Cannabis sativa
taaacgataaggctcacaggtgcggtcttctagatagtgacacaaagaggttggatgagcagattgttgccttaaccaaacttgtttaaaaaaagggggtccgatctgattaagaagatgaagatctaaagtcgtgcgccaggcggattgcagaagcctcactcttggagaactttaagatgccatagatcgagttgtaagatggtcgcacaaatccaagaactcacctttgaaaagtataataaaatgatgtaggtggcaagagttagtgatgatactaagtgtttatgcttctcactgacacttaccaagtccgcaaaagattaggggaaaaggctcgctcccaaatccattcatagctgaaaagatttacaatctactttttggaagtagtttatagccgccgggactatgacatggaagttgggtcgatcaccaatgtcaaacgacaagctggaaaaatcctgaagaatttcattcagcgaatgatggaggcatcaacaaagacaaaggtgagc

SEQ ID NO: 174487 - DNA, 684 bp, Cannabis sativa
tatgaaggtagttgtagtgatgctcagcttcagggcagttttgactattattggtaatatgattttatcacagatagtgacgtcaacttcactaaaactatacatcagctgcttgcatggctccagatccttgaaagacaaacccattctttccaaggtttgttcaatcaagatatttgatgacgttccatcgttaatcttcacctttgccaccatcatgttgaaaatttaaaacttgctgaggagcaggtcattcattagttgatcgaggatgcaaccaatgccttctactattgggaacttaatagataggtggaatattaaaaagttgacccagaggttgccttaaagttgtttgacattttatttaaccatgattgatgtgctaatcacacagtagtgtttttataagattatttccaatagtgtcaaaaaggtggtgtattgttatattttagcacatttaagaaaaataatactccaatggtgttttaaaacgtgtactaaatttgacacatgctaaaaattgtgccaaatttagcacaaaatatagcattatgccaaatttagcccacaataaatgctacttttttatttactataattattatcatcgacttttactaaactttatttactttatttagcatattactattatttaaataaggctaattaggattt

SEQ ID NO: 174488 - DNA, 572 bp, Cannabis sativa
  modified_base (494)..(504): a, c, t, g, unknown or other
tcttctcttcaattaatttcgaattaatatctgttttagcctattacattggtatttcttaatttttgtagaggagtagataaaacactgaacaagaatgacttaagaacaaattctcaaaagtgataataaactttttaattacctcataatcctagaaaaatatctaattagtcactaataaggaaagttcttgacccttttgtcaattaggttataaaatttttaattgaccaaattatgcaaattattatattattttaagatattctaagacgaaaaatgtaactttttgcaaataacttaaagagtaaattgtggcataaatacctaatgttttatattttatacacttaaatacttaatatttatttttggaggcaaaaatatctaatgttataattctcttacaccattactaccacttccgttaacttatcataaatatagacatgtgaaggactcaaaagcattacatttatttattttatttnnnnnnnnnnnattcttaatataaaaaactaaatactacttgtttaaaaaaaaacaaagagatgcaatactaaattacc

SEQ ID NO: 174489 - DNA, 532 bp, Cannabis sativa
caacctcggatgctgccttttgatcaaatgccaaatcaaatgcaacccctgaatttaaaatggtcaaaaattgggtaggagacctcatcctcatgttcagaagccttggaagtatcaaaaacgaaatctcgggagctcagaagaaagggcccagtgcccaagttgacaaaaggcccggtgtgttgggttctacttatctgaatctgatgtcatttcgactgtccatctagttttccacaattacaatgatccatgaagtcagagaaatcaaattcacaactttgcatttctcatttccagtacacttggaaatgaagagtttcgaatctctcatttctgcaaaacaacatctccgagaaccgatgaccagctttgctagaacataaaaatggagtaagtggtgtcaacctgggcattgggatgtgttggatatcaacttgggcgttgggacctgcactgcctttagtaaaataaccataactcactcaattttgatccgattgacgcaattcaacttgcgttttgaagttaa

SEQ ID NO: 174490 - DNA, 659 bp, Cannabis sativa
tctcgttaggttgtgggagtttatataaaagcactgcagatgaaagaaggttagggttttcacaaagccataatgattgggccttcctcagcccattaaattcaaaagtctttttattgatcctcccattgacagaaaataggggtttttataaaaatattggatttttggcaaaaatttacaattttactatcacaccgaattttttacaaaaatactatttcttttataaaataaccgtaaaacaacaaaactaaacaattaaaataacagtggaacaacaaaaaaataagagtagaacaaccataaaaacttaatacaatacatagtacaaaacttatacagtattttttaaaaaaattctgtcccacagtataaaaataaaaaaaataagaaatttcagcatgtggtgtaaaaagctcaaactaatattatggattttttgggtcactaaataaactaagccttagaagaatccctagggtgttcatcaaatacataattaaattcaatccaatccaatttattaaatgtgtacaaatttaattgaattagaaaatttaaaatctatacttgtgtgaattgaatattgattgatatgtaaaagtaaatgatccaatccacacatatttatacatgtttaaaaaatttatatatac

SEQ ID NO: 174491 - DNA, 708 bp, Cannabis sativa
gtcgctgctgccaccttcattctgccatcccagtcaccacactcatccacgtcggttgcagagtgttgccttaaggtaatttcaataattttaattttgaagtgagaaaaggtaatgctatagactatactattgctcttgtacctagcttttggccatgttgatatttgatgcattgacaaagcttttggttatctgtgattaaaatccttgctattaaaagttttaatgttcaattgtatattgttgttggttaaatggatccaaaatttgaacaaaggcctaaacgttttgaacaagttcatttggaagagctttgcttagttcgaaggcttggcatctcaactgaagatgctctctttgcacagacctaattccattgtgttatagtgagatttttctcacctagaaactcgagaccagaatcctgattgaaggacacatgtactcaatttcccaaaggaaagctaagatgtcaataagagactcctcgagttttaaccttgcctgaactaaactcagcgagatgatgcggatatggccaagtctaatcgcatttgtgtggctcgcattatgtaggaccaaggaacgaatttaacctgcatataccaagatacatgcgagtatccattcgatcctcctgtgaaaacataaatatcaattctctatgatgcgagctggtcccaatgacccaacagcctcgataaa

SEQ ID NO: 174492 - DNA, 897 bp, Cannabis sativa
tacacttgtttttaatattaagaaattttaaatttgggattatatttctaaaatacagaaatcacatgatatgatcagtgattagaataaggtagatgaagaagagaatatccgtctgttacatttaaaattactcgctttgcgtgcttgtattttatttaatgataattaaattataaaattatatcaaattttaaaatttaacattttcgtataatttttttaataatgagtacctattcgaaattttattttttaactcttaataacacagaaaaaataaattaatgttttagagtcttgatttttctaattattttaaattcaataaattataattattaattaatttattgtagacatatatatttctataaagtccgtttcaaaatatataattttggcataaattaaattagaatcagaacatgatagaattttagtaatttgataaatattattttgatgtgattaagtttatatataaaaaaatagaattgggaaaaaagatataacgattgataaatctatagaaaactcatcaattttaaaattattatcatcatcgtatctcactcgtcactacatttaaagttgttgttattaacgtatctcatttgtaatcgtcactatctcaaaaacaaaatataaaagggaaatttgaatatatatacttaataatacttaaaattggacccctaatcttatactatataatatttgtaaagtgggatatattttcataaaacccaattttacccccctcatttgaaaagccactctctctctcttcgtcccatattctctcaacccactctcaccactgaagctcccccaaaccaaatcgcaccacccactcgaacaatgaatccaccaccgcacggagggaactcgcca

SEQ ID NO: 174493 - DNA, 574 bp, Cannabis sativa
  modified_base (548)..(548): a, c, t, g, unknown or other
gaaataatggataatttatatcatatttatttttggtgaatagagcatttgatgtaattaggagtgcaattctaaatctttactggagttaggagcagttaataagatagagaattcacttggtaaattctagagctacttattgggaacttggttacataggcccatggtctctacactaactaggataatattattttgtagcctcaactaattgatttatttacttaattagaattctaaataacgacaatgtcttatttgtgaattttatcaagggcataattaagaagaaagagaatttaaattgatatattaattaagagactttggaaggtctaattaataaatatatttaaatagtaattttatttgataattaattataattattaaatagatagaaatagtgtttaaataactagagcagaaaaataacattattaaaaaaaaaaaagataagtttgtttcattaaggaagcaaaataatgacaaaaatctaactcatacgccttcataaggggttcgtgttaggttttatgccctanataaaactctttacaatctgattagt

SEQ ID NO: 174494 - DNA, 801 bp, Cannabis sativa
cagggtgtaaattttatttatgaagaaagttgaaaaaagaaataagttagggatttcacatttatgtgtacagataaagagaaagggaggtaaataaattagggatttgaaaaaaaaattgaaaaatatggataaaaaattaggaattttacatttacatgtacatatagagagaaagagaggtaaaggaattagagattttgaaatcaataaacatacctgttattaataaaaaagatgaaatgtgtgcatatcgaagctatggatttatataagcataaatctaaatcaatcccaaaggtgtgcataagataatataaatacactttatttattaatttatatatattatgaaaaaagcacagagaaaagagaaagagatcaatctgatgttagtagtgtggttagagagaaagagaagaagagaagaagaggaagagaatgaagtttatgggagctggcatagttattcaaacaatagatacaattgttggcacaacactgtgactagtttatgatctctccttgcagaaggaattatcagagagaagaaagatgaagagttataagttgaattagttagcaaaatagccaaattgttaatatttaattttgagaagaaaaaggaagagttaaaacttgacttatgaccggtcaacaaaatgggaatattgtcaacatctatttttacaaagggtaaaattgtttgtagaactatgacatatatttttataatagtaagatataatataaatatatttttgattaatgaatatgaaaaagagatatttctcaatttat

SEQ ID NO: 174495 - DNA, 648 bp, Cannabis sativa
ataacaaacaaatttatagaggttcagccaccttgatgaacagataatgacctactttctttttagttgtgttcactcttgagataataccatacagattacaggtctagaccttataatttctagctatgagtctcttcagtattataattgtgagaataatgtgttacagataaaaaaattggaaggattctatgaagaacttatgaagaaaatagacttagagtctacgaagcgttaggtgcatatggagctttaaagggagagagagctttgggcatgtggcttagcttgagtcccttttccatgtgatctagtgccttttatatagtgtagagattacaaaagatcctaatttaaataggtaaagatatccctttaaaataggaaaaataacatctattttatcttatatttggatataaaattaattttataattattttatttctacgttagtaattttaataattatattaaaatacatagttaaaataaatagttgaataaaaatactactttctttaaataatgatctttattttataagaaatctctatggttggtcttgttgggttttatgccctaaataaaaccctttacaatctgattagttatcaataaaagaaatttgaagtgattgatgtt

SEQ ID NO: 174496 - DNA, 505 bp, Cannabis sativa
catagggctgcttgcagcctatcttggctgcacatgcagcctcctaggcagcaacaccccaaaatctgatttatggattttttccacaaatttttattttttccaatttcaaaccctaaaaatcaaaataaaatattattttttaatatatataaacttaaatatcaattttaaattaataatatttaacttttaataaattattattaatttctgatattttgaggtttaaatttaaaaattaattattttattttttttaattttggtcagattttaaaaatttgttaatttgtcaatatttatttattatttaattataaggttagatattttgatattggacatattttaaattaaataattgcattatccttttaattttgaaacattttattaaaatgatcttataggatatattaaataattaataaatttaaaattaacctagatatttttattgatattctaaccataatattttcaaatttaaaattggttattt

SEQ ID NO: 174497 - DNA, 694 bp, Cannabis sativa
cgttggtggcagactgacaccagcgacatagtcgttagggcatgtcgttagggacaattttggtataaaaaaaaattgctgagaaaaccctcattttccccatcctcatcagttcactccgcctctccccctcatttcagccccttcaacattcgaaaaaccctcattactccgcttgaagctaccttagccaccaccttcgtccgcctgaagcttcgcgcgtcagcccagcaccgcccgcctccgcctgaaggttcgtcagcccaccaccggcggccatttttgaggtataccctcatttttaatatgtatttatagtactcgtttttgttgtataatctttttatcggtcatactaattttgtatatatatgttgttctttgttttttttattcatctcttttctgtaattttttttggaactgtcatttgttttcttccttttttggttaatatgctatatggggttttacaatttcaatgaccgaatttcttgtctttaattcctaaatgatataaatgaaaatattaaaagattcatataggatttaggcattgaaaacatgtaaaaaaatatatgttttaatttctcaaatcatttttgggtaggaaatatattttctagaataaattttaagcttcatgatttttgaaatcgttttcatggagaaaatttctatataatataatata

SEQ ID NO: 174498 - DNA, 560 bp, Cannabis sativa
aggaaaaattaagaaaagaagaaagtttgaaatagagttttctcttggaatttctctctctttctttcggctgagacaaagcaagggcaaggaccaacttttctcttccatttctctgggatttagcaaggattcaaggtttttgcaagtaaggtaaaccctagaaacccttatgtcttgagtttatgagttttagttgagttttcttttgtttcaagctatgattttgcttgtaaggggctgttaggtttaggttttcttagggtttgaattctagacttaatttgagttggttaagagtcctagcagctggttttagtgtgtggtgttgattttatgcaattttaagctttgagttcaaagctttggtctttaatggcaagttgagtttcaatggtttgttctgtgattttctggctggaatgtattgtgtatatccttattaggtactatggaaggttttattgcatttggtggagaattgagcaaggaatgagaggctttgggaactctggtgcaaaccggctagccggcttgcagagcctaaaaaaccggctagc

SEQ ID NO: 174499 - DNA, 595 bp, Cannabis sativa
atatttgaattctaggtgtattatatgcattgtatatgaatttttttaattcttcatattttaggcccgataacaataaaatgcaacgatttggtcattagagttacttagatacagttgagtatcttagaattagcggggaaagataattagacatttagaatgtcgagattattcagagctatagttttggtccattttacccttaagtggttatatttgtcaaataactaacgtccaagtcaaaatcctttgctgctatgaattatttcttaagcattacctgtagatccttccatttacaaacaagtaacgttgaatgtacttctcaaggcttttttctaggtttttgcttgatatttgtcaaacaactaacgtccaagtcgaaatcctttgctgctatgaattgtttcttaagaataacctgtagatccttccatttacaaacagattcaggagataatctttcccactagtcttttgcggacttggacaaagttaaagagaaacaaaggcactttgcaacattacttgcttttgccacttgcatcattctagtatattttgatagatggtccttggggtccattcttcc

SEQ ID NO: 174500 - DNA, 511 bp, Cannabis sativa
ccatccgacggttaccatacatcacggattgcaatccatgaccgtacactaacaagacaaaatccggtcccataataaataatccaagtaaagtaattttacttttattggacactagtagtgttagggttggatttaggtataagtaggctaaactggtgcttagaattacgcgactacaaaataaaaaataaaaagttttattagacttttatttaagtaaaattaagtattctataaacaacaaatatcataacttaattagttgaagtatataacatattatacaacatcatgagtttgaatttcataacactttttctcaatatttttatatatatatatatatatatatatttctgaaggctccaaaatctaatttgccttatgcccatttattcttagggtcgccctgagtagtgcctagcaccttctataggtaacacccttacgattggttagcgatattcttatatggactcgatacttaattacacaaataatagtatga

SEQ ID NO: 174501 - DNA, 765 bp, Cannabis sativa
gtcgttaataatcatttagtgactgacgagaaggcctatatatacctaactttttaaggaaacaggctgttatatatatactagacttagtatcattataaaaatggcatttctattattttctttatttatagtaatggacattaattgattattgaataaatatgatttttatttctttaaacaattacgatttatacttttattattactattattattgtagtgttgtctacctaataaaataattatgatcatatatttcaaactatttggttctttgatttacaagtatattgaatttacactgatatgataataagtgatatggtttgcttacacttgtataagtggaatgtctttttctgagcattagcaaagtaaacttgtatcgaatgtattagttatacatcaaactggactgatattgaccgtagaaaatatattagaaactcatcgttatatcttttctaagtcaattttactattagttgatcttagatcacttaatctcaatcctcatatggttaaactttagcctattgtagtatttgagatctctgatttgttccttaattaggttacccgtcggactagcccatacttacatcttggagactcagtaatgcatttgagtgggggctttcatcatagatataaaatttatagcttctataactatttagaagtaaaacgatggttttcttagaaattgactaaacgagataaatggaagaattattatttaggtaattatattagttt

SEQ ID NO: 174502 - DNA, 502 bp, Cannabis sativa
aataaagttttcattcaaactaaaattaactattaggacaatcatttattcaaatatttttaccaacagaaaaatatttagtgcataagctacactatttacagaattatgtatttttgatatacatgaataattacaattatatatatgtatatatatatatatattttatgagatggtaattatagcagatattttataaaattttaaataatttatggtaccaaaattaaatttaataaataatttattttacatatatatatatttataaaaaaaatacgtacacaggtgtagtatattatttctttgtaatttcttgacattctaaattatttaaaatttacaaaaaaaaaaaaaaacaatcttattgatctatactagaaatattctataatatcaccttttatagattttaaaaaatatatagggaaattactttatatactgtttttttaattttttttttcaaatttacggttacagcgctagttgcaatagg

SEQ ID NO: 174503 - DNA, 647 bp, Cannabis sativa
atttagataatataatgtattgtagatgaaattttttaaaacaatataaaatgtattatttaatatataataaataatccgtattaacttgtattataatatttacaaaaatgatccgaagtcaaccttagtctttgacctagatctagagacccgaactggaaccccaaacgccaaactcggacgctggacctgacccgaacctaatccatatttggtgttgaagtcgagtttattgaaaatatattacagctttatgcaacctattaatacaaatcaatataccaaacatagtattctattaaataatactaatataatacaatacgatacaacataatataaatacaatacaatacgacttaccaaacgagccctaagagcattattaggcaccttagcaatacttagaagtggtgccttgtaattagttgatgatattctttaaaagttattacattaatttatatggaactcaatatttaattacactgatagtaatatacaaactagattggtgttagactgttgaacactacaacacatgaaaaacataattattttattattgtaaaagcaattacaccaagacttgaacactttttactagaccacaatacaccaaacacttacactcttattttaat

SEQ ID NO: 174504 - DNA, 589 bp, Cannabis sativa
  modified_base (562)..(563): a, c, t, g, unknown or other
gtttggagttggctacaataaagacgtgaagattgactcaaattatttatttctttacttctttatctatatttgtaaagttgtaatttatttttgggtgtaaaaaggaaactcttggtgatcaaattttgaagagttttctagaaaaagctttgaaatgtcttggtccttaattaagttgtcttggtgcccaagttttgtaactttataaacttatgttttgtgtgtgaaagtacgtgtgaagaaacaatagtgagttgtgaaaagagaagtgtgtgtgagtttgttgtgtaatgagattgaggaagaaacaaagatttaggtagagagactgggattgaacatatatgtaattttaaagtgataagtgaactatatctctctttgtaggtttgctagttttaccgaacaaagtaaattactttacttcgtttctttattattttattgcgcttgaagtttattattttttccaataattataaatattttctctaaatttattaaaggaaacaatattaattacaatttccttatctatctatatctttatatattaaanntgcctatctaacggcaattcttggtt

SEQ ID NO: 174505 - DNA, 510 bp, Cannabis sativa
aactcgtagttgggattctgatgtcgtcaattacctgtttaacaaccgggatgcacgtctgattctgagtctccctttatcaccaactgctgcttctaatttttggtcttcgtcgggagaccgtactgggctatttttgcttcagaaaaacaaaacccaacatgtcagctctgataattctggatttttgcataaactgtggcaattgaagatcccgcccaaggtcaagaacttgttatggcgtgctatcactgactgtcttcccacctgtcttcaactggtgaaaaaacatgtaagcatttctgcaatctgccccgtttgtactgatcaagccgagtctattgtccatgcccttctcatttgcccttttgctatgtcatgttggcgtactcttggtatcacttatgaaccgatataccctttatcctttggtggctggtttgagaaagctcttacaactcttgatgaggagattgcatcacaggctgctatgctctgttgggcaatttg

SEQ ID NO: 174506 - DNA, 625 bp, Cannabis sativa
tcattaaatatttgaatcttactttcaacattatatattatttagatttctccaaaaatttacctatgatcctaaataattatcgcacatgatcataaaaaattaactaaaaaattctcctaacataaaaagaaaaaaaattaattaaatattcttttagcagatgtagtagtataaacttacccattagagcagtgacagtcaaaagtttcgtaatccgtaagggaaaatatcgggtaagttatgaaatctcataccgcctgggcaaggtcaagtgtgatgattctgagactgtgtaggtatagaactacacagttgaagagagcttaaattgattgattggtactacctatttcaacaaggtacatcttgtcttttggtaacccatcacaaaagaactccacagttaagggtgcttgacttgggataattttaggatgagtgacctcttgaaaaattttcttaagaagcgtgtgagtaaggacaaaacacgctgaaaacacttgtgttggtctgtagtgccagtcattaatcctagaagtagctaaagtgacgtactcgtgtataagagtcattaattagtccgtgggggaaggcccaatagaggcttgaagcggggacgtta

SEQ ID NO: 174507 - DNA, 569 bp, Cannabis sativa
atgtctcactgttcgttatcagcatcgttgaagcaacaccgatcggcagggcgtctctttaaatttgtctcgtgcttacttcgttagatctgcttcacactggagtcgtgcgattggagctaccaagagaggattgtgacagattaagaatttttgggagctagaaagctaatggtgaggattccttcgacgatcgacgactgagaatggccagcatggtctagccgtcatttttgtgcattttatttctaacacatatatgtctctcttctcttattattctattttctctataggtgaccattgttgaaagtttacagttgtccgacaggttatatcgttagggtttgggttcgtgggttcttggttcaacgggaaggggctctgagtttgtgggtgtggagatcttgcaggtggtggctattgtgatttgtggtggtaatgtttttttttttgtgtaattttagattagttctagtgtggtggtggtttaggttgaaggtggaggaagaagaagaagttacagggggttgggtgtaatacccggaattaagaaaaggattagcaaa

SEQ ID NO: 174508 - DNA, 935 bp, Cannabis sativa
actccatgtgtcaccattcttgtaatgtcatgtcagagttcaaaatttgggataacatttgccccttaagtctatacggggcttccgaagttgcgtggagacttaatccaagctgtctttacatttgaatgggtgacacgtgtcgaatacatctgttcgtgattcgatgtgtgtctgactaggcatctcttcagtttttggctaattaatgctctgactaattaatgcctcgagacacggtttcctttgcacgctttgacggttattctcttgaggcacttgaatgctttttatttcccaatatctatttttgggggaaatcgaagcgtctgggaattttgaaatgattaccccttttcaccagtttgcctataaataaagttggaacttcttcagaaatcactttcaccattttctccacgaatcaaactcatagcaaaaaggaattttcttcaagtctgtcgcgagatttttagcaaaggcatccgagcagcttcgtcgggacaacgtttaggcttcaaacagtgagtaagttttcaatctttttttcttttaactttgtatctttaatctctggttttccattgtagaaagtgcaattgttcttgacttgttgtagaagatacatataaaatctaggctcaaaaatttgtagtttttctgcaatagttcgtacaactttgtggtttatgacattctgactttaatctcccaatgttcgattttcagcttgctcattcaaagctttgtgatatttaacccttaacccaaaaatttaaaactcttgggttatgactttatttttgtgttgttttttctctttttaatctgttgagtagtcttggtcggtatatttgcctgtttattgtttgatatcccggccaaacactcatctcgtgtgttgtcttttgtagatgaactctggtgagttttgg

SEQ ID NO: 174509 - DNA, 557 bp, Cannabis sativa
tcctgggttgggttcgagtcctggctttagatttgggtctgggtttcggggcctaggtccctggtctaggtcccctatccaagtctggttcttaggtcctggtctaggtccaagttcaggtttgggtcttgagtcttagttttagtccaggtctcggtctggattcgagtcaaggtctcggtcccagtcttggtccaaattcaggttcaggtccttgtcagggtctggatcctggtctgggttgcgggtctcaggtcctgatgagggtttcggaccaagtcaagtctaggtcccgctttgggtcccggtcaaggttcgggtccaaggtctcgggtcccagtcctagtcaaggtctcagtctaagtttgggttattatttgggttcggttcttatcttagctttgggtcctagtcacaattctagttctgattctgtgttcgggtttggttccaggttcgggtctgggtccaagttgggtcagggtctgagtcttagttcgagtccgagtacgggtttttctgatctcggtctaggtctaggtctgagtccatgtcta

SEQ ID NO: 174510 - DNA, 590 bp, Cannabis sativa
ttttttttttgaaaaaaaaaaatcggtttattatatatagctcctgtaagtgtgtaaaccctctctttctctctctatatatataaatactatatataacataaaaagaggttgctgctgatacctcatttttgagaataaaaagatcgaggcttaaaagtaattatatcaaacaattaaaaggggtcattttcttggctttctatggtttcacaaatcaccagtctgttctgttaaaacaaaataattcaagcttcaaatcaagtaggacccataatagtcataaaacagaaatgagggcaaacaggcaatatatagcatgtcccatagctatatgattatataaaataagaaaaaaaaaacgtaaaataaataaataagtaaaagaaacaactaagcaaacaacttgatctttaaaaaccccaccaacaaaggagtatgactttaaatgaagggcaccttacactgttacacagagggccaattgcctcttgtacaaaaaacattatgaagtgaagaaaattatattaatataggctatatagccaataataagcaaaagaatcataaaatcctacaagaaaattttg

SEQ ID NO: 174511 - DNA, 518 bp, Cannabis sativa
ggataaatgtgtcccgactctcatggcgtgtcactatatcatatttttttttttaaaaaaaaaacagacagctgtaattaataatatttttttaaaagagttgtaattgattttttttttggtttgaaagagctgtaattataattaaataaaaagaaacaaaaaagaagtataatatattgggtacataaaaaccctatcatatcaatttatacatattaaataaggggccgttcttcttcttcttcccctttgtccttcttcttctccttcgtgcgcagctgctaacaaaccttcctccggcaaacgacgggcaagatgctccacatatttgagttctccatcacccgaaaccccaatcgtcgactagtcgtctctcctcctcgatttgtcatcttctctcctcctcgattgctgcctctctgcctttcacgttaacgatcgaagatcccacgaaagtctaaggttagatcaatatctctactttatttttcttttatctgtttctctctctctct

SEQ ID NO: 174512 - DNA, 667 bp, Cannabis sativa
gaaagcgtgttttccttggagcttcagcaggtagtgtcgaattgaagtctatttcagccaataaaactctatgatcagatccataataatctaaatgtgacaattttgggctaacaaaattatctctccatacatgattaatgaagcaccaatctaatctctcctttaaactagatgcactttttcgatttctagcccatgtaaattcatcaccagcagcagggatttcagtaaaaaagcattggtccaaagttgtacgaaaggcttgcatttgattatcatctcttaaaggaccaccatttttatgttcatttgagaaaatttcatttatatcccctattaatagccacgggtctagaggagagacatcagccaatctccttattaatttccaagtatgcttcttattgacagcttcaggaaaaccataaagagcagaaaaatgccaacgaggaccatcatcaaacaagatatagcaaaatgatttgtattcattgataaaagtgttacatcaacaacatcttgccataataacataagaccccccttcaaacctacccgagcaacttttaagccattactaaaatttaaaagattcttaaaacgagaaagagcaccatcacacaatttagtttccataagaaacaacacctgaggagattgctca

SEQ ID NO: 174513 - DNA, 530 bp, Cannabis sativa
gataattgcggttaatatttgaatgtcacacaactgtgattagtcagcttttaccgggtcaaaataatcgtgtattaaacacgttataaatcatagcgttctgggatgtctcaataagaacccagtaccaatgaccttgatagcgagctggagcttttcctgtatctttcagaggttgataatgtaaatctcgtcactcctgcgctgaagacataatgctccatctcacaatcgcagttcttggtgagaaggtaaacttctacagtcatgcgcatgtcttcttatggcgagatggacgcctcgctgtcacttacttgggtttacccgtctgttatacttagtctgtatattgtacattatacgctaagtgtcttcacagtcattatatcttgcttacgtctactcaggcttaacaaggttgatacctcgccttgcgcattccttgatgtatggttttttgctaatgtatgaggcaacagtttgtatatctttatctcgcgtaagaccttatagtcaacaagttgtaaata

SEQ ID NO: 174514 - DNA, 666 bp, Cannabis sativa
aatagttatcttattatttcttaggcgctaagaaatttatacttttaggatatttggtcaactccaagtactcaaaatacttcgatatttttaaaatcaacttattttaataatcctatcaatatttttaactaaaaccgttgtaatatttttgatctccaatcgagtcttcacagtcgccaaacctgaaaatatttttgtttcacatatagctcatattacattcacacatattatataaatctccgtaatttataaattacgcttatttactcacttataataaaatttaacttttatgctaaaataaattaatagtatcataatcccacctattacctgattaacctaaaatataaatataaatcctaatcattcactgttagacttaccgagatataatacatattatatttttaagaaacaacacatcattacacattattatgtacaaagtttgtgtaattttgttttcttttacaataagaataaaaagtctgtaattttgggtgtgttctaatcatttttttttatagatttaaaaaaaaaaaaacattttcctacatagatggtgtttggtaatacttttttaattaattttatgtttttaaaattagaaaagtgaaaatatttttaaaaaagatattctataaaactgtttttatt

SEQ ID NO: 174515 - DNA, 591 bp, Cannabis sativa
  modified_base (321)..(326): a, c, t, g, unknown or other
  modified_base (395)..(398): a, c, t, g, unknown or other
aaaaaaaaaaaccaaatttttttcttgcctattaatgattgaaattaggagcagttagtcatcttcaaagaagagtgttatctctcaaaaaatcaagaataattgtgcatgaatttttattctagatatggaggtccaacaaagaggagcacattggccaaagaggagctcattggccaaggaggagcacattggccaaagagcagctcattggccaaggaggagcacattggccaaggaggagctcattggccaaggaggagaatattggccaagaggagctcattggccaaggaggagcattttgggcgcactaagctnnnnnntccgtcaggtgctaaggcgcaaagagctgctactgtcgaattatctcaaggaccttatgggcacgaacnnnnccaattggctcccctcatgtacccatgaccatccgagtcccccaaatgcgagagacacgtgctcttaaagctattccaaaaatatagtcaaaaaatgataagtgaagagatatttattttttaaataattattttattattattattttgtatcttgaacccaacctaactatagttacgggaaggtgtacct

SEQ ID NO: 174516 - DNA, 737 bp, Cannabis sativa
tgggatttttgcacccgatgctttttgaggaaagtcattggggtttccttattttgcaagcatccggagggggcctctttccagtggttaggggacccccattccctttttcaacattagggtttggtttggggccaaactgctagatttcttatttttacagaaaaatgtctgcccctatctccgggacgaaaccttctgagaagcgggtagccagcttggcttctttggaggaagttatgaaaggacctgttcctcagtagaacaatacttctcgcgccaatggctgggaagcggatgagctccactctaccttggtttgtgctcatcacctcgagaagattgtgaccatgacaggcatcaagccatctgcgtctggggttgttcaccgcttgcctcgagacgaagagatgcccaatcacaattatggggggttcagagcttggagccaaacccacctcatatccggggccatgatccctcttcaagactatttcattaatttccttggttttgtcggccttgcgccttaccaactaattccacaagcttaccgcctgctctcaggcttatttattttttatgtcgccagaggctgggcttcacctacccaggccaaaattttatatttttacaaacttgttgattgtccccaagaagggggacaagtataaagacggtttcttcaccctccgggcccatcctttaaatgagggcccggtcccttttaactatca

SEQ ID NO: 174517 - DNA, 966 bp, Cannabis sativa
  modified_base (588)..(588): a, c, t, g, unknown or other
gtagggtaagtgcgtgtggcacgtgcccctataatcttagtggaaaagtagatgaaaaattaattaaagtgtaaaaatatttttgaatagagaactataaatataaatatagtgtattgttattttcttacagcatcttgttaaaatttaactctagggtgttcatttaatacaatctgtattattttactcatagtacatttgatctgtactattttagtcatagtacatttgattcgcactaaatgtagattttatattttggatccaatccaatgaatctgttactttagattggttactttttttaatattaagttattcaatatttattgaaaaatattttcttttcacataactaacaacaaaacaaaataaattagggttcttttatgtttccaacaaccactacaagaaaacctagttttaccggcgcaattggtcaattacgccggcaaaagttgtcagtataaatgaaatgttgaacttcatattggattcagcaataacttttaccggcgcaataaaatgcagcggtaaaagataaacaatgaaccgccaaatggcgcgaacacatgtccacttctntaaggcttttgccggcgcaaaattgcgcgggtaaaagttagcaaattttggtgggaatcttgaccggccacgtgaaattttagggggagaaaatcccgcgtggaaagtggtggtaggtgggattacttttaccgacacattaatgcgtcggtaaaagtgttaaaggaaacggtacgtttgggtttagggttatatgaccatttttaccggtgcaattcaatgcgctgataaaagtgttcatatatgatccttcgacgagcaaaccccattttccttttttttttcagaaattttttttctctcaattcctccttcatccctctctttcaatctcactcattctcactcaatctctatcaatctcactcaaactctctt

SEQ ID NO: 174518 - DNA, 544 bp, Cannabis sativa
cagaagccaaaacgacctccaaaataagtggctcgaaaatcggttcgccctgtttggacctcttcttcgtctgaatcttcgaaggcatctcctccgcctttagcagtccttcctcctgctacatcagttcctgctactactccaacaggtccttctactcgaacccgagctcagaaagcatctgtcgagaaagaactccttgcatctctaagtcgtgaaaaggttgggactccagccaagaagaagcttaaggtaaatcctccttcggtttcttcttcttcagaagaagaagaaccaacgaaagtctcctctgacaaatccgcgtctctgcattccgagaaggaaattccagaggacatgggagtttcctcagacagtgaggacactgaactcgagccagagcctcatttgacaaaatctgctcctgctcgttctgcttcagcagcaaaggcttctactgctgccaaaggcaagcagccaatgaaagagccttctcctggtaatgttccttcaactctttctcactgccctcgattttattatc

SEQ ID NO: 174519 - DNA, 556 bp, Cannabis sativa
gctttgactcttgcgagatccacaaaaacagtgaaaaagatgagagaacgagtgagatcgcgaggatagacttcggagttcaggattctaggatatcgattctatggtttgtttggaccatcgatgaccatggacaaccatcgtggccttggatgtggttgtgccgagatgaacgataaatacatagatgaagagagtctaagcgagagtgagagggatgacaccctcaggttttggtttccaagtgctgcgagcaccttgatgtcgtctgtttggactactgtcgctcagggaatagccattgtggtctggcagcagtgccgcgcaagatgaaacagtgagagagagagagagagagagagagagtgaaagcttgggatcgagagagaaatgaggaagagggagtagggtgagcataaaatccagaaaattgaaaaaaccgttcaaaccgacctaccgaacaccgttggaaccgaaactgaaaactgaaaaaccactaacgattaaatgccattgaactgtcgattttttttttttgggtaataaaccgaccgaa

SEQ ID NO: 174520 - DNA, 701 bp, Cannabis sativa
tcaaatttctcaaagatgatcatggaaatattctctctgatcatatggatatgggaaatctggtagtctcttatttctctgatctttttagctctgatggtagtgatgccgatgccattagcctcattcttgattgcctaggtcctcctttggatgacttggattttgcgttcttggatgaacctttcaccattaaggaggttaggaaagccctgtttcttctctctggggacaaggcccctggtcttgatggccttaatgcctacttttaccaaaaaaattggtctactttgggggctgattttgccaaggctgttctgtcttgccttaatgagggggttgatttctcggcagttaatactacccttatctctcttattcctaagaagcagaatgctcatactctgaaggattttaggcccattagtctttgttctaccctttataaagttatatctaaggtcttagctaacagattaaaggttgttttagataagattatctccccttttcaaagtgcttttgtctcgggtcgagttatatttgataatattcttattgcccaagaattagttcatgccattagtttaaggaaaaaggggaagctaggttgggctgatctcaaattagatatggctaaggcttttgatagggttaactggcattatttagagagtcttatgtttcactttaactttcct

SEQ ID NO: 174521 - DNA, 599 bp, Cannabis sativa
ccaagggttttgaaaatcctagatctggactaagagagacaaagagagtgatagaacgagaaagaggagatgaacagacagaaaaagaatgaaaagaaaaaaagaaagaaaaagaataagaaagaaaggaaaaaaaaaagagaaattattttttatttatactttttttaattttaaattaattttattttaattttttacgtggaccaataaaattgtgtcacatatacactgtgttcagtccaacatgacacttaacacctaaaatgaacagaaatattaaattgctaacagaataggagtattgggggttttaccgcccaaatttaagttttgagatatagtgaaaatggattattttttgtttcttttttccccaaatatttgcaattaaattaaagttattttattcaaaaaaatttaaggatagcattacatatagtcctgtctattgacatggtgtgagagttttgttctgttcttgttttgttgttgaagagtgtgttaaagagtgtgttttattctgattatttcatggcgagtccaagtggggtaggtagtggtggcagggaggatgtctttagttttcagattgaaga

SEQ ID NO: 174522 - DNA, 942 bp, Cannabis sativa
catgtaaactttgaagcacctggtctcttcatttcaatcccaaatgattagctaatgtttcttggatgaaattattattactaccagtatgataagaacttctaatgatttcgtgccatgcttagcgctttagtgaaaaaatcatggattcagcgaattagataaagtattaaggcttacctcatccagtggggaatcatccaattcaccactatcctaatcctccaagggcaaggtataagaattgtcctcctcctctgtgccactcaaaattatgattcgattcttgcatcgatgtttgatactatacttttcattacaggtgaaataaagtcctttctcgcacttctttcttatttcaggcaatggggttgttgataagttgatattttgctttataaatatagcttatttatgtattaatattcttaaattgattctttaaattattgattagtgtatttataatttattaggctattttgaagagtaatcatgcatttggagtcatttggggggatgttaacatattttggtgaaaaatagtagaagcgggtgagctcagttttataagacagaacttaattacaaattttggaaatcttagaagtagaactggacttggagctcaacatgaaagttttatatcttgttcttagctttccaaaacatcttgaatcatccaattacgagttgtattgaagaagttatgaccaaaataataatcaagtgtagaacagaaattgtgctgtgtgctatagcgcccgattcttgcgctattgcgctgctctgaaaaaaaacacacaaaaaaaaaaaagataatttcagcacatgagttattcggaaaatatctcatgggcgctatagtgcccaattcctgcgctatagcgccaatttattattttttaaaaaaaaaattcctaattctaaggggattcatct

SEQ ID NO: 174523 - DNA, 514 bp, Cannabis sativa
atcaaagccatatctattaaaaaattcaggaaattcattaaaaaaatagacttatttttttcaaaaaaaaaaaagaaggaaaaatactattttggaccctgtgttttgtaaaagttatcaattggatcctctattttgttaaatgacaaaatagaccccgtattttctaaaattgtacaaataggaccatgaattgattttttatcaaaataaatttaattataatatgatctaaaagttttatgacaaaactgtttaaattttttatatctattcgtattaggaattgtctttaagttggttatattaaaaaaattgtcaaaaattaagctcattaaggtcttatttttaccattttggaaagtacaaggtccattttatctttaacaaaacagatggtccaattggtaacttttacaaaatacaatgttcaaaatggtatttatccaaaaaagaaacaacccattaaccatgttcatcagagcttgagcaaagatgagagagagagagagag

SEQ ID NO: 174524 - DNA, 629 bp, Cannabis sativa
taaacgtccaccttattgtataaacaccttgcctcaaataaaataaacaaaaatataatttatctttaaaaatgtaaactattactttaaaataaggtaacacacatgtcttgtttaattaaacactgtgcctcaaatacgataaactaaaatataatttatctttaaaaagacaaaccattgccttaaaataagataaacaacatgttttatttaagtaaattacgcgtcttaaaaaagtaaatcaaaataatcattaaatatgaaaaatactaccttaaaataaggtacatgactcgctttattacccacactttttaccttaaataaggtaaacgacacgccttatttaagtaaacatcgtgcctcgcaagggcggacccacatagaggcgaggtggggcagtcgcccaccctgaaaaaaaaaatcgggaaaaaactatatatgcattttagttagttacaacatatgtttataaataaaaatgatatctacacataaaataagttttagtataatggtatagtcatttcatacatctaaagaaggtcatgagttctaatcccaataaaagcatgtttacattaatatttaatgtcttaattattgaaccaaatatattttattgt

SEQ ID NO: 174525 - DNA, 585 bp, Cannabis sativa
gacccgcgacccagaccaggatctggaccctgataaggacccagaccaaggctaggaccaagacctggacccgaacccgaactaggacctggactaaaacaaagactcgggacccgaacacgaacctggacctagaccaggagctaggaactagacttggatgggggacctagaccagggacctaggccccgaaaccagacctagatctaaaccgggactcaaacctaaactaggacctgacctagacccaggaatctgaagtcagacctagacctagacccgaaaccttccccggacccaaaccagtataggaacctcgacacgaacccataccaggagaaaacccgaacctggactcgaattaaaaatcgaacctgaattcaggacccgaactcagacccagacccagaatcagacccaaacctggacctgctcccagacccgaacacgaacccaaattgtgatcgaaacccaggacgtagaccaggaactaaaccctaactcagttcgagatcgaaacctgggacctggacctaaacctggacccagaccaaggaccctaacccacacccggagcccgatcc

SEQ ID NO: 174526 - DNA, 693 bp, Cannabis sativa
ttgtttgatgttatatattatgattttcagtagttaattaacttcatatatgccactttcatatctaaaagtaaaattatataaatatcttattaatacatatttgattgatattataacaagtttctatatataacatcactttgtacctttgattttctttccttttgacatacatgataattaagtcgattcatcaagaaattgttgtagtgactgtgagagtggtaacacaccctaatatggaaattatttaacttatactgcaaaagactagattttgtctaagaatcccatttatatatggctttcttttatgatcttatgtatagctatttatatatatattattatcggtacactactacaaaaaccatctttacaaaaataggtctcaattaaattaattatgattaattaaataatttgttttgttattatgtatcattattttaattatataattactctatataaattatctcactttacataataataataattattatatatattattttttaacatttgttttttttaaaaattacaatttaggttactgtaatgattttttggtgaattgcaatatacattttgatgtagattgctccattaattactatgtgagttgctatatgaatttttataaaaaattaaaaaaaatactttaatatataaaaatgaaataat

SEQ ID NO: 174527 - DNA, 812 bp, Cannabis sativa
ccagcagatgacaaatgtttttttctttcttcttctattgaaattgaggaatttatgttcttgaattggtggattagaaatatagtatgttgggctacagatcattttatcctagagaaaattagagattttaaattaataactatatctaggcggtgagatggtagtttaaacatctccaaatatatttatctaatttttttttaatattttcttaaattcaatctatactattttttttttttttgagacagtgatatgaatcacgctatgacaatcgcagacgcagaaaatttccagtcaacaagtcaattgtttagtcaaagatatacaaagtcagaatatgaatcactataaacaaagcgacttatataagtataaaaaaaagcatttgaagtaaacaacccaatgggccaaaactatttacaaaataaataagtataaaaaaagtggcttagcatactacaataataatgctataaatttttaaattaaggataaaacacaaatattatgttattagcaagaaaacttatctttgaagcatgacatcaaactaatatgttatatccaaatattaaaattaagtcttctaaagtagaaataaactaaccaccataacctgcaccatgcataatatttaaaaaattaatcaaacttaataactcaaatcccaattaaaataactattttttaacagagtaacaaaactcaattagctaacaaataagtaataagaaaataataatataaaataatagaattaaaatttcaccaaaattattaaatataatcaaaagtaagatttaaaa

SEQ ID NO: 174528 - DNA, 524 bp, Cannabis sativa
atcaaatccccctcacaataaaaagtgtgacctttttgcactcgctgtcagaaagtaggccacttaaaggagaaatgctatgttctctatggcttttctcctggttattttgacaagcgtaaatatgattctacacagcgctccactttggatcgggattcccaagtcaaaggaccggctgtaatcaagctttcgcttctcactctgtctcaaacaaacttgcttcgttgcaacataaatgatctctcaacttactcaacagattcaacatgttcaacagatacaatcaacggttgatgtcaacacttcaatggcatctaacctcactagtaaatctgtatttctctaataatatctaaatagttgatagcggtgctacccgccatgtttgttttgataaaacatgtttgacttctttttatactattcctagtgcttcgcatatcactttacctactggtataaaaattcctattattaaatctggtattattcacataaatgctaacttttgtttaactaat

SEQ ID NO: 174529 - DNA, 642 bp, Cannabis sativa
  modified_base (593)..(601): a, c, t, g, unknown or other
tttaatgccaatataaattgaaattccgattataatattgcccataaattctaacttgagtcggttgaaggacatatccaggtccccttgaatcataactggcactttgccaggacccgtgcacttttctcctttagcatcaatctttctcaactgtgggtaggttatttttagatgacccactaccctgcgataaaacaagatgcgactctacattggctcaaatgaaacctttttgcatcttgaacactcaggataaggtcgccatttcttatactcaccttgactactattatagtcaccttggaatctttttgttcttccccataattggtggttcatttcatttttgctccctgatctactcataagttagttccataagtttcaccatattaaggcacaacattatcattggtacaggaatagacataagacgggcctgttattctctcacatcttggatttgttttccccttgttgtctaatcatatcctgcatagtataatttacatgcttccagtattacaacaataaaggattctcttccttgttgtttgccccgagcctagatgtaaagaccgcttagtttnnnnnnnnnaattagcagataattagggttaattatgaaaattatttatt

SEQ ID NO: 174530 - DNA, 536 bp, Cannabis sativa
tgtggatgataatagaagtacaacttctgaacaaattggattaaatcacgactcttctagtccaagaatgaatgatagaaggacaaatttgcgaaaaagaagttgaagtaaatcatcattcttctagtctaaaaatgaataaagatgaacacaccgttttgttaaaggtattgtttttattttcttatttcatatattattattttttactcttttcatactttttacaaatttataaaagattttgtgttttacctcttatatgtttgcaggatttaatgaaagagagtgcttctcttaaagcattaaatgctgagattagagaagaaaatgtcaaaattaagaaagaaaatgttgaaatcagagaaaaaattattgaaataacaaacgagaattgtggattaaaagataaaatagctgtcatgagaaaacaagttgatgtgtttatgcaatattttacaaatcttctcgagttgaagacaagtttcaaaaatattgagaaacttgtattatggttagcggagaatggtggtgca

SEQ ID NO: 174531 - DNA, 619 bp, Cannabis sativa
tggaaatattcagtcaccacagtaggcaaatcatcttcccatccgacccaatttccatcattattcttgagcttctgaattaagttattccgtctattcgaagtagggttgtgcatgggttgtgttggccgggttgaaggtattttagtgagccaacccaatgagatcgacctattaaattctaacacattcatattaatatttatttacaaaccaacccaacccaacccatttttaatcggtttgggttgggttgggttgggttaaaacccttatttttttttataattaaaacttaaaattttgagctaaatttccatgatcaaatgtaaaattcagtagttcatcaaaagttcaaaggttaaaaatcaattattacagtcatccaaattcaaaataaggactaaagttaattaaattgtccaaaatattatcaacttaaaaaaaaatacatcaattaataatgtcaatagtcttctcctttggtgatactttgacttttggtgtgttacctattattcaaaaaataaagctactcaaattatttatattaaattagcataataaaataaagaacatttttaatttataaataaattattataaaaggaaaagtaat

SEQ ID NO: 174532 - DNA, 525 bp, Cannabis sativa
gccaatccgacaaatgagaaaatccaacgtgaaacttgttaaaattttggtggccaataatgagcgtctaatggcaccattcactcaagaagatattcacaaggttgttaaggtcattggtgccacaaaagctctgcgaccaaacgaatatcatgctttatttttctagagattttgggatattgtgggagaaagggtcatccaagtatgccttgcaatcttaaatgaaggtgcttcagtgcgatagtttaataagtcaaacgtggtgttgataccaaaagtacaagaaccaagattggttaaagagtatcgacctattgctttgtgtaatgtaatgtataaaatttttgccaaattgctatcactgaggatgaagtgttcttggcccccttatatcatctttccaaagtgtatttgtcccaggacggttgatacatgacaacattatggtcaattttgagctacttcactcattatttaaaagaaataacgggagaaggggatttatggcactcaagcttgaca

SEQ ID NO: 174533 - DNA, 595 bp, Cannabis sativa
atataagtgaaagagatatgtatgttgtatatgattaaatacctgtggcgagttacatttagagattttttattcgttttgtttgaagttaattaatagttaaatgataattatatatgtttgatataagatatgtgatttttaaacctattaaaaattaaaaaaaaataagaaaattaagcaaaaaataaataattgaaattgtaattacaccaaaaatacaaaaaagaatttttcatacataaatactcccatacgtgtgtacttccttttgtactcttcgagttttttatttataattataccaaaaatacaaaaaaagaatttttaatacataaatactcccatacgtgtgtacttccttttgtactcttcgagtttttttatttataattataccatttgcacacacattacatgtagaacaagtgttgaaacacatcaggtgatagacatgacctttattaattactccatgctttccctctctttttttctttttattttcaactttgtttcaattttttttttagaaaaacaaaatatccataactgaactttgtctctccccaggatcaatgtaaagcccgcttag

SEQ ID NO: 174534 - DNA, 920 bp, Cannabis sativa
gagccgtaccacccagatatcatggataccccttttgccatggaatttaaaaacccacatgtctcatcatatgatggaaccaccaatctggtctcgcatttgaacaacttcaacacaataatgcgagctagtaatgtgacaaacaatttacgctgtattttgtttcccacctcactagttggagcagcaagcagctggttcaacaagtttactcaccactccataacttcctgggaacagttgtccagggatttcaagaaatagttccatgctgcaaaggatagatagtacacaacttacagaccttaaggcagagatctctacttatccatcgaccgttgggggcgaattataggatgatttacaaggttgtccagtgaagaacatcactgagttcaacgaaagggctcaggtgttcgttcaaaaaaaggaagctcaaaatgagatgaatctgttgaaaataggctcgggaagaaaacccaacaatgtttcaacaagtactgtctcaacaagagttgataactcagggaactctagctcaaagagaatggatgattctaaggaatcgtcgaagggtaaaaagaaacagaagaagcacgataaatacgtgccagtgtatacaatttataccgagctcaatgaaactcaagagaatttttaccttgcgcatgagaaaaaggttgccttctgcaagcctgagcccatgaggcattcgaggaacaaaagatatcctaccaggtattgcaaataccataaggacattgggctcacaaccgatgaatgccgccagttgaaagatgagatagaaagtctcatcgcttaggccacttcaaacagtatgtgaagacatagggcaatatacacaaccagcccaatctacccaacaacccaaacaaccaggggttacaacctcttcctgt

SEQ ID NO: 174535 - DNA, 526 bp, Cannabis sativa
accagccctatggcacaagtcttgtttttagatccttaactaaaaaaagaaagggaaacttataaaaatactgacttttagtttaatttttacaaaaatactgtcatatggtagaaatcacttttatactgtcttgaccaatttttttttcttttatactgtaaacacaaaaaaatgataaaataaatatagcattcatcttccacacccacggacaaaaccaccataggaacatcagaacaatcggaaaacaaccattaatttcggtgagattaagaaaaaaaatgaaatcgacatcaaataaataatgatggcaaaacaactgtaaaacaacaccaaaacaaatcaaacaaataaaggaaaacatgattaaaaaaaactaaaaaaatgttctgcacagccccaatactcaatacaataacaattataaatgcaagtctaatcttaaaaaatcagaacaaaaaaactactaaaacaacacaaaaacaaatgtaaaacaataagcaaatataatcacttagaaaaa

SEQ ID NO: 174536 - DNA, 555 bp, Cannabis sativa
tagaggagaatggagttcaatggcgtcttactggtttgtacggcgagcctaatcgcaacctcagaaggaacacatgggaccaacttcgtgagttacaaacacgaagccccctgccgtggtgtgttgtaggcgacctcaataatgtcacttcccaatccgataagagaggaggtaattcctatcctaattggcttattgatggcttttgtaatatgcttgaagagtgtgggttgtgtgatttggagttgtgtggttacccttatacttgggagagggggaggggcactagcaattggattgaggtccgtattgatcgggcgctagtttctcaaagctggcttgagagttttccacttgctaagcttgtgaatttggaggtgtcgacttcggaccattgtccaattcaagtggtttttgatgtaggtccgaaagtggtgggaaagaaacaatttaggttcgaaaacctttggcttcgtgagcccgcttgcttacagatagtgaaggatactttggagcttctttcggggtctcctgtaatggaaaaaattagttatt

SEQ ID NO: 174537 - DNA, 662 bp, Cannabis sativa
caacaccatgagggcagaggtggaatttgccaagaaggatgctaatgacgccagggtggaactcggagctgttctaatggagctgggtgaagccaacaagaagctttttaccgcccagaagaaaatagttgagctgactaaggatctcaaggcttctgagcgtcttgaagagaccatcgagatgttatctgctgaagtgaacagtcttcaagatgaaaggacttctcttcgagcggttcttcgtcgggtggaggaggagaagaagtctaaggaggaggagcttacggccgaggtgatgaagctgaaagagaaagttcatgctgtggagacaactagtcttgagcccttcaatgacttttggaaggctaatccttaggcaaacttcgactacttgggtgatgctaaggacatgtacctcgagttctgtgcttcccaagtggcttatggtgcaactgaggcagctgcttctaccttcggccaaaaagctgatgtacctcccgttcaaacaacagatcctctagctcctaccggcccaaaagacaaaaaccaagagcttgggactccaattgtttaaacacttctccttttatctttttatttttatatatcttattcggcaataaggcattttctaagacatcatgaccggccaagtggtcttt

SEQ ID NO: 174538 - DNA, 547 bp, Cannabis sativa
gttgggcatttatatgcttcacatcacatgttccgtatgagcatctttaatttgatatattttagttactttatagtatttaagatattatattgaattttataaaattttaaataatttataatattgaccttggctttaaatttttttattttactcatgtataaaatagtcaaagctctttttggcaaaaaattagaattccttaggttgtatttttcttctggccaaggttgccattttttttttgggcgtaggtacagtttggtcgggattgtattttgctactgcaatttgatttttgctactgcaattagttttgtctctgtacataattttatagtattttagtcttgtctctataacatagttttgagtgttttaattttgtctgtgtgacatggttttgtttcgttgttggttcttctttgttatttgatagcttgtcatcaaatcaatattattagtgattggtaataacaagttctctgcgactgaaggggttgttagtagtgcaattacgtacacaatagttgagtgcttaagc

SEQ ID NO: 174539 - DNA, 791 bp, Cannabis sativa
ccaaagcgaatatggaatagaccttcttcatttttgtattcggtgattgttatggggtatcgtccctgccaatgcccagacatttgatcaatgaagcccagtttgtaaacattctgagtggttaggacccttgtcaaaagcccaaaaacaggctgaggtgccgtcgaatgcagagcaacaacatcaagcaaggtgaggatagaactttcctcatcagcagggaaagagtggaattgatattattcataaccgagttcatggaaatggggaaattagtagagttgtgacagagaaaggagatgtcggcagtggaaaagaagaatagaaggaggaggagggagcagttatcttcaaagaaaatttgaaaaagatggaaaaacagttaagcaaaagggaaaaacaattagaaatacataatttccacagacccaaaaacgagcacaaaatttctactattaacactaagtccaagtgcaactacaagtttacttaatgtttagttaagttatatgtacgtgccttatttttaatagactcacttccttttagatattaaataatatgtaacaatataagtttaacaaaattatatatattttcaaaataggcaagcatagctttaagatttttttctccctaaacaaaatagatttatgttaaaataattatattttcaattaattaatttcattttttttttcaattagagttttactttcaatatctaaatttaaaatttggttagtttttaagtactctttcccatgtatttaagttttataattaaaaaa

SEQ ID NO: 174540 - DNA, 590 bp, Cannabis sativa
gaccccacacacccgcacgctgcgccctgcacgccccacacgttgtgcccgcgtgccccacatgcccgcacgctgcaccccgcgccccgcgtgccccgcacgactgctcttatttgcacgcgccccgcgtcgatcgcccgcttcgcctattcccctttacttcctaacattagcaagattaataagaagatgtcaggagggataatgacggcataatgagtatgaataatggagacaaaacttcagttcatctaaggtacaaaatgaaaggagtatttttagtagggctgtacatcggtcggtttgggcggtttatcctatatattttctaaacccaatctaaagtttgggttgctaaaatttaagtgcaacccgcccaatttaaaacaaaaattgtaaaccgactaacagtttgggcagtttggtcgggttaactgcccaaaccggccaaccttttttttcggtttcaaagtcaataaaaattaaaaaaaaataaattaaaaatatcaaattttaccaaagcacaacacaatatatataactttgaaactaacaattaagtatataatttatattattatatatttaat

SEQ ID NO: 174541 - DNA, 551 bp, Cannabis sativa
gaaaatttaagaaattttggtttttacaaaagtcaattcttataaaaaatgaaggagatatgaatttttgaaaattagaaaaggaggagtcaatcatgggcgagatccctcggttagcccttccttctgtgtggggaagtgtgcccagaactcgagttttctcggtggatgctacttgaacacgcgcgcgcatggggaccctgcaacgccccctattttcccctatgttcttccgatcgtgtgtgtgtttttcggaccatgcagctcgtgtgcatgctggaacaaggcagattgcatggtatctaattttcatgcatattttgataaaaaaaaaaaaacaaaaaaatcattttttggcaaaataaaagccaaaatttattagacttttatgtagattttaaattttcaatttgaaatactaaaatataagaacaaaaaaataatttttatttattttaaataataaaagttatttttttagatatttggagtttactaatttgaatattgattttttcacataaatattaaattatgatcagatttaaaaa

SEQ ID NO: 174542 - DNA, 692 bp, Cannabis sativa
taatttaagtacataaaatgaagtttgtaatacataatcatacattaattcctttcttaattaataaaaaatttgaagaaaaaaaatccaacccataaatatacagagggagagagagagagagaaagttttaaaaatgccaaaattttaaaaaataaatattaaaatacaaaatttatgaaaattaccaaaatacttaggtgtataatcataaatatgatggttatcaattaaacaataaattttctaaatttctatcaattttttttttcaactaaagtttacaaatgtattacgtacaattatatttgggataattttaaaaaaaaaatacaaaaccaataaaaaaaaattacaaaaatgcagtatgtatagagtttttaacatttttgctgttttttaaattttatttatataaaatatagttttttggagtatttttatattatattgttgttgatttttttatttatatattatgtattatgttgctttaatgttgtttttatatttttataaaatactgtaaaaatatgaaaaatttataaaaattagtatttatttaattattccattatatttatataaataatgtctacaaactagacagaacattattaattaaattatgttttttttttctcaattatattttataggctaattaagatttttttcccccgaactttgac

SEQ ID NO: 174543 - DNA, 601 bp, Cannabis sativa
  modified_base (552)..(553): a, c, t, g, unknown or other
ttaagttctaatgtctattgttttacttctactattttcactagttgtataaccggtagtcatgccgttattttagttggtttgtgtcagtttgttattagtcgattagtaattagttgactggttgatagacttgtatatgtagtccctgttttcttgtactcgaaactcaattgacttaatgcaataagatgaaattcattcattctctcttctgcaatatttttttataaataataatgaaatatacatttgacctactaaattttaaatatatttttatcatatgtattagagttctttttattttttaaaaaatatgtattatatttttaaagtacaatttcttatattaaaatagtaattgtatatataattttttaaatatatataaatatgtgtggattgaattggatcagttcttttaaatatattatataaatttatatttttaccctaaaatagtaatatattatatatataatgttgaattaacatcctaaatatgaattctctaaaacaatgatttaaacacataagggtttaagaaanncttacattgattgcagctgaatataatgactcctcccattcaagatct

SEQ ID NO: 174544 - DNA, 792 bp, Cannabis sativa
ctctctctctctctctcacatttgtcttcactgccgccaattgccacctccaccatattcaccctcaacgatcctgcccgaaccataaacggaggttagcctaacgtccaccacactcaacaaaccaatgggtaagtgtttttctaagtaaatcgtgttattttttgttgtattgtatggatctgaacattgttagttgtaatttgtcgtttttgtgtccttgaaataaaggtagattttgttccgaacactctgttttttcttagtttttttgtatttttgcgattttgagcgacattgtacaattgtctgtgcgatgtcataagaaattagaggttagggatgacatgattaattttggtgaaaattaacgatttttttgcgattttgttcttatgcaatttgtgtgcgatattgttgcagcattatgcgattttgttatgtatgttttcttgtgcgacattatgcgatattatttcttggttgtgcgattattgtgcgatatgatacttgtttatattatttttgtagtatgcaacattatgcgacattagtagtatcttgtgcgatatattatgctgattttttctgtttatttgtttgtattttttgggactcattcaactgtatttgtgcatgtactgtatgatggcgtttgggctgtggagggtttcaactgggtatttgattccccaaaaaagtaagacattgatgtttgacattgactctactctaaaaaaggtacgtgaaattttgcatgaggagttggatgtggacccattggtgtatgaa

SEQ ID NO: 174545 - DNA, 502 bp, Cannabis sativa
actcaaactgaacaaatgtaataacatacatcagtctcgcgttacacatagcgagatgatcacctcgcaatactaattcgaatgaagggatgcgacgaggtgaaataccttccaacacttgcattttttcttattaagatgaaaaatgaggataactcatatcaagcgagatacaaccttccaagtcagcaataaccgtctaaatgataaaaataaaaagtggttcgatagttattagatattatcccatgtgtgattaagtgaaaggtgagaattgtccacatttcatgaacagttatacttgaatcaatcctaaaatgaataactacctacttatattcctataaataggggtagaattcataaaaaaaaaaagacgataaatttgagagaaaatattagttattcaaagattattattgtaatatgtactcaaaaatattcctaataataaggactcgtggagtatgtagattttaactacaaaatcacgtaaaaatat

SEQ ID NO: 174546 - DNA, 500 bp, Cannabis sativa
ggttcaactgatgaagtaaattctacaacatgtagtcctattaattctgcaacatgtagtcctattaatatatcatctgattctgaaaccgaatcaaaatcagaggaagagttagaggatagttacgaagatgattacatggtgtttgctgaggaagaattagagtgtgaagatgatcaggtggaacacttatgctaataaatttttgataatagtttgatttcttaattgattattaactgaattcttatttttttgtacgtatcatgtggtgaaccactgataggtttagacgggtctttccttaaaggttattgcaaaggattgatgttggcagcagttgggatagatggggctaactgcatatttccaatagcatatgcagttacagaaaaagcaacaactagcagctagacatggttcttagagttgttgaaggatgatttgacaccgactaaccctaacacattcaccatgatgagtgataggcaaaagggtct

SEQ ID NO: 174547 - DNA, 632 bp, Cannabis sativa
  modified_base (578)..(586): a, c, t, g, unknown or other
tctctctctctctctcacacgccccacattattcatagtgggtgtgagataaaatctctaatctcattagttgagtacacactgtaatacctaaattagttcatcctataagatctaataggccaatctattcttgagtgttgaggttgacttggaagattaaggtgtcgattcttcaatcaagttctgggattggatgttcgattgttatacaaaaagaatcaaggataccctgatagtcatcaagatttaattgaatttctttcagtagtcagatttaatctatatacattatgttgagatccttaggcttatggttcatattagaaaaaaattattttatcaaatttctacttctgcttttataactctaatatggaccataaaaataaataggaagaccccatgaaacttgaaaaccattatgtcattgggtccatgttaaggtcatgaattgggtcactatactaccccagagcaaactatattggttctccattaaccacttctccaagacctctacctcgacgttccctttggtctattcatctgttggaatttttttttaccaggatctnnnnnnnnntcacaagtatgttgtttaacaccatatgaactttctaaaacgataa

SEQ ID NO: 174548 - DNA, 564 bp, Cannabis sativa
  modified_base (536)..(538): a, c, t, g, unknown or other
atatacactacccctattttcggtaatgtttcaagtacgccgatttttaccaccaccgatagttaatgtgcaccgcttaggtgaggcttcagaattttaaattttaaatatagtcatattatatgtcattggactcggttttgaatgtagaatacgatgatgataattatttaaccatttgatggtataggtgagagtaatacctatgattggactaaacaattggagctcgggacttgagagcttaagatcgtcttttggacaaagtttaacgacttgggggaggtagggactcaacttaattattggacttgattttgcttatttattccctgtaaatggtgacagcatttcaatattcagggacacatagaaaaatacgagagaaataagagtagaaaagaattatagattcaagagtgaaatactgagagatcattgtaagagctttcgataaagatcaaggaattcttgtttctcttctcacaagtttatacaagtaatggggagtaggttattgttgggttttatgcccnnnataaaactctttacaatctgattagt

SEQ ID NO: 174549 - DNA, 515 bp, Cannabis sativa
gaaaaagatggaggttttgagtttgttgacttgttgacatgataaggcagggccacccaacaagaataatgtcattaacaaagagaacatgagataaggcagggccacccctgctcaatcttacccctttaatgtctcccttcttaagagaactctctaagagtcttgaaagaatttctgcacttcctggactaattctctccacccctccatagtaagagaacatgagataaggcaggttctccattttcattgtagccacgataaggcagcactcgagctacccccttttactcatcacctttggcttcaaaaggaatagcgggacggacctcaccctggtcctccacttcccagacttcaacgtctccagcaatttcttcctcctcaacggaaggacaggcctgctctgccctggccagagtagttagacggacaatatgggggtcggtcgccatatgaaggtttcctgaccgtctgtttggttcgtaccatcattctacgtttggacggag

SEQ ID NO: 174550 - DNA, 523 bp, Cannabis sativa
taaaaatatgaagtatatataattcgattgttggatatggtttttgatttggacaactttttcaacaaatgtgtgctagagactctgtcttcaccttcctttactgtgtatacattcaaagaacaagtgctccaaattttcattgtcttccccacacaacaagcaaaattgatccagagatgaatcatatttagcaatacgatcctttgtgttaagtctctttcacatgcctagccacatgataaatttgtgcttcggggtaattagcctttcccagacaaatttgctccaacacaccttttcatctgatctatatagtatccaatgtccacccttaatattatattctaataccagctacaattcttgggattatcataatctcaccagttttgattcattaagtacacactacgcatctatttgacaaataaattatccatctttttagcaatcgcccacacatatttccccatggtcgccatattccactgaagcaaaaaaaaaaaaaaaaaaaaaaaaa

SEQ ID NO: 174551 - DNA, 531 bp, Cannabis sativa
  modified_base (473)..(488): a, c, t, g, unknown or other
aaagcctttatataattaatgtatgtacataattaaggttgttgtaaattattagttgctaaactgtttttttattaaaaaaaacaaaaaaatagttttggtgtaccacatatatatatataggagtgttcatcaaatcgcccaaaccgttcaaaccgcccgtaccgcaccacaccgcaaaaaaaatatatatatagtttgaaattctttgcggtgcgattaaatcatgccccttgaatttttttagccgttaaaatatttctcataaataatatattgagattgtttgatttaaggacttttgtctaatttcatttaattttactatttcagtgattatttatgtactaataatcatgctcccaaactttgatatctactaaatcatgtccctcgaactttgacatgtactaaatcatcgtgtctcctgaacttttattggccatgttagaatttttttactaaaattggannnnnnnnnnnnnnnncaacaatcttaatagttcagggagtatttttaacgaccttaaa

SEQ ID NO: 174552 - DNA, 830 bp, Cannabis sativa
atggacagagtaaggtctgttcggaatagttttccaattatatatagtatccttaccccaataacttggctgattagtacgttttaagattggtatagttgacttattgttaaagtcaacagaaagtaaataattgagctacgataacccatggtaaggttgaacttattttaaagggaatattagtgcgctttctatgttttaatacatatatggtatagtcttaagtagataattaacactggaatgtaagtttgttccaaagatttggaggtattggcagggcaattcagaaagcgagaatttttgcaaattaaagaggctttcaattatgtttcaattgaagagaatcaagatacaatacacaaatatggctggagcaatcaatggtagcataagtatgaaatattgtgtcacctgggaagactggtatgaaggaagaaatactcactgcatatgacgacacacttctattattgctacaggaataagcttgaccactggaacaacacgttgtcaattcaaatgcatgaaaaaaaaaataaaacattatggaaaacaagctaatgttaaggttaagcttgattgaaagtaataacaacagattaggcaacaaaggtgagattagcaataaagagacaatagagtggtataagaatcaagaggctgcacaaagaatcaaagactatactatccaaaaaaaaaaatagaatagaaggaaggaaaagtgcaacgaacatacgacagaaggaagctaagaagttatatctcatgttcattggtggtattaaaattatataaagaattttaaaagggtctgtgttgatttt

SEQ ID NO: 174553 - DNA, 965 bp, Cannabis sativa
ttagatatatagagcattgttattttttacttaacatctttagatatgttgtattgtaattagctaaagatattttttaaaagttattatattaaactatatgaaattcaatacttaattagatcaatagcaatatttatatatagaaaagtgctaacactaaaactactcattaacatttctctctcatatatatatattggtgatcatgtggctgttgattaataacttaactaatagtttcttcttattacaccatcaatttttaacgaaagatgtaaaacatgtattatatataatttttttttaaaaatagctcatttaataaaagtgtactctaatagtgtaccaaaaagtgatgtaaatttgtcacataacaaattttatgtcaaatttgacacaacatttactatgatgtaaaatttacaccacaataaatgcactacttttttttatttaaatttatattatttgtattattttattagtataattaactatagcattaaattatgaagcatttatattattattttattatcttatatattaaaataataataaaattgataataaagttattagttttatttttttaataaaaacattaattaattagatattaaattttacatcaaaattttacaattgtgcattggagcacaatgctaaaatttgatgtaaatctaccacaaaactactttttgtgccaaataaaacacaatttttacatctcccattggaaatggtctaacaaataacagtaaaattttataggacttttttcatgtatatattaaaatggcaaaaatattacacaaatacattaggcaggccctataaacatttatacagctcaacaaaaaaaatttacagaaatacctcttgctctaaccattctgccgcacgaaccaccttctttaacagcgacatcttccaccaataaactagcaggccaactgaaa

SEQ ID NO: 174554 - DNA, 520 bp, Cannabis sativa
ttatcttaacttgttcactaattgttaaaattactattacaaaattgcacttttgcatcggtgaacacgtcagtcaacattaaaaatcaacacaaaaagtttaatttcatatttttcgtcggtttctttctgatgctactctgcgtcggttgaaaattgacatttaaatttggggtatttacaccaggcgacgttaaattaaatttatttatagatatggccttgtgtgttttaatccagttttataccgtttatatttaaaaaaattgtggcacgtataccgatataaaaagcttttgcctctgccatatattttgtgtgtattacacgcgattataaaattataactatatcgtagcctattctctctctctctctctctcataatcagtcacaatcatctcacttttctttaattttagatgatttctctctcatctttcatatacattacctttatggcacgtttactatacagtaatcagaatcggaataaattaatggagaaatgtaacggaat

SEQ ID NO: 174555 - DNA, 611 bp, Cannabis sativa
gtttggtgaggatgtctaccaagttggtttttgaagggacatgattcatcttgatgctgtcattggttacctttttttcgaataatgtgacaatcgatgtcaacatgttttgttctttcatggttgactagatttttagtaatgtgaattgctgctatgctgtcacaaaataaaagggaaagtgtcttaatgttgatgtggaaatctttgatgatggagtggagccaagtgagttcgcatgttgcatttgccattgccctgtactaagcttcaactaaggatcgtgaaacagtgggttgttacttggatttccaccagatgagggtctgaccaaggaatacatagtatcctgatatggatcttctggtgtctgaataagctccccaattagtgtctgtaaatgcttgtagttgaggtggagaggagcaagcttagtaaaagaagagaccctatcctcgtgatgttttaaggtactataggatacgattggcaggaagaaggtgaggttgtcgaggagcttggagaaactggtttagtttgttgactacaaaacttatgtcaggtctttgttgggattttatgccctaaataaaacccatttcaatctaatc

SEQ ID NO: 174556 - DNA, 764 bp, Cannabis sativa
atgtaataaacatctttcatcaaaacttgttgtttactatgaaaagagtttatcatatcacaatgatgattattaggagatcatcaacctgaatcctaagtatacatgaacgatcatgtttgtgatcattgagttctttgattcactcgttaaagtttctcaaagaagatgatttttaaaacttctattttaggagcttaataacatgagtggctggaaacatgttatacaatagtggaatccaagcttttctaacagatcgaatattagtttccttataatgttaattttgggagtgctaacagttagatccaaatctataataagttatagattagttgtcacattgaattaatagtatataaggaatcaagagataattagaatgataaaatagtattttgaccaactctaattacaaactaataattggacagcaagctacttatattgattatatcaatggactacaaataagaatcctgtgaatataattatatattgtcaaagagtgcaatgccatatttatagtggagtaataatataattgataaaccagattaatttgttgatgagattgatggtaatcttgggtttattagagctttgaaatataggtccatgatccccgagtaacctctatacaacaatgtacagggaaaagttttatttcatgaatggatttcgagtgagaattaatttctatggaaaataaattcttaagggtaaaatagtaatttgtaaaattattgttttgattaatt

SEQ ID NO: 174557 - DNA, 558 bp, Cannabis sativa
ttggtccgggaaaaagacaaagtccaacacccggtatactatgtcagtaaacgcatgataggggccgaaacccggtatcccttgatcgagaagttagctttttgcctcctgatggcctcaagaaagttaagaccctaatttcaggcccatcccatcaagatatttacgaatcacccatttcggcaagtcttgcaaaaacctgaagcctcaggaagactccttaagtgggccatgagaagaacaagaactaatagtaaccacaattgaaagaaaaaaaacgtggatcaatctttcaaacaaaagaaaaaaaaattgaaaaaaaaagcttaagaagaagaagaagaaaaagaaaattttgaagatggtggagatcagaagatcagtaagtaatggatttgggacaacatgtatttagctgttttttttttaagaaaatgcctcaaaaaatatcccagaacaataacaacacataatgccccgcaaaataaactaagggtcggtttgtcagaacttttgaaaaagctaaaagttactttttgaaaaagatgtgataaaaat

SEQ ID NO: 174558 - DNA, 514 bp, Cannabis sativa
ctagagtaattgataaactaggtaagccttgtgatagttttgaattagggtttggaaccctattgcttagcaaagagttaaatatctcaaaaaggttgacttggcctatatgccgattaggatggatgatagggatttgcgtgttgatcttgtagagctaggcttagcttactttgatattatactcagaatggacttcctgtctaagtatgcagctagtattgattgcaagagaaatatggtgactttttagcctgcaggtgaagaaccatttgtatttgtgggatcgattcaaggttcccaaatcccaattatctcagtattgaaagctaaagacctattgcaggaaggatgcatatgattcctagcgattgtgatagacactagcagacccgaaacagttgggcccgaggacattagggtggtaaaagagtttttagatgtatttcgtgaggagttactattaggttttatgccctaaataaaactccattttaatgtaatctattttatt

SEQ ID NO: 174559 - DNA, 893 bp, Cannabis sativa
cccccgccataactcctcaagtttggtggccatgtttactttctggtttactgctataaggttaatttgttataattttgagtaatttgcagcataaatatttaagtttaatttttcagttgtaaataaatatctaagtttaatttttagcggcaataattaataagttatatttctagaactctgtaggcacctagttgttaaatgtgaagtaaattactacgcgacaatccctgatatgacttgacatttaacggtctggtacctacagagtcttaaaaatataacttaagtattattaccataaaaaattaaacataagtatttatttataacaaaaaattattaaattcaaatatttatgctgcaaattactctataatctttagatttctttagctttgtgcttattctaatagactttttttgtaaagactgtttagttttaatttgacattagcagttaattagagtttaattatgaaattagattaataattatgatttatcattttgtggagatttatttgaattcagtgtgtattatatttgctatatataaaattttatatttttttatgttttcgcatattgtgtgctcgacaatattagaacgcggtgtttgactattagattcacattttagtattttaatagtaccggggtaatatagataaacattgggaatattgagaatattcaaggtattaggtttgactaaaatacccctaaatggctatgagacttttggtgtgagtaagggggtaaaatggtcgtttttcctagaattcttttgtcctttagtggattttattaagttagaatattcagttttatcttaagtaatttagtagataaacatttaagatttatcatttacttaaaatagaaat

SEQ ID NO: 174560 - DNA, 501 bp, Cannabis sativa
gattaggtgtgattggagcctctaatattaagaaattggaaagtgtagagtactacctcaacattagaatcaaggcgctaaaaagtaaaaatttgacagcatgatcgtgtttaacaaatttataggtgggtcttaacatggtgttatttcttggtttatgtatttttttaaaaaaaaaaaaaatatatatatatagtaccacttggtaatactttttttttttaatttttttaatcaaaaaataaatttttatttttgaaaaacaaaaatactttctataaccactttgtttttcaatttcaaaaacagaatacaaaagtgtgttctgtaaagttcatttttatatttatttttaattttatttaagtcagatttaggttcgaggttgggtctgagtctaggttaggggccgggactgggtttgggttcggtccaagtctagtcggagtctaaaatattaattaaaaaaaactatttaaaaaaacattgaaagtgattttt

SEQ ID NO: 174561 - DNA, 583 bp, Cannabis sativa
cccagccgttcgatggtggctgattacagctgtctcacacatgtttcggcctataaaagccaaccttcttacttcatttggttactttcagcatttcaccaaatttcctcaaagttttccagagagaaaagaaacctcaaacaccatagatttcctgctcttattccttcgctgttgccagttaaccttttaccgatgaccaacaccaacatctagcttccacaccttatgtaagttcctcgtaccttgtacactatttcactgtttgttcatatagcatgcgttactgctgatttatattttctgggttggatgttgaactttctgggaacttttgtttgagtttctgcacaaagcgttagattcctcctcttttgcgtttagatcacttcttttcatcatgtttttgtcgaggaataatcttcgtcccacgtaatgacactttagggtttagatcagacttcgtctactcgattttaccctttttttccttttctctccttactttttcgtaatttcaccatctgtgggattcttgcacctgactcttgtcaagggtaaccttttgaggctttcttttttg

SEQ ID NO: 174562 - DNA, 529 bp, Cannabis sativa
tttcatttaacttatttatcaatcaaacctttaaaagtctcttaattaataaacaagccttaaattctctttacttatcaaataagttcttgcttagtgaaactcataaataagacatagtattattcataattctaattgattaataaaatcaattaatttagtctacaagataatattatctcaactagtgcggggaccatgaacctatataattaagctctcaataagtagttttagaatttaccgagtaaattctctatcttataaatttctcttgactccactatagatttaaaattgtactctagattatatagaacactcaagtacaaatacgctataaattattcattattttaatctaaaaaatcaatgatcctctattgatgatctacatcgagtaggggaaattttacagttttacccttcaatgtatttaatccttaaaacacttagctacttgtaaatgatgtttcagtatactaatataataactgaaacgtgtacttcaccatttaaactcatt

SEQ ID NO: 174563 - DNA, 547 bp, Cannabis sativa
  modified_base (383)..(390): a, c, t, g, unknown or other
tttaaaagtaaaaatgaaaagttataacattttcattcacaacctaacattgtcatgacacataaatctaacactactatattgttccaaataatcacattaaatcacttctaataattttttttattcttaaaatatattattaaaattttaatttacttaaataaaaatctgatgaaattttttattttttattataagtcccaaaaaatatggatcctaagcaccacaggcgtagtctacctatactgggcttgttaatactttgagatgaacttttaacagtgttaaaactaagagcattgctattagataccaatagtgtctaacaccttctcgacatgtcgcgttgcaattagctagcgatattctttaaaaattannnnnnnnaattatatgggactcgatacttagttagatattgacacgtaggagggtgctaggcaccattggtgctctttaacatttttctaaaattaatttgagagacaaaaatcttgattagctaagtaattatattataattaaagtaaagaaaagaggataa

SEQ ID NO: 174564 - DNA, 511 bp, Cannabis sativa
agagagacaaacaaaagatcaaataatcatacatataataatatgtacgagtcgttttgaagaattttcttgcctacatggaatctttaaagcataacgaaatcccgatttttcatacagggatgcatagactgagaggtctccttcagttaaccaagatggtggtagaggagtagatggatcaaaccataaatcgcctcagtccacctgccccaaatcaccgaagcatggccatctagcctgagcaggagctccaggagaaggaaaaataaagagggggaagagaaatgtggtgttgcgctgagaagaggaaagattggggctttgttcggggcagcaagacgttgaactgagaggagagattggggcttcgaggactgaggagggagagagggaaagggtgttgttggttatcggagaagaggagcagtagctccgattgagagaaagagaaagaggcatcgactgagagaaagagagagaggctttgattgagagagagagagagaga

SEQ ID NO: 174565 - DNA, 643 bp, Cannabis sativa
aaaagggtaaacacagtaagctctgaaaccctaaacacttctcttcttcgtctcttcttctctatctaagaaaaacaaacacatatatggttttctaagagcttgtttggttgtgtttttcgttttcagattttaaaattgtatttttaaaagtgagaatagaaaataattttttatcattttaaaaatttagtggtgtttgactcaggtttttaaaaactatctttaacttttttttactaaaataattcaagattctacaccatacccatcctaccccagacccaaacctagacccggacccgaacctagaccatgaaccccagccctaacccagactcggacccgaaccatgaccctgaccgcgaaccttggacctggacccagaccttgaccaggacccaaacgcaagacgcataccctaaactcgaattaagacctagactcggaccttagactccaaccttgacccagatctggatcatgactccgaccatgttgtgatattttacacacgtaagtgcacgtatcgtttacaagtaatagactcaccaaaagtgaggtcaatccctcaaggattttagttaagtacgttaaaattaaatttctacttctatttggttaaataaaaattaagaaaaaa

SEQ ID NO: 174566 - DNA, 595 bp, Cannabis sativa
  modified_base (535)..(559): a, c, t, g, unknown or other
gaactaaaaacatctataacaaatgtaaacaaaagagagaccagcatgcttaggaagagaacgccaggtgccatgaccatggcgtttgatgtagttgactaagatttggtcttcctctggtgtccatgcccctttcttcactccattcttgtcacaacatgctatctttcccatctttacctcattgagattcatactcccacacctctaccacattatatatatttatacacaaacataatatttaattttagtactacgaatgaaatccttgcattaaattgacgtgtcccattatagctacgctggatggaggagttaattctactagctaaattaataaaaattttatattttcttgctaaatgtacatatcactgttcattatcataaaagtattctttatattatatatatttttttttggctaattagtaatttttcttcccgaactttgacatgtaccgaatcatgctcctgaactttttttcccgttaaaaattttccctaaccattgagattgttagatttaagnnnnnnnnnnnnnnnnnnnnnnnnnaattctaacatagatgaaagttcaaggggcatgatt

SEQ ID NO: 174567 - DNA, 587 bp, Cannabis sativa
cttctccttcttcgtctttggtacgccagaggagctcccctgctggcttcttcagccatctcagtaacgttgttactgataaaaatggtatattagatattttccttcttttttttttttttttgataaatagatatttttcatttttgttttgtgccttttttacttacaattttgtgatttttgggtctaaaatgactattttatccctgtcgaatgagaggccattctgaagtatgaacttcaactgccacgtgggcagttgagcacctctttacgagaaaaaaaaaatgaaaaaagaggaagagtagaatccttctcatatttactgcttaattgcaataaaaatttcaatatttatatacaaaaatggaaacttgtatggagagtggaagaattcagaaacgttttaacattatcataaggctcccaaacaatttttgttacgaaaactgtttaaaatttatttgaactattttttaattctcaaattttgttacaggttccataaaagctaaagaagatttttatttataattgttaattgtgttcaacataaaagcttcaaaggttgtataacataaaat

SEQ ID NO: 174568 - DNA, 540 bp, Cannabis sativa
  modified_base (184)..(187): a, c, t, g, unknown or other
  modified_base (339)..(342): a, c, t, g, unknown or other
  modified_base (398)..(405): a, c, t, g, unknown or other
  modified_base (508)..(508): a, c, t, g, unknown or other
atgaaaaacatattttataaaaaagttttaaaaagtgtacagtaacaaaaatataaaaaaaaaatgctaaatttggtatctagtgtaaaaatccctttcctaaaagcaaattccagaacattgactctttgagaagaggttagcatatcacacaactgctggggattattttaccaggatctannnntactaccatgtatgttgtttgacatcctaaatatgaatttctaaaacaatagaattcaaacacatataaagttcaagaaaccttacattgattgcagtagaattaaaagtgtccttccactcagatgtttaacccttgttcctttctgtcgnnnngtattatcaagatttgagcccgattctcctttaggtgttggattcttcacagtctnnnnnnnnatgattgagtactagacttgctatgtgtgggcatgtactctatcactatgacgctcgaaaagtgaagagaaagagagagaaggatttgaaaatagagagagancttaatctgacaaatttgactaaaaggcttat

SEQ ID NO: 174569 - DNA, 797 bp, Cannabis sativa
aagagcacaccctaagtttgcgagcttgtgtgagcaaatgaatagataacttgcactatgaaagtcgcatacgttgctgtatttagtaaaacgaatttaaattgttcttcatttattttattttcgtttttcttaatttgatgccaatattcaaagtaaaacggtttaataatcaattaagttctgtgtaaccaaagacacttgctttgtatataaatgagtgatctaacatgaataaaaaaaaagatagaaaatcatgggataattgcggcaaaagtccccaaaaacttagggttgatacggattaatccccaacctcgaaaattggcgttaaaagtccctaaggtcgccatttttgtaagtccgttggtcctcaatttaacagatctgttaaatacggacaagaatgccacgtgtttaaatcttattggaccaactcataattttaattaaaaaataatttaaaatgatttaaataatgaataaattattaaaaaataaaaaataaaaaactttaatatttttttatttccttttttctttccatttattttatcttggacttagtcttcttcatcaagcacgcacagtccacagacctttcttcatcaaccaacaatttttacttgcaagttgtatttcaaatcttctttctttcttgccttccaccaccactaatttaaactccatactggaggttggctctggtgacttcgaaatcgcccaggtcgaagccatggcgcgtgaggcttcgacaacggggatagctacacacaagggccaaacatcacgggcag

SEQ ID NO: 174570 - DNA, 784 bp, Cannabis sativa
aataccacataaaagtgtttacacaattaaaagactatgaaaaaattaatacaaaatgagaagagatcaaataaagataatgaaatgaaaatattaaaaaacatggaaaaacaaaaacaaaaaaaaagacaacaaaataaaacaaaaattaagactaaacaaacaaaaataaaaaaaaaacccataaaaataacaaataaattggataaaacaaattgatgccctaaaaaaccaaacaaaaccaaacgaaatgctaaaatagaaaacctagaatagtacaatccaaaaacacaaaacacagaaatgtcaaatacgataaaatttcgaaaagggggaaaaccaaaaagaaactgaaagtaaacctgagatcgaagaccaccaccaacttgatcatttttttgagaaacatcttgaggaattttttcatgggcagtgtaacgctctaacgctaaggcacggtacagtgcttttgcaattacagtgcaatctttgctaatcaaataattttcttgaaaaacgtgtcaaattaaaacttttaaattaattaataaactttataatatattaaaatatttacaagtgccgggatcccatttttaaactttttaaacttaatattccaaaatacataatatataggtcacacagcgactataaaatacaattcccagatgtcccgagaccgaacactccagatcgcgctgctttgacatgtacaacttcatccgagctcagtttcacttttgttcagccttcgcctttcctttacctacacatggaagca

SEQ ID NO: 174571 - DNA, 545 bp, Cannabis sativa
tctggttctcctataaatacatttcacatgctcactgacaaaagagttttagttttgattttgaggtgtgtatgtgtagttgtagttcttgttcttttatgtttatgtttttctaaatggttatatatgcttcattattttacatttatttttttgttattttcattttgttttagtagtttttttattctaatttttcaggactgggcttgtaaatatagccaatattacatctattattgaggttgtgtagaagattgttaattttttaatctttttttcctttattttttatttattttagtgttgttttacagttgttttgccatgattatttatttgacgtcgatttcactgtttttcctcaatctcgctagaattaatagttgtttttcgactgtgctggtgttgttgtggtagttctatctacgagtgtggaagatagaggcctcgtattttttttagtatttacagtttaaaagaaaaaaaaaagaggacagtataaatgtaatttctgtaaaattgaaaagttttacccaaaatat

SEQ ID NO: 174572 - DNA, 921 bp, Cannabis sativa
aatgtaacatgagaaaaaatttcatgatttttctcaattttttatgcatttttttatattattttcattcctattcccattcccatgaaccctaaaccctaaacccaaaaccccaaaacccctaaaccctcaaaccgtaaaaccataaaccctaaatccttaacgccaaaacccaaaccccaaatcgcaaacattaaccccaacacccaactgattcatgaaccctaacccctgaacacagacccttaggtggcatttggttagaggtaatgaaatggaatggaaaagaaataattttcattccgttcttttgtttagtttcattttaaggcatgtttacttaaagggaatgggaatgaatggtatggtattaattcccatacaattgtttactaaattttggaaagggagaaagtagtgggacccacacaaatttgggagaaaacaaagggaaaggttctccccccatttttatagggaatacctttccctttcttagcttaatttattctaattttaagattattaattaaaagacaaatatgccctttaaaaatctataacaaaacaataattacatattttaataatgtcaattttgtcaaattaaagcatttcgattacctttcctagttatgtaaacaaaataatataattctggtttcctttcggacagtttagtaaatagcataataaaatattgattccgattattttctattttcaaccgatacatttctcccattgattattctgattccaattacagtttagtaaacgcgccattaaagtattagaatgtcattctaatagaatgccctttccaccattttggtggaatatacattctatttcgaaatggaaggaacgacaattatcgtgtaacatgagaaaaaatttaatgatttttatcaatttttt

SEQ ID NO: 174573 - DNA, 654 bp, Cannabis sativa
ttgggatattttgttaaatcattgactgattttttatccttaagaaaactgaagcgttaacaattttgtatgctttaaaatggtgtttgcaattaggcttttttcgtttcctttgtggaaagtgatgctggaatcgttgtcaatttaatcaattctctttctgaaggtgtcttccgatgggattgtattattagatctagaatattattattgggcagcagtggtgcctaacacctctagacatgtcgcttgcaattgactagtgatactcactaaaagttattatattaaactatatgagatccgatacttagttggactaataacgatattaacacatagaagggtgttaggcaccaccggtgccctttagcattttttttagttctattaggttcttgttatctgtctttccatgtgtatgtcttcaacatgtgatgcataatgataatactgcactacatgggttagcaagatatgtactacaaatgaaaaacgagatttcttgattggaagaaactcttcttattattataaccaatgtattgtttgactctccttttaaaaaaaaatgtattgtttgactctctgtaataaaattagttattatgttaaaaaaaataaaaaaaaaaatccggaatttaattaaattgt

SEQ ID NO: 174574 - DNA, 635 bp, Cannabis sativa
cggagaagcttgctttgaagaacagttgaagtcgcagaagagaaaaataagaagaagtatagtagttttttttttaaagccaaagaagaagaggttgtatggagagatttaaaacgattagaatttggtactataagatgctatttaaaaattattatattaaattatacgggatttataactaatagcaatattaatacataatgagagtccaaggcaccacttctaccctttatatttctctaggcaaaataataattgaaaaaaaattaaatataaattttaatattgtttagtaatatttttgttttctaatattttaattatgaaattaaagtaaaatttttatttttgaaaaacaaaaatatgttttgtaatcatttttattttattttaaaaataaaaaataaaagtgtgttctgtaaaattatttttatttttattttttgattttttttaagtcgggtctctaggttcgggactggattcgaattcgggtcaaaggtcgagtttagcgccaggaccgtggagagatttggatccaagcctggtcgatcagagtctaaattattaattaagaaaaaaaatatttaaaaaaatattgaaagtgcactttttttatttttaaaattttg

SEQ ID NO: 174575 - DNA, 936 bp, Cannabis sativa
aatctctcgtggcttgtcccattccgtcactgccaaacttgttgtcacaactctattggttttatggtactaaatcaggttcgcagcagaagaattcgtattatctgattatcattgtatcatagctcccaggatctccaaatgtgtacattaaatcagaacaataaaaataataagtttagagtatatttcttgaagcctatcagggtatcctcgaaacttcttgtaagttgtatctcttaatccagttgatgaggaatttacaatttggactcacactagtgtcttctaaatcgatctaccacacaaggaatagtgtggactattaggataaagtgtatctttgttctagttgagttctcaacacatgagcaagaataattgagaagaaaaaaatattttcttttctctctgtatacttcgaaaatatagtgttcaaaatttttcaaatcaggcttctatttaaagtagttaaatttcttttaattaaatcatatttaattgtttaaataaacatatatttataactaaattcggttactgatattaatgaagaaatctctcaaccacttgagagaatatttgaaaaccttaaaatatctataatcacttttcaaattagatatttacctaattgaattaattaaataattaattaatccaaaaagacaaatactgtaatgccatatctcatagggacgccacgtgtataattttataaactaatttagtactaataaagtaattaataaataaaatctgtgataatattaaaaactacaccaaaataaaacactgaaaatggacatcataacgacacttaaactgtgtttcggggatctctgttgtagaagttttaaaaaagctatatacgacagcgagtcaaaatactaaatcaaaatacatggcacatattgttggaattattttacaagg

SEQ ID NO: 174576 - DNA, 537 bp, Cannabis sativa
catccacttcaaacggctctttccacaaaagcgcaagaccaccactcttccctttagccgccaccacaaaacagccttcaaaacccatcaccactctgattctttccatcgccacctcgttaagtctagtttcggataagaaaatcatcccgggatgataatctttcacatgggaacaaagggcttttaatgtccaagggttctcaagcccttggacattccaaatcaagatactcatggcattcggcgacccggttccaccgagttcgccgcttcgattttcaccccagagtccaaatccaatgatctagaaatgtcccctgcacctctgttttttgccacctctcctgaactttctgctatgttgtcattgcttacaactataggagctttgagtttgggttcaggctttttgtttttctttgctacaacccttctccttcttccacctttctgacttgaagtctcaccccctgaatccttgcccatagtaatcgggatatcaatccacctctatttgttttagtattcgaaata

SEQ ID NO: 174577 - DNA, 915 bp, Cannabis sativa
atttattaattataacactttgtgagtttaagtaataaatatatttaaactatattttatttgataattattagtatttaaataaatttaattaagaaaataaataaactagtaaaaggtgaatttatttttaatcatggcattatataaaataaatgacaaaaaaccaacttggcccaactatagtgaggggcggccaagcttttcttatctcaatttactttttctatttatttattaattaaaataaaagttttatttgaaaaatgaaaactaaaacttaaggctttggctatataaaaaaagagaagagaaatctttatccagaaaatatacaagcaatataaagccaccaaaagctttctccttcttgttgaattttgtgccctaaataaaatacatttcaatataatcagattaatttaattaataaaaaatcaaaaattatttcatgttgcatgattcacatgatttatttcatgattatatgtttaatataaattctattaaatctagaacatataattattcatgattatagtattgtcaacatagtagaatataatcatgattatatgtttgaaaaattagtctcatgatttttcagtacactgaatttagactgacatgataatcagcgataagagcttacttacaccttggataagtgttatgtcatttccatggtattggcaaagtatgctaggatcggatgtatggagtatacattggattagaccgatattgaacttggataagatatcataaacttaccgttattatatctatctaagtcaatattagtaagttgatcgtaagtcaatggatcttaatcctgatatggttaggttctgtttaaatgtattatctctattcttagagttgttcgttaaagcttggtcggctgaatgctta

SEQ ID NO: 174578 - DNA, 744 bp, Cannabis sativa
  modified_base (682)..(682): a, c, t, g, unknown or other
aaaaaaaaaaaaaacaaaagaaactagtttcctgtaaacataggaacataaatccaaaaaaaaaaaaaaagtaattattataaacatctatccattcatctgaaatcatttgtctttgccctttccctttgcaatatccttccctttgacctttgccttatcacttgcattatcctttgatttcttcacctttttcaacacttcatcatcagttatataaccaccaatttgtttcctcctagcatgaataaacaaacttacagcaagatcatctctatatactactaccaaatctgacatcttagatggaatgtcatcaatttttccacgaatgaagtcagcaaacttgatcacaaatacaccacagtcactacaagaaaacaaaaaaaatgaattcatatcaaaaaccagtttctgtgcaaacaaaacaaaaattgacaaaaaatataaacaaaacaaaacataaaactagtttcaattaaaaaaaatatatgatcaaaagaggaagaattacctattgacctgacttggaagcccatcaatgaacttgaaattcaaaggttctcttttcccaacagaatatggaccttcaaccaaattaagatccggtcaagaagaataaacatcaagatactccaaatactacggcagcatagtagaataagctttgacatgatccaangcgcgtttcttgttgagagcaccagacatggagttatatacgttcaacatcctctccttgat

SEQ ID NO: 174579 - DNA, 583 bp, Cannabis sativa
acaaggtctccccttctcgctgtaccaggaccctcacgagttcctagtcattgtggccttatggcctgatgttgcccaatttgttacactacggtcgcgttaataaatgagctatgtcgtatccataaggaggtaaaatgacactcaaaaggagagttagtgagtaaaaaaaaaaatagtgctgaaaatattaagaaaataattttttaaaattaaatacgtaactaatactagaagtgatcagaaaacggttatggaagacataagctttgtacatgcaattatattttcctaataaaattaattatttaaactcaactataattttacacaattaattattatagtaagaaaatgtgtacaattaagctcactagaaaaatatgttctttaattaaattaatactacttctaaaaatactatgattttatagaatttaaatcgataaaataccactagtagaatgcataaaaaatcatataatataataaacaccatagcaattaatagcctaacttacataagaaaagcatgactgaatttatataaaagttagtattaaatttaaagtgtaaattagaa

SEQ ID NO: 174580 - DNA, 548 bp, Cannabis sativa
aatcattaaagcactcataatataaaggttcaatgaaacaatactaccacaactgatcacctcgagggaaggtgttgaagagcccttctaccaagaacatatcataattttcaattgtcactacaaataaaaataagtaataattgtatggctattaatgagcaaaatcaaaatatatctactaattcttttgaaattcaaaactacgtctaagaacatgtcacaataaaataaagaaaaaataaatacttacggaatggggataacctactcaagacaaaaggactatccaaaagacaaaacactagacaacaactagaccaaatataagaatcagcagcaaaacataaaatgtcactataatttatttatcaaaattccactctgcattgtcttgcagcagaaagggatccacaacagcaaaaagaattaaacataaattacacaacatatatactattaacataatctcacctgaaagaaaaatgatatgttgcctatatctccttgtgtatatactagttaatttgttccacatgaaatccttg

SEQ ID NO: 174581 - DNA, 615 bp, Cannabis sativa
tccttcccaaatcgaattaaaatccagaagtcatatacacatacagcaatcaaataaacacaacaatgaaaatacagtttagaaaaatggagaagaaaacaccagatttttatagaggttccctaaaatattgtgttggtctggtacgtcctcttcgagctcgcctcgttccactatggatcttcaaaaatcacagattacaatgggtgggattccaaaacacacaggtattattttggtaattcgaaaaatagttacagtttttttctcctctttttctctatgtttttctctcttaaaatcagtactaatttttcttcttctccttctgttgcatgaacgatctccttggcttcttggatatccgaaccctaatcctagggttccaaagcttaccccactgtaagcttcctccaacgaactcaatctcatttctatgactacttgtgtactgatctgattttcttattgtatatactgatctggagttgtattgatctgattctaaaattctgtgttgttgttgtattttctggctttttatatgtgttgtagaggagagcagagataggagagttagttacaaagtgttaacagactttgtaactaacttaa

SEQ ID NO: 174582 - DNA, 767 bp, Cannabis sativa
cgaacaggacttgtccgctgtggaggaggaatactacgacggggatgttgaggtccaggagatagaggaccaggtgggcgactgtcctgatagcccatccgaggctgaggaagagggagtggctcggcctctatgttttggaggatacaatgagtccggggagtcggtgtccaagcttggtgacgtcttggtcgagggggaagactatgtcacccaagagtatactgaggcggtcccccataagaggcaaggtgtcgtgggggccagatgggtgtgtcctccgttcgtcataactgagggccacctaaaaaatttggagaaggctgggtatctgggcggacttgaatgcttcctcccttctccaaatcaccgggcaataagtccgaaggaagggtactgtgcctggtcgggtgcccacacgaaacaaagggatgcttcctttgcacctgtacttcaagagggttgcggactacttccacctttgtccgacctagttcacacccaagggcatcaagtacttatctgccctattcatcctctatgccatccaaggatggggtgtaccgtctccgcacgacatcatctggctcttgttagttctaccacttcgaacatgctctcgtttattggctttacctgtaaattaggtcaatataatctggagtaaccactctttcgatatgttgctgtccatcttgattgatctatttccaaaggggacaaaattaccgaagtcgcattatgagtcgaagatgcgattgcgcaat

SEQ ID NO: 174583 - DNA, 792 bp, Cannabis sativa
  modified_base (487)..(497): a, c, t, g, unknown or other
atatttgcgattgtttttcttatacacatgtttaaactttaatttcgatataataaattattcgaaattctttaaaaaaattgtaaatggtcttaaatagctacaacaaacacgatgataaaaaaaaaaattaaactaaaaaaataatttagatgtagtaacagatagaggtatatcagaataaccctttaaaattccatgaatatgacattaggaaattatgactccctataatatttatgagtaagtctagagtacacccctaaacatatttgttttagcatatggaagagttttttagtcaattttttaatgatagtgtatgtgttgaaacttattttatcatgatctagatttactaacatgtgtgtttgataatgatctacaatctaacatcctaaatatgaattttctaaaataataaaataaacacataaagttatagaaaaccttacattagtggtagcggaatataatgactcattcnnnnnnnnnnnctaacccttgttcctttctctcgcagagtattaccaagatctgaacttgattctccttagatgatagaattcttcacaatcttccacactatatttgagtgttgacttgaaatgtgtgggcaaacactcgctcaatatagggcacaaaattatgaagaaggaaggagaaggtttcgaaattcaagagaggctttcactttattcttctcagttgtctgacaaagtagtctgataagtgttatgaaaatagtagtcatctctttccttatataggatttcatctacggttaggatt

SEQ ID NO: 174584 - DNA, 674 bp, Cannabis sativa
taatatataactcccatgcataaaattataaatcccaaataataatcttatgctaattaatatattatgtatgttactatcaacatctcatatgtaatatacacataatatattaattattacacatctgtatatgttacatatctcatacatatataacgtatatatatattttaatatacatgcatgatatatattatatatgcatgtctcatataaatacatagaaataattatttatacatatttactctcactaatatatattatatcatatgctctacatatatcatatatattactcatatatacatgctatatattatatatctcacatgtatacatataataatgtaaggacaatcacacactatctatttctccattggtatgatattgtccgctttgggcctaagccctcacgaatttgtttttgggcaccttcccaaaaggtctcattccaatgaagatagtgttcatccttatatacccaagatccttcccatttctagccaatgtgggactttagatgtacacccaacaatcctcccctcaaactaaggactaccttgcatcccctaagacgattacatatctaaacctgaatccctcgattccaacactcaagattcccttgagtaagctagatgaatcccttcaccagctagattcga

SEQ ID NO: 174585 - DNA, 768 bp, Cannabis sativa
  modified_base (64)..(66): a, c, t, g, unknown or other
  modified_base (421)..(427): a, c, t, g, unknown or other
atcatgttaacaaaattatatctaccacttttaaaatatgtatacataccaaaaaatttatatnnnataaaataaaaactaaatattatcttaaaaaactgatatactagagacaacaaatgccatataccatacaacaaaatatatatatctacaattaaaaataaaataaaataatataatattattaaaaatatcatatatatcgtattaataaaattatatacagccataataattataccatacttacaaaattatatatcaattttatatataatacaataaaaattaaacacgcataatctaaaataaaatgatatacaataaaacttacaatactatacaataaaacttatataccatataacaaaaaatatataacttacaatcgaagtatatataataacaacaaataaannnnnnnatatataggatgctaataaaataataaatcatgtcaacaaaagtacaatttaaaatagaatcaaatattctttaaaaaataatataccatataacaaaaaatacatataccatttaccaaaatatatatactaagaataattgttgacctcaaaaagtgatcaaccgacagcgaggtcgtgaaaatctgatgcttgccacgtgtttgcacaaataagaatgaaaagtaattgataacaagatttgttatagaggttcagtcctattatgatagcgggtaatgacatattccccttttagttgtattattataagagaattactattcagatcgctataggt

SEQ ID NO: 174586 - DNA, 583 bp, Cannabis sativa
cacccgcttcggtaagttttacagaagacggaagcgttaggatgactcctaaaatgggccatggagttgagccagtttgacatacactacgtacatttccataaaaggataggccttagcagacttcataacggaatgtaatgaagcagaagctagttcaagcatgccagtatcgcaaaccccacaatggaattcgttgatggagcgtcaaacaaaaacggatctggtgctgggatagcaatgatatcgccagatggatgccggctccaggcaaccctgcattttgcattcctagcttccaacaacgaagccgaatatgaagccctaattgcaggattaaagttggcaaaagaagtaggggccgcaagagtagaagtgtttagtaactcccaactagttgtcaatcaagtctcaggagaataccaaacgcgtggagagaaaatagccgcgtacgtagctattgtccgggaagggctacatgagttcacagagtacaaagttgaaagaattcccaaaaaaaaagaatgctcacgcagactgtttggccaagttggcatcagacagtgagatagagagactgggg

SEQ ID NO: 174587 - DNA, 532 bp, Cannabis sativa
atatagctttgtgtggcttaaattattgaataagtcaatctgagtagtgggacggaagttgaattataatcggatcagatttaacccgattcatttacactcttaatatattagtacatcacttattaaaggaaaaaaagcatatgttatgaaaatggaattatattaaaaaaaatatataaaaaaagaaagaaagaagagagaaagaaagagagaaagagagagttttatgatcaaaattccttgtccacaaataactttgtcatttcttttggatattttgagtgtacatgttgaaaaatctgcaatcaaactggtgttggtcatgatcgatcacacacaatgtaaagaaatagaccagcaatacttaaaagaaaaaagggaaggaaatgaaaaggaaaatactatactccaaagttaatataagttagtgatacattatatatatttagatacaaaacatctatatatttatataaaggaaagcacacaaatatataggtggctctctaaaattttttgtttttatttt

SEQ ID NO: 174588 - DNA, 526 bp, Cannabis sativa
agaaaaagactaaacttgatactactaaccatttataataaaaactacagaatacttacttaggcctagtggaagccaatctgctaccatgccctatccaattgcaaggttttaatggagacacattgatccccatgggcaaaatataacttccaatgactataaatgaggaagttcccggaagcaacacagtatcttcattcaagtacaacacatttgcaatagccgattgccctactacttataatatcatcttgagaagactaattttaatagattttggagtagtgacatccattcgcatttgtgcttaaaattccaaagtaataccgaaagcatagggacaatcagaggagatcaaagaagtgcgcaaagttgttacagtattttaaccataattgtactcatggtcggagaaggaaataactctaaagttggaacatcttcccagccagcactgggggtggtccaggaagatgaagtacttgatccacgaattggcgtggaacgtgtcatagaaccaatg

SEQ ID NO: 174589 - DNA, 550 bp, Cannabis sativa
aatgaaagagaaaagaaaaaaaaaaacaataagagaaaaaaaattgtcagcgtaagaaaaaaaaaataaaatagaagtaaaaaagataaaaagataagagatatttgcgtcaggaactgttcttttcatattaattaagaatttgacattgttttaattaatacagttttataccattccacgtataccgtttaaattgttttgctatattttcatagcaccacctttctcttttcccaatcgctaatccttcaagtccccaacgtcggataccctcttccacctcctctgtccgacatccaagaccagagcattaatcggatccacgacacccattcctcctcctccgatgaacgagttatactcatcaccttcgaatccactccgcctaggtcaaaattcaatcacttggataataacaattaataacaagcaaagtaatagctatggccctagcaatggagaaagcttgttgtcggcagcttattgttggagaatgtggttatggcggaggagaaagagaatgataggtttaatgtttttttttttt

SEQ ID NO: 174590 - DNA, 528 bp, Cannabis sativa
  modified_base (126)..(131): a, c, t, g, unknown or other
atttaagatttcttgtaaaattttaataaataattcaaaataatttacaattaatgtataaaataatgttcaagcaatactctattcatatgcataaaaaataaaagagtcacgcgtacaataaannnnnnaactttatttttaacatgttaaatttctctaaaagtctcaaaattttacaagatatcttaaataactataacttacacgactataaaatttttttaactattttctttcgtatgctgaaataaatagagatgcataggtacaccggtgcaaccccaatggttttgttagctagaataatttcttattagtctatttttttatagttgtgtgtaagttatagttatttaatacattctgtaaagaaattcagaataatttacaatataaaattcaatgttcaaacagtttatttcatatgcgataacatatataaaaaagttacgtgtataacagattctttaaacttatttttggcgtgttaaatttttctaaattttttaaaattttgcaagatat

SEQ ID NO: 174591 - DNA, 803 bp, Cannabis sativa
gtcggcccaacaggcccaatagaagcttccttaccagtccgtttacatttagagtccataaagaccattttctcctcttccaaatttgaattactatcccctactgcctcccatctttcgctcccattatttttgctcaaaacagctggagaaaaaataagtccaggattctctccattatttgtggcaatcgggttgacagcaccacccgatccttgacaattcgaccctgcactcatcgtcgactgcctaggctcagccaccatcatgccaccaacattggatgagctaggtgccccagactggagccatttagctcccatcgcataatgagtttgtcgtggcattgccttcatgaacgtgccataaggcttaacaattgttgaggttggttgaataaacaatcgagaacaaaaatgatccgtatgcccaatcaccccacaaataaaagcataaggttggcacagattcatactgaaaattaatccaaaaccaatctccaccaatctattgcagcttcattctgtgcttcaatggtttttcaatgtttaaacgaacccgaacccgaaaataatcactccaaacaccattaaaattattctcatcaggcttaataaagctaccaacataattcctagcatcctatacaacctgctccgttttgaagcccgacctaatatcatgtagttgcacccatatatcgagatgatgcaaaggaacctcccgaagaacatctcctggtttcaaccgttcaaagatgagaggagcatttttaaacgtccatggactcctatccatcaccc

SEQ ID NO: 174592 - DNA, 604 bp, Cannabis sativa
cagacttatttttcaaaagattgatccaggtgaacctagtgtgctcatctacaaaagacatgtaatatttgtagccattatgagaattagtacgggagggtccccatagatcagagacaactaattgttgaggttctgaataaatagtataagattcttttggaaatggcattttatgaattttgccaagacaacaagcttagcagacaaaacttttattgcttttaacatgaatattacatgagttcattacattttgcacaattctatatgaggggtggcctaacctgttatatcacaaatcaaaagcagtaatagtagattgactacacttgttacaatgattgacactaggttcaattgtgcgtgtaccataagtgataagacaagcaaggttttaaacattaagactgggtgcttaataggaattgagtgcttggtctggtgagacagcttggtctgggtgttttctgtcttgggccttgcaccttcacctccattgtagggattttaaccgttgttacagcaccggtctcacacactagtgtgtaacccaccatgccaattcttggaacccgcccagaagtcttggaagggagcttag

SEQ ID NO: 174593 - DNA, 784 bp, Cannabis sativa
tatttatctactaataaggatattgagagttagggctgtacatcggttggcttggacggtttatcttatatattttctaacctaatttaagattcgggttgctaaaatttaagtgcaacccacccaatttaaaaaataaaatttgtaaccgaccaacggtttgggcagtttggtcgggttaacccgcccaaaccggtcaaactttttttttggtttcaaagtcaataaaaattaaaaagataaattaaaaatatcaaattccaccaaagtacaacacaatatatatgactttgaaactaacagttaagtatataattttatattattacatatttaatcatttatgttatatataataaaaactaaaaagtgaaaaaaaaaataaaaaaataaaagccaaagttaggttggtcgagtccgggacggatctattaagagttgggggctatagcccccacgaacaaaaatattgccttttaaaaattaaatgtaaattttttaatttaataattataggtcaaaatagtagaaaagccccactaaattagataaatttaataagagtgattataatgtagctataaatatttttttatgataaataagtccccacaaagtaaaaatcctgggtccgtcactgagtcgagttattcagtttaattgggtgggttggacttattttcaacctgcccatgttcagtttgtaatgttcagtttgtaattttttcgagttattttaatttgtaatatttatcgatttttacggttcggttttgaacggatt

SEQ ID NO: 174594 - DNA, 587 bp, Cannabis sativa
atgaatacttgcaacaattcaagtgtgggggaatagtaagttctatgaaaaaaaaatacaaggttgaattattgaggagagtgattggggaatacaaaatggaattatttgagagaatattgtatatgtatgctatggtgtgatttgagcctaaattaaccttctttatctacctttcaccctcgtcttacattataagcctataaagtcctattgatcttcagattgtgtgtaattacattagtggagaatggtttgataattaatcttatagagtagattttcattgaaatacacatttctttggagatgagcattgtttgttgtcatccatgaattgatttgaatgttagtaatatgatgaattgattgaacacacacaaaattgagtttgaaaagtaattatctttagttgaaattctaatgattgaagagtttggattttcttagaattatagagggatgtacaatttttgaaactaacattatttttcataaagattggtttgtttaagcatcattcattttattattaacttacttaaggacgagcaagagtcaagtgtggaggaatttgatgagtccat

SEQ ID NO: 174595 - DNA, 559 bp, Cannabis sativa
tactatttgtagctagaattgagatacagtgatgacggttatttttgaaattatatgatgagttttcaataaatttatagtctttttttctttgttttagatctatattttgtgcgagtattgtttaattttaaatttttcttcactaaaatatgcatttgaagatatttttttatgtgttttattttgaatatttttaaagctctctatatataaattttttaataaatatatatttaaagttatacgtataataaatttaaaattatttaatattattttattattcaataattatgtatatatatttaaaatttctataaatagccgtacgcgaagcgtggtctggttgactagttataatataatataatcatttagacatcccacattacataaaatgtcactcttttataatattgttataggacactagcacaaacgttctatgattggttaataattctctataatcttaattaaactaaaataaatgagatctaatattaaattacataataataataataataatacaccttaaaaaaaaaaaaaaaaa

SEQ ID NO: 174596 - DNA, 602 bp, Cannabis sativa
agagccctatgcactaatgaaattatttattttaaagatttaagtatttatgctgctattttttaaatttaagtacttattaattagtaacaaattcaataatttcaatatttatgtcgtaatttttttaattataatatatattttaaaagtttggttgtaccaaatttaatttttagctatatatatctctctatatatttttgaattatctcataaattattcaataaactaattttaaattatttatcgaacactttatagtttatacattgaggttgtttggaatgagttaatactagtaagggaatgataatgtaaaacattatcttgtttgtcttgagagtttagccttgatatgttattctcttattagtaatataactatggtaatgttgatacattaataaataaagataggattaaattattaccttctgttatattaatttgaatagaatttttaaattaataaataaatttaattactaataatattatattttttataaataaaatattatgatatatatttagtttgtgagatcatttttttttagtgaattatttttatattattaacaataatatatatattcat

SEQ ID NO: 174597 - DNA, 694 bp, Cannabis sativa
cggtattagctctaccatctgataaagagaaatttgtggtttgttgcgacgcatctaggcaaggtctggggtgtgtttgatgcaggccgatcgggtcatcgcttatgcctcccgtcaactaaaagaatttgaacagcgatacccaactcacgatctagaactttccgtagtagttttttctttgaagatttggcgacattatctttgcagagagaagtgtgagatttatacagactacaaaagccttaaatatttctttacccagaaagattagaatatgaggcagagacgttggttagagttggttaaggattacgactgtgaaatcctttaccatcccgaaaaagccaatgtggtggcaaatgccttgagtataaagggcctcggggaggtaactagtatgattaagatttcacctcaactagcagatgacatggtcagattgggtattgagtttgttataggaaaaattcataatttgacattacaatctgatttgttagacagaattaaagttgctcagttaactgatccagaactggtaaaaattcaagaagaaattttagctggtcaagctaaagattttacggtggcaggtaatgggatgttgttatataaaaccagaatttgtgttccatgtagtgtggaacttagaaaggagattctcgaagaagctcacaccactccttattca

SEQ ID NO: 174598 - DNA, 559 bp, Cannabis sativa
gaccaagcggtctctgactacatatatacaactcttttcaagattccagatttttacttctcgatcctcggggtagaggcggctgagatggctgaggctttttgacctatgtcacctacgcagacccaaggaggtgggggaaatctttttcctgaggatgctgatgctgcgaatactgaagaggttgctgacgaggctgccagcaaagtcgcagatgaacccattactccaactgcccctatcgctcccaatgcttagtttacttactttatgaatattttgtcaaactttttaagcggtacgtgggtactcgcgatttctacttagacaaatttctctttatggtttttaatatttcgaacaacatatatcccttcggggatatttatttatgttatcatattcgtagtacacgggtactcgccttttgctattttgattgcggcattatttacaacttggtgtaaaaaatgataaagaacaagttaattaatagtataaagtgggccatatacccctatacttagaacatttatagataaattgactaagtataaat

SEQ ID NO: 174599 - DNA, 711 bp, Cannabis sativa
ttctgatcattgtccaattcacctagttctctctcctcctttggggcggtcaaaacaaagaatttcaggtttgagaactattggctcaaggagcgtctttgttacaagattatcgaggatgtttggagtacaaattcggatagtcatgttctggataaaataaaagtttgcagcgaagtgttacttacttggggtaaagattactctggtaattttcaagaaagattaagcaagtgtaaggctgagttgcgcaaatggaagaagggtcgtgaccctatggcagtggacaagtataaggaagccgagattgaatttaataatgttttattacaaaaggaaattttttggaaacaaagaagcaagcagctttggttgagagaaggtgatcagaattcaaaatatttccatgcaatggcttcatctcgtcgatggaataactccatttagaagcttcggtctcctacagggggttgggaaacttaggacggtggtctcccgagtctgattactagttatttcgaagaattgtttacgccgggtgttgtggagggccttgaaggtgttgctacgggttcaggcatggtgtcacgggaacagaattcaatgctacttgagcctctctctgatgaagaaatgaagaaagcattgtttcaaatgcaccctgacaagtctccgggacctgatgggatgactccgggcttttttcaaaaa

SEQ ID NO: 174600 - DNA, 571 bp, Cannabis sativa
aatttaagaaaaaagacaaaaaaatttaaacaaaatatcctttctactatttaaaaacttaataaaacttaataataatctgatctagagatgttatgatgaaactggttatattttctgtatctgttcgtattataaattgttttaaaattgattatattaaaaaataaaattgttaaaaattaagttcatggtcttatatttactattttaaaaaatataaggtacattttgttatttaataaaataaatggtcaaattaataatttttacaaaatacaagatccaaaatttatttaccgtttattaaattatataaataaatatatatatatattttttttgatttaaacgtttatatattacaaccatatattattggaactcgaacctaggacctctaacacacgcaccctctatggctacttgagctagcctcaagtatataaagaaataaataactactaacaacgtgatacataaatataatgttaagcactataaaatatttaagcgtaaataacattttggaccctctgttttataaaagttaccaattggaccctgtgtt

SEQ ID NO: 174601 - DNA, 575 bp, Cannabis sativa
atctttggtaatgaactaagtagaatgattgcttggtcctcctcttcaatctttactccaagattattcagatcaagactaatcttgttgtaatcatcaagatgtcttcgaagctccttggattcatccattctgagagtatacagcttcttcttgagatatagtttattagccagagatcttttcatgtagatagaagccaatttgttccataatccaagagccttttcttcactagacacttctctcaagacttcatctccaaggctgagaagaatggcactatgagctttagattcaatctcaaatttccttttcttgtcatctatctccttcatagcctcaatatccaatgcctctgaaatttcttgatgaacaagaaatactttccttttaatcctccacaaactgaagtcatttgtgcctgtgaatttgtcctcctcgaatctggttgaagccataatgcatcaatcttgatttcttgcatagagttcttgaaactaattcctgatctccctagtgctctgataccatttgttgtgcactcaagcaccaacaagaacacaatgcaagaa

SEQ ID NO: 174602 - DNA, 582 bp, Cannabis sativa
  modified_base (551)..(556): a, c, t, g, unknown or other
ccccccaagcttttagagtgtatcatggtccgggagcttgcaatatcttctcttgagagattttgagcacgtgttttatgacaagctctttattacattacatcatcagccgccaacctaaaggtgatcaagagctctatgggcttctgctccttagagctccgatcttcgacagctaggacttcacctttgggttgtgacacgagcatagcgctccctagctttactagttttgctagcaatgtggggtcgacctattatgacccctaggtgtcctgccacagatggtggcatcggatctccattctggcctccttgcgcttgggccgggtcgtcttgcacataccgatgtaggtggagattgttatgccttattaggtactcaatctccctcttcaaattttgacactcattagtgtggtggcagaagttgttgtgatatctgcagaacttttacatgtccctcttgcccatttcccttctaataggaaagggcttttggtatggtattgtttcctgagtggccatgaagatggtgttgggttttatgnnnnnnataaaactctttacaatctgattagt

SEQ ID NO: 174603 - DNA, 531 bp, Cannabis sativa
aataaacaaattgaggtatgtaatacgaccattttaatttaatggacataagtgtctaggctttagttaatgaaatgaaagtaaataaattttcattttatttcttatttagttgcattttaatgtattagaatctcatcttaatgaaataatttttctaccattaattgtgatcaaatgtctattttatttaaaaataggaggaaagatcaataatgacaaaaaactcaataacttgttttatcaataattttacccatattgaattttattcaatatttctattatcattctcatttctcttccttgtttcctttcctattaaatttgaatctttaattagtttttgtttttcttctattactcaaacagtgaagtatttgcttacaaatactaaaatagaagtcaacgccgtcaattcaaacatgttcactgcattggacatcctagcgcagagtcaaagaagcgagaaagactgacattgtagagtctcttcgctcttatggagcttcacgaaccataaatcaaccc

SEQ ID NO: 174604 - DNA, 519 bp, Cannabis sativa
aatgatgatcattccagtccttttctcctcagcactggtgatcaccctggacttgtgcttgcgtctaccgtcctcaatggcagtaactatcaatcctggaaaagaggaatcaccatggctctagttgcagaacaagattgccttcatcgacggttttccttcctcacccagatttcggtaatctctatctcaattctcggcttagatgcaacaatatggttatgtcatggttagtcaattcagtttcccaagaaattgctcaaagcattatgtatttcgatttggccattgacacgtggaatgatcttgctgagcgatttaacgaaggtaatgaccctcaaattttttaattacaaacccaactcacccgtttacaacaaggtaaccaatctgtttcatcatacttcactaaaataaatccctttgtgatgagttgaaagaattttatgttagacttttatatgtataaactgaaacatacatgattaagtataaagtgcggaattaatcaaacatata

SEQ ID NO: 174605 - DNA, 592 bp, Cannabis sativa
  modified_base (530)..(535): a, c, t, g, unknown or other
tttttatgttccaatttttatttgaagatcattagatgatagtcattgataggttgactatgtcagatttttatttggttttaaatcctagtatactttacatttccttgatgtttgaccgctggcggcttattggttctctagttgaggttattgttagtgttttcttccatgttattataaatggcttgctatgcctatttttcatgatttttctatttgagttatattttcaagcaatggactttcttgaatttacttattaatggatatttttattttctcatataataataataataatagactcctttttcaactttttcttttcttacaaatttttaattatttaaaatttcattaatctttccttaaaaaatcataaaattgtattacattataattggaagtaattgtgtgataattagatagtgcaattattaccctagtaattgcactctattttaaaatatagtgtatttggatgttaattaataatttgtcgggaatattttaccaagatctagatnnnnnnacaagtatgttgattaacatcttaaatatcaattctctaaaaaatgaaattaaacac

SEQ ID NO: 174606 - DNA, 537 bp, Cannabis sativa
aggagcactggaggaggacctccccggagtagtaactaggtaacagccggaggtagggaagcgtccggactgtaggcctcagcaagagtttccaggagatcgtccatgggcctagctgctgcaatacagaaataagtgttaggacattaaggaaaacaaaccacacttagcgaaaaagcaataaaactagtcataccctgactctctaattcggccctagcaaagtcttgaatcatggcgctggcctcatcatccccgagataactgtccaagggaagaaaccagctggaagatacgtaggctaaatgatccaaaggaataggcgccgaaggtccggaacccatcaaagaccgacctaaataatggcctaagtgggaaaagtagtactccttggcatgatctccccaccgggtagaaggtttctaaacctacggagacactcatcgaaccctatgggcctaagacgggaatactcacgaacgggaggaacataatgtattgataaaggggacttaccagaacccgaagtgctggcat

SEQ ID NO: 174607 - DNA, 518 bp, Cannabis sativa
cccctttcgccgccaagatgactggtgagtacgtcgcccagatgactcggtgcgtgcctaaacggtacgctgcttgtgcatccttgaactccatctaccaggctcaggacctcaaccactccttggccacggtaagtactttgtgatttacttctttcctcattattttacttaaggccttcactcactcttgcttccttttccaaattgctgcagaggtcggccgcctttccaaaaccataattaatcatggcttcgtcttgtccgaatttgggggcatagacgaagtcgtgaagatcctgcaggacttgtctgctgaaaggcgggcgtttcaagaggaggctgagcagaaggaggctcttgctaaggccaagttcgaggaagaggctaagcaaggggaagctcaggcggaggcgatgatccgataggaggtccttcagagggatagcctggaggcaaagcatcgggaagcattgaaggcggagggcgaggctactgccaaggccaagcgcgagctt

SEQ ID NO: 174608 - DNA, 680 bp, Cannabis sativa
tcttaacccagtaaaagcggacctttcactgctctgtgattttcaaatattaaccgcatttattttacgtgaaatgtaatcaaaccccacgatttcaggggataattgttataaagagattagtcaactatgtaattaactgtctggctatgtaattataaatagaagcatgttacactaaaaagaagatgaagaaaatttataagagaaaaggcccgagaactgtatcggaaatctaacaagattgactcgtggactgtggagaatatatggatatgcagttcaaagatcatttaattaaacttggagttgaatcccaactgactgctccaaacactccacagcaaaatagagttgtagaaagaaaaaatagcactcttttggaaatggttaggtccatgcttagttattcaactctgtctatgtccttcttaggaatatgcaattcagatggcaactgacatttttaatattgttccatctaaatcagtccctaagacacctttagaattatagaatggttgcatacctagtttacgccattacagaatctagaggtaccctactcatatcttaagaaagaaagatggaaatctagaaaagcgaactgaagtttgcatgtttgttgaaaattctaaagagactcggggtggactattttatagtcataaggatgataa

SEQ ID NO: 174609 - DNA, 644 bp, Cannabis sativa
atatatataatgtgtgtttaggcttaatttccaacttaattggccaagtgatcgttattaagtaagtgtacttgtttgtttatttgcttaaccattagagaatcattttaatatgtgaggccaactaaaagtgttcaattttggaatctttatatgttatatatattttatctcctcaacaaacaatattgggctttagaaaatgagctatcaactctcttttacattgtttatttatacactaaacttaaattcataaataaagcattcggaagtgtcttttctttccttttgtattcgttactttaaatttaaattttcattattggaatcaaaggacagcatttattcaaattcaaatatatgatggaagtaggaactagcccataacagaataatgggaaataaaagtttgtagtgtacttaattattgtctcacaatagttaatataatagaacagaatagttatagagtagtaaaacattagtcttcataagaataattgatgaaataaactttttctttcttctatgtaattaatatttctgaaaaaaaaatgttaaaaaggtattattagtgttaaccactctcttcgttgtcatactgttattaatgtaattaaatagcttaattagcaactttt

SEQ ID NO: 174610 - DNA, 562 bp, Cannabis sativa
taataataataataataaaattgtgtcaaggaggaagaaaaaaaattgtgttgttctaccttgaagtggagaaggcttgaaagcttgatgaaaatgaaatcgagaggtgctctcaaagtgctataggcatgtggaatagaatgagaggtgtaaaaattggttctcaactcacttatttatagctgagtctgatttcctaatcttaaagctaattggagtcttttaaatttaaagctttctaaggaagaggtaaatgataagtaaaagatataattatatatttttccttctccttttcaagtgtatttcgaaattcctatacaaatacgaatagaaatataaatttaaaaggtaacaacaattcctaatactattgagattaaagaaaaattagagaaattaaagggaaaagataaattataagcaaaaggccaaaagtcttttctcttcttcctttctctctctaattttgaatggcatattcagcaaggattaggattccaatccaataaatcctaatgccataacaaaaataagaaaattttaaattttcaaagaaaaa

SEQ ID NO: 174611 - DNA, 564 bp, Cannabis sativa
gctaaaaatttccacatcatctaaaaatataatattttattttatttctcgtttacattattttttgcattgttactttaaataaaaatattcttatatagcactcttcaaaaatactataattatgatctaatacattattatttaattttttagcaacactaattttttattaaaaaaataatgatagcatcaatgctactgtataacattcacacatattcctataatatctatctacctaagcaagcattccttaattttttactattggagatcttcttagtatttttcttttttatatggacgaagtctgccgtagaaatttaagatacactacaataaaaatagtttttcctgacatttttaaaaagtcgtttaaagtattcccgtcggtttctataaccgtcgcaaaacgggtaaaatagacgacggttaaaaactgttgctaatcccgacggtttaaaactgtcgcctataccttgttataggcaacgtttttaaaccaaatgtaaaaaaaaaaaaaaaacgcacacacacaaaaaaatactcacaaatataatc

SEQ ID NO: 174612 - DNA, 888 bp, Cannabis sativa
tagatggcatgattagggacccatcgaaccccaagtgtgttggcaagttgttggcctaattgcttcgagatacttctgcccgtactcacttcgaatttctcaagatttattttctgccccgaaagccttgcataccgctggaaaatcagattcatgttctcacattctgtctccttcccttcaaagaaaacaaagctatcgtccgcaaagaaaagatgcgaaacggtaacatcattccttccaaatcgaacccctgttactactccagccctctcggcttcctgaattaagcaagataaaccctctgaacaaataagaaagaggtatggggatagagaatcaccttggcgaagaccccgggaaggatggaattttccaattctttctccatttattaagaccgaaaaggaaacactagtaacgcacctcataattttctcaatccacttctcatcatatcccaacccacgtatcatagtcataaggaagctccactcaacccgatcatatgctttggacatgtctaactttaatgccattttctttccattaccaaatcttttcaacttcatactatgtaggctttcatacccgatgatagcattgtcttggattagccttcctcctacaaacgcactttgaacctcggaaatagcttgatgaagactatgtttcatacgccccgctagacactttgctacgatcttgtataccacattgcacaaactaatgggacgaaattctgacatttggactggttttggaagtttcgggataaggaaaattagggtatcattaatagcttcaacactctttccctcattgagaattcccaagcaaactgtagtaacttcgtctccaataatcggccagaacttcctataaaac

SEQ ID NO: 174613 - DNA, 756 bp, Cannabis sativa
  modified_base (646)..(658): a, c, t, g, unknown or other
taattgaatctttagttctatttagaaaatagttatttattttgaaactactttaagtaaacaagaaaataaaaactaaacaaaaaacgatattaaaacgagagatgaattaagaaaaattactgtaattgctttatttataattttcttttatagatgcaaatgatcttttcattttatatatggaccacctattaattactatcactatcatcaattataattattttttgtccattagtttttaccatatatttattatcacgtttaacaatatagagataaagtagatattaattatattttttaggttccattcatacaattagttttttcttgtatgtatctactttatctccattttattaaacgtgacaattaatatggtagaaactaactgaaagaaaataaatataattgatgatagtgataaaaaaaaaataggtggtccaaaaataaaatgacaaagatcattttcattaataaaaggaaaattataaatgaagcaattttagggagccaaattctctgtcccaatatatgtctcaaccaattatattataacaactcatttaattagttcttattcacacaagatttttttacggtacaaggttaggaatttatatatatactagatgagagnnnnnnnnnnnnncacgtaaatattagttttatataattctagtagttttatatcgatgattgttaatgaaattagtatgtagttttatgtttctagaaaaaaaaagggta

SEQ ID NO: 174614 - DNA, 652 bp, Cannabis sativa
aaacgataaataaaaacattaggaattaagtaatccttatagtgttggcagctaaataatatgatacctttcgttcagattcctaacccttgattctttctattgtagagtatgatctagatcttaacctatatcttctcctcctttgattgtgttcataacagtcttcctcactatgttgagtattgctttgacatgtgtggacatattttcaacaccaacgagcacaaaatttcacaaagaaatccaagagaaaacagcctctgaattttcaaaaataaaaagagaaaaagaattgagctttttagggttttctagcttagaaaaacatcatcagacaaagttctcttctctttctttttacagtcttcacatagggtaaggtttagatgagatgggcttggaataaagacttgggttgaatcttactcttagggccatatatacatgggctttagagttaaatttttgccactatatttcaactaatgaaacaaaagtgtctattttaattttatcacttttctcatctaattatttcaattccaattctattttcataattataaataattattaaataaaatataatttaaatatatttattaattagactcagaaagtgtactaattaataaataaacctttattt

SEQ ID NO: 174615 - DNA, 512 bp, Cannabis sativa
  modified_base (243)..(243): a, c, t, g, unknown or other
tacgtatagtatagctaattaattataatggtgttaatagctttcagaaaaaaaaatgggttaatatacaattaaaatatagtaataataataacttgcaacaaatatctcatttatattaatattaaatgtgcttatctaacaaagtcgttagtttaatggtttttttttttaattcatctgttataattaacggttaaaactaataccgttaaattaataaattaattattttttttaaanaaataattttaaatatttaaatttcatttaaaaatattatcaacaaaattaaataattattttttatatataaatcttgatttatatttgaattagacgttaattcaataattaattatactttataaaaagattattaattatattatttaaaatatctaagtctatttactttttttattatttaataaaattagttagatatattttttaaaaataaattaaattttatatatttaaaaatgtaattgaataatattagatttaat

SEQ ID NO: 174616 - DNA, 792 bp, Cannabis sativa
ccgaaataggaaatggcagcaattgataaactgggtcttctctgcctacccaaatattcttaaagctggaagtgatgtagttcagcaagaggccgatatcacaatcaataagaagcagtggatccccctgctaatgactgcatctgtgtcaactgtgatgcaactgtagttgataaagttgctggtatgggtctcggttacatctggcgcaagactgatggccaaatccttgctgctgggcagatttataggaatgaaatttgctcagctaagatggctgaggcttgggcgattttggaagctctgaagaatcctccagctgaggttactaacccgattgaagtccaaactgattgcagggtgttggtggaagagatcaacaacaaggatcaacatcactcggctgaaagcaatctgctgcataaaattcacaatgtgctggccaattttcagaatgtaaaaatcattcatgtaaaaagaaccaataatgagtgtgctaatatgttagctgggaaatgtctagttgacaaaaacacacaatttttcaatcattctttcccggattggttagccaatttttgtaaggctgattatcctcatgtggtgtagtttgttttgttggttctaattaaattctctttcaaaaaaaaaaaaaaagaataatatgttgcaattttgtgtgaaatttgttagttaaggttagatttaggaagattagaaagagatttttcgaaaatgggatttttttagatcgggctcgatgcccgtctgatggtcgggtccgatgggggc

SEQ ID NO: 174617 - DNA, 621 bp, Cannabis sativa
ctttggttttacattacgattattcgaatacttcaatattgggctgttcatgttgaagttttaacataatttaatctacacatataattagatttagattatataatattgctaattaaactatcattttctttattatttaaaaattagtgtaatttattttaacaatgaacaataaattaattttaacaataaactgcatgaaatgcgcaacgcgcaacatgaactaacaactatttacgtatattataaaattgattatcatatatataaatataactcattattttaaacataatttttgcttcctatctcctttaaatattgtaaataaaataaatgtttattgggaggaggggcggctatactataggttgccacaaataaaatgctttcttattaaaataatagaaaaaaatttctcaaaaaaaaaataaataaataatagaaaaatgtaaagggtgtgccaacactattccaagttatcacaattaaatattagatttaatgggtattaccaataaagggttactaaacaaatttaattataattaataattttaaaaatatcaaacatcgaattttgatctaataacgaataatgaaatcacaaatttgaat

SEQ ID NO: 174618 - DNA, 510 bp, Cannabis sativa
ggatatctgcttcttctgtggtagaatgggtcacagctacaacaaagggtgcatggattatatgaaagcttgtgatgaagccccgttccccccggatctaaggtatgatatcaaaactatcatgggtaaagttaaggttacaactaacgctttgttatgccatgaacagctcaactttacaaatcccccggtggcatcattcatgacctcaaacccagctagcgcagtttgtgttgcacccccggagaactcccctcctttcaccactaatggctctcttgagcaaggcccctcccacggtcaaacccaacaagtgggcttatacaagtccggccccacgccctacattcaagaccctcctcccatggcccaaaccgaaacctatgcaaacacaaacaccatcatccaacccatttgcacccaacccgagaccattaacccctcatacactgctctcctcaatgccacaatgagtaactccagtgtccaaaaagcctctcctatctccaa

SEQ ID NO: 174619 - DNA, 543 bp, Cannabis sativa
  modified_base (326)..(326): a, c, t, g, unknown or other
  modified_base (375)..(378): a, c, t, g, unknown or other
  modified_base (471)..(479): a, c, t, g, unknown or other
acttgaatccttagaagaattccataaaaaaaatggtaaaaaggggtgatctcctctggtttgcttcagccgaaagagagaaagagaggagattctctattttgacttttcttttgattttcctttttcccttatttttctccaaatgaaatgaaaattaattcataaccttgctgaaaaatctaaagctaggtgtcactctaataggcagccactcaaaacatcatttactcgaaagactaaattgcccttgaaccaaaaactaaggtttttcaaaagctaggggtaaaatggtcaaattcgataaccccgctcaatcccgatantttattttctctaaaatatttcctactaagaaataaggttctaaacttnnnnatgtgatcaaactagccatccaccgcagtttctgttatcgtcgagcaaaaattacatatttcttaaattaatcaaataatacccctagagttnnnnnnnnnctccagaattgagaaattataactctaatactcatttctaaatattagggtccacaaataatta

SEQ ID NO: 174620 - DNA, 604 bp, Cannabis sativa
  modified_base (387)..(399): a, c, t, g, unknown or other
tacaagttagagtgatagctcacactaagggattgtaaataaaatagagaatatacttgaaatatgtatatttttgggtgtgttaaaaagggaattttaggatttctacctaacatagatatagagctttgagatcaaggaatgatctttgatcaatttgtgattagccaaaaactcagaaaacggatgcaagttaaaattaatggagatggataagattcaagttgacaataagatggaaattcctcaagcataagtgaacaaaatcgatgaggaattgtaagagaataataaagagagtgatggaaattggatttaaataacggaaggacaaaaacaagaaacacaagtaggaatgacaaagaagcatctactttctaataaccnnnnnnnnnnnnnccttggagttaagcatacttaacttggggtaatctcaagatgagaaatcttttgggtagtcatcttagaaagcgtacaagtgaggacaaagtacgctagaaagattcttattaggatgaaaaatcaataatcgttcctgagattacaaagaggaaaggatgtgttaataagtaaatatttacaaggtatcgagataagcatatgt

SEQ ID NO: 174621 - DNA, 585 bp, Cannabis sativa
  modified_base (369)..(370): a, c, t, g, unknown or other
tcgtctctgaatttgaaaaaaaaaaataaatggcactaaacattgccactaaaacatcaatctaaaaatttaataatttttagtagaatctaaaaaataagggttattttttttatttttatattataaaacccttttttttttattattatttttatagaaatctaactcacatagcaattaaattgggaaatttacatggtatactaactttgttatttttttaataaaaatactgtcaggcattattgtttaactggtgttttttagttgttctactgttgttttgagttgttttgttttgtgttttactagtgttttataaaaatatagtatttttgaaaatatttccgtgtgacagtatttttnnaaaagttaacccaaattttaatatttttgtaagtttcccattaaatttatatagcgactcatataaaaattattgaagcaactatacagaacaatctaaacgtaattttaaaaaaaaaattaaaaaataatatatggaataatttattaaaaattaatttaaatatataagatttataaatttaactacagctagtatcctatgtgattttggtc

SEQ ID NO: 174622 - DNA, 542 bp, Cannabis sativa
atgctcgcgcttgctggaacaggaaaagtgtggatgtttgcagcaatatggatgatgatttcagcaattggctgcaggtgttgcaatgccgaggaagagaaggcgagttggaggaggcggctatggtcagctgggccatttggcgtgccagttttcactttatttggcagtaacaaagttggactgctgcaaatatagttacatcagcaagaatgctacttgatcagttgaaagacgctaaaaaaaagggtctttctttgtcttcgttgttcgacggaggccgtttggttgagcattagagtgcacttcttcaggaaagatcaaggttaatgttgatggcgccttatttgagcatgaaggcaggtttgggttgtgtggctcgcgactgctaaggtaatatcgtggaggcttccaatcggggtcatttaaggagggttcaatctgaagttgctgagatggttggcatcaaggaagcattaagttggattgatcgtcacaattagggacaagtaattgtagaatcagacaacttggtatgcata

SEQ ID NO: 174623 - DNA, 593 bp, Cannabis sativa
  modified_base (166)..(166): a, c, t, g, unknown or other
gagaacataaattgtatgccaaataaaggaagtgcaagttttggctatcttaggtgtcttttctcgaacatattataagtaaatatgggatcaaggttgattcagggaagattgaatcctgggtctggctggttattatcgtcgatttgttgagggattttctaanatctcaacacccttaaccgaactcaccaaaaagaatcagcggtttttatggatagacaagtgagaagcaagctttcaagatttgaaatagggatttattacagctccggtattagccttacaatctgataaagaaatgtttgtagtttacagtgatgcatctagacagggtccggggtgtgttctaatgtaggtcgattgggtcatcgcttaggcctcctatcagttaaaggaatatgaattacgatagccaacacatgatttagaaattattgtggtagtgtgtgctttgaagctttggcggtattatcattacggagaaaaatatgatatttataccgaccataagagcctcaagtacttctttacccagaaagatttgaatatgaggtagagacgttggttggagttggttaaggattacgact

SEQ ID NO: 174624 - DNA, 800 bp, Cannabis sativa
atacactttcagtgaagttgaatggtcataatttccttctctggaagcagcaagttcttgttgcgattcgtggacaccaacttcaacgattcattcaagatgttcctcctccatcgcagtttctttttgatgcagatcaagcaccacaaaggtataatcccgagttcttaaattgggagattcaagatcaactattagtctactggcttttatcttccatgaatgagagcctgctcattcgaatggtcggatgcaacactgccaggcagatctggtatgctttggaaaagcattatatcttacaagtctcctctaaggttctggagttcagaactaaactccaaaatctcaagaaaggcacactgtcattagatgagtatctcttgaaagtaaagcaacatgtggacttacttgcttctgttggagaaacattatctgctcgagatcatattgcagcaatttttaaaggattgccgagtgattatgacacattcataatctcatctaatactcggattgaagagtattctgttcctgagatagaagccttgctcttagcttcagaatcaagaatcgaaaaatccgataaggacatggatctgaatgttaatcttgctgttactgagtcaacaccaagatctgttgataatatgctgcaactcgaagcaaatgttggtcacttcaacaggaacttcaaatatcctgctcctcaaagaggtcagtattactccacttatccaaatttctccccttctaacttctcgaattactcttctaatcgtgccccttatcctggcact

SEQ ID NO: 174625 - DNA, 541 bp, Cannabis sativa
caacattaacctttttggtactgaattgaacctttgttgggaggcaaccgactagcacacgccacaagaagtgctgcactttcggaggaatttccaactgccatatagccttgaacattttttgatcttcagcagcaacatgcacaccagaatcttgctgtagcattcggtatgcacttttgacagtgtaaaagccattggtttcttcattccaacaccacttatcagccgtagcagatacactcaattgtatagacaacacaagattcttatccctttcatcaaatagatcattgataacatcatagtcccagctcttagaatgcatcaaaaataagctagaaacattttgattcactaaacccggatgatgagataggacaaaaggattagaagggtcggggagccatgggtccaacaaaatacttacattatcaccattgccaatagactttctagtaccctccttgactagcccttgtgcttccataatactcttccaaataaagcttgggttttgtcccaaagtagcattaagaaa

SEQ ID NO: 174626 - DNA, 896 bp, Cannabis sativa
acttcttccacctctacgacctcagcctcgtcgagaagattccccccaccaccttgagttggtgtgggcgacatggcacgaaaagcctcggccatttcagcggcttctgctccaaggattgaaaagtcaaagtctggaatcttagagagagtggtatagatgtagtccgagaccgcctggtcatactgcctttttccattctccttctcagcctccaagtcgcgagacatctcctcgatcttcatttgagcattcttggcctcgagctcgaccacctccttggccttgcggagttcctcgagctccttgtccttagaagacgcatcttgctttagcttcttattgtcttcttgaagctgagcaacgtgtctcttcgcgagttcaacctccttggaaccggtagcgaaagccctcgagaacatagccataaactgcgaagctaactctgcggagcgaggcagtagctcctcagcaggagtcttgtcaaccttcgactgaaactcgtcactgacaaatttctcctgaagagacaatacgtggcgagctcgaactgctgggtcaatcatgactttcttccctttctcttgaatgcccttagctggcctcttggaagaatctgcgacaggagtaaccaccacatcgcttttcctcttctgaggagcaacaggggaagttgccgccgttccagatttcagcttgcggttaagagtaggtacggacttcaagaaagtcatttctgcaagaacagcaaaaaacaaggattaatactaatgagggtgaaattttaacgccctaatttatgtatgcgataaactacttgatgatggtcgagaagtttgcttggaaaggcgtttatcaattcgctcttgctgcttttcagaaggttccttgtacac

SEQ ID NO: 174627 - DNA, 706 bp, Cannabis sativa
cttcttaaagttgatgaattgaattatattacttacaatatgcattatattttttttttactgtaacatgtatcataggaagcttttgctcccaaaaatagaatttctacaatgacgtataccataaaccaggcagcaataatagacagtagcacacttcttcacttttttgacaacttctttttctgcagtcaatggatcattttctgtagctctacacctctgtaggagataccacaccacttagcaatttccccaaaaacttacttagtgtagtaacacacaccaaaaaaaaaaaaaaacaaatgatggtgatttttgttagaatttaggataagatgaatgggattttatcttaaaactaattgataatgggtggagtagctcatttaacaatttatttccacacattagtaatgtgagactaactctaatacaccttcctcatgtttggatctagaaaatgtgggtataacgaacaacctttaagagaccatatgaccgaatgtaatatttgaaagaatccgacaataccaaattttgagaaatttgtgaattttgaaataggtcaaagtccccaatactgaaaactggcacacattggtcgaaaggtcccaaatgaaggttaaaggggagacaacgaaagtttttaagtttggcttgtatttttggaccggcggcactttgggctcacaacggagcacaa

SEQ ID NO: 174628 - DNA, 511 bp, Cannabis sativa
tttgtatttttacttctataaattaaatttttattttagttttaccattatatattataattttgcccatatagatttatatttttttatttatttttatcttcatatatttttatatttattctcctatatcaattcctatctataaaatttatatttttcttcataataaaaataatagttttttataagtataatttttttccaaaacaaaaaaatttgcccgctaatacttccactgttgattatatataaaaaaattacaatttttgtcaagtatcaaaacaaaaatgctatgagtgagtaaattaaaagtagaatgacgaactagataggaaaaattatttaaaaagctaaagtttttctcattcccacatcaacgtctttcttaatgagtggtttaagagtagttgtctgagaatggttcggttcggctcaacgacgtttcaaatttttgttttcatttattaatttactattattagtttaattctatttaatgttttttatg

SEQ ID NO: 174629 - DNA, 681 bp, Cannabis sativa
ccaaatactctaggtcacgttgtcccgacatgtacaaaaaccatcctagctcagaactcactcttatttagccatcgcctttcctttacatacacatggaagtagcaactgtgagtcaattgactcagtaagaaaagcatgtaacgaataatataatatcgatttgtatctaggcgctcatacacctatctacagggctcaacaaatgagtaagaatgttcttaactaagatacaaccatgttccactataccacatgcactcagtaccaccattatactagtgtaggtagggtatgaatcgtaccccagtactgttaagtcaactgccacattcaccttgtacctactcgtactagtgctggtaataccgtagtgtactcttcaaacatcgtatactttaccaatgcactctgtaccgctaccgtactagtgttggtagtgtacgaatcacaataagcatgcatatatataacacatacatacatttgcatatatacaatatgttctatgtgattcttacctcgtttttgaattcacttaagttggccgacctgaacggaatacttcgcgctagatggacgccctagtcacattcacgtatacgggtaaataacacgcaaaagccctaatctagggaagccaaacacctaactaagggttctgtgattaactactaatac

SEQ ID NO: 174630 - DNA, 981 bp, Cannabis sativa
tcttgccaagcccgccggccttccttagttaaaggtgcagtttgatcgagattgtattttgttattgcaattaaattttcgctactacgattcgtcttatctctgtgacataaatttaattgttttagtcttgtcactaggggtgtgcataaatcgatccaatccaatgagaatcgaccgatccaattacaaccgactaaatatttgatatccaattgtgactggatcggattgaatattatttttaaatatccaattggatcggatcagatggtagatgggtgtgtctaaaaatccaatacatccaacattcaatcgaattaattagtatttttatttattttggatgaataattagattttatattgttatatgtaaaatctatatgtatatataaaaaatagcattaaatttttactctttttttcttggattggatggatccagttcaatacaatacatactggacttataatattggatggattcgatctgatcaaaaaaatactagatctaaaatattggataaaatcaaattaaaccaataaatatatatataatatattcgatggatagaacaaccgatccattctaacatctaatggatattggatcgattgtatgactgaaattaattatattggatcagatggtaaaatttaacatccaatatataatttgatcggatctggataggcctaaaaatattgaatgtggcccaatgaacatccctacttgccactgtgacatgtttttgattgttttagtcttgtctaattttaattctggtcatttttctaattttaattttgatcatgtttccaagagggcgatatccccaattgaattgtaaattattattttagttgataattattaataaaattatataatttatttaaaaggctaattagtaatttttcctctgacttttgacatgtactaaattttgtcccctgaactcttttggccattaaaaa

SEQ ID NO: 174631 - DNA, 504 bp, Cannabis sativa
  modified_base (458)..(461): a, c, t, g, unknown or other
ataaaaaaactcaaaattgtgtttgttcagcattgttattaagcactaatggtgcttaattagcacgtaccatttatgtttcacaaataataagcattttccaaataattagtgttttaattacataataattattaaattaaaataagtaaaaatcttaaatatttaattatactaatagtaactataataaaaattacactagttagacatctcgtgatactactaatacactactggcattacaaaaaatttgactttgcactggtaaaagtctacttgttgtgctagcggcgaaactttttaccgacacattttatcaccagcaaagattatcgataatatttagtcgctaaaactacttttgctgtgcaaccactatgtcactgataaatgaaagtagcttcctgtaacgtgtccccgcttcaagcctccgttgggtccttacacccacggannnnatggctcttatacacgagtaagtcactctggctgcttcatgga

SEQ ID NO: 174632 - DNA, 801 bp, Cannabis sativa
  modified_base (769)..(771): a, c, t, g, unknown or other
caatggtactttaaacttgctctgggaacattcaattcttaggctgagttttcaagatttacacaattctcatcctcaaggcttgtcccatcgtagctagaagaccttgtcgaagtcaagaaatgacaaggagaacctttgaaggattacatccaaaggttgatgaccgaggccacaaaggtcaaaagccttacaaaagaggtccaatatacgaccatactgggtggcatcctcccattgagtgacttatggaaagacatccagaggatctcaactaacaacatgaaggagttccccaacagagctgatgacttcatcaaacgagaagaagttatacgacaggcctagacaaggaaagtaaacaataggtagtcataagacatcctaaagtcccatgacttgttaggtgcaaaggcaggcaccagcaactctacccaaacctccagtggcaagaaccctaggagcaagcacaacaaaaacaactctgggagaaagagtgggaaaaaggggaagtttaacacttctcccacgccacaaaatcagaaagacaaggaggagaagtatacatgctttaccctcctaacggagaaatgtgaggccatcttcatggccactcaaggaataatcccatatagaaagctcttttccatcaagagggaactaagcaagatggacatgtcgaagttctttcagttccacaacgacttcagctatgacactaatgagtatcagaatttaaagagggagattgtgttgggttttgtgcccnnnataaaacccatttcaaaataatcagattta

SEQ ID NO: 174633 - DNA, 623 bp, Cannabis sativa
cccattgcccattgtctaacagtaagtcagccacactattgatgttggggttgagattcccgattggttttgggcaaaagcctttacgatgcggaatccagggatcccccaagatcttagtattctgaccattggtaaccatcttgcaggcaccttttctcaaaatggaatatgccttaatgacgcttttccaaaactaggaatctgaatttttatacttgcagttcagaaagtcttgccctttcagatatttggctcttaaaactctgcagcacaaagattgtcctccagtaagaatattccacccccatttggccagaaaggcctggttcatttctttggtcttctggaaccccaggccacccagcgatttagggaggcacagtttatcccaagctcggagatgaattccatgatttcctttctcaaacccccaccaaaactctctgaccaatccatcaatcttattaaccatacgactggagtttagtcgtttgcatagcatacattggcagagacaagcccacagattttataagagtcgttcgccctgctttagacaaagttttagccttccaaccctggagctttgatgtgaggttatccagaataaaattgaagtc

SEQ ID NO: 174634 - DNA, 950 bp, Cannabis sativa
  modified_base (917)..(923): a, c, t, g, unknown or other
tttgggcctaaacataagagctgggggattacaaacaaatttacatatatactaacttttgctatttttttacaaaaatactgccagggcgtatttttaacttttttactgtattttttataagtttcatactgcagcatactgtgttaagttttcactggtgttctactggtggtttttagttgttctactgttgttttgagttgttctgttgtgttttactggtgttttataaaaacacagtatttttaaaaacttttccatatacagtatttttgtaaaaattaactcaaattccagtatttttgtaagttttcccttatttaaggaataatttcattaaatactaatttttctaaatttattatttaaagttattttttctttttacatttttatggtattttataaaaacagaaaaaaaaaaaacaacaaaaaattcacatgaaaataataagaaaacaacataaaagataatgtacaaataacaaaaatcaacaattaaataacaaaagtacaacataaaaatacataatatcgtattttatgtaaataaaatttaaaaaactataaaaatgttaaatatccctaaggaggtaactagttaccttaaaatatattatttttaattttattaaaacttttaccaaaaaaaatataaaaattaaatttcgcctataaaccattatcttcaacttctaactcagtacatgataaaaggggatagaagaatgcaagaaagtatactcctattttagttccaaccattactatatgctatatttctatgtgccattttaatttaaattaagctaattagaatttttgtctctaaactttaaaatgtattaaattatgccccctgaacttttttggccattaaaaattctttccgaattattgagattgttagattnnnnnnnttttgtctaatttcattcaatttcact

SEQ ID NO: 174635 - DNA, 554 bp, Cannabis sativa
aaagattcgttggaacaggcgggaattttccctcaaaaaaaacactggcgataaagttgtcaatgatggactgccacatcgtcagtgaacagcccataactgacgactttagtcgccattaaaaatattaaaaaaaaatgattaaatgctcaaacgcatcagacttcccattttcatttcaacattcattttcttttttttagcagaaaaaaaactctcaaacccctctaaatctctttccagatctctcttccaaatatccaaccgcctgaaatctcttcccctcaaaccactccaatgattggttccgtccaccactgccctccatttttaaggtatgaatgaattagtttttttgatgctttttgatcttctgcattttttaggtaataaggagttgtatatagttgggttttcaattgcatgcctgatttatgattattttgaatttttcataattattagaacacttattatatactagtaaaaagttacgtgcaaggcacgtatactaaattttatatgctaggtattttctattatattaaaaggta

SEQ ID NO: 174636 - DNA, 579 bp, Cannabis sativa
gacatataagcacaaatacactagctcgacatgcgacaagcccgaaaaactgttattttttattactttctctgccttatgttaaaatttattttgttaaacgatcagcaaactcctagcacatgttgttgctaggatgtcttgatctttttctgatcttagcatttgtgtgtctaatgctccagctgctatgctggatattttgtatttcgaattaggggtgtttataaaatagccaattcaattcaatctgcacaatccaatctaatcaatccgcaaagtgaggatatccgcacttgtgcggattggattagattgaaaaattcaaaatccgcacttgtgcggattggatattgattgacatgcaaaagtagtcgatccaatccaattcacaaatatttataaaaatattaaaaaattacatatacaaataacattttaatgtaaagaaaatagtaatttaaaaatcacatataatacaattctatcttaaaacttaatagatcaaatatgtattctattattatatacatatattttctacatacaatttaaaacaaaattaaacatttctttata

SEQ ID NO: 174637 - DNA, 503 bp, Cannabis sativa
  modified_base (261)..(261): a, c, t, g, unknown or other
ttgccataaacaaaagagcaatgtcaaaaaatatctatgatgtctagcattcttttcgttgtcatactgttattaatgcaatcaagtgttagattttatataatttaatataataattttcaaagaagatcattaactaatcacaggatgtcacctttagaaagtactaagcactactaatgcataataataatgctctaaacaaaaattatttaagaaaataataacaaaattaccccatatattattttttaatttttnttttcaaatttacgatttgggttgctatagtgatttcttcggtagtttctatgtgggttgctatacggattttggttgcgatttatgttgctccgttagttgctataggggtttctgtgtggaatttcgtgaaaatacaaaaaagaaaaaaaaaaactattttaaagggttaaaatgaaaaaattccaaaataatattactttacttacactatgtttggtaaggtagacaaaggtggaggg

SEQ ID NO: 174638 - DNA, 699 bp, Cannabis sativa
  modified_base (362)..(376): a, c, t, g, unknown or other
ttgatcattagtcaagtcttggactaagcacctcattagggtggggagtcttttgttgtttagctttctttcttttgtatttccactcaaatatgtatggagagctataatcatgcatgttcctagaaatcccttaaaaccccaataagctctttaggggggtgacctggtgacttatgaagtaccttgtcaccagcatgataggggcccagttgtgtactcccttgccctatcaaggccatataataataaaacgatgttcatccatgcttctatatggtctttgtgatgcctgtttgatgcctttgttggatcattgcgtgccatttgtctatacgttttcttgtgggttgtgtgagatnnnnnnnnnnnnnnnctttgtgtttgcttgctcatgcttcttgtttgcactcaatgtgtgcgagacatgtatcctacttaacctttgaacttgtttgcctacaggcgcgtttaggttgacttgctagctcgttgtgcgagcaagtgctgcacgttctgcctacttgggggtgtctaaatagtcggcttgtgacacctagcaccttctataagtggcacccacaagttttataatatccaatacttaattataccaatagcggtatgacagatggtatatgtgttggattatgttttactaagatctagatttattaccatgcatgttgtttaacatcc

SEQ ID NO: 174639 - DNA, 745 bp, Cannabis sativa
  modified_base (641)..(663): a, c, t, g, unknown or other
tacaatgatcaatattagatctgtgctaataataacatgcatgcatgtgtacatttaaacttagaattttcatcgttttttttcttaattttttgaaccccaaagccacaagtatatattgtttcttgtatgtatataattactaatttgttaaaatttaaaaagtaaatgcaattttggatcttgtattttgcaaaagttactaattggatcctttgttttgttaagtaacaaaatggatcatgtattttttaaaatgttaaaataagacctgagcttaatttttgacaatttttttattaatataaccaacttgaagataattcctaacataaataaataaagaaaatgtaaacagttttgtcataatgtttttagatcgaattattataaaatttattttgacaaaaaatcagtgcagagtcctatttgtactattttagaaaatacaggatccattttgttatttaacaaaatatcaaattagtaacttttgcaaaatacagaatccaaaatggtaaatataaattaagcaattaagcaaaagttttacccaaatgttacctattcagtgtaccttatttggttaaatttagtatggaataacatattgaggaatgggataatttcacaaatgcacnnnnnnnnnnnnnnnnnnnnnnnacggaattttaaacattttacgattttttgattttatttacataaaatacggtcttttatgttgaaattttgttcatttatt

SEQ ID NO: 174640 - DNA, 522 bp, Cannabis sativa
cttctgccctacttaagctgcatttgttcctggaaggaatatcctagataacaatgttatggtgcaagaaattattcattccttcaataggaagaaaggtaaagagggattctttgcgatcaagattgaccttgttaaagcttatgataggttgagttggaaatttattgatcatgttctagggaatttcgacttccctcaacaattctgtagttgggtttctcaatgtatttccacctcatccatcaatatatgcctcaatggtggtcctgttggtaagattcttccttcttgcagccttcgatagggggacccgttatctccctatcttttcatctgtgcagcggaagtgctgtccagactgttggaggaagatataggaaaaggaattattcatgggattaagttaagtcgagagggctcggtgctatcccatgttttcttcgctgatgacctaattctggttggtcgtgccaacttaaatgaggccaaaggcttttggaattgtcttgagaagttttg

SEQ ID NO: 174641 - DNA, 734 bp, Cannabis sativa
aagagcatttgggaagaagaaaacaaatggtattcatgaagttgatgccagtactgctttaacagctcaagtaactacactcactaaacagttaaagcagacaactatagttcccaatgctatacaagcttcagttggatgtgaaatttgtggagaccctcacacttttgaggaagacgagaaaaacaagataaagaaaataaaaaataataatatttttaatttttaatgatattttttattttaaaattaattataattaaaattataatttggaccgataatatatcaacgtatttttaaaaaataaataaacgaatcagggaccaacacacttactaagaactatcaccactgatttttaaagttgaagactataaaccctaaattttttagaacttttaccttaatactaatactaataataattatagatatatattatatttaactaatactaataataatgtaaagttaaaaatctaaaaatagatatataattatagtttttaattattttatatacataataatataatatatataccgcttttaaaagaaaatagtataccattcaaatactttaaaaataaaaatacaaaaaataatgtgaaaaaaaaatataatattatattttcacatgatataaaaattaaaattactccgaaacaatccaaaactttgaactaaaattgtagagctttaccccaaagggagcccttccagaaattctc

SEQ ID NO: 174642 - DNA, 798 bp, Cannabis sativa
aatttaagcttctaatacttagaccatctctgtaataccatctcgtgagaaatgaaaactcgaagtacgtagacgtagctctattactgtcgcgatagagggagtgaactactatagatttgttgtgtctctcttataattacttaactacttttttattctcaccaatctagcgagcggatgtaatttagaagtctagtctaaatttcaaagtcaacatgttgttaagaatagttagactaagagcactctcatcaacttctctactatattttagcttaaatttttacattacactatacatcaccagcattctattttttttttttttgcatattttaatatattttatccacttcaaacatatggtattaatattttatacatatccttgtataaaagataatttaaaactccaaacaattaatacaatatattttgagtgatgaataatattttataaatgtaaaatatgaatagtgaatttttaagaaattttaaaatagagaaataatttaacacatctaaagtaaagtatttttagtttagttttttaggtggcgtttggtaacattttcttaattagttttctgtttttaaaattgaaaaagtaaaaatatttttcaaaagtatgttttataaaactgtttttacttttaattttttttaatgagaatcaaaattttttaaagaaaaataaaatcacattaaatattttttagacaattctttttttcttaatcaatattttagacttcgatcagacccagacccaaatccccccacagccctgacgct

SEQ ID NO: 174643 - DNA, 767 bp, Cannabis sativa
cccatgtggggagtgccgcagcccgcccttcatttttaggcagatttgaacgcgttattcgaatcctcataactttgtgatccggactccgtttctatatattgttagaaagctcgttccgagctctatgtaaatatctatgttttgaatgccaattttatattatgtgaaagtggaattagggattaaccctatacttgtaaattccaaaatttgtgactaggattaccaacacttggtcaggagcacccgaggatttggaatctccacgtttgtgggacatcaggtaagacagtagtgagcacgtagagttatgcacggtggcgcttatattggaaataatatatgtgagtaattagaaaccgagattagggttaataccctaacatgagcggtttaatggcctagggttattaccctagtgattattaatgtgtaaatgctatgccatgtcaattatatgtgtatattgagatttagggttatgcgttcaaggcataatcgagttggactcggtaactagaactgagatgaaccgttctaaggccttattgtatatagacgtgtgagcgcaacacgtgggtctatgccacatagacataaataggcatgtgagcataacatgcaggtctatgtcatacatacatatgtgaaattagggatgttcgcagtgcgggtgtgcggtttttgactattttttcaaatcaactcgcacatgcagtttttccaatttctcaaaccgcacccgcactgcgaaactaaaaacc

SEQ ID NO: 174644 - DNA, 609 bp, Cannabis sativa
gatccgggagtatgcctgttggactcgtcctcctcccatttgatttgggcccaagctttggctagtacttcttccatagtcctgcaaggatattttgttaattccttgtaaaggtcagaatgtaccattaggccttttcggaaggtcgcgatcactatgtctacgttgcatgaggttatggatactttctctatgttgaaacctagcaacataatctcgcagcgattcacccatcctttgtttgatcctgtaaagatcgccagataatttctccaatttcctgctactagcgaattgctccaaaaatatgtcagttaattgagcaaatgaagaaatagaattattgggtagatttgtgtaccactggagggctggccctaccagactagaaccaaaccccttacacatacaagcctctcgcaattcacgagggatggcgactgtgaacattctttgcttgtaactcgctatgtgatcgttagggtctgttgtttcgtcatacatcttcattgacgggaagacaaactttttcggcatctccacgagagctatagcatccacgaatgaagagtctgcgaagctacttggtaagctctttttgataggtgc

SEQ ID NO: 174645 - DNA, 517 bp, Cannabis sativa
gacgtcagaatattaacctaggtgctgggtgtcaaccttggcactggatcctgaacaacctttagtaaaatagacataactccctcaatattggttcgattgatgggattcaacttgaattttaaagatctttctagtcatgtcctacacccatattgcaattctaaagattttaagttcaaaattcgtccccaagacaagtgtaattttttctgcagattacccaaaaacgatctaacggacgagtacaaactctaaaaattgacgatttttgtcaagagtcaattttagctattaggtcatcactaatggtcaatatcaacccaaattgatttttccatatttttgtattatttcattattattttaataggacctctttccctaaaaggagagcccactagtttattttttacattcaggaaagagcccataaggtcagagtatctctctttactttctctctctagaaattagagctcttgcctaagtcaattttcttttaatttttgtgagc

SEQ ID NO: 174646 - DNA, 623 bp, Cannabis sativa
ttcagtgagtgtgaaaattgagatgttcatgttcataatttttagaaattcataggaaatctgaaattgtatttttatcataactttttactcgggtgtctattttggacgttctatatactgtttcaaagattgtgacgagctctacgatagggtgtatgttttagagccaaattataagttttaatttagtgtattcataccgcggggtttgatagaaaatcctaaattatcttacgcgagtgttaagtagtgttttagaataaacactcattgatttattattgttatgacatagggctcaagagtatcgatcgttcttcaagctggtcggccaacatacctgaaccataacttgaggtaagaaaagtataatgtaccacatggcatgacaaaatctgaaattttggattgtttgataaggcaatggtaatgtaatgatactatggacataatatatgggctcacctaattaggtgatgcaatattcttggcgacgtatcgaccgcgggtacgggcgtcagtgatatgaaattgcctggttatggtatagattgaaatcattattgggtttcttcctagcgacgtatcgggcgtaagtacgggcgtcagtgacatatgat

SEQ ID NO: 174647 - DNA, 681 bp, Cannabis sativa
ccaattccttaacaaatgaactatctgctataaaggacagtttaaagattggtattatgcaatgtggtgcccctttcagtgttcaatcaaactacttacaaagcggtgttactcatccaaaaacaagaagaagggtgttgggaggtttatatggtttaattcaggagtgtcataagctactgcaacatcctcttgttactggtttaacttttatttttagagacaccaatacagtggcccattgtttagccaattacgctttattaaccaaggcgatagccatgtggattggggtttcaccatcttatgtgagtcaagctattcggtttgactcaccatttcttttgtaatttctcttctagtaataaattttatttaaaaaaataggtgtatcaatgcatccttatctgttttggtatttaaaaaaattgtccaaattttttctagtcatatatatatatatatatatattgtagttatttaatacatttaacaaaattttgagaaatttataaaaatttaagacgctaaaaataaagtttgaagagtctgttgcacgcataatttttttattttatacccgtgtgaaatagatggtttgaacattaatttgtatattgtaaataattcttaatttcacaaaattttataggatgtcttaactaactgcaacatacacaa

SEQ ID NO: 174648 - DNA, 625 bp, Cannabis sativa
gatatgtgtttttgtagttaaattgtgattagaaatattgaattatgcatgttttgttggctaatttgttgaatgagcaagctttgagttttagaactcaagcttggctcattaatggtgatttttaattttgagcttgggtagttatttcattacttggaatatgtctattggggtataatatgaaggtctggaaggtttggtaaagtttcgaattgatttggttagattttggaattattggggatttttggtataaactgtctaactggttttaccgaacctgtaaaaccggttacccaaatttgctgctgggttccccaaaagattcgtgtggtcgatttgtgctagtttcagagctttagttggttaattccctactagtttagggtgttgtcatcttaggttacagtagataggtttttggtttaaaacctaagtctccggttgtgatttagcgtatcacttatccatgttattatcgatgtgatttacgagcctgtaattcgccgagcagtttttccactcaagttggcctgcacacttgaatttagaattaaggtaagattagtataatgtcatgcatatgtttttacatgtttaacatacatgttatttatgcctg

SEQ ID NO: 174649 - DNA, 641 bp, Cannabis sativa
cataactttctaggactcccatcacttgcctttgataacaatttttaatcaattttttgtttctttaattaaaaaataaaaatatttttttaaaatatattctataaaattatttttattaagagttacttttaaatgggcgtttggtaatattttttttttttaattttttaatcacaaaaatataaaagtaaaatttgtgtttttaaaattttatttttaaaaaataaaaatgtgttatataactatttttttttttaattttaaaaatagaaaacataagtgtgttctataactttcatttttatttttattttagtttttttgattttatttaagttgggtccaggttcgggtctaggacatgggtcgtgatttgagtttggaactgggaccggggctggagttcgggtcctaaggttcaggttggggtcggagttcaaaatattaattaagaaaaaaaaaactgtttaaaaaaattatgaaagtagtttttttttaaaaaaaaaaaaattaaatttttaattattaattaaacaattgaaaagtaaaaacagttttattgaacatgtttctggaaaatattttcaaatttttaatcacaaaggttttctagttcaatactattaacttgtggacta

SEQ ID NO: 174650 - DNA, 571 bp, Cannabis sativa
acgtgccactcgtatctactgccacgtcacagtgccaaaaatggaataacatttgccccccaggtttgcatgggacttccgaagtcacccgtggacttcaccttgtttggatccttttttgaacgggtggcacgtgttcgatgcgtctgttggtgattcgacataattctgaccaagagtctcttcgatatttggctcattaatgctgattgctttatgtctcgaatttctccaaaaatttgcacgctttgacggttgctcttcaggtatttgattgcctaatgtttacttttggggagaaaccgaggcatttaaatttcgaaatgattacctttctcactttttttgcttataaatagggcaaaaatccctaataaactacttttagtatttttctctcttgacgatttcagagcaagaacaccttttcctcttaaatccttcaaagaatttccaggaagtgtcgatctgtgtcatctgaatagctctaaagcttcgaacagtgagtaagttcttcatccttttcctctttaatatattttatttgtttttattccatatcccaaccaaa

SEQ ID NO: 174651 - DNA, 700 bp, Cannabis sativa
tgaattttatgctcagccctaatatacactatcattaactaattgggaaaaagcctaaaactcacctccccaatcagttcttagttatttaattttcctatcaaactggttttcaacaaggtttttaaagtgtgtaaaggcttgtaaagcatctaagatctgttttaaagggaagaaccaagtatacctactataatcatcaagaaagtgtatgcaatatttgtaatttttatgtgatgcaataggggaatcaccccataaatcagtataaattaaatcaagaacatgagtggcacgactgatggaatttttaaagggtaataaatgatatttaccaaactgacatgcatcacaaaaactatgtgtttcattactcttagttttgacattacataactttaaaacttgatttaaaatagaaattgatggatgtcctaggcgtctatgccaggtatcctttagggaattagaaaagagacaaacattcttagagtgagatttggtggtagatgcagatggatgaatttgagatgaaactgtggtgtgaaaacatgctcgattaggactaaaacagtacaagccatctctaattgttcttcatagcacctccatccctgttgttagatccttcacacaacaaaaatcaggaaagaactcaattgagacattattatcacatgttaactttgacacactaata

SEQ ID NO: 174652 - DNA, 567 bp, Cannabis sativa
  modified_base (214)..(220): a, c, t, g, unknown or other
ctctctctctctctctctcgctaattgatagttgtttagttcctgctgatcttcattgtcttccctttctattgcttcaattccatctggaacatcattagttggtgctgtaagagcaacctgctccacctcaatctaaacattctcatctaaaccagcttcactatctttgtaagtgctcttggttttcatggccatttcatcttccttgaannnnnnntctctactaatcaaacacttcttgtatctaggttctaaacaccacactctatatcccttaccccttcagggagcctagaaacatgcatttcaatgctttaggttgcaacttatcttgtctaacattcacaaacacagtacatccaaatactttcaagtgatctaagtttggtgttttacctctccacaactcttgtggggtctttaagttgtttggcacagatggtgatctattgattaggtagcaggctattttaagagcttctcctcaaaaggttttgtccaaactagctcctagtaacatgcacctaaccctctcaatcaatgttctattcatcctctcagcaa

SEQ ID NO: 174653 - DNA, 523 bp, Cannabis sativa
tgaggatgaaatccttttaacggcgggacaattgtaatgaccgcttaagtttaatatgagaattagcaaataatttggatgtaatttggaattagaattttaattataatttacataattattgtgatacatttaaattttaggtgtgctatttatgttatatatgaaattttatgtttttttgtattttatgcccagtgacagtggaatgtgacgtttagctgatagagtcactttttcctatgatttagtattttagaaatagtgggacaatttagatagacattgagaatgtcaggaatattggtagttttagctttgatcaaaatgcccttaggtggcaaagttgcttcttggtgaagcaagggcaaaatagtcttttgccttgagttgaccattatcttttagtgacttagaagattaattttaagtttatgaagtttgattttatgctacattgtagactattagataaaaattaggtttattcatttttacaaattagacaaagtcactttctccc

SEQ ID NO: 174654 - DNA, 652 bp, Cannabis sativa
atttgaaataaccgcactacacatatacgagtatagtgcgagtacaatatttggaccatctcaatatatacatattttgaattcttttaatgattatatacatttaatttattatatttatatattatcatatcatattttttaatttacttcttaaaatttatcaaatttatggttattgtagttttttttttaatgttttcatgtgtctacttagtatttttttaataataaatatacagacgcgattgattttgagtttaaaatgcatttagaatgatatttaattagattttgaaaataaattattataattattttttatgatcgtgtatgttgtactaatctaagaccacatgtaaattttaataaattctgaatactttacagtgttgaaaataaagttcaaacaattacttactacgtgtataagaaaaaatagttagacgtgcaaaaaaatatataaaccttatttttgtcatagttaattattcaaaaatttctaaaaatttaccggcaaccataaataattaaaatgtaaatgttaatgaaaaaaaaataaacttaaaaactctcttagatgccaaaaattaggggtgtgcataaatcaatccaatccaatgacaaccgaccgatccaatcacaaccgacc

SEQ ID NO: 174655 - DNA, 647 bp, Cannabis sativa
caacgtggagagaaatgggcttctaattaggttattgaaaaaagcaccctatagacctaactttgaggagtaccagccactacatatatatcaatacacacaaaagggtctaccattattggagagaagttgtagaaaagaaagagcatgatgatgaagaagaagaaaaagaaggaaacacaaggaattgaaggaggaagataaggacaagaagatccaacctacaacaccatcaatctaggctttgttctcatttctttctttcttctttattttgtattttcttattttgcatagctattctagcactcatggatattaattttctattttggtttatgtttgctactttagttatgagctaaacttttgagacttgaatggttaaaaatctcttctgtcatgtattttaaatttgaatgcattacttaagctaaattatcattattcattcaagtgagcttcatgtttatttactattattgtttaaaaatcaatggcaagttattaagctagatttaatactggaaaggttaaatctagtagttggtacttgaatgatgcaatgtaaattcttaggtttaggtttttcttagtaaaggaaatagggatatttcataacttgcataacttgagaattgatgttt

SEQ ID NO: 174656 - DNA, 520 bp, Cannabis sativa
  modified_base (66)..(70): a, c, t, g, unknown or other
agacaagactaaaacactcaaacttatgtcacaaagaaaatactaaaacactcaaaaccatgtcannnnnataagactaatcgcagtagcaaaaatcgaatcgcaatagaaaaaggccctgaccaaatcgcacctatgccaaggtaaggttggtgagcctggctggagaaaaaagttaatagtgtcgtatctttgggagttctacttgcacccaacaaaataataagtacactttaattttttaaaaaaataaagttaaaaatatttttataaattactctaaatatttttttaaaaaaataaaattcttttgtgttaattttaattttattttcatattttttttaaatcataaataaaatttttttaataaaatttcatataatttgttattttaaatttttattataatatttaaaatataatttattgtttggtagatatattttttaaaaaatatgaattaaaaaagaaatatttaaaaaaatatatataattaaaatatatattttatataaaa

SEQ ID NO: 174657 - DNA, 613 bp, Cannabis sativa
ttatatatagatgtgattatacaaatatattttttatgtttaaatatatatataattaaataaaaattttaatataaaatatgtacataatttttatttttaaatgcatataataatattataaacactacaagaaatatcacttttaccagctcattttgcaaactgtgctggcaaaaatgtcaaagttttaccattgcacatttgcagaggctaaaatctaactttaaaatctcactttaaagtcatttttgccaacgcttttcattttgtgctggcaaaagatttaatactaacgttgatttttcaaccccttttgccaacacatcataagtaaattccattttaccagcacaataccaaacttttgccaacacaaaaatgagctggcaaaagtgacatttcttgtagtgaaaattaataaagaatattttgttaagtaattgagatattctgttaaagttatcgtagaaattaaaaaaaaaaatcccattattgttacatagttacactttttatatagaatagatatatatatatatatatactagatagaagttacgtgtgtcaagtcacgtatattaattttatttagtttttagtttttttttaa

SEQ ID NO: 174658 - DNA, 581 bp, Cannabis sativa
ctactcttgctggtgtttagaataatcgagatacgtgtttgattaaactgactgcccctagtccaatcaatgtaaggcgacccatcaatatgttataaactgatggtagatcaacgactaagaactcttgcatcagtgttgtagaaaatggtggctcttctacagttaatgggagtccaatgatgccttggctggcgacactatccccacttaatccgcataagctcaccatacaaggttttaactttgcatcttgcagccccattttcttcaatgtatctctataaaggatatttaccgagcttccatcatccacccagactatttattctcttgttggcgagttgaactgcaacaacgagaggatcaacctatgtcctttgtatcttcctccgagaatatgattggaggttctttagttttggccttttttagtggttctggagcaaacaccgattgctcgttttttattttattgacatatcttttctgggcattattactctctccagcgagatgcagcctgttgggttttatgccctaataaaactcatttcaatataatcagaattacttattaa

SEQ ID NO: 174659 - DNA, 548 bp, Cannabis sativa
atataaaataactaatttaatttatttttgtagttagtcatgtaaaaaaaataatttaatattaaaaaataaataatctaaaatgtaattttttttctagaatttattattttttgttttatttattttaatggagtacacgaaaatggacttgaaaaaatattttattttttattacccacagtgaagacgaaaagcatgaaaaaaactagaacaggagaaacttacttgtagaaccaaccgtcgacacccaccactgtaacaactacaacaatggcagaacacgaataatgtgcaccacacacttactttcttagagtatgtacacgaaaataagtgaagaaaatggaaaatggaagttttacctaagctgaaacgaaaatggaaaatgaagttttgccctaatgtgaaagaaagaagtagaaattcgaagtagaagaaggtgatgagtgaagaaggaagaaaaagagtagaggacggttgaggttgatatgactgatggtggtcatgttagtttttactttttaaaatttattaattttttatta

SEQ ID NO: 174660 - DNA, 566 bp, Cannabis sativa
  modified_base (533)..(535): a, c, t, g, unknown or other
tctagacttggagcctgactactgttcaccaattacagcagatggactactgttcaccaagtagcaggttgttttatcaacttctccccaaaactttctttccaaaccaacacccttcaacatgcatttaaccctttcaataagagttctattcatcctctcaactaagccatcttgtcgtggagtccttggtgctgatttgtgtctcccaatcccaacttctctgcaatagtttgaaaattgtgtggagcaaaattctaaaccattgtctgtccttagtttcttaactttctttccagattggttttcaactagagttttccaattcttaaaagttttgaaagctttatctttggttttgagcaagtgcacccatacctttcttgagtaatcatccacaatacttagaaagtaatttgatcccatttgcccttatttaaataattatattaggctaattatattaattagtctaacttaattaaaaattaattagcaacataattaaatttaaaatatatgaaattaatttnnnattagataattttaaaattaatttagaaaaa

SEQ ID NO: 174661 - DNA, 664 bp, Cannabis sativa
  modified_base (237)..(246): a, c, t, g, unknown or other
tttgagatcggaccaaatgaatcttgcgtgaatcatttgatcaatccggaccgttttaaattctctaattcggtcatggttttagaaatctcggtgacggtttaagccaaacaaatctgtataattatatacatatacttagcatatttatttaaaatgaaatgttgatatttgatattgagcttatattgttacgataataaatttttattgttacttatgtattataaacttatnnnnnnnnnnaaaaaaaaaaaaaaatacactaaaaaaagtaaaaattattataaaaaaaattagaacaactacgaaatacaaaccatggttcaaaccaaaccaatctattttttagtggtttggtttcatttggtttgatcattttattggtttggtttggttttgaatttttaaaattataatagtggtttagtttgaaaaaattaaaaattcggaccaaaccaatccataaacacgcctacataaaaatataaaaatttgacaaaaattaatgttttatgtaattattcattttaagtacccaatattttaagacatgttctatatgatttaatgattgtatagtactccaagttagtgacggacccaagatttttattttgtgggggcttatttatcataaaaaaatatttatagctacattata

SEQ ID NO: 174662 - DNA, 706 bp, Cannabis sativa
aaaaaagaaaccaattttataacacaatgtataaaaaaaaataacacaaaataagtcaaactgtttataattaaaatacaactgtatctataacaatgttataataaataaaaacaagtaacaactcaaaccggttataattaaaacataactaattctataacataattaatacaaataaataacacagaataattcaaaggggatataattaaaaaacaaagagaaaatcagttcatacaatactaaaacataaattaaaaacaaaactagttacataacgaagtgagtaaaaacgaatatcacatgatatctcaaaaaccaattgttataataataataaaaaaaaaaaatgtgataatcaattccaaaaatattgagacataaaactaagcagaactgattccataacaaaataagtaaaaacaaataacatacaataactcaaaatataagataaaaaaaaaaaattagttatatttatcaactagtgaaaaatctaagacaaaataatgtattccgtaaaacaaccaaaataaaaacttacacacaataaccagttaaataaaataaataaatcaaaaatcggttcaattagttaactaaattgttgggaaaaatgataaacttcaagcacagcgaaataacaaagaaatgaagtaaagtaatttactcagtttgataaaactaccaaacctacaaagag

SEQ ID NO: 174663 - DNA, 673 bp, Cannabis sativa
aatgttacttttttttaaaaaaaacaactcaaaaaaatgtataaatattaaatattattatacattaatatattattattattttagttaactaatatatattatatttaatatatatataaatttatattatattatattattattaatattattataattatatataataaattttataaattattaataataattaatattagtatttatatttttgtcaaatatatacatattatttatttcttgctatatttcagtttttatttatttacgtacttacttatatggtataggcactgccttcttatttttctgttattttaattttttgtgatacttggtgtataatttactgagaacgaaaattcaaaatcgtttggttaaaagaaaattattgtgggttgaaattaaaattgaaaattctacatcatgaatcaaatcaagtaaatgtggaagaaaaaactctcattgatcatttttctcccatttatgttaatcctccatcatgtgttatttttcctgaaataaatgctacacattttgtgttgaaaccttctataattcaatttttaccatctttttatgggttagatagagagaattcatacgtgcatgtgaatttttttttagaaatttgtctactttcagatttcaaaatttttctgatgaa

SEQ ID NO: 174664 - DNA, 736 bp, Cannabis sativa
gttttgttttagatcataacaacagactcacaacaataataacagagacaaattaataaattatattaaaaattagatgggtcaagaagtgttcatcgtccgtgaaacaaacctcaaacaaagatgcttcattagaggattcacaaagtgggacgacttatgattttgcagagtctttgagtttactggctttcgtaaaaacacccacaaaccttcgatatgtgcgaatataaattcatgcaaaagcgtagaaaaatcaatacaaaatggggaaacaatatgggaaatagggtgtagtacctgcagatgagactgcctagctacagggtggctacaaagaagagagaatgagaaaaagatgatcttgaagggttttaggaaaaagaaaaatcacctctcccaattttcctatcccaacatagccctccaacaaataactgccacatgtttctattagcattccctcagcggcgccaatgtgtttatattttttatttgatttgagagaaaaaaaaaactactaagtaataatagcatgacattttaatttcaatatgagaatttttttttttttttaaattgttacaatatgtattatgagatataaaggtatggaaaattgtataatgtagccctttaaaagagatgtaaattataattatttaagacatcttgcaaaattttaaaaaattcgaaaaagcttaacatactaaaaattatgttcaaatagtgtgtt

SEQ ID NO: 174665 - DNA, 779 bp, Cannabis sativa
taaaggctagggatttactacacaacggatgtgtaggatttctagcaattgtgattaattctgatagggccgtgatactcggacccatggaggtcagagtggttaaggaattcttggatgtgtttcccaatgaattactagggttaccaccacagtgagaaataaatttaattattgattttgtacctggggtagaacctatttcaaaagcatcctatcgaatggctccggtagaaattaaggaactgaagatacaactttaggggatgttggatctagggtttacctgacctagtgtatcgccatggggagcttcagttttgtttgtgaaaaaaaagatgggactctttggatgtgcatagactatcggaagctgaacaagttaaccattaaaaacaagtaccctttaccaagaattgatgacctatttgatcaacttcaaggtaagaccgttctctccaagattgatttgcgattaggctatcattagctgagaatccgagaagaagatattccaaagaaagctttccgaactaggtacagtcattatgagttcttggttatgtcatttggattaacgaatgctctaacaactttcatggatcttatgaacagagtattcaaggatttcctcaataactttgtaattgtattcatcgatgacatccttgtgtacttttgttcagaagcagagcatgaacaatatctttgcatggttctgcaacgacttagggatcataaactcgatgcaaaattcaaaaagtgtgaattctggctgt

SEQ ID NO: 174666 - DNA, 660 bp, Cannabis sativa
gttgcgacttgttgtttgactttgaatgtgacagtggaaaagagttgcaagtttataattatggagagcgattttaaggtggttatcaactctctaagtggactctaaatgcgagagtgatgaattattctagtcattgtcaaaaaacttcatctcttgttagctgtttattttctagtattgtaaggacatataactttatggtccataatatgactaagtggatgtttgctcacaattgttatgatttttgaagggcatgtttacttaaaggaaataagaatcaattgtatacaattatttattaaattttagaaatggaaaaagtagtggggcctacacaaattacggaaaaaaataaagaaaaaaattatctccttatttttataaggaatgtctttctatttcctaacttattttattctaattttaattttattaattaaaaataaaaaaacaaatataccctttaaaaatttgtaaaaaaataataattacatattctaacaatgacaattttgtcaaattaaaatattttgattacctttttttagttaagtaaacaaaataatatgattctggttttttttttttccggacagtttagtaaacagcataataaaatgctgtttccgattattttatattttaaactgattc

SEQ ID NO: 174667 - DNA, 565 bp, Cannabis sativa
ttgcttaccatttccaactgcaatagtttctggcccattgtaagtggctgccatatccagattggaggtgtcaacagagacatggtttgtagcacccgtgtcgatataccagcagtcatcatctccaatttcagggaacatagtggtggtagcagcctgtggatcatatggaaaatcagattcaaccaaaaaggcttgagtgggaggattaccatatttgggagtgacccaattcttgtcaaagcgatagtggaacacggctgcggtatgaccagttcgaagacacacttgacaaagaattctagcaccagaaggtctgccattgtatctatttcgattgttgtcgtgtgcagggccacgggaatttgcattgggatgtctgtatagaccatttcttgctgcaagatttgcttgcatttttacagagagatctgtaacagattgatgatgctcgattcgagtttcatgtgagaggagaagtgcctgaacctcttcaaatgaaagaaagtcgcttcttgaagtgattccagagaccactagatcgaattctggtccaagaccatta

SEQ ID NO: 174668 - DNA, 542 bp, Cannabis sativa
acttaccgtttgaagttaggggttggggcaatgcctaggaatttcgtctacaaacctttgaacaaagcaagtatcgctttgagaaaatgaagtcggaggaaactccctagaaaatggtcaaggataaggatggcatgcaagtctatggacgaatttaatggtgatccttaatgaagaagtgtaagggtttttctccaattttctgaaatggttcaaaggtggttcctttcccttattttatacccatgatagtgatttcaaaaatgatttgatccaatggacgtgatttgaagtggaagttgaaaagatggtcatttaattctgatgtacctcaaaaccacacaactgccaaaataagagggaatgcgtcttttcaaaaatagaggaatgttacgaaaataccctttgcaatcattaaaaagttttttttaattaaaaagctttttttaattaaaaagaacttttaaggggaaattgttacacctgaagttcggtaagcacatcagatgaggacacgtgtttagctgggaaagactcaaaca

SEQ ID NO: 174669 - DNA, 560 bp, Cannabis sativa
gcaacaatctccccattctgaaagacaacatactcgtgttgaagaggaacattctccccattttgaaaggcaaccactcatgttgaagagcaatatactccttattatgaagagcaacctttataggatgatgttgaaggtgaatctcatcaagttgtgcgagaaaatccaaagagggtatcaaagcgttcacactacttggagccaccatatacagacccttttcattatactaaagctcatcgaggtgatcatatccaatatgatcctttgagaaatattgattctagaaaacaaaagaagtttgatgaacatttaaaaagtggagaaagtattaattgtggtcttggtgaacgaactataatatatttccaggagattatcaaggaacatgaatggctatttagtgaggtatatgacatataattttatgatctcttatatatttaacacttacatttgcttatatgtgtacaatgttattactttttatagcatgttgatgatgctctgtttgggattagaaagcgataatatttgtatcaagatgtgatcgcaca

SEQ ID NO: 174670 - DNA, 550 bp, Cannabis sativa
aggaaatccggcaagtgcagtagttaattaacgtaggtctttgtcaataataaaaaaaaacattatattatttattatatatattaattaaaaaaattatttatcatgaaaatgttataatttttttttttctgaaactaatctttttaaaattaaactcagcgaaaacttcgtaagaaaaaaaaatgccaagacaataatattagattttttatttgagcttatattaacttttgagaaaattacaatacctgacaaaattttcaaaatattcttaacaatagccttcaacattttaatatcatcaatataaaaggagggtggttcaatgttcggtacaagtaccgattttctagacagctaatattcatactttttctcattaatttgcttccctactttcattcttcttctttatttttttgtaatattttctttatataaaaagataaactattattataatgtatatttttctctctcttatttttttttcttttctattaaatttttttaaaaaaattctaaccatattaatgattgtttgtac

SEQ ID NO: 174671 - DNA, 577 bp, Cannabis sativa
aatcttgttgtatggctcagacccaattgaaagatcagattttttagagacccaattgaagaatacataagccggttgccaatctgaatggtgtctatggagtacattcaaaaccaaatcttctgtcaactcgaaaccacaacgttcaagagctttctcgatttcatttgtgggtttttgccttcgaaaattgatgatgttttgaataaaaattgctgtttctccaattgggtcagtggaattcgatggtagggagtgtagtaatcgagttcttggattgaaaatgaaactgtgattatagttacgtagaccgagtaagaagaaacccatatttcttggcattttctttagtgttttgttttcctctgaataagaaaaaagaaaactctgtgcttttggtccaagactccggcggtggtcgacggctgagctggcggtggtttcttctgatatcacactttcagttgttcagactcaagttaggaagttgaacctgctgcaataatttttactattgttaataattcattaagggtgcgtttggaagtaactatgtaattactaggtaaggtaatta

SEQ ID NO: 174672 - DNA, 536 bp, Cannabis sativa
gttcttgttaacatggtatcaattgccaactgacattcaatatgtcatcttcaacaacctctgatcctggaatcgctgctactgctgccatggccactccccctaatcctccttagaacctgttttctcactctctcacgtctaaccttacgatcaaactcgatcgtcacaactttctctcttggaaatctcaagttataccaactgtgatcggccatgatctggatgaaatcctcttcaccggcacgtctccacctcagaatcttgtcaatggagctgtaaactctgagtatactctgtggaaaaagaaggatcaattactgctttcatggcttcagtcttccatgtccgaagtcattcttgcatctattgcaaatcatacttcgtcacactctatttggccggccactacaagaaaatgttacattaccggcggactataaatccgctgctaatagtagggttaattttttaagaaaataaaaaaattggtttgtgcggggattgtcccggtattaaattttaaatttattagc

SEQ ID NO: 174673 - DNA, 617 bp, Cannabis sativa
tgaagaaaagcactctgagtttcatagattaccaaaggaagcacaacctttaacctatttgcaaggacttttgttatgaccttgagtagcacattacaaagcaaaataggtcttaaatcacccatgttgccaggctgcttttttcttggggataagaaccacatttgtattattgagcccagcagggagaacccctgtcagaaagaaattttgtacttgtgcaacgacaaccctgccaaccacgtcccaacatttttggtagaaacaagtgtcatgccatccggacccggagccttgttagggtgcatttgaaaagagctttcctaacttcatcttcttcaacaggtttaagtaaatcctcattttgagcagctgagatacaaggagaaatacagtcagaaatatgagaccaatcagagccgttgaaagagaacaagccttaaaaataacccatcattaactcagtcagacccgtgtcccaaccatgccaaatcccatttgaatctttgagtttggcaatcaaattgttgcgacaatggaaagaagcggacttatgcaaaaacttactattgttgtctcctgcttgtagccatataattgcttggaacgctgcctcc

SEQ ID NO: 174674 - DNA, 505 bp, Cannabis sativa
caaatctatttgttagagatttactttttacgaatttaaaatttgatattaggaggattagttttctgcgaataaaaccaaaatttaaggttgaattttagtttcgaactagtttttctacacttttttcatcaatatgaacagcatgtgtttggattgattctggtcttcttttcaggtaaagttgccggaattaatggtggttctttgtctggcttggtttctttttggttggcctactggtttagttgctggaaggtgtcattgttgaagaaggttgttcgtagtactgaatggtaagagcaaaaagtatttttgtgaattttttttattgagctgtataaatatgggttattatagcaaatggccccaaatcataggactatgttagtatatgtcctcattttaaaaaattagagcaaaaaaccctaaatcataaaactatgttagtaaatgtccttatttcaaaatcattatttttttttattttttagaattagaagca

SEQ ID NO: 174675 - DNA, 565 bp, Cannabis sativa
tcaccggcaaatccgaacaagctctcggggagaatcatgccaagtacactgcattcactattctgactaaagatatagaaagtatttacatggcgactcagtcgctggtcccataggagaagcccgggcccatgaagaaagatgccaacaagagggacatgataaagttttgtcggttccacggagactacggccacgacactaatgaatgcaacaacttgaagcaggaaattgaattcctgataaggaaaaataacccacacctgcagaagtatgtcaagactgatcagggtcagaggaccgacaataaccaggatttactacctccaccggtagatgggcatctgcaacttattattggaggcccgcacatcgctggagatttgggcaaagttcaagagaggtatgcccgaacagcacagcacgagcaagaagaagttatcctggtcgtggaagaaagaagtctcaaaattccactagcaggagaaccgagcataaccttcaacgatgaagacgctgtcaaaattaaatttccgcacaacaacccgctggtcgtggaagtcca

SEQ ID NO: 174676 - DNA, 730 bp, Cannabis sativa
acatataatatattaagagagaatatttatatccatctttttccagaaatatacattcaaaaaaaaaattaaaattaaaaaaaaaaaaaaaaacaaagagaaaaaatgtcagagggcccaaggcacaccactagctctgttattgtgtgatagtattaacataccacatcaccaaatataagctttatatgtaaagctttcatatgtcatcaattatcactctaaaattatagaaaatataaaaatgccatgacaacttgaaacaacctataatcaaactacaatctacaaaaaaaaatgtcaaaagaacatagataactgaaatttaataacattcaataatagtcgggcaaatgtcaaatgtgtgtatatatatataaataaatcaataaatatcaattttaagggtatatatttatttgttttcatgtgttttacttttaacaaaacatagggactatcatcacgtacctgtaaattaatacctgagctcaatgttggtaacaaattacaaggtaccaaatggatatattcccataattaacaaaataacattttacaatgatttccagtgtaggctaactaatctcattttttttttcagaaacctaattttaattactgacaaaggatatttttatatgactaattagtaatttttccctccaaactttacatgtactaaattgtgctccctgaacttttttggccgttaaaaattctccctaaa

SEQ ID NO: 174677 - DNA, 559 bp, Cannabis sativa
aaaaaaccatttttcactctcaaattgtctctttctctctttcggcctagagcagctagggtgtggggatttttttgtagttttctagctgatcttagcaaggttcttgtgatctcaagccaaggtatagttctttaaacttgttctttgtttttttgaagtttaggaaatgagaatttttcatgtttggtgttgtcgtttctgttagttgttgtggttgttttctataacttatatatgtttaattgagtggattggaataggttttgatgaatgctagttggttttaaccaagtttggaatttttttaactcaaaactttagtttttatgagtgaaatgttaattggatttgtgtagctgctgtggtgatttgttgttgtgctctgaggtttagatatgggtttttatgttgttttatgcttacattagtggctgttagtggattgagaaagctttggagttttgaactcatgcttggctcattaatggtgaaattcgtttctgtgagtgaagcttggttttatcacttggtttatgttcattagggtctaattagc

SEQ ID NO: 174678 - DNA, 618 bp, Cannabis sativa
acaatgatccctttcaaaatgggtggactgatatagctctatctgttttagtatctgaaataatttttttgtcaaattatttttcataatcatatatgttataattatttaagatatcttgaaaatttttaagaaacttgaaaaaattaactgagttgaaaataagattcaaactattttagactctttaaataatgtattgtaaattatttcaaatttctaaaaattttgttagatatcttaaataactataatgtacacgaatataaaaaaatagatgtcgaaacaagtaaatagtgcatcattgtatctttttaaaatgattacaattttaagttatatatattaaaaaaataaggagagaaataataattacaattaataattctaagtcgtgtctattgacatggtgtgatagtttttgtcctgtttttgcttggttttactgtaaaaatcttgtttagtcgagtgtgattgaatatggctagttcgagtggggtacgtggaggaggcagggaggatgtttttaattttcagattgaagaggaagacttatcagagttgacagtcggccatgagggagaagaagaggggattgatgacagatggtgtttagtt

SEQ ID NO: 174679 - DNA, 511 bp, Cannabis sativa
tctctctctctctctcttaaagtatgttatgttctctttttcttagagttctgttagtttacactgatatatatcatacatataatgttataaacaaatttttatttaatcctttaaaactaaaagaaattatctaatttgatttaaattcataatttaaatttaaatataaatatcatgtaactgattaacataaattagttaaattattttattttattatttttttaattaaataattattcaataatatatctaattcaataataaaaatataattaattaatttaatttgaattatattaaccgataaaataataaaaaaaattaacatgggcctttatatgttaccctacatgtgtgggtcatattttaaggtccaaaattaatttatcaattttaccataaataagatttattacttattttgtcaataaataatagttgattaattatcattaatctcttatttcacaagaattataataaatattatttttactaaaataat

SEQ ID NO: 174680 - DNA, 510 bp, Cannabis sativa
ttaaattaggataattagattttatttattagaaaaaaaatgtgataattctcttattactaagcctaataataaattgtgaagttgaaattgaaaaaaaaaaacccaacccaatagcccatttaaattagttatttattttatggtaaaaagtgacaaaaaaatgattaatataatttatttttgaagagtacttttgtatgatatatatttatatgtgtcttaatatatgtatccttatggtatccaataccatattaatgtgacactttacaagtggttagcagtttcttatattatttattaaattaaaatatttaggactcgatattattttacaccaataacgatatgccactttttatagtacttagtactataaggtgccttttattattctcattattttatatatgttgtataaagctaattaacttcttctattgatatataaaatactacatactataaaaaattgatgaaaatatattttatttggcccctccttat

SEQ ID NO: 174681 - DNA, 509 bp, Cannabis sativa
tttgtgattacttataaatttttagattattctaaataatttataatagtgttaaaaataaagttttaataattatgtactatgggtataaaaaaataattatggatgtaataatttatttgaattttatttataagattgtaaattattcaaaaaataaaataaaatttataaaagtggttgcatattactaaaaatatgaataattatgaaaaaaaataaattaaaaaataagaaaacttacaataatactgaaatttgagttactttttataaaaatactgcgacacggaaatctttctaaaactactatgtttttataaaataatagtggaacacaaaacagaataactaaaacaaccatagaataacagtgaaaacttaacacaatactcagcgtagaacatagacagtacttttaaaaaaattccgtcatacaataaaatagtaaaaaaaaataaaaatttaaggtggcgtttggtaacacttttttaatcaattttctgttt

SEQ ID NO: 174682 - DNA, 668 bp, Cannabis sativa
ttcatcattttccacatgcgcgacggctgcatgagaggtaccttcaaccatgaccgtgtctaacagagttcctttgtcgattttcttttgcattttcactatgatcaacggatgatgaatactaccaagcttccttcagctctcaacgaaagcaccaaaatgtctatcgagtttttcgaaaaccaaatgtaacaccctaactagcataggcgtgttagcatgaatttaaacgtacggtgcaacttgttgataatcaacgaggttactgaaaaatgtgattaattaaaactttactatttaattaataaacttaaagtattacatatatacagtcccgggatcctatttacaaaatactcttcaaaaatttgctgtacacataaacaaaagtttgtcgcccagcgactatacagcaaaagcctcgatgtcccaaagttcgtacgctccaatcctaatcgccccgacatgtacaatcttcacatgctcactctcacggctcctcagctttatccttaccctaacctacacattaaaatagcactatgagtcgacaaactcagtaagaaaaatacaacctaaacatacaaaaaacccaggttataacctggcgcccatacacccgatcataaccctaatcctcgtgtctcacacggtactgagtctagaac

SEQ ID NO: 174683 - DNA, 734 bp, Cannabis sativa
gagattacttgtttgtaatgaataataagtaaccttgtatttgtgttaattacaaaatataatttttttcttattataaatgataaatatcattttaaaatctgtattataaaaattattgatttgctatttcgttttcttaaataataatttttgttatgtattagaggaatgatttgaattgtttttttttattaaaaataaagtttaaataattttttaaaaataactacatcattagttacaagtaaaatttattaaattcagaaactgatattattatttatttattttcttataaaaacatatacagtttatttttgttaattccacaatttctaatatttattacaaaatcatcatctttctctgtattttaaaaatagcacattatatttctcatttcctactattagtttgtttaattataatatccacgtcaaaatattatattttaaattatatataatatatgcagtaaacactctatctaagaatattctattcacgaataatctctgatttgttatatatataaaaaaatcaagttccaatttggctcacgtataaataaaaataacctctaaattataattagttatacattttttaaatctcatactaagaaagtatacatctatatgagaataattatattttaataaaatatatacatatagtttataaatttatctatgtaaaattaataattaatacatgtataaatattatat

SEQ ID NO: 174684 - DNA, 573 bp, Cannabis sativa
attgataattgacatggatcttcttcggttatttcgtttgtgaactttgaccactatattaatttattaaaaatattatctctatatatttatttatgaagctagctagctaacctaccaaaccttcgatttgaaaacaaaccaaaatacacctaatacgactaataattcatcggtagtcaaactttatatttcattttctataatgataatccctcatatcatcattattaacataatcgaagttaacaagaaattggagactcagcaatttagtgacgttaaataatttttaataggaggtgtaaaaattaaattatatttgtacaaaaaataattttgtgatatttttacattaatttgtacttttatttttaattgtataattgtaaatcttaattcaaaatttaatatctcatttaatactaacttaataatttattaaaataatataaaacaacaataataataagggaaatttgaaattgtatacttaataaataataaaattggatacctaatacaatagtagacataatttgtaaagtaggatacattttactaaaacccaat

SEQ ID NO: 174685 - DNA, 716 bp, Cannabis sativa
  modified_base (182)..(183): a, c, t, g, unknown or other
gttctatttcaaggcacattttcaattgctcattttttcttaacaatttgttctattcttatatctattagtattgttattggatactagtagtgcttagtatcttctaaaggtgtcgttctgcaactggttagtaatataccttaaaaaattattatattaatatgagtaatttgcggcannaatacctaagttttatgccaagtaacagataaatacctaactcgtatttttagcggtaaaaataccttccgtcactagtgtggaaggtccgtaggtacctggccgttatgtgctaggttagtgtccacgtgtcactatgtgattagtccagatcattttatttttattttttatttgtaaatcaaattaaaatataaacaaataaaacaaaatatagtttaaaattagaataaaataataaatatttaatattcatattttcattaaactaaattaaaataaattattaattaaaacccaaaaatcaaaatatctattcgtcatcctcttcttcttcttactgctcttctttttttgctgaaaaacttcatgaaaccctaacttcttcctgctcttctttttcttgctgaaaaccattcatgaaacccttattcatatacatttatcaaagtaacactatttcatcatcatcaccttcctcattattcaattgcagcaaaagaaaaaaagggcaaaaagacacaaacacaaag

SEQ ID NO: 174686 - DNA, 809 bp, Cannabis sativa
aaagcttattataaaaccaagaaggaaattcattccattatacttgttctaagtgttcaaccactctagaaagaagaatgttcatattttctctacatcaaaaataatatagtaattaattatttttttaaaaaaattaactatttgaatggtttgaattaaattggatgttaatatttaaaatacttactgaatatatagtgcaatctcagcgcaattatttagaagataccactaagttattttcttctcttcttcatctaggggtctcaattgtttcttaccgattagatgaccttgagactgaaaaactaataatttctcaagtaatggaacaacatctacattttgatctggacgattaaatcatgtctccactcctcaattatattgaacaaaatgttaatgcctcatccatcacatatcctttttgatattgacccttctggatgtgctttattacaaacacaatttttaactttttcatgtatctctacacccatctcatgtgaaccaggcctccaggtactacttcttgtggtaaatgtatgactagatgaatcataatatcagaaaaatccggagggaaaatgttttgtagcttacaaataatctcaagtattgatgtttctgctttttccaaatctgagactagtagagttctagcagatataagtttgaagaaagtgcataactcaataattggggtgctgatcgatttatcttaatatgcattcacaccaactagcaaaaggtgttgcatgatggtatgacatgttgggttttgtgccctaaataaaacccattac

SEQ ID NO: 174687 - DNA, 851 bp, Cannabis sativa
tttaagaataatcgagggaatagagttaaaaggtgcttaaattaccaattcaactttggagggggtaattagcaaccgtcaatttaagtaggatgttagatacacaaacaaacttcttggtaaatttaacttacaaatgcctcattatattaacatgtgttttttatttaatatttaaataggaattgaattgacatttcatgttcaaaaataatgtacgtatgatagaatgatagtataacgttaaagacggaaaatgacccatttagaatataaactaataataaagaaagattattctgataagtttcccacactacaacaaatatgagtattttgggcaacaaaaaccgcccttaaaactatttaaagtcgcccctaattattattagaggtgacaagtcgtctctaaaaaattgctccaatattattaggggcgataagtcgcatctagttgagggctacacaaatttttgaagtttacttttaggggcgacattatagctcttaagagcatctccaatagtaaaaaaaaagaggatgtttgcttaggcggatagatgatgtggcaaaatattgagatgctatacaattggagttaaaagaatgccattttaagaatttgtggggatgctatatagtagcatcaatgctagctatcataattttttaataaaaaattaaaactaaaaatttattattgctaaaaattaggaaacatgtacaattttttaatagtaataagagaatttacatatataataatagaatttttggtttatgagaaattcatgggtggactttttatttatattaaaaataaaatagtttatgggtgactattcaatggt

SEQ ID NO: 174688 - DNA, 630 bp, Cannabis sativa
gcatgcaatgtgtatttatcgataactgtataagtgcaacgcatgcaatgtgtatttatcgatacaatgtcgatagtttattgataaaactttaacaaaaagaaatttggtgtacatattatcgacatgatgtcgatgttatgtcaatagcttatcgatatagtggtaattggaaagtgggaaaaattaattagcattaaatgtttaattgtacacgtgtctgacatgcaattttcttgttgggaatacttgttgggaatgtaggaaaaattaaataacattaaatgtgtaactgtacaagtgaaatgcatgcaatgtgtatttgtcgagtgaatatcaatacaatgtcgatagcttgtcgatagttgaaaaggtaagaaagattaattaccattaaatgtctaattgtacacgtgtctgacatgcaatgtgcattgtggagtctatatcgatagtgtgtcgatatgtattgccactcaaattgtagatgtttttatcgacataatatcgatgggatatcgataggatttcgatatttttatttttttgtattttttcctgcacttaccttttttgtttgaaattgcaggatcgactgtgtttcttgttgtatcgtacgatggtgtttgg

SEQ ID NO: 174689 - DNA, 524 bp, Cannabis sativa
catggcttggacccaccctgtagttgatgtatgaatttgggacctagacccgatcccaaacctgaacaaggacgaggacccagaccaagatcagaattcaaaccttgactcaaactcggacctagatcaaaactcaaaccggaactcgggacctaaacacaaacttagacttgaacccaaacgtagattgggcacccacacccagactcagacccaaactcaggatgcaaaagggatcaagatttaggactcgactaggtctaagtttgggtcttgttcgagtcctgatctggttctaggtctggtccaggtctaggtctgagttagggtcaaggttggggtccaatttcgagtctaagttcaactgtaggttttaattgtagtccaggtttgggtcccgggcttgatctaaatcctagttcagtttctggtctgggtccgtgtttgggtttgggtcagttctggttctaggttcgggtcctagtctcgatcccaatctagttccaattttgggtcccaagtct

SEQ ID NO: 174690 - DNA, 567 bp, Cannabis sativa
agcacaatatcttcaaaacactgctcctcgggaagccggcaaagagcgtcccgaggtaatcaatgtggttggtctccctcagtacttaggattgaacgtaacacattagtcaccttccgagacacgcgccttaatttttatatttgggattcccttctcgtagaccgagttgctcataggtttgacagttggtaccctagattccacatccagatcaactttcatgagtcatattatggtatagccgagcaatatggcaccatggcagatatagcgagtcatatagatgcgagctaggatttagaaccaatcgtgtcctttgatatattcaagattacaggctgtagggattttagtggatattacagttcttctaccccctcttctagtgatagctcgccttctaatgacttcggtaaatcccttaggtggagaactccactcccccttccttttttatttgccttaattgtaacattttttttttttgcagtcatggggggttttgaggatatcagggatcagaaagggaagaaaaggagaaccaacccaggggtccctacaaac

SEQ ID NO: 174691 - DNA, 650 bp, Cannabis sativa
  modified_base (505)..(507): a, c, t, g, unknown or other
agtctttgttaagataagtggaagggaagaatggttacatttacatattctctttgttatttctcaccacccatggaaaccttggaatattttgtttataaaatagtttatgtaatacaattcatatgatttaatccaatttaatttataaagtgtaaatatttatacttatgcaaattgaattgaattgaaaaattcagaatttgcatttatatagattgaatattgattgatatgtaaaaatatttataaaaaaaataaaattatacatataattaaaattttaatgtaaagaaaatagtaatttaaaaatttaatacatataatacacatatgctttaaaacttaatagataaaatgtttatttcattcttatatataatttttttttctgcatacaatttaaaacaaaaataaatatttttttatatacacaatttttttttcttttgaatttgttatttttttattttaatttgttgttagagacataaaataataatannntattttattttattgctagttatgtgaaaagaaaatatatttttttcataaatattaaaaataactaatccaaaatcacatttttgtggattatattggattggatttgagctattgtacggattggattggatccaaaatat

SEQ ID NO: 174692 - DNA, 507 bp, Cannabis sativa
tgggtgagtagggagggaggactattattggaggattgattttatttttatattttttatattgtacaaagcatcttccaccatcctctttaaacatactctttaattgaattaagaaaaaaaaaattccaacaatataaaaaatattctctataataaagaatggacatagaactctctaaattggagcttttacttttttgctaatagtataacttttttaatagtattttaattaaaagtaatattacttttttttttattattttataaaattaatttatatttaacaaatttaaattatgaaatattattaaaataattaaatactaattatagtagagagcattaaagctattcattcgatccaatctaatccgcataacagtttaaatccaatctataatagtacggattggattaattattttagatccgttacttcgtttcttaatctccaataataatctctttccatctctatttatatacaaatcaaaccaatat

SEQ ID NO: 174693 - DNA, 689 bp, Cannabis sativa
taaaatttttagctaaatgtaatacttccatcgtataatagagatgcacttaaaataatgcaatttgctctacatgtggagaatgaatagtgcattttctaaatttattttaataatatataaataatattttatttatgtatattgtatatgtttaaaaattattattttaatagtttaaaaaataaaaataatattaatttaatgatgtaaaaaaatataaagaaattgatgtatagtgtaatgtaaaagtgtgttgtaaaataaaaaagtataattttaataatgtattttaaaagataatgttgcgagtggtctaatgatcaagtgggtatgaggcttttcccttaatgagattaattagtcgtatttttttaatttttccccataaaaaaaataaattttttgtgaaaaaaaatatctattttttatacaaattgaaattcaaaaaaaaaataataataataataacttttgttcaaactttacatttatacattttcctacttattttttttttttctattttactgttttttttatttataaagcttcaaaaaaaatccttccttatatctctttatttatttgttcatgctaacttctcttcctctccttctccctctttttatatataaaaatatatataataagtgtacatttttatatatattttttaaaactttttc

SEQ ID NO: 174694 - DNA, 571 bp, Cannabis sativa
tctggtttaccagttttttgcgattttttacgatatttaataatgtatttgcaatgatagattaatctaaagtcaggaatgaagtttagtgatgatttgcgatctttagcgatatttcgcgatgatgttcgcgatgtgtttcgcgatgttgtgaattggagacatttagagatgttttcatgatttcgtgatgtttcgcgacatcgtcaaaaaatcagaaaaaaaaaaatgcagaaaacaagcattgttgtgaattgaagacatttagagatgtttcaagatttcgcgatgtttcgcgacatcgtcaaaaaccagaaaaaaaaatgcagaaaacaagcgctagatgggtcagaaaccagaaaaaaatgcggtggtcgtgggttgtcttgggtgcttcttatgggtcgtcgcgagtcgttatgggtcttctcggtcgcgggtcgtcttggttgatcgaagctcgtgaacaggggctggaagggaataatagagagagagagagaggaggaagttagacagagagagtgggagaagagagcttttgaattgtaagggtaattttggggtttta

SEQ ID NO: 174695 - DNA, 528 bp, Cannabis sativa
tcgactgtattgtactctgttcttacttaatcaattaaggagatttggtggtattccagaaccggagtagagccataaatcacatcaatttataagacttgaactagtatatatcgtggtgttgattttattattttattactttattgcatctggttttaatactatgtccatccctgttttattttcaatttttatatgttaataacaaaatacaatcccgaccaagccgtacctattatatctaggcaaaaccgaccttgaaatatagtgggttccataaatggagtagagacatagatcacatcaatttataggacttgaatcagtatatattgtggtgttgatttcattgttttattactttattgtttctggttttaatactatgttcatccctgttttatttttgatttttgtgtgttaataacaaaatataatcccaaccaagtctctcctatatccaggtaagagtagccttgatatatagtggaaagaaaaaaaaaattatttttgaattcttattta

SEQ ID NO: 174696 - DNA, 808 bp, Cannabis sativa
ctcccaccacactaacacgctatttatattcttttgttatattcacaaaaatattaaattatttctttgaatgttttttgctgttaaatttttttttgccaaattattaaaatgattggatttaaagatttttgttcaattacgaatttagtgattgtttatgtaataaattttgctctccaaactttgatatctactaaattatacccatgaactttaacatgtatcaaattatgacatctaaactttcatatatgttatacttttcttactaaaaattgaataaaaatctttaaatctaacaatcttaataattcataaaaaaaatttaatgatcttaatagttcaagaaacatgatttagtacatgtcaaaatacgaaaaacaaaaatcttaattagtaaattattaaatgaaaatgagcacatgtccagaaaagcacaaatatgatcacatataaaaaaaaaatataactttggacacattgcgacatgataatataaattggtataatatgataaaaaaatatgtattaaaacacgatatagcaaaaataaatacgaatgaactagttcaaaaaatacaacacgtgacaattgttaacaataattttataattaaaaatactaaaaaaaatgtaaaactagtgtacatatatatttatttgagtatttataggtaaatatttaaaatttaataattttattaatttacatatatgatttttataaatattgttgacaattatttaaatataattgaaactataaaatatacatatactttagtaaaaaaatatatataaaaaa

SEQ ID NO: 174697 - DNA, 570 bp, Cannabis sativa
aaatttaattttaaaaaaaataaagataaatgttgtaactatttttatttcttgttttgtaatttaaatgagggaaaaaaaaagtaaagtgggattgagaaaaaaacaagtggccagaaaaaataaactaatataatgaagaatagtacaaaatgtacattattaaaacatacattgaaaattcttttcaatggaaaaaaaaaatcatatatttaaatagattataaaaataatttatttcttttagtggtattatcaaccttctattgcaactttttactcactcttcgtgcctggaaatacatataagaaattttttttttcaattttttttttcatggcagtgtttgctatacttacaatattattcttgtaattttttgaaaaatttcaaatagtttaaagtatcaaaaatacatttgaaattttttaacaagcatggtaaattagaatattcgaaattctgttttcagtggtattgtaaactatttaaaaatttttaaaaatttacaggaataataccataacataacgaataccactataattttttttatttattttcttaga

SEQ ID NO: 174698 - DNA, 504 bp, Cannabis sativa
acccagtgaaccgatcaaccggttgggaaattggtttaccggttggggtctttgcaaaaaccctagtttgccccaaattattgatatttagagtgttgccatatatttcatcgatagggttattccaaattttatattaatgtccccgagaagtgttttagcgtgtctctcatcagaatattttggtttagggccttgtaaagcgtcgagctgtaattccactcaggctgaccggttcacctgaatacggaaacgaggtaagatagcataaagtatatatatgtgaatgtatgcttgttattaattgaatacactaataacaccaatgaaaatatagttttaagggtgttagtacagtgtagagttttagagtagttacagtattaccaatacaagtacaaatttggtactcttgtgcatgtggtacaacactcgataactcctgagagtacaaattggccctaccaacacgagtataaagtcggtactttagtgcatatggta

SEQ ID NO: 174699 - DNA, 566 bp, Cannabis sativa
  modified_base (529)..(533): a, c, t, g, unknown or other
ctttgtctccacgggaatagacattgatcttgtgagtgatcttagaagtcctcctctggttgacaaggaatcgtggaagaaggttggcatggtttcggatggacctaggagagaagttttcgtggtttctatcagagaatccagccaactcaaggcctgcaccagatgacctttgcgccaacctctttctggtatcgagaagtttcttgaggctgggaattaggtctcggcttcaggaaatgagatcttctgatgataaggagaatgaggtctgcgcagaaatcaaggctctctacgtgcagacggtctttctcgagctacatgtagtcgatctttctccaagctatgtgtagttggtctttctcctctcatcctttgtttaggaagatgacttaatggtttgcccctagttgcatttgtgtaaagacaagtttgtaacccaacttgggatttttcttatcttaaatgcgttgcactattatcattcgaacttaatataattgtgtttgcttgcgtttttattcacaannnnnacaactatattttgatcaaatgtacagtacttt

SEQ ID NO: 174700 - DNA, 567 bp, Cannabis sativa
  modified_base (379)..(382): a, c, t, g, unknown or other
tctggtatggaggaggaattgtttggcaggggagctaggctggagttcctggaatagatgcaacactggtattttcacatgcagaatgacaagtaagaacagacgtgagagtgtagcaattatcaacagatttaaacccttgtaaaatgcattgtttattactgttaagaacaaagcaatgatcattgtcaaaattgacggtatacccttgatcactagttcgactaatgctaagtaaattagcttttagtccctcaataagcataatatttttcaaccttggtaatccttcaaaatttagagttcccataccaatgacagttcctgttaaaccattactaaatgtgacctcaccacattgcattagtctgatattcannnnaaagtccttgtcacctgtcatatgtctagaacaactactgtcaaaataccacattttagaagcagtacttttatcagaaaaattagctagacatttttctttttcaatccatttttgtttcaaagctctatctttcttttgaaaaatttttaaattaccaaaataatttgttttgtacaaatttt

SEQ ID NO: 174701 - DNA, 624 bp, Cannabis sativa
  modified_base (505)..(515): a, c, t, g, unknown or other
  modified_base (563)..(590): a, c, t, g, unknown or other
cgtcggaccttcatcttcccagcctgaaaacacagatccgaaaccctttcacagattcgaaaaaaccccacaaaatcggacccaaaaaatttcttaaatctaacaactaacaattccaaacaaagtcacacacaatataaatctcaaaaacactttctaaaaaaaaaacaaaaaaatcacaccttggccatttcgaatttttccggtgaccgtccttcgggttggggttttcgtcggggtccgtgggtgagcgatcgggtgagcgtttgggtgaccgattcgtgggtccgtggtgagcgtttcgtgggtggcgtttgggtccgactgtggtgtggcttgggtggcttgggtgttggtgagttgagagagagggagagagttggctgagatgggattagcatttcaaatgggagggttagttttggaaaaggtgtaaaattgtcatatattaccaattttactaagtatatatttagagaaaaaataatagggtaaataccatttnnnnnnnnnnnttttgcaaaagttacagattggaacctgtgttttgttaaatgacaaannnnnnnnnnnnnnnnnnnnnnnnnnnnaaataggaccctgaacttaatttttgacaacttt

SEQ ID NO: 174702 - DNA, 524 bp, Cannabis sativa
  modified_base (494)..(498): a, c, t, g, unknown or other
gacggcagtggtacgccggtcaaatcccgacatactaatactctccgaaacaaggttggtattagaaaaatttcaacaactaatgcacaaacttcattttactgagatttcgtatgtttcactaattggtctttcgggaggatttggagtttgctggaaacagggtgtgttatgtaagatcgtggaagcggacaagaatgtgttgattggtacgattgagtcggacccttcggggattatctggaattttatgggcatttatggtcccccaactatgacagggagagaacttttttggaacagaattggcgacttgttagccaatggatcgtccccaacagttcttctgggagatttaaacggaactcttgcggatcatgaatgtctctactacacaaaccaaaataatgcagcaagatattcttttgatttgagaagaatggtggctaggacaggattgattgaccttggatgtctttgttgggttttatgcnnnnnataaaactctttacaatctgattagt

SEQ ID NO: 174703 - DNA, 586 bp, Cannabis sativa
acaattagtggatttgtcgtcggacttttgtcattaatattaatttattcttgacttttgacatattattgtttttgtgaggaaattacatgctatactcattttattttatttgtttttatttttaccttaattttcatattctttaagatatatccacttttaaaaataatatcctcattaaatcccttaagttaatgcaaatcatatgctatatttaagtagagagtgaaagtatattggacaacccacttaaaaaagtggttatatttttaaaaaatataatataaagatatttttgattaatgcatggaaacaaaaaaaatgtatttttcaacttattccttattttgtcctatggcaaaataagtattattttatggggtaagttgagaaataccacttttattaatcaattaatcaaatttacttctaattttatatttaattgaaacatgcctctttttatatgtattatacctaaaataccttgacatgaaagaatcgcatggagagtatcttgaagtgataggggcaaaattggtacaatatttagaaaaagaagtaaaaatgatagactttaaaa

SEQ ID NO: 174704 - DNA, 553 bp, Cannabis sativa
  modified_base (59)..(62): a, c, t, g, unknown or other
tgttgatatatccaatgatctaaattaagcataattcaattgtcaatagatcaaataannnntttgtaacaggtaaattttgtaatattctttcatctatgtataaacttagtaatatgataggacccatccatatctgtgtgtgtatatgagcatatatgtttgctttagggcgtagatgcatataggaagtccatttaatttttattattaaaatggactagatttgctaaattaaaaggatcactttgatagttttatttaggccgaattagtattgggtttattcagggtcgaccatgagttaaaatgggctatagacaaaaaaaattttttttaggcccttactataaagataaatagtattttttaaaagacaattttttaatttaggcccctaaaatgagtggccctaggcgcgggcctagcccgcctatgcttagggccggccctgggtttattcaataaataataactgtgtttttttaaggttaaattcttctcttttggaccttgtgtgagagttagggggtaaatagttgtgagtacgaca

SEQ ID NO: 174705 - DNA, 650 bp, Cannabis sativa
catagatcacctgttttttcagtgcaagttctctcagcaatgctttcaacagttgaaggaatggcttaagtggcacactcaggcagataccttgaggaatttgataaagaccatatggaaagcaaagcaatctaagttcaagaaggggatcaaagctgcgtgcataacagcacttgtgtaccttaaaaggaggagaaataatctaatctggaatggagagtctcagcaaccagccgagcttctgcagcagctgaagaagaatgttaaaactagaatgatgtttgtaatgccaaaaaaaagtaaaaagtaaagatagagaatggtttgaaacaggcaaaaatgtcttggtttgctcttaaaaattttatcaatgctgattttacttcgaggaacaaaccttttccgatctttagttttctggacgggatatctagatcgatctcaatctcttataattcttccacaggtctaacattactgcttgggtcctcaagtcaaggatcaacatcttcatccccgtcttgggaagctcccttcttcgaaatattttttcccatgtttgtgctctggctggaggatacttccttcttagccttggccactacaaggttataacattcccgagcagtctgctggtttcctctcagaca

SEQ ID NO: 174706 - DNA, 553 bp, Cannabis sativa
cccacagatggttgatgttccaaaaaatccaatagtagttaaggctaatgatctaatggaggtattggaaggaatgcgagcatgactgagatgattggttgaagagttttcacaagctcagcgccatagatcaccaacactagtagtgcaacttaaggcacataataaaatgtaccaatagctaattaaatactgatgcatgggattgtacctatcaataaatggttaaagaagcagtccccacacctagttatgaaaggaagccgaacctataggaagtaggtaatggcttaggatagttgatgctatactagactgggacagggtatttcacaaaactcgcttattaagaaggatgaaagaatagatctttaaggaaaattactatcctaatagatgttttataagttacacactcctaaggtatatgagaaatatgtatgtgaagactttagagatgaatctgttatagaaatgagtgtcgaatagaatctaagataagaagttagaaaaagatctgttaaaattagctagaggtaatatcttatgaagg

SEQ ID NO: 174707 - DNA, 610 bp, Cannabis sativa
gaaccagcccccacatcctgagtggtgagaaactgattaacagcagcagcaagagtttgatcaacttgtccttgagagaatggcaactcatccagaggataagaattagagaggtcaaatggatttcgcttgaaattggttttagaaggggcttttagagggattttataatgcagaggaggtgggaaggtaaactcatcacatttctttaggtatgagacacatttggtgagggtgtgatcaaacataccacaatgaaaacagatattaggcaggctttcatatttaaagttgagccatttttccttatggatgtttctaaaatcaacaaggatacctctagggatgggcttggagacatcaagcaagacacggattcggagaaacaagccagaaactttaaggagagtcattttatcagcttcaaggaagtctctaacttcatccccgatcattttggccaacttataggacttcattccaaagggaatggagtgaacatggatccaaaagggagaatatcgtatctgattgggaagaagggtgtcaagaccagcaggattagcactagtgaccaaacagtggtcaaaatgccatggctgaccctcaa

SEQ ID NO: 174708 - DNA, 550 bp, Cannabis sativa
gaatttgagatgaaagagcttgggttagttcaaatgatacttggtatcgaagtctcacagaaccggaaggaagagactattagcttggagcaagtcaggtacattaagaagattattcagaagttaaacatggaagatggaaagagtacagacgttcctaacaatgcgaaagagaaagaagaaatgaaggatgtaccttatgcaatggttctaggatgtttactgtacgtaatggtgagcacgagatcggacatagctcacattttaagcatcctaagccggttcatgtccaatcaaggcatggaacattggaaagctcttaaatggttagtgagatacttaaagggcacttaggattatggtctgacctatgagaaaggaaaaggataattggagttgaaaggatttgtggacgcaaattatgcctcgaatagagatacgagaaaattaaccacttcctatgttttattgacaaaccaaactgtatatgctggaaggctcagttacagtacgtggttgctctttccaccatagaagtagaatttatggc

SEQ ID NO: 174709 - DNA, 600 bp, Cannabis sativa
gtcttctttttagttctgcttctcttaatgatgcgactgtcatcaagcaaatcctacatgactatagtctggcatccggtcaattggtaaattttgccaagtcggtcttgtttttctctccaaatactagcgctgagaccaaaactagtatcaccaccatccttggcatccctgttagagacgctattaataaatacttgggccttcctcaaacttttgggagaacaaaaaaggatgccttcaactacattaaagatcgggtttggtctcatttaaacaaatggaattccaagcttttttccaaagggggtaaagaagttctcttgaaatcagtagtccaggctataccctcttatgctatggtttgtttcaagctccctgcctcttttcactctaaactcgaatctaagatggctcagttttagtggggaggaacggagcacaaccgtaaaatccactgaaaaaactagtcttccctttgtgtttcaaattttcatgggggtctcggttttcgctcaatgaaagctttcaatcaggcgttgttggccaaacaagcttggtggcttcttcagtctcctcactcacttgttgccaccttac

SEQ ID NO: 174710 - DNA, 594 bp, Cannabis sativa
  modified_base (290)..(300): a, c, t, g, unknown or other
tagttagggtgttacaattaggcttttctttaagtaaaattaagtgtattgtaaacaacaaatattcatagcttagttggttaagttgtatggcatattatacaattctaatcccataacactatttttcaaaaaaaaaaaatatatatatatattttgaagggtcccaaaatcagatttgtcttaggcctataaatttttagggccggctctttttttatcgtcaatttttcactagattcaatttgatcatccaccaaacaaactataataataataataataacaannnnnnnnnnnataataataataataatatgatagatttcatgttttaatataggaatttattatactagctagaggctcaataatatttcactatacatacattgtgtgcaataatattatttaatgtattcctatagtatatatattgactagctctatttgattaattactctatgcactgctcgtaaatttgaattacactagaatctctatctatgaatacacttgagactaagtaaattatattctaattaagatgttataactaaatagagttacactagaaaaaaaaaatcaaaata

SEQ ID NO: 174711 - DNA, 649 bp, Cannabis sativa
ttattcctaggaaaggccatcaaggtgaagtgagtgcacttgatcaaatgatccaatacaatatcatcttgaaagacaaccaaatcaacttaggctaccttatcctaaaaaccatcaatgaagtgtataagcctaccctaaaaagagtcttatcctatggttatcttcttagctacttgttcccactcctaggaatcccaattgaagatgaaaccgacatttatgaacccaaggagttcgacactcttggtgagatcacattcaagtctatgcgctacaagttcaatgaagtggaaaagaaatggatttccaccaaacaaggtccacatgcccatgaggaagcacccttggtctcaagtgaaagtgaagaggaggagcaagaagcccaagctcaaagcgatgaggaagccgaagaagaagtgcctccaataacacaagctcctcacttcaacattttttgctaaccttcacacctccattacttcaaatttaaacaacttgagaggtgaaatgaacactcaatttccactctccaaaatgagatgactaccataaggagtgacattgccaccttgaggggagacaaattagctctcttgcatttttttttttttttttttgcatcttttctcatgtttatttgttttta

SEQ ID NO: 174712 - DNA, 841 bp, Cannabis sativa
taccatcagtttaggaatgaagctcgaaggttagcttcaattttaaattgacacaaaaataacttttttttagaaaattcgctattagcatcgggtatagtattagcgacgatttagtaactgacgctaattaataattttttgcttcagtttgaaaacaacaccccaacattcccctatactattcacatcggtcaacgcaatgaacagaagcgttgaccgacgtgagtagtattttttgtagtaatgtttattacaatgaaagaaaatcaagatgcattatacctctattgtaaaataatacaaggactaaagaaagagattgataaatatatattacaatacatatatatacactatatatatattacatatatatatatatgaaagatagaaaaagaagaatacaacacatgtaatataacacatatatatagtaagagaagaatatatgtatatacactcactcacaagcttgagtgtagattagtgggaatcactatgacttgaatttgttgaacggggatcactatgacttgaattaggggtgtacgtcggtcggtttggtcgggttatagcatatttttattaacccaatataaatatcgagttgcaaatatttaatcgtaacccacccaatgaaaatttagaaaaagttcaacccaccctttgtcggtttggtcgggttaacctgtccaaaccattccctttttttttttatgattgttattgttagtttctagaattcaagcaattaaatttttaaaaaaatatatattatttatatttcaagttaaaaaatgctatagtttaaattaattttaagaactttaatataaga

SEQ ID NO: 174713 - DNA, 524 bp, Cannabis sativa
ttttgatgctcctgtcaaggtgaccaggaataacatgcacttcaaatcgccacatactaggcttgtcctcattaatgtgctcaaatcactaacgtgggctcccgggtaagtacttccatcatattttgtcatggtaggaatcatgaacccttagggttatggtaatgccaagatgtgtggagaaaacggctcaagttcctcatcagattcgtatcccctgactctcccttggtcattcagtaattgctgaatttgttgttctaatgctgtaatccgtgggtcattagccaaagaggaggtcattagccaaagaggagcccattagccaaagaggagctcatacgacaaagaggagctcattagccaaagaggagctcattcgccaaagaggagctcattaggaaaataggagctcattagccaaggaggagcacattggccaaagaggagctcattggccaaggaggagctcattggccaaggaggagctcattgcccaaggaggagcacattggccaaagagg

SEQ ID NO: 174714 - DNA, 562 bp, Cannabis sativa
ataaaatctaattttatgatacacaattgtgtgatttcaaaatacaaaatacaaaataaatattattaaaaatacaaaatattaaatttgtatttagataaaatataaaatattaaatgactatacaaactctaatattaatgtatatatatatatatataaatatatattaggttattattacgtgcaatacatgtatatttaattatatttttaatttttatttttgttatatatatttttttgttaacatcatttttattataaagtatttaatttaagtgctatttatagaaaagataataatatttaaaatttattgttaattatagttttagtttaattgtaatacttttaactttataattgaaagatatttttttggtaacagcaataagtaacgatgtcacaattcaccgacaggttaactacaataggtaacgacgtacatccactattgctgacaattttaacctgtctgtgtagtaagtttaaattaaaattttaaagttttttttttttttttttaaaataatactttctgttatatagccacatttaa

SEQ ID NO: 174715 - DNA, 532 bp, Cannabis sativa
aggaaaaataaattttatcaatgaaaatattaatgtagagcataagattaagcatctcaacattaatcaagagaaagttgaggtgagctttgaagagttattttggagaggtgtgaattgttggtcaatgaaatcaaacagggttcaaaatgattcttatgatgacatgaaaaaacaactagacaggctatgttgtttaggggaagccaaagtaggatggtttgtgctcaacaaagggcaagtcacgatagtcattggctcgcaacagacgttggagaagatgatggaggacatcgcaatttggaagaagaatgttaagaaaaatactttcgaagttgctttcaaagagtttcacgaaaagatttttgacaaccttcatcaagatcaaggctttggtatggagaacaaaaagactactttaggaaaagataacagtgaagattgttgcatcattgagtatccaaccgaggaggggaagctgagaattaagatggattgccctaactgtcatcaactcatcaagaagaatatt

SEQ ID NO: 174716 - DNA, 519 bp, Cannabis sativa
  modified_base (450)..(461): a, c, t, g, unknown or other
cccagcctgtatgacctggaccccggccgacctctaggacttggaaccctagctggccaagaccaaggctgcaagttggcagccagttttctccccatttgaaccatagttaggggcctatgacgggcttggaggcatatgcaactgtggccttatgtgtggtttctcttgaaaactttgtataaggctagattataagtccattatggttaaatgtacgacatgggacttaccgtatgtcttagtaattgtgtctaagatgatacttggtcattggtcgaccttgtacccttttttctacctggaggatgtcgttaagtgttgttgacttgaatatgtttgtagctttgttaggttgctcacctccccttatttcttccatgtaggtactgccaggtgttagtttggggaggtgacagctatctgttgggtttgtgccctaaataaaannnnnnnnnnnntaatcagatttacttaataataaagatcagaaataatatttttatgttgcatggttca

SEQ ID NO: 174717 - DNA, 501 bp, Cannabis sativa
atattaaatttaaaattttgacgtatataatgtgagtagctattaatttttttattttttaattcttaataataaaagaaaaataaattaatatttattttgaactcaataaataataattattaattaatttaatatacatatatttatataaagtcagttttaaatatatattttttgcaaaaattaaattagattatagaattttagtaattggataaattttatttttgtgtgattaaatttatatataaaaaatagaattaggggaaaaacatataacaattgataaatctataggaaactcatcaaatgtaaaattattgtcatctatgcatctcaattgtcactatatttaaagttatcatcaccgtatctcacttgtaatcgttactatcttgaaaaaaatataactattgatatgttgagattttatgccctaaataaaatctatttcaatataatatgatttgttatcaatagaagattaaaagtcattta

SEQ ID NO: 174718 - DNA, 880 bp, Cannabis sativa
ggggtgtgcgccccgccgctatctcgatgggcctaaccggtcgagaatgaccctttctcaatgtcggcattcaaattcacggtgggctgcgcccgtcgagatagaacaaaaatggagggccgggcccaccgagataggcctatttttttgtagtgtcaaataaataatcatgacaaaacaactgtaaaataactgtaaaacaatactaacacaagtcaaacaaaagaaatgaaaacatgattaaaaaaaactaaaaaatattcttcacagtctcaatactcaatgtaatagcagttatatttgcaagtccaatcttaaaaaatcaaaacaaaaaaactattaaaacaacacaaaaataaatataaaacaataagctggtataaccacttagaaaaacataaaagaaccacacacctcaaaacttttttttttctagtgagcttgtcaaatgtatttttaggagaactaaaataaaaaaaaataatcatagagaaggaagaaaaaatgtattttatagcctccatcttccaccctcacggatagaaccactacagcaccacgagaacacccaaaaaataatcattaattccagcaagatggagcaagaacagtgaaatcgacgtttaaaaaataaattatgaaaaaaaaaactgtaaaacaacactaaaacaaactaaaaaaactaaaaaaataaacactgtatactgaagtatgaaacttataaaaatacacagtaaaaatgtaaaaaaaaaataccgcctaacattatttttgtaaaaaatgtaaaaagtcagtatactatgtaaatttccctatataggacctagcaaaagttctctactggtagaaaactttttttaccattaattttagatcttgt

SEQ ID NO: 174719 - DNA, 582 bp, Cannabis sativa
  modified_base (287)..(303): a, c, t, g, unknown or other
ttgccgaagctttagcatggaaaatttttgtgtttcgatcctccaattgcatcaaatcaacacgtgacgacctctgctgccaatattgttctacagcagctaaaagcttatctaaaatagtctctgccaaaataatatcatcagaatgagcaaaacttggtgtttatgaatattttatttagcatattaagtttcataaaaaaaaattgacttaaatattttttcatataaacatatttttgaaatagtgtaaaaagagatatttttttgatattttctttaattannnnnnnnnnnnnnnnntagaaattcaaatttttcttttattatttgctatcggaccaaaatctaatggtttagtatttttaaaattaataattatacttaaatttgtttattacccattaatgtgtaatacctattaagaagtattccatatatatttatgtattgagcttaaaataacctaaaaatataaacaatatttgacatccacatttggacaatatttttatttctaggttagatagattccagtaaatatgtatattatatatattgttataaaatattatttatata

SEQ ID NO: 174720 - DNA, 590 bp, Cannabis sativa
cctatagctataagttggtatcttacaaatagttaacaaaattctcctgtcaataaaattaacataaattgataaaaatatttaaattcaataatctcaataatttaaaagtaatttttaacggtatgaaaagtttagagaaaaaatctaattattattttaaattaaaatatataaattttttaaaataaatattaaactccatacttaattattttaataacaacataatatctcaatgttagttgtcatttataccatttgtgtaagaagaaactctacaatatagaggcacaactttataagtttggcattgggccaagctgaacatggtccacattgatttggtgaaaaattaagagaaaattgtattacatacctattttataacttttacctttatttttatattctttaagatatacccatttttatagatgataactctattataccccttaaattgatgtaaattatgtactacatttaagtggagggagagggtatgttaggcaactcactcacaaaagtatgtagattttaatgaaatataatataaggggatttttgattaattgatacaaaaaaac

SEQ ID NO: 174721 - DNA, 507 bp, Cannabis sativa
  modified_base (247)..(249): a, c, t, g, unknown or other
aaattcaaaactataaactgcaccacacaacgcggttcggcgaaaacacaaactgcaactgcactgcaaaacactacaaaataaaattttatttttagttacaacaaaacttgtgactaaaagtaaaataattgtgactaattatgaatcattatgcttatgttgtgactaaaatgttcgtggctaaaagtattagtcacaaaaattacaatttatgtgactaaaataaaattagtgacaacttgtnnntaaatactatgttttagttacaagcaacattttgttgtgactaaaagttacatttagtcacaaaaaatttctattatggctaaaaaattatcactaaaggtacatattttttgtagtgaaaggattttaaatcacattttttgtgtggtggggtgtggtgcgggcggtttatgcagtgtgggcggtttgatgaacactcctacttttgactgaagtaaaaaaattgtgactaattataaatcatcattcttatgttgt

SEQ ID NO: 174722 - DNA, 507 bp, Cannabis sativa
gtgagtaatgaacaaacagatttcctctcaagtaagacttctttttatcctttgtacgatgctttagtacatttaagtaatacaaaatttcaattcaactaacatgacacccaaaccaaacaagaatcgggcatgcaatacacacaattaggtgaatgtaaggcaatcctaaattatatttagacacaattttatccaacagaaaaattagaaaaggcaaaatatcctaaaagaatggcgtagaaaactaattatattcacagagtcattttatcaaacaccatgtatgtcaactacgacaacaacataatattaaccgtagacatacttccccatattaagaaacatcaaagacatattcagagaacaaactccaatgaaaatatactgtatataacataataccttgattcttgagttggaatgtaattccaataccttcgatcatctattctagttattctcaaggcctttgacgatatcgacaaacaaagtttcccactactc

SEQ ID NO: 174723 - DNA, 591 bp, Cannabis sativa
ttttttttttttttttaaatggacctttttgtatctaaaacttatcaattgcaatattatacgaagaaattaagaagataaaaaaaaaattaattttcaaaactcaaattttaacaacaaaattcttaatacttatgttctgttaaaaatttaatatttttattcattttaagtgttaagtgttatattgatctgtctacgtgtacatttacgtggacataatatacacataacacaattttattagttcatataattttttttttaaaagatttaaaaattaaaacaaaattaatttaaaattaaaaaaatgtaaattaaaaaacaatttttgctttttagtttttttttttaaaaaaaaattaaaataaaaaatttgaaaaatatattttctttttttatatttttttcgttttttttctttttcctttttctttcttttctttttcttttctcgcctcttcatctcgtcatctctttttttcttttgctttctacttcttcttcattcctttattctctcttttttttccaatttttttttctcttcgtcttcatttatcaccacaccaccaccgctgccacccatca

SEQ ID NO: 174724 - DNA, 523 bp, Cannabis sativa
ttctattgcaatttctatatatttttgaaaatacatgttgaaataattttatataaattaattttttatttatgaaaatacatttataaagtatggacaacatttatacttataatatttaattttatgtttgtcacttataataattttactgataaactatttatctataataaaagaatgtattgtgataatatattgtcatagtatttttatatgtatatatacacctatagtagtatgaaaatgactgataattgtttcggctacaagttttcacaaaatttgtttttgagtaaaacacaaatagtaaaaaaaataaatggtgtattcagtaatactttttaattaaaaatttaaaaatattttctataactatgttttttaaaattatttttacttgttagtttttttaattgagaatagaaattttgaaaacaaaaaaaaaattactttcaaatttttttaaacggttttttttttcttaaacagttatagaacacatttttattttttaaaaaca

SEQ ID NO: 174725 - DNA, 557 bp, Cannabis sativa
tggtttatgtgcgtatttgatgaacacttatgaattacgaattttcgatgaaatatatttttagtttcgtactggaagtattttaaaaaataaatgaatttaggcttttacagaactcaaattttttattgaatttgttatgattttttgaagtttgaaaaaaaatatcgggctagggtttccccatacacgcggggatcaccatttcagacatattgtttgaacactctgtgcaccccatttagaccctgcgtgaagcctcattgccagcctttgccccccattcgcgcccatgggtgtatgcaatgcatactcccctatattgcccttttttgcatttgtcaacttttaaaaattgtttttttaatgaaacacaattcaaattatggtagaattttgtgtagaatctattttttcaaataaaaatctaatcataagaataaaatcaattttattagttttttaattaatttaaattagttttagataatagtgggctttgaatttgaaaaatagatttttccacaaacttccttttatggttatttttgaaatta

SEQ ID NO: 174726 - DNA, 698 bp, Cannabis sativa
taagaaggcatataacttaggtggcatttggttacaatataaaaatggaataggaatgggaatggtaattggaataggaatagaatggaatggaatttctattcttttgtttggtaaagactatgaatcaataactgaataacaattatgatgatttttatagtatagaatgaaataaaatttttattattttgaccaaaatgtcctttactcttttaaaataatttttgttctataaaattaccattttgtacaaataaaaaaaatgatatatatttatgtatcactttaatattgtatttttttagatctaactatcaaataataaaatataaataaatatttaatttaatagtctaatttatattaatatttaagtatcaacataaatattattcatatattataatcatgacacattgtttatccatataattataataataatattgctttcctataattatttacaaaaaaaatataataaacatattattataatattaaatgttgtagatatatgttttaaaataaaaaatgttacccatataattataactttaatcatttatttatgagaagggtagataaggaaaaataatttttagttggtatatagaatgactttttaagtcattttatttaggaaaattctttagtttacatgaattactattcctatggaatgagtttttcaa

SEQ ID NO: 174727 - DNA, 514 bp, Cannabis sativa
atccctctttatgctaaatataccaacctcaatgaaactcggaaaaatatctacctcgcacatgtacaagaagccttttttagcgagccaagacctatgaaacatgccaggcgtaagagggatccaatcaagcggtgtgaatatcatggggatattggtcataccacggaagaatgtcgtcagctgaaagatgagataaaaccagtagcagccaaagacaaaaccaggattactgcacctggaaccccgggatatgttagggattaaccctggatattgaaacaattgagggagtatgtgagggattgacccgaaacatcaaaacacgtttgatcaaaaccagatgctcctggaagattgataaaataaacgattgagctggggaagtccttatgagattaatggttataaataacattgttgatgaaatattttgaacttcagctgtgaataaaataatcatttctttcaaacaagtaattataaagcgtaaaccctttaaaattatttgagg

SEQ ID NO: 174728 - DNA, 506 bp, Cannabis sativa
aaccaatgctccgacagcttttatcgatctgatgaataagatattcaaggatttcctcggtatatgtgttatagtatatatcgatgacatccttgtgtactctcaatcaaaagcgaagcacaagcaataccttaattagggtggttctgcagaaattacgagaacataatctgtatgccaagttcaaaaaatgtgagttttggctatctcaagtgtcttttcttggacacattgtcagtaaggatgggatcaaggtggatccagggaagattgaatatgtcagggatcgaccaagaccgaagacaactactgaagttagaagttttctgggttttgcttgttattatcgtcggtttgttaaggggttttctaagatctcaacacttttaaccgaactcactaaaaagaattagtggtttctgtggacagacaagtgtgaagcaagcttccaggaatgaaaacagaggttgattatagctccagtgttagccctaccatctgataaa

SEQ ID NO: 174729 - DNA, 546 bp, Cannabis sativa
aattacttcaagaatttaatatgcgtgccatatgtttaaacacccataataattgctcgaaatatggttataataataacaaacttgaagataattcttaacatgaatagatgcagaaaatataatcagttgtatcataatacctctagatcgagtgattattatgttttattttgataaaaaaaattaacttagggtactatttaaaaaataaatagtctaatttgtcatgtaacaaaacagatggtgcaatagacaatctttccaaagcatagggtttaaaaactacaaaaaaaagactaaaatatacaagtatatccaaaatacaagagcattgttatgaggcactcatggtgcttaatatcacaataaagtatcgtcttataattggttaacaattttctacaatatttattaaaataaaaaaagtaaaacttaatattaaattgtatcaatagatattacactttataaaagggaaatttgacaatatatgcttaaaaataaatagtacactaaaactatgctagcattttttacattatg

SEQ ID NO: 174730 - DNA, 571 bp, Cannabis sativa
taaagtatacatttatgtttttttcttttagtgtcgattttaaatcgacaccattgaattttagtctcattttataaccgatacttaaaggtgctttagtgtggggtcataaaatgacaccaaaaaacttatttatgattttttagtatttttcaggttttttagtgtcgttttaaaacgacacaatattattagcagggtgaaaattactattatttgtcaaatttcccatctgtattgtaacatttcaaaattaagacaaaaatatcaacaaaaattaaatactacaatacttatactataaaaatatcaacttcacaaagtacttatactgatatcagttagaataacaaagtactatgtttatactagaactaattacaataacaaaaatatatcctacagaaagttccaaagcttcaatgttgcgttggtttagtgagctcgaactgaatgaattccccccatttatcctgaagtatattgatttcgccgggtgtgtatggggtattaatgttatactataaaagaaagagaagaattctttaagttaatcataaattaataaaaa

SEQ ID NO: 174731 - DNA, 807 bp, Cannabis sativa
  modified_base (779)..(782): a, c, t, g, unknown or other
tacttcaattatttagaatactatataattttttttttaaaatatgaataacataatataatttagtaatctattaaaattgacacatttacttttattgattttaaaatttgattaattaaaaaggaaaagaaaaaaaaaactaataaattattttttatttcagttatctttattggtgacgatgagaaatatatgtctcatgtcaaaatgattatctttaaaagtatattacaatagtataattttaaactcaaataattattgatgaaaccaaaaaactttataaaatttgaaaaaaataaaataaaattaaaattctaagaaagtgagagagagaatgtcatttctgaaagaaaaaaacaaaaagcatataaatgaaaaggcaagttgtgttagcaaagaattgagtaagagatttaaaaaaaaaaaaaatagaagaagggagtcagtgactctcggtggttagaaaaaaaaaaagaaatgaaaggagttttggtatacgcatattagaatattaattgaaaatttgttatattttgagcatttaaatattaaagcgtatttttataaataattttaaaagagtgtatgctgaggtaattttctcttttattttagcaacctagtctatttatctatctagaaataaatgagcttcctatgtacccaaaagcaaacatataggctcacacatgtcaaattgatttggatgggccatatcgtatttctaggtttacacggatgaaagaaatacaaaatttacttgttacaaattnnnnataagatctattgacaattggacta

SEQ ID NO: 174732 - DNA, 503 bp, Cannabis sativa
ttgaggggcaggatcatgtagtcaagtctaccctgggtaggtgggctaggcctaggcctaggacccacctagcttaggggcccaacaaaaaattactcctttttaaattatacaattttttattaatttttaaaagtactatatttttttaaataattaaaggatcaaattatttttttttcttatgacccattatattgactctatatcgcgttaaaagtttatatagtaaaaatactaattattctttattaattttaactatattatatatgagaggagtgtgtatagagggtggttttttttttttttgaaaataaagcgtatatatattagaaggaaataactagtcagacctcacggtcattacagaaaatattactcggaatagtagagacttctaccatttcagaaatattgttggcaaacgcccactttaccacattatgggccgagggtggtgttctttcatatgaatagatagatatcttagagaaaaagaa

SEQ ID NO: 174733 - DNA, 618 bp, Cannabis sativa
  modified_base (146)..(149): a, c, t, g, unknown or other
atctgactaagtaccatgttagacacagggataggatatggttgggtgtatgtgcgtctaattataatccgagttatagttatgttattgattatgctttccgtactgagtctgtcgactcacagttattgtttgcatgtgtaggnnnnggcaaggctaaggttgagcagccatgagagcgaactaatgaagattgtacatgtcggggcagttaggcctggagcgtatgatctttgggacagttggtcttatttggtatagaccctaggcgacagcttttgtatttaatacttgaaacggttgtaaatattttgtacacgagatcccagtaatatatatatatgttatttattttggtatttataagtatttaaattaagttttagttattcacgactttcaataaactcgttgattagtaacgagctgcacagttagtataaaatcgtgataccacgcctaaactagtagggtgttagagtttgctatcagagccgccaggttttcttccaaagatcgtcacgacatatacaatcatcatcagcgataagctcgactcacggttcagtaagcctttattactttagtagtttattttattgggatattggcggctaa

SEQ ID NO: 174734 - DNA, 583 bp, Cannabis sativa
  modified_base (517)..(521): a, c, t, g, unknown or other
taagttagtaagtggttttttattgggaaattatagcaaatcacctcaaatcataacattatgtaaataaatgtcttcatttagagaaatgactcttttatactatttattatttatattgtcttttgctacataaaaaaaaaaaaaaaaatcaataatttttttgttaattttttttttagaattagaaacaaattacttaaagattatagtatgtttatagttttgttgaaatcttttttatttaaagttatgttgattttttttaaaaaaaaaattataggttgttgtggattaatggtattttagattttattgtacactatatttcttttttgttgtatgatatattattatttttagataatatttattttttattttgttatgtataataatggtatataattttgttagcataatgcaaatattttaatgtatgtatataatattattggcatgctatatatattatttatcttatggtatataattttattttagatcatgcatgttnnnnntttattttattatatataaagatatataattttataaatatggtataattattttatggttg

SEQ ID NO: 174735 - DNA, 611 bp, Cannabis sativa
gggaataaatcttttgtttggttattctatgaattgtctgtaacgaatgctactaggttgattcaggcagtagtcatatgtttttcttaagattaagcaatgcatatgtaagtatgagctaatttagataatgaaacttcaaataatttattaaattaattatagtttgttttatggtatttatttgatactcgaataactgaagtaattttagagctaatgtaggtacttttagaagggataactagacaatgcaatgactgtatggcggttatttgtgacaaagaattaaaatttgattttggaggagcttgagaaacacctaccacatccaagggagatagcaggtcgtgttcatattgtgtcaagactcatgtattataagtatatgcttgatatgaatacgagtcatttaataatcgtgtcaaaaaatcaaacccaaacacaatcggttacaaatgggttgatacgacatgacccatataacccgtttataagtaaattttgtttaaacgtaccaatccattcatatattaatgacatgtttaatatgttagaagaattaataaactcaatatactaatttttatataatttagaacacaataata

SEQ ID NO: 174736 - DNA, 690 bp, Cannabis sativa
ggttcgcccttcaatttctcaactcgacgctaaagcattgtctaaccaatagttgatctccactcatcgtccctactccaaattgagtggggaatttcaggaacaagtgtttgattgagcctattgtcctcatttcggtcaatgcatgaccacacatgagtatgttatatactgaagggattttagtaactaaaaactcttgcatctgggttgttgatagtggtggctctaccatagtgagtgggacttcgaatgtgcctaaacttgcaacaccatcactcgtgaatccacacaggttaaccatgtatggtttcaacctttcctctttcagacccatcttctttaatgtttctttgtagagaatattgatagaactctcgttatcaacgagaactccttttactctcttattcgcgagctgtactgtaatcaccaggggatccgtatgcagaaattgtacgtgcaatgcctctcgtcagtaaagataatgggaggttctttaggctttgcttgcttcaagggttttggagcaaaggcagattcttgattcttcacttcatttatatatcttttctaagcattatttttatttcctgtgaggtgtggccctccaaaaataactaagatatcctcaccctcaactgggggaggttgtattccttggttattattctggttattgggaaaatt

SEQ ID NO: 174737 - DNA, 522 bp, Cannabis sativa
  modified_base (183)..(186): a, c, t, g, unknown or other
ttagaggccgagtttagccccaggattgtgggagggatttggatccgggtccggttggagtccaaaatattgattaagaaaaaaaggtgtttaaaaaaatattaaaagtaattttttttagttttaaaattttgattctcaattaaaaaaattaaaaaagtgaaaacagttttatagaacatnnnnttgaaaaatattttcacttttctaattttaaaaatagagaattgattaaaaaagtgttaccaaacgccacctaaaattatgagttgttatgtttaaatataagttcataatttgttctagtatagtcttctataatattatatatttataataaacacattaaaagaaaaattaaaaataaaagaaaagaattaaaaaaaaaaaaacacaagagaaaaaatatgataaaaactagaattttttataccaaacatacaaaataccaattttattacatatatacaacaacacggtcacatcaacatttttacattctctcttaattttattacacat

SEQ ID NO: 174738 - DNA, 578 bp, Cannabis sativa
  modified_base (509)..(530): a, c, t, g, unknown or other
aacaaacttataatcattatttgtcatttaatgttttgactttagaattatactatgtatttaagtaaaatgtatcataaataaattttcaactacgtactaaataatgaatatatataggaagattatgaggagtttacgtggcatgcttataagattcttatgaccttccatacttatttgtctctttttaataatttaataattttgtatttttctatatgtagaccaaaagtcatatatgtatcatttcaatactatacttattgctaaaaaaatttattttcacaacaataagatatctcttcatatatcatctttaatgttatttattatcaattataatataaagttaaaaaaaaataaactttctattttttatttattttttatactaaaaactcacaaaaatttacaaggacattttaaaatcaaaaactatcatttctatcatttatatatattcattaattagtatcaatatcaatatatatgggtgactattcaannnnnnnnnnnnnnnnnnnnnnatatggttacatttttctttaacatgtaatatcaggttactaataggt

SEQ ID NO: 174739 - DNA, 533 bp, Cannabis sativa
ggttttatttgttttgtattttaatggctctgattcagatctgagtggtgatttcggtggtatttttttttggatctgatattcttgtttttgaatttaatttgggtttttgtttgattttgtgagatttagatctgatatcatgataaatgtatatttgtttgtttgtgctataagatatgggattgtgtttgagtcatggtggaggtggcagtaacagtgatggtggttgcggcgggtgggtggtgatagtttgaaggtggtttcggtggtggtgatatggtttggaaaagaatgaagaagaagaagtcagaaaaaaaaaagaaacaaaaagaatttttttatatatatttattgatttttttaaaattttaattaattgttttttgtctttaaaaaaaatatattttatttttaaataattattaacatgagccaataaaattgtgccacgtgtatattgtgtccacgtggacaatccaccatggcagttaacagtcaaatttggatggaagttgtaaagtgctaacggt

SEQ ID NO: 174740 - DNA, 726 bp, Cannabis sativa
  modified_base (432)..(443): a, c, t, g, unknown or other
attgagtttatgtgcttgagttttacaaaacgtaaaatgcaggtagttttgccgccaatatcccttttaaaattccttcacctatcaagtattttatgtggacctcacatttttaagttttaaaaatataaattattttcaaattccataccaatcaagtatcctaagatatttatgcctcaatatatagtgcttttatctcaaaaataggtgcattgatgcactcctttgtattttaatctccaaatagttttaatcttaaatatatatatatatatatatatataacactttttaatgggtattacccattaatgagtactaaacaaatttacttataaatattaattttaaaaatattaaaccattagattttagtctgatagcgaataataaaatagaaatttgaatttttatgcttaatttagctannnnnnnnnnnnaaatataaaaaaaaaaaaaatacttttttttacactatcaaaaatatgtttatatgaaaaatgtttaagttaaactcaacttttttttatcatttttttgccgaattttttttattattattttttcagctaatggaacaacttgagcccatataatctaaaaatgagaaaatttttaattaaatagaaaaaataatcataaaaactaaaaaatttctaatatgacccattcatgagtaatacctattaagagtgcacccatatatatgatataatatagtta

SEQ ID NO: 174741 - DNA, 768 bp, Cannabis sativa
gggcacaaaacccaacagaaaggaacacacatttctgttgactttgaaataaaactagtgagtgcggctatccgaccagttaagctttggacttatttggttattgtaggtgatttcatatcaaggatggcttggatttttctggattggcttcaatacctcaggctttaacaataaaacgaagaaacttacacgagctgactccgaaggagcactttaagggattgagtttcatgttgaattttctgaggactttgaaacattcgtccaggtcatctatatgccaccaacctattcagatttaacgagcatgtcatccacgtatgcttccatatttcgtccgatctcgtctttgaacattttttttaccaatttttggtatgtagctccagcgttgtttacaacaaatggcatgactttataatagtataggcccatatctgtttggaaacttgtatgttcttgttgtggtggatggattttgatttgattataccccaaataggtgtccgtaaagcttagaatctcgtgcccagctattgcatccacgagctgatctattcttggaagtggaaaacagtctttggggcacgccttattgaagtcggtgaagtcaatacacactcgccatttttttgttaggcttgcgtacaagtacggggtttgatacccaggccgggtagaaagctgttggaatatgttttaccaggatctagatttactacaatgtatgttatttaacatcctaaatatgaatctctaaaacaa

SEQ ID NO: 174742 - DNA, 535 bp, Cannabis sativa
  modified_base (273)..(275): a, c, t, g, unknown or other
gtaggttgagctcgactctcggtcgagacaatagactaagagatgatagactaagggtgggtgctgtccctgtgcggtggccagcgctgctggaagaagtttgacgatcaagataggggaagatcagacttttagggattaaaggatttagtcgatacaataaagaaattgggaatgttttatttagggaaacttacaaaaatactggaatttgagttaagttttacaaaaatactgtcacacggaaaatttttcaaaaatactgtgtttttnnnaaacaccagtagaacacaaaacaaaacaactcaaaaaaacagtagaacaactaaaaaacaccagtagaataccagtgaaaacttaacatagtatactacggtatgaaacttataaaaaacacagtaaaaaagtaaacttatagtatgtatcgtgccaggccgtgagcccaataaaaactcgaatcaactgcgaaaaaaagcccaaattgccattcctaatttgtatcactcatgttgttaaacaaactaatttagtggct

SEQ ID NO: 174743 - DNA, 565 bp, Cannabis sativa
aactagggttgctctgatttttcttcccatttcaagcaagtttaggtgtatctaagctttaggtaagctcttaaccatttctttagttttcttgaattgtaagaaattgaattatgcatgtttcatagattttgctactgttgtggttgttgttgtttgtgattgttttatgaagtctaaatatgttgttttatgttgatttgagcatgttttagtggttgttagaaggtttaaccaagttttgagttttagaactcaaactttgagctttaatggtgaaatttgattctgagtttgggtgctagttttattgcttggaaaaggtttattgaggtgtaatatgcaggtctgcaaagttagataaggtttggaaacgatttggttagggtttgaaattatttaggtaatctagggaaaatcggctaactgtttttccaggtacctataaaactgggtaactggtttttgcagctgggtttctcaaaaaattcaagttgtcgattcgtgttagtttcaggtttctggttggttaattccctgctagtttagggtatttccatattaa

SEQ ID NO: 174744 - DNA, 659 bp, Cannabis sativa
  modified_base (426)..(447): a, c, t, g, unknown or other
tgagtcctgtatgttgactcatgagggccagagtacaagacaataattcatcgtatatttatgcatatcttactgagtctgttgactcaccagtgcactaccatgtctaggtaaagaaaaagctaaagcggaagagcagtgagtttggagctcggcagtgattgcacatatcgcggtagtacaacctggagcatttcgattttggaacattttgagtcaactcatgtagtcactatgtgacatgtaaaaaccaattatataatatgtttacgaaaacttcttttgaaatcgggatcacgacttttgttaaaattatttatatatttttatatatgtatgtttgacctatacgattaaggtttaaatacaagtgttttgtttattgggtgttacatataagtattaagaagtgaaacgatgatttcnnnnnnnnnnnnnnnnnnnnnnataaatgattgagatctcatttaaatgattattttagtttactgaaatatcatttataggtagctaaatattttaaggagataatacattgacgggtagagcggtaaatttgtctttattcgatgtagatcatctatagaggatttttgaatatttggattagagcgatggataattctgtaacgccctaatctatagggacgccacgtgtg

SEQ ID NO: 174745 - DNA, 502 bp, Cannabis sativa
catctttcttcttaacaaataataaaggagctccccagggtgacacactaggccgtgaaaaccctaggtcaagcaacccctgaagctgaaatttatttccttaagttctgctggagccattctctaaggtgccttagaaactgattatactccaagtgctagatcgatgatgaaattgattttcctctgcggtggtaaacttggaaattcaacaggaaaaacatttaaaaaattcctaaaccaccctgagatctgctggctgaactgtctcaggtcgtgtggtatccaataccacggccaaaaaccctaaacatccgttttataacaattctctagctgttaatactaaaatcactgggatccgggatccgtgaactaatcccacaaaaataaacggttcctcaccctctagttagaagattaccatcttccgtttacaatcaatactggctgagtacttggataagaaatccattccaagtataatatcaaaatctgctaa

SEQ ID NO: 174746 - DNA, 538 bp, Cannabis sativa
  modified_base (275)..(276): a, c, t, g, unknown or other
  modified_base (502)..(503): a, c, t, g, unknown or other
atttgcatggactagttaataggttgagtactttagtgggcttcccactactacaaaaatgggtattttcgccggttttcaagtgactaataaagattttgtgtcggtttaaaaaaccgatgtataagccgtagacggaaaatataatttattagcgtcgtttataaaatgacacaaaaaactattttcgtcattttacaaccgacgcaaaacacaaaaaaaataattaaagcattttgcgtcagttttgaagtgacacaacaagctatgcgtcnntctttaaccgacgcaacaagtgttttttgcgacggttctaaaatgacacttatgtgtacacataacatttttcacgataaaactttccacatattaaaagaaatcacaaataaactaatattattttgtccatgtataaaagataagttaatatcacatatccatatagaaatatatacattattaactgaaagttcactattaaaaaataataatataaagttannattaataaaagataaattcaaattgaaacaattac

SEQ ID NO: 174747 - DNA, 562 bp, Cannabis sativa
gagcgtcctccatcacaataatgaaaacgagtaacaacctcgagtcgtgagaataggaggaacaatgcaccccctcctacacagcaacaagttaggagggacgcacaacaacctactgccccacaagacaatgctacagatcccccacaaggaggctctcgtgaggagagaggcacaacatgcaataatgggatcccaccatctcaaccatctctagcacctagggatattggtgttgatgagaggagaagagaccatgttcggaaccctccttcaccaatcaggttccccccatcacaaataaggcatcctaagcctccacgtactaattcactagcaccacatcaaccagccccgagagagaggtcacgaaaaagggaagcacctctcagtcgctttccaagtaaagacttgcctcgaccccctcaaaaacgggcgagaggactaccaagaaaaccatgctcgacaagtacctcaacctaggggacatggacgggaaagacgacgcaccatctctcgtgataactatgtccgtccgagaccagcacccagggagactaga

SEQ ID NO: 174748 - DNA, 743 bp, Cannabis sativa
tctccaattgtcttacttgtccaagttgcttactcttgacttgactggcaattctggtttgaaactagagacatctagttgcaaaatcattgttgcaaatctcacaaatcttagagaattgtttcttcgttatgttgatatgtcttctacttcacctcattcctttatgaatctctcaacttctttgacatctcttgatcttagttcgactaatttgcaggggaaacttccagaaattgttctcagttcgccaaaccttcaacaactcgatttgagttacaatatcaatctcactgtttcttttccacaatataattggagcagcccacttaaagtgttgaatctttcttactctcgagtcatgatagatccttacctttgtagaaagttcaaatatttacaagctatatctatttcctattccaactgcgtacaagtactatcacccacatttcttgacaattgcacacaaatcacctccttagacctttccgataatagtttaggtggtttcttcccatggtcatccattttaaatcaacagcagctaatccacttagatctttcaagcaataatttcataagtcaaattccagaaatttgtagtaactcaacaaaaaatccattctcgtctgtctcttcaaaacatcatttagtgggttctcctccattgcatttaactttcctaaatttatatgaaaacgagcttgatgggacaataccttcttggatatattcccttc

SEQ ID NO: 174749 - DNA, 539 bp, Cannabis sativa
  modified_base (216)..(221): a, c, t, g, unknown or other
ttgggtaagtatgatgaaaagaaggcactcattctagtaccaaggtattggaacggggaacatttaagaaaatactaactataacagtactatgtcggatgaccatattaagtacgaaacaaaagaacatttactgttaagtgaatggcattttgggcggagcacgcccaaagtttcagataaaatgaaaaagtactcaggtcgggtgaacacttnnnnnngtacaatttttattttctgcaatttgttttgtttatgttaagctaaagatcagactagatcaatataatagcttcaatgtaagttactacggttgcagacatattcccaaccaataaatgaataaagatatttatttcaattcaaattgagtcaagtttattagcaagttattcatttaccattaaatgcgtacaaaaggtctactcgtacccaaagacccgaacagacaaaaagcacacttgtgaaaaacaagtgaccttgagtcaaaagtcttcttggtcacttgggggcacctatacctgtacaaagcatttggt

SEQ ID NO: 174750 - DNA, 562 bp, Cannabis sativa
tcaaaacatcagaccatggaattaatcaacacattatcaattaaaggaattgcttttaaattgtgatatttataatatagttttctttattaaaaaagtgttttagcatagcaataaatagtcttttgattcacgaagttatattatcattgttatttttattaataagtttcatttaaaaaaaattataacaattccatttttcatgttattgaagagatgcaaaaggaatccaggtaaagattgggataagatttctcatattcaacacttagacttatgtccagatcccaacgaagaagaagaaaatgaggtagaaacgtcaacgtctaatgtttgcttttaatttcaaataaaattaaaatgaacgcttatgcttgtttttatgatattgcagaatacaaagggatgcaacctcttcaacaagtttaggctatgcaatacaagaaatcaatgatagattagatatatcatatgtgtaggtaactagttattttgcaaatcccttctgcaatgtgtacaagttcaatgtgcatgcaattacttccttctgatatgattt

SEQ ID NO: 174751 - DNA, 520 bp, Cannabis sativa
ctttgtatataaaggattaatccaccgtaaaatgggaacaagacagaaatccatgccacagtggactaagcagaccgtgatctgaccgaaccactatattctcttgagttcattgtatttctagtttttgttaagtattttgtgttcctgatttgagtgctcggcattctgagttgagtacttgcacatattctttccacttattattattattattattatttaattttggtgttgtaaaaattcctttaacaagagttctatataccgtttcgaatcttgaaacgagctctacaatatggtgtatgttttagagccaaaatattagttttattttagtgtatttataacacggggtttaatagaaaaccttagattgtcttatgtgaatattaacaagtgtgttgggataaacacatattggtttgccattgttgtgacatagggccgagatcattggggatagttctccacttgggttggtcgaaaaatatgaacctgaattaaaggtaagaaaagt

SEQ ID NO: 174752 - DNA, 533 bp, Cannabis sativa
ttctattctatatgtcaagtagtgttgtaagttcgtggtgaggtgtgttgtgttgggttgaattaattataattttttgtggttttttaaaaaataagttatgtagtattgtgtcacgtaaaaatatgaatcgtgtcgtgtcgtgtcaatatttttaaataataggcccaatgtcacgggctcacctcttcaggcagcgaaacacccgtccggcaccttgacttttctaagcaaaagtcagccttccaaccatccgaataacaatgggctcatttttcgtgcgaccgtgtgcctcgtgcacacttccgtctctcgaacaactcccatcaagtcatgctcgcaagcatccatgagtgcatccatgcatcaagaccctctagccaagatactcacactgtccataggttctcactataataagacaaatcccaactctgacactcacctagtcactcgtgaccaaggtagcatgtgtgtggcaagatgccaacaccaagctgacgtgccaatgcatctgtcccatgcgcgtatgc

SEQ ID NO: 174753 - DNA, 543 bp, Cannabis sativa
tctcccatgtgaatcttccataaaaaaacttaaatatcgtattgtattatattgaattatatatcatatttttatacaatattatgttaaactttaatttatattaaaatattatatatttaagtgtctataaaaattaatatcacatataattttacataaaaatatttcataaaatataatttaatataatacaatataatataatacgacataatacgacgttccaaacgaatcaatatttattattatttacaccagctacaaaatactactatagtagtgataatctgagatatatgagtagttgtgcttagatatataatctgagattttttagcaatattaatacctaagaataggactttttaacttaatctaaagtttaggttgctaaaatttaagtgtaacttgttcaattttttttaaaaaaattgcggtttggtcgggttgccaaactatttttttttttcaaaatcaaagtcaataaaaattaaaaagataaattaaaaatattagattctaccaaagcacaacacaata

SEQ ID NO: 174754 - DNA, 710 bp, Cannabis sativa
tacatatcaaatgcccactattttataacgggaaagtgattgggttttttttctttttttcgtttcaataatttttgggatagatatttatctctaggtctattttttttttctaattctcgaggtgctttatttaatttttgatttcgaaattattttttttaccttaatactaatagaaatttttacaccaaaaatacaatttacacaatttattacaaaaaaacccttacacgcttacatcatcatttttacctttcctctttcttttattacaaatataccacttgcacatcaattccatgcacagacacgtgtggcttccctatcaaccatcaatcaacttccaatcacttccctctcttttatccttttgttttcatttgatttttgatttcttttcagttttttttttttaaaagatcaagtaacctccattgttgaagcataacttcccacgattcctcacggttttttccctttcatttttgttcttccaaaatttttcaactcccactaaagcaatcccataaccgtttccctctttccttttgtttccaatctctttttgaaatggctatcacttattcatcttcatctccttcctctgttcagaaaaaaaattccaaaatgggattgaaatctctagctaacaaagctaagggtaaacgtccaattattgaagaggaggattctgattttgctcctcc

SEQ ID NO: 174755 - DNA, 526 bp, Cannabis sativa
gtgtgaaatcactatcgtgagccttaaattcagttaacaaaaatctgcgttaacaacaagtaacacaagtcagttaagagatgagttgtgtaagagtgacaactctttcctaaacgcatagctctataactaactttataacagaaaactaacctactaactaccttcactaataattaataattgacaacaacctggttaaactaatattatatagcattagcaaaatgcttgaatttttattaatcaatatcaaatatatatatataatactaataaaccttgccctttatttttataaaacttttaaaactaatacaggtatataatgcattgatcaaataaccttaaataatatttaattaataacgatttcaacactaataatattatccttttacaatcgtaattggttattgttgttattattactatgtttgttacatttttgaggattaataaaatatatgttataaaaaaattattataaatctcatattaattaaatttttcaacggaagttgtt

SEQ ID NO: 174756 - DNA, 587 bp, Cannabis sativa
  modified_base (100)..(101): a, c, t, g, unknown or other
acccaacctagacaaagacataggacgcgaactgacatccaaagcctgatctggacctagactgaaatcaagaccaaaacccaaactcagaccaggactnnaactccgacccgaactcaaacccaaactcgaacttagaatcgcaaatggaacttgaaccgaactaggactaggaccgaaccaggacctaaacccaaacccgaaccagatcaaaacccagatatagaccgaaaccagaaccgaggttacggctagaacctgaacctagactgtgacccaaacccacgcaataaccgggacctgaaccaagaaccaggataaggacatgggaaacagaactaggactgggccctagtactcgacccagcctcgaacttgaacttaggtcccaactcgtgacccggcaccagaaatggaaccagactaggacacgagattggggtctggaccttgacccagggcttggacaaaacccatagtcggtgtctggatttgggaccaagccctgcagccgaaccctaacaaggacccaaaccaacacccggacctaaacttagtcctaaacccaaaagtggacccgaacccgt

SEQ ID NO: 174757 - DNA, 697 bp, Cannabis sativa
gacctataaatagagctcatccctctcatttgttcatcccatcacaagttattccaagactgaagagtgatgctcttgagagagaaatagtgaaaatacctcttagtgagagaaatctaagagagaaaaaagagagttcctacaaaattgtgaaaaatattttgtagagagatgatgtgattactacactagtgagtgtgagagttttgagtgtatttctcaagtattaatcaaaaattttgagtgtaatgttgtgtagacattattattgttatagtggaaggtttaccagtagtttttatttgccacaagataatttcttagcgtgtttttggtgctttaattattattcgtaaagtactatttacattggaagatatctaaaaattctgaatatgctctgtgatttgcagctgtgactgatctttcacatcaaaatggaatttcagagtccccattatattttcccgcaaatattgatcttgaaagggaattggaatactgtccattatttcccaaaaccaccaatatgctccaacacagaaatatgcaattttatttggaaataatatcaatacaatacatattcagtaggggtgtgcagaaattatccaatccaatcacaacccatccaatagaatcagatatccaatcataattggatcggatcggatgtaaattttgaaaatccaatcgg

SEQ ID NO: 174758 - DNA, 545 bp, Cannabis sativa
agattaaataattatgttgtaaaaaaaattattttatcatattattgttttatgctctaaataaaacttaattttaatataattgtatttacttttaataaagaatcagaaattataccatgacttaattatatacttttattcacatgttttatacataattataggtgtattattacatgagttctattaaattaatatataattattcacaattacagtgatgtcatcatagtagaaaataattgtgattatttgtttcaaattatttagtctcacgatttatcaatgcactgaatttatactgacgtgataatcagcgatggagtttagttacacttggataaatggagtatctttttctaggatattactaaagtaaactagcatatgatgtatcgaccatacatcaaactagactaatattgagagtgaaaaagatatcacaaatttacttttatatttcttttctaaatcaacactacaagaaatgggagtattgccggcagtattaatgcaggcagaccccacccgcctctaataat

SEQ ID NO: 174759 - DNA, 609 bp, Cannabis sativa
aacagatgggtaaaaagaggcaaccatttctggtattatatgagattgttgatgtgaagcataaggaaattgagattcattaaaaatgacatctcttgagatgtacacacggccagaagtgtcaagacacttataacctttgtggttaatgctatatccaataaaagtccatggagtagatctaaattgcattttgtgcttattatatggtcttatattgggatagcaggaacaaccaaaggtttttaagctagtgtaatcaggtgggatttttttgtttagaacaggtgtaggaaaactattatgaatatagacagctgttctaaaggcctcatcccaaaattttaagggcattgatgcttgagcaagaagagtgagaccattttcaacaatatgtctatgtttgcgctcaactagaccattttgctcatgtgtagtgggacatggatgtctatgaatgataccagcctcttttaagttattagtgaaagacctatactcacccctccaatctgtttgtagaactttgattttggtgccaagttgtaactcagctttagctttgaagtgctgaaatgtttttaatgcttcatctttggttttaagcat

SEQ ID NO: 174760 - DNA, 688 bp, Cannabis sativa
tgcacaaatatcattatataaaatgtatgatgtataagccactaataattattagagggtattgctattagcagtgacagactctagaattttttctttgtgagagttttttattattaaaaaatatttatatatattttaatcattcttactagatttatttaattttatgaagaatttttttttattattttagtctaaaattatcaaatttaaaaaaaattaaattaatttttttaaaaagcaatatttttgttaagtgagtccgttcctgactattaggtactagtaacgcttaatatttagttctgattctggttctttgttaataattagtaatttttttataataattattaaattaaaatatatatgagtgtacacttttaatatgtattacttatgaatggatattattagaaaaatttgagtttttatatttaatttttttatttaattagaaaaatctttaattttagaaaagaagttttttggccaaaaaaaaaaaataataataaataaaaaaaagttgagtttaacttaaatattttgtttatgaacatatttgtgatgtagtgtaaaaagatataattatatatatatatatatgttttaattatgtaactaagtataaaaattaaaattttcttttattattttttagtggatcaaaatctaatagtttaat

SEQ ID NO: 174761 - DNA, 881 bp, Cannabis sativa
gttaccagcatgatcgatagtgcacggacaaacacaagggtcccaggaaaaactttgtttgggaggattatatcctggagtactacagaggtgatcatcaggttttgttttagtaagattttaaattttgaactatgattacaagtttattatggtttgttaattgtttagcttttcttgataattacaggcccaattctttttgagatggggggtaatgatttcatttacttcattttgcatcttcccgcacagaggcattgggtgactgtttaagttgacatagagctgtggaaaattaacgtatacgactgtgattccagcatttgccattggactgccatggcacccgtttaaagacttgggaagaactgtttccctcattaatccatgcaaccagggattttccacataataaccagatcatggcgctaactacgaaggagatcaacgtgcttccaaatatgcatgtcagtcaagccactcacgacttagttctgaaggcaacaataaggtacatagcgataaaaaagtactatagtattaaaatatgctttacattgtactaacttcatattttatgttgcatttagtggtgattgtggcgtttatgcattgagtacgtggagcatctcatgatgcaacgttcattagctgatgtcacgcaagatcggatgaagatgtttcgtgaacggtggtgcgttgatttgctttaccagaatggtggttgaatatatgtgtaattatggatacattgtatattgtgtgtaatttacaaaattaaaaatacagttatatattttgtatacttaaaaatatattgtttatttagtctaatttacataatttaaaatacatatttacataattgctcacaatat

SEQ ID NO: 174762 - DNA, 565 bp, Cannabis sativa
tagtagtataaatttatgattttatgtattcttcttcatctatgttgagatctatttatttagtctaataattattttcttcaatttttatgtattcttcatttatgttgagatctatttatttagtataataattattttcttcaatttaggtggtataatatatgtgtagtttaatattaaatatggtaaccaaatttttatttgtaagtgaaggcattttaaaattactttaaaattatttttctcttctctccttaattctctaaatttatattttactattattttaataaatttttctattaaaaaaaaaacataaatctataaattgatattttacaattattttaactttctataaaaatataaaatatttaaaaaaaagttagaaaataaaaaataaattctaaaaaaatattaaaacttaaatcaaatataattaatcgtaaattccgtttatatacatatcaatcaatatatatatatatatctatatctatatatctacatatataaagtagagacataaagcagtgacatggtactctaaaatttctttaaa

SEQ ID NO: 174763 - DNA, 803 bp, Cannabis sativa
ttgatccaaaattactaaactaaacgtgtgaccaatgtttgaggctgcctgataactgatattttattacattactgtgtgtagtatcccgatgagttgacaaatggtaaataattagggtttaaaattatattatgggttaattagataataagtgagattatgatcctactaatctagttcaacataaattttaaaatttgctataagtggataaataagcgtaatttataaattacatagatttatatggtatatgtgaatgtaatatgagttactggtgtataaaaatattttcaggtttggcaaccttggagactcgatcagaggccagaaatgtcataacaggtttaattgatagaattgatggaaatattatgataagttgataatatagatattggggtaattaggagtatgtgggatttaacttagtgccctaaaaatataaattttttagtgactaaaaaaacgataagataattataaataataaaatttttattattattatattattaatattatattattgataataataatataattattataatattatttttattatataaaacttatcagtaaactaataagtatatatattatgcgttatacatttataaacagaagaacgaacaaaaacaaaactctcgtccttcgtcaaaattttttctcctcctatatcaattcgattttcaatccaaaacttagtgatctaagttccagtagcaggatagaaaattctcagagcaggaaagcttaagggcccaggatcatcgatcgtactccaagtaggt

SEQ ID NO: 174764 - DNA, 589 bp, Cannabis sativa
ttttttttaaaaaaaaaaataattaaataaaaaattttcatctaatcactttgtaaccgccatagttgtacacttcttctttattaatttttttttagtttttgaaattttaagcttgcgagtcgtgtggttggttttgagcagttgagtgttgatcagtttttctattttatttgaaactcattttccctctaattttttccctcctaaccgtttttcccttttctcctatgaattttcattttatgtttcttttccatggttgtcattcaatctaagtcttcatctcctgtagttagaaaactccaaaacactcgtaaatctaagttaaccctgtcttcaatgtggaaaaaatgaaagaccatccttcaagtcctacttcccctgctccttccaaacgtaagttagatgttcattccccttctaagaaggtttctaaacgtcatcgatctataaaggaagagtctgattccgattttaaacttgatgatgagttcattcaattagctaaagttgccaaggtcagtcatttgtttttgtgttttttttaggatttttgtgttttatttttaaatttttatattattgt

SEQ ID NO: 174765 - DNA, 611 bp, Cannabis sativa
aataggcactaatgatatttagcactatcatcaagtgtcatattatttttagtttaattaagtatccaatctaacacatttaatttaaccattattataaaaattgaataatcatttgcaagtcatgattaagagtggtaattcgtgttaccatgtcatatttatattcgtgtaaaaagtcgacccttaaatttagtgagccttaagaaaataaaaattattgggtcttttatttaaaaaatatgtagtaattttaaaaattattgaaaaatatttatattttttaaaagggaaaatatttattttggtccctggactaggtgggctctaggcgcgagcctaatctgccttagcccaagtccagccctacgtgtagtgcaagttgatatgtttcactggtcaaccctaacccaactcatatatatatttcgtgtcaagaaatcttgatcctaacccgacctgtcttgtttgcgtgttaactatatttatgttacaatacatgctaattaacatgattggtatcacatatttagattttacaacaataatttatcacaaattatcaatacaataaataaaattattgatatcaagtataaattatctatttt

SEQ ID NO: 174766 - DNA, 507 bp, Cannabis sativa
gagttttattattgaccactaatgaattagtagtattttttttatagttggtgccttataattagttagtaaaattttttaaaattattttttttgaatgatatgtgatttaatgcttaataaaactaataaaaatattacaaaggaattaggacaccttttagcaatattcttatttgtaagagagatagtaaaagacgtactatagttagtgtctcaacttttttttttttttttttctgaaaatgtgtcaactacttaagatgttattatatttatttttttaaaaaataaaactttagatgttatttattggtacaattaatatcgatttttttttataatttaattaataattattatagaatattagtattactttgttttgtaatgttagacaatattagtacctaagggcatctctaatggagaaatccaaaattaacactaaataactactattttaacactaattttttttttcaattccaaccacaatactaaaaa

SEQ ID NO: 174767 - DNA, 860 bp, Cannabis sativa
  modified_base (249)..(252): a, c, t, g, unknown or other
cagaaggtaaataactggttatttgttatcctatgacttttgtgattctttttttgtttagttttctgcttaaataactggttatgtattgtttatgtttttgttttgttttgcagtgactgtggtgtatttgtgattaagtatggtgatctattcatccgggggcaagattaatgagattccttctactatggatgagatgattacgcactatagggatgacctcgctgtgactttgtataactatgnnnngaaaaagattaatgaaggatattctactgaagataggccgaaggaaaagaagtccaagaagaagaagtttgattcttgttaaatatttgtattgttttctggacagatacaatgtttgtagttatgtttagtgttttatttttttttttgaaacaatacattatgttatgttaatatttttgattttaggttgacaatatatggaaccagtttttatatgtttatatatacttgtagttttttatgatttttctttatgtaatacatatttttatggtttttatattattttccttgtgcagtgttcttgttacattgtgttttgtttgtatagttttttctttaattttaactagttttttcatgtgtacttagattgcccaatgttatttgtatatttaaccggtttcttttccagtttttatggtcattttttaactttgttctgtttttaaccggttattgttttagtgatcttatatttttttttgtttattaggttgtttgtgttgtatatattatatagaaccttttttttatagaacatgtatttttggttcatgtttaaatataactggtttcatttttctttgttttcttttgttttg

SEQ ID NO: 174768 - DNA, 567 bp, Cannabis sativa
gcggattctccccacttcttaaccttttgaagaccaattggatccgatcaaaggtccaggggctaccctcgatcactcgtccgatatcaacttcgtgataaaactgaaaaaggtatagattaggctctaattccttgacatataaaccccgtcccggacgccataaggaggccatcttatgttgcatagcaaggaaatcaatttcccgatcagtgataaaacgtcccactagacaccacctatcgtcgatctcagagagatcatcatcattcaccccgtactgaagaccccccgtttcctcttcttccagagttatcgaagcatattggtcctccatgtttgaacgtgcatgattaaacgtcgccataatcgcagatacgaacccaacaaagtttaacaaagagacacacaaaacttaacagagagaaaaacaaaccatgtcaatagacaagacttttaacaaaacatttatctctgttgttttttagtatttctcaaaagaaaaaaaatgttaataggtataattacatgtgaattcctaatatcttgtttggcaaaatagttagt

SEQ ID NO: 174769 - DNA, 714 bp, Cannabis sativa
  modified_base (665)..(676): a, c, t, g, unknown or other
tttttttactctttaatttttttttttttttttgaagggtgaagatggatagatataaagacatttatctagtttcatttaattttattaattctgtgatatttcatatataaaattattttctctaaacttttatatctactaaatcatgtcagtttttattcatgttagactttttttattaaaattgaaaaaagcttaaatttaacaatttccattcaattcttttgtttggctatatattaaagtattggaaattcattctacaggattgaccttctactattttagtagaataactattctattttaaaatagaaaggaaaacaattttaatgtatgatgagaaaaaattaattaatatttttttatatatattttaaattttattctatttttattcttattctcattctcattcttattcttatttttatttttttatttttttatttttttttaaccaaacgctacctaaaaattttaaaaatataattataaaaaatatatttagtaccctgtattttcaataatacttaattggtatatttttaaattatacatatttaaaatttaattaatacaattttatcaatttaatcaaatagttctcagttatatatatatagttaatcttaattaaagttttaaaaggaaataaattnnnnnnnnnnnntcaggttacaagtcattttttatttttttatttaattt

SEQ ID NO: 174770 - DNA, 522 bp, Cannabis sativa
  modified_base (454)..(457): a, c, t, g, unknown or other
tttatttttatgggttgtatagcataggctttacttggatgtatgagtatcggggttattgcctagtagatcctaaaggagtccgccaagcttcccaaagtacattcgcttgtgtctgtttccaagactccatcgccttcctcgatgcaaatatatcattcccctctctcgtagaagtcttgaacttaatctaattcccttttcgacatcttcccccataatctactcctagggcgtattccagcagctatggcaaacttcaacaacttcgacattaaagcattgaatgtacccccttaagccttctttctccccttgctttacattggtgacactcattacatgcataatgtaatcactcgccgcttgatgcttgtaatatcttgataagcctaatggtaaataatttgagtttatattttacattatgtgttaatcaggtaataagtgggannnngatcctactaatttatttcagcataaaatttaaattttgctataagtaagtaaataagtgtaatt

SEQ ID NO: 174771 - DNA, 574 bp, Cannabis sativa
ggtgcagagaaataattccaggtctcttgaggaagataagcaaacttgaaaatcaattgatgttgtatgaagcaaataaacatttgaaagtaaatcaagatttgagaaaggttcatggttgtaattgtggtcacatatgggtattgagaaattggaaattttttttgatgattatttgtgtatttctttttgtactttatttggtaaagtagtggtaatctctatgtaatgtcaacttataatattatgtaatggacatggcacttgtattgccattgttattgagtttgtaatgtatatggtacttgtaacaccataatttatagggaccccgcgtgtttgactttataagatagtttaatactaataaaataattaattattaaaaaccgtgataatattaaaaatttgatttaaataaaatactaaaaacggacattataacggcataaaaaacatgttccataatccctgttttaaaaagttttactaaagaaatatatatgacaaccatttaaacataaaattaaaatacacaacagatacaactagcccaaaataactcctggcaact

SEQ ID NO: 174772 - DNA, 534 bp, Cannabis sativa
ctcacggctaacagaaggctgaatgccatccaagaccgatcccatgttgatgctagaagtggaaaacagctcatggaaataactagttattacattggccaaacctgactcccaattaacccaccttccattgctgtcttgaagccgagtaagactattgtttcgctttctagaattagcaattgagtgaaaatacttgctattcttgtcacccgagtttaaccaaaattgctttgatctttgcttccaaaaaatttctttttgagctaacacctctgccaacttttccttcccttctttgtgttgttgaatagataaaggatctctaccccatttggaatttcgaatttggctcttacaatcacttattctctttcgaaagttcccagttatgtcccggccccaccttcccaagacttccccacaatggtgaattttctcttgaatatggactaaacccgaacccctccaacaactctcaacaagctgctcacataacggttctcgaatccaagcattctcaaaacgaaaaga

SEQ ID NO: 174773 - DNA, 624 bp, Cannabis sativa
gtgattaaaggattcaatcttctttagctaacaattaaattagacgttggaggatatccctactcaaattcatatataacaattaaattataactctgtttgttttaatatagcaattatttatctcaaaattaaaaagataaccataggtgatagtgatagtgatagtgataggtgcttctacttcttttctttacgttcgtatatatttgtgaaaattcgctcttaaaacctcaaccacactattacttttggtgtatcatccttatttagatctttttggtctatctatggatgagtgtgttttttttcaagaaacgttttatattacaattttgagttaggccacatgagttagcatcaattgattgatgagtatgttgttaattagtgtattaatttctttacatatttgttggactgtgttcaagatcatatatatttttattctttacctttctttgattttctaaaaagaaactataatcaagtactaagacaaatgaagatgcaaataagttatatataaagctaaggtagaatttgaagaatttgctatggtagggtgggctatttggaatttgaagaatttgctatggtagggtgggctatttggaatttgaa

SEQ ID NO: 174774 - DNA, 511 bp, Cannabis sativa
atgagtagtgctaaggagattcttttgcactctctatattttttacgacaaatgttaattattaaacattatctatttttatttaatatttagtcataatattattattttattacacttatgctattaactaaatcactacactaatttataaataagtttatatttatttttaaatgtcacattttttttacaggtttaaaaaataagtatcgtataatatataaattattataaattttctaaaatatttaataaaataaacacatcaaatatggcaaatatactatacatataaaattgaaataattctacacacactactacaaaaaaacccctttagaggcgattttttagccctttcagcgtcggttttggcaaaattcgctaccgacgctgattagggcgacgctaaaaggggttataaacaaccgacaccgtatgtaccctatggcgtcgattattagctaggaaccgacgccatagggtacatatgacgtcggttcctagc

SEQ ID NO: 174775 - DNA, 664 bp, Cannabis sativa
  modified_base (602)..(603): a, c, t, g, unknown or other
ttatttttctttattacattacttcacaatatacattttcaaaatatattgtcattttttattacattacattacagtctatatttttttaaatgtattatctttattacattacattagagtctatatgcaaagtatacacattatactaaatatatatacatctatagcaacttaatatgtataaataaactatttcgtgattaatcattcttatcaatatggaatttgagagtatttaattttcttttatttatttactagaaaattaagtagcacttcgcgcgatgttgtcaaattttataacctttttaattgatttatataaattaaaagtttttcaaacaaaaaaatatataaatttaaaatattaaaaaattattaaaatatttaattacgataaactataaattataattatattatcaaaatactaaattgaattaactaataaaaaaggtaaatgcttcgtaaatgaaagaattattcgaacaacatttttatattatattcatttttttttttgaattttcacattcagaacacctacataaccttagttaaactttcttttatatatatactagggaactaagccgcgnntcgcgcggtgttgttcaacttttacaattttttattatataaatatattatacttgttgag

SEQ ID NO: 174776 - DNA, 610 bp, Cannabis sativa
agatttgagtgttgttgcactttggttgttgacctaaagtattggaaaatgaggtaaagagaccaccagttcagtatagtaaagggactagtcatttatcttagtagatgaattgcttaatgacaaacatatcaccagtactaacattaccaaactacccttttgaataagcaaatattacattattgtttgattttggtcagtgagctgacttccacatcaaagtcttttgcagcaacaaactgttttcagaataaggattctaagtctttctaattttggacagagttggatagtaatctcttccaccaatcttcggcggacttgaataatgttaaaaaaaatataaatattttgcatcttcactgtgctacttgcatcaacctgttgtatttcaaaaaataggacataggatttgttttaccctcatacaattctatttgaggcatccggaagttctcgacaattgtgcctcgatgacctcatcctttgaattagatgtggctctgttttgcttctgaaccaaacagtgcgtgagttttgtcaatgtgactattgttggaaattattttaccaggatcttagatcttctcacaagtatgttgattaa

SEQ ID NO: 174777 - DNA, 595 bp, Cannabis sativa
  modified_base (406)..(424): a, c, t, g, unknown or other
ggaaagtttggttgggttttgaaatgatttgattagagtttgaagctttttggtttttctgggttaaattggctaaccggttttacaatgcttgtaaaaccgattacccagattttgcagcagagaaacccaaaaattcaagttgtcgtttcgcgtcagtttcaggtttctatttggttggttccctgctagtttagggtattgccatattaagatgttgtagatagggttttggttttaaacctaagtcccggttgtgatttagcgggtcactcacccatgttgttatcgatgttatttaggagcctataatttgccgagcagttgttccactcaggttgactggcacacctgaaaaaagaattgaggcacacctgaaaaaagaattgaggtaagattagtatannnnnnnnnnnnnnnnnnnacatgtttagcgtacatgttgttttatgcctgttagattacattgataggcatattgagtaaaggctgacattatggtcgatagtattgtcgtatgaacgttctagactcagtaccatgtgggacacggggattagggttatgatcgagtgtatgggcgccaggttataac

SEQ ID NO: 174778 - DNA, 654 bp, Cannabis sativa
gttctatcctaaatcactaccatggtttgcaatgcgaatgatattttagcagaacaagaacagctgcaaaggttttgcaaagtggtttttattagccaactttttccaaggatgctaatgaatttgtcaaggcgtgtgatcgttgtcaaagaactggcaatatttcaagaagtgagaggcctttgaatggtattttagaggtagaactttttgatactattacaaatacaacaaaacttgagcaacatctgtcaaaaatactataggcttaaaaataaatatgaaaaaaaaaatttaagtttcaacaaaacaataattagtggcctttaagctgcgttttcacatattggacctaaatatatataaaaatttgtatttttatattatgcaatgctgtgaaatttgaatcgcatattaagaattcaaaatcgcaagcactgcacggtttaggaaaaattcaaaccgcgatcgcaccgcacaaaattttaaactgtatttttttttttttgaagtgcaaagaatttgagcggtttgatgaacatccttacatgatatagcaaataccataaaatagttaaaaaattgctataaaaaataaccaaacttaaaagttgccatatttaagtaaaaaaaaatggtgtaaattctacgatg

SEQ ID NO: 174779 - DNA, 710 bp, Cannabis sativa
cactagccaacttgtcaattagtctttctaacatttcaccgtgcatgaacccataaaagagctaatacacattctttttccatcactcttcagtgatggtcattgtgcagtaagccacgtaggggtggccactacgtgatttcaaaagtagacactaagttgtatgctgttgttacacgtaagaccaactttgtctaaaccacttgctaataaagattaacttcttaaagttaatcttttagttccacatgtgtaaaacgggtagcaccccaagaaaagtcctagaaacttggtgaatagcaagttaccaagagacttaagtctgtttggttacatggggagcacccataccatacaatgcatcgaactagtacgaagaacttatgtagggaaattttaatgcttataataagctactaaacccacatctaagtcgtgcaggcatactttagcttgataagtaaatctggacacttacatgtcaaggccataagaagatagccaggaaaatcatatgtccatcatagaaggctttaaggctaaataatagtagtgtttgaacatagagggtctataggccaaagcaggagcatgaaagccttgaggtcaaatatgaaatcggttcacatgcatgaggtcaaggccctgtaagaactgtatagccagaaaagaaccggacagagctcctataggggccacgtactgggcta

SEQ ID NO: 174780 - DNA, 670 bp, Cannabis sativa
aatactagcaaaagtctgcttcttgttccttccaataaccatcggtaaacccaaatacttatcatgagtagcaactgaccccaagcctaaaatacccaatacacttgtacgatccacaggtagaacattcagactgaatgtgatagcagatttatcaaaattgacttgttgaccagaagcaacctcataacactgaagaatccgacggatagattctgcctcccttccattggctctaccgaaaatcaggctgtcatcagcaaagaaaaggtgagacacccgaggcccagatctggaacaccgaaaccccatcaactcaccactaaactccgcatgacgcagcagggaagacaaggcctccgcacaaaaaagaaacaaataaggagagagcggacatccttgtctcaatccctagtaggcaccacacaaccccgaggctttccatttactaaaaagctatactgagctgaagtaacacaatccatgattaaatccacccaccttctaggaaacccaaacttacccataatagcactcagaaaacaccactcaactcgatcatacgctttaatcatgtccagcttcaaagccataaacccccgtacaccattattcttcttaaagagagaatgtaacaattcgaaccccaccataacattatcatgaatag

SEQ ID NO: 174781 - DNA, 601 bp, Cannabis sativa
ttttttttttttttgtttatgtttacttctcctttagttatagcttagtacaagacatcttgatagtcgattatttgaatttttttcaggtagtggaaagacttttgctgaaattcttgcatgtgaaggcattagtacaagacatcttgatagtcgatgcatcacatatagtacaactattggaatatattttactaggacctaaatttactaacaagtgtgtttttaatattctaaatatgaatttttaaaacaatgaaacttaaacacatataaagtttcagaaaccttacattggttgcagcagaatataatgtctccttccattcagatctctaacctttgttcctttctatcgtacagtattatcaagatctgagcctgattctccttcaattgtttggattcttcacagtcttacacactataattgagtactagacttgctatggttgggaatgcactcaatcactaaggctcgaaaatttgaatgaagaacacttaatttcaaaattaaaaagaagaagaagaagaagtctcaaaaactcttgtctgacaagttgtaaactaggtttacagtcattagttggattatgagact

SEQ ID NO: 174782 - DNA, 826 bp, Cannabis sativa
taggccaaactctttggtggcacgcgtttacaaagctcgttacttcccaaatgagagttttcttacagcacaattaggaaacaacccaagttttgtttggaggagtatttgggaagctcaagatcttgttcggaaaggtataagatggcaagtgggagacggcggctcaatctctattttgggggatccgtggttgcctgatgctgataatccgtatgttctttcatctcatccaggcttggaaggggttaaagtttgtagcctcatgtgtccgaatgatagatgttgggatttggagattttgcaggacatgtttagggatagggatatcagtctgatcacaaaaattcctttgcaagtgtccccgtatcccgatcaatatttttggcatatggagaattcaggtctttacactgttaagagcgcgtatagccttatccaacagagcaaggggctagtctatgaagataacttctccactttttggaaacacttatgggcattacgcattccaccaaaggtcaagaatttgatttggcgtgcaggtacgcagtgcctcccaactatgtgtcaattgcttactaagcgagcgacagttagcgcattgtgtcctgtgtgtgaacttgaggaggagactatccttcactgcttgtttacttgccatcatgtgcatctttgctgggacagagtagggataggaactcaggtacctgtcaatcataactttttatcctggatggctcttctttttgagaagcttgaggttgaaatgaaagggatggttgctactctttgttgggcgatatggaatgctagaaatgagctg

SEQ ID NO: 174783 - DNA, 728 bp, Cannabis sativa
catccacagaaagccgatatgtgtcatctggaacatgaacattcggtgaaggatgatgggaggtgtgacaagaggtggatatccgattctgcaaatccctgtattcctgcaaataataactgacagaactctacacacagaaatcagtgacatggttaggattgaaaatagttctgtttctgttattccaaatggcccaaattaaacccaagaaagagtaaaattgatctttattataactttcgaagcctcttagcatgaattctttaatatcacaatttctatttttaagataaaattgataaaatgaagagtgtttccaaattttacctgccctgaaacattcaataagggagtgagtattggaatcatgatgagatagacaaagggagcaaaaaggggagggagtggacttacggtggaaaaggttaagattggagggaagaatgtggtggaaagctttccaaacaaaatgtttgattttgggagggctgttagaggaccagactgtggtccaccaacgcttgtaggtagcaggatttgaaggaccaggagaggaaagatttgaattagcgaaatggtaggcagaattaactgtgaaaacacccgaatggtgatgattccagatgagcgtatcattattatgagggtctatgggaacagcaagaatggcattacacatctcctcatcaaaataacgccgaagttttgaaaggtcccaatgacgg

SEQ ID NO: 174784 - DNA, 692 bp, Cannabis sativa
atcttgaaataatattacaagacacttttctcaaaaatataaatatatatataacaaaatgatattattataaaaaaaaaatactatttttatatagctaaaaaaatactatttttatatagctaaaaaaaatactaattgataataataatttttttactattttatattagataataaaaatttaaataatttaatctagaatttttattaacttgcttgaaataatattataacacacttttcccaaatatatatagaacaaaatgatattattaaaaaaaattataactaaaaaaatactaattgataataaataaaaaattgagctcagtcttctttttatataaaaaaaaaaattatatgaaaaaactataattatagattagtaaaagaaataaaaatgtatatttatatgtattataatatatatatatatatttttagatagtatacattataatattgtatatatgaaaaatgaagttctttaaattatagttttctcttatgattgaataatataaggttcataaaaaaaaaataatataaagatttaatggtaattaacaaaaaaatttaaggctatgtttgtaattcaaaatagaaatttagaaagcattatatcaaatccatttggagagttctatttgcaccccataaacttataaatacaccccattattaaaaaa

SEQ ID NO: 174785 - DNA, 705 bp, Cannabis sativa
ttgttgttattatttaatgcaaaaattccttctacatttttgttattttttgcttcatattcccatacttttgggcatgccaatgttgtaaagatgaagtacaaccttgcaaattatccatgaaaacctccacaacttttgttgctgttgatgagttccaattttgtttaatgatagtagcagcttcctcgtcctaaagccactgataactcatgaataacgagttatttgtcatgttcttttagcttaatttatgtgtgtattttacttatatttagttattttcctcccattttgtgagaatataagttattttgtatttttatgttcttttgggtaatttagagtttttagtgagaaatattaagttttatttgggttttggtaaagaaaagggcttaatagagaaagtgcaagattttgctgaagttttgcaagaactttactgcagcaaaagtagcagggctgattgttgagctattgtagaaaaagatgacgtggcaattcattaattgatatggtgaaaaatagctgaggtggcatgaatacatatggattgtcactgatttgtgaggaagtctctagaaaattcctagggcacatgaggaatatattttatgaaagatatttttgtgaaaaaagaggggagaatataacctagcctccattacaccattgagtaggaagaacacaattcttggcagc

SEQ ID NO: 174786 - DNA, 874 bp, Cannabis sativa
taaaagttgaaatatcacaaaataaaaaattgcacagggggaaatgggcgtgaaatgaggttgcatgcatccatcttgaccgagctagctcggtcagcagctccttcagacaagggatgtccgagatacctcgggcatgagctatttgaagctcggtcatgagcgaggtagaacctgcatctgtgcgcgtgtgggttgttccccttagatattttaaactttgaaaaaaacataactaattcaataaaaacccaaatgaaattctgtaaaagcctaaatttattaatttttcatctaatttccaaaaaaaaaagttccagtactaaactaaaaatattttttatcgaaacattgtaatttatatatatttatctaaaaagcacataaaccaacatgaacacatccaaatcatcacaatcattgttttaaatctatattccataaaagtaaatcattaccatggctctaaggccagttgttgggaattattttacaggatctagatttactaacatgtatattgtttaacaccataaatatgaattctctaaaataatagaattaaacacatgtaaagtttaagtaaccttacattgatggcagcagaatgatatgtctccttctgttcagatctctaacccttgttcctttctgttacagagtattaacaagatctgagtcttattctccttcaagtgttggattcttcatagtctttcgtgacttgctatgggtgggcatgtactcattcactacagggctcgaaaaatatgaagagaaatagagagagatttgaattctatagaaggaggctctcaagtttctagttgtctaacaaagaataaaaactacactacaagaaaagggatctttt

SEQ ID NO: 174787 - DNA, 667 bp, Cannabis sativa
  modified_base (76)..(81): a, c, t, g, unknown or other
gcatgttttcaagagggggataccatgattttgcccccactaacctcttactaacatagtaaacaggttgctggtnnnnnncctcttctcgcactattgcagcactaatcgcattttctgtgacaaccaattagagcagtaatgtgtctctagttactggttttgcctaaactggaggggttgacaaatgcctttttatgctcttaaaggcctcctcgctctcttccgtccattcaataatttttgttgcctcacaatacattgaaaaatgctaggcacttatcagtaggcttcgaaattaacactactataaaaataggttttcccgacatttttgaaacagtcgtttgaagtcttcctgtgggtttctataaatgtcgccaatacgaccgtcgtaaaatttgcagagtagttgatggttcaaaactgtcgcttatgtgggtttcctgacggtttaaactcgtcgcctataatacggtataggcgacgattttaaaccgtcaggaatgtaaaaaaaaaaagaaaaaaatacagatttatttaatggcaaaaaaatctctattttccctcatttttttcttgcattagttttataattttacctaaatttaaataaaaaaactaattaattttgttacaatagcaactaactttaaaacacattaaa

SEQ ID NO: 174788 - DNA, 557 bp, Cannabis sativa
taattaatatttttgtcttttgaaattacgatactatcagaaaattattatttgataaaatatacaaccgactaaattagatattatttaacgacaatttgtaaaattattttgttgtttaaattttaattttaagtatttgttgaatacaaataaaatatttatgaaaacaaaccttggaaagaaacccaagtttttttatgattaaagaaattaaaatttgaaattatttagtatatagttttatttaaaaaaataaataaaacatttaggcctatttgttgaaattttataattattcatctatgatacaaatataaaaattaactactactatactttatataatttttaacaaaaagtaataattatctttacaatcatcaatatatataaatataatttttataaagaaaaactatatatattacttcttaatataaactattaattattatacatataataagtattaatattttgtattaattaattataatatatttaattacctaataatttttctaaatattaaaaatatgtgtaacacttttact

SEQ ID NO: 174789 - DNA, 898 bp, Cannabis sativa
atgtttgttgctaataagattatgcttgtctgttttggtacctattagggaatgcaattgtttgtggtatttttaacacgcaagtatatatatcgttaacaagtaatagactcacaaagagtaaggtcgataccacaaggattatagttaagtactttaaaattaaaattttacttctatttggttatatcgaatttatgaaaaagttaaaattagaaaacaataaagaaatagtaaaaacaagaagcaagtaattaatgtgtaaattaacgatgattaaaagttagttttcgatttcaattgtatctacctattatggtctaacatgattcaattcctattactaaattctatgcaatatcaggtttactcaagtaatttatagtcttctcagagatataaatctcaattacatacaaattttctactctcgtgataaattaaacatgtaaaagacattaaacaagaaaccctataagttatccaaaccacatggtactcttgtcctatatcgaaatttatttccattttactatagcataattgccactcactcctcagatttcacatcaaaatcataaacatttaactggtgattagacaattaaaagtaattaagtacgaatgaaatagaatacatagaaattgggagaaaattaaatcacattaaaatcataaatcgatgtcaaagaatatccatctaaacccaaataaactgttcagctacttatgtttatcgtagcaaattcacacatattaattaagaatagaagaagaaatagagaagaaaagaatgttgaaaacctcattgaaaaagccttctggattgattttgctctctaattttcgtaaacctagattgcttactgaaaaatattgaagtccactccttttatag

SEQ ID NO: 174790 - DNA, 522 bp, Cannabis sativa
tcaaggtaattttttatgtatatacgattgtacacgtgttatgttttaattgtttcacttaattttaattattataaaaagttaattaaattttttaatacaatctaaaaaaaattataaaaaaataattattattttcgttttatttttatgtttctctttcttcctcaacccgattataataattttctctttcttctataggctttttcaatttcaggatcaacaaacggtattatactttgtccttgacatcgcatgtacccctaatgcctgaaataaaaaaagataatctaaaagaaatagattagcaataagcagaagaattagcaaaagtagaatttaatctaatgtttgtaatatcaacttttaaataatttcccggcaatggcgccaaaaacttgttacgaaaaatatgaacagcttcgcaagtgcacgtaatcaagtagtactcacacaggtgtggtcgatcccacatgaaattgaactgaataccactaaattagacttatatttctattt

SEQ ID NO: 174791 - DNA, 793 bp, Cannabis sativa
actaataattatttgatctcaaacattgcacattgtgatctactctttaaaatattcattttgatatgtaaaaaacatatgtttttttgctagccaaaatcaaaggtaaaattttagtttctttcagtttttttttcaaaagtttttttttatatttagtttaccaacaattaagcaatattcaaaaatatatatactaaataaaactatttcatatttatgcttacttcttatattatatatttatatatatatatatatatatatgaaaattaactagtttctacaataaacttaaaaaaggtaattaaaaatatactaattttaaaataagtatttaataatttaaatgtttagtaattttactaataaattatgtgattcttttttattattattataatttagtagtttattaaataaatttgaaggtaacataaatattattacaaaagaaaaataaaaaaataacgtaaaagttcaaaataactgaataatttaatatgatttaaaaataaacacatagatttcaaagtatcaaaaaggtatacaaaataattggtatataaaagtggtaacttattatgttacataacaacttattagcttcaataaactttaagattaccaaaatatattttaaataataagatactataatataacttaaaataactaattgattattaagatgtttacaaaaaaatttggaggtaatcaaattgtatctcaaattatatgatataaaaataatttttttatgtaaaattaactaattagtttcttatcaaca

SEQ ID NO: 174792 - DNA, 696 bp, Cannabis sativa
gtccagtactgtgagtctagaagggtaagacagcgtgttcctggaaaattagtccagttgattgtatcaagacaaataggaaaacttcttcaaatagatatcaagcaattaattcacagttgattgcccacaatcagagttcacggtgttaaccaaatccgatctacctagtcagtagatcctctccgtcattggctggacttcacgaggcagcccaagtgtgcaattcactgtaagctcccaataaaagaaaaagaaaaactaaatgtaattctcaaattactataaatagctagtgaatcctatggattaagggttgaattctcttgcaatacttgcttacaaaaacttgagaacttgcattcattgtattcgtaaaggcttttcaagctaaagaactactgaataacattgacttgtggactaaggctagttaatgttccaaccacataaaaaatattgtttgtatcttacttgcttttttatttttaattgttttatttcttcagttctaattatttgattagttttttgaaaatctcggtaaatattttggtacttccattgagaactgaaaaaagcagtgataccaactgaggattacgttcagtaaccatggtatttgtaggaaatcaagctagcaattaggtgtaaatttacatttaatgtagtttttcatttactctaatattacta

SEQ ID NO: 174793 - DNA, 798 bp, Cannabis sativa
cgattgcaagatctagacaccaacaacgggtcgggtccaagcatcaggtcgtgggtcaagatgcagatcccaatcttgggtcccagtctcatttcatttcggatcttgggtcccagtctatgtccgtgtctggctctgggacaaagaccacggttgggtctttggtttcagtcctagtcttgagtcttgattttgtatctaattttgagtttgggtccccaatctaggtctgggtccttggtgcaggtctgagtctcccatctgggtctgggtcctgggtttgggtctaggtccaagtccgtgtctcggtttgagttcgtatcccgagtctcgatctgagttttgattcagatccgcgtcctgatccgggtccgtgtcccaatccgggtcagggtctgggtcctagtcagattctagttcccggattcaaacctagactcagactcataccctggtctggggtacgggtctaggtctaggccagggtcgtgttccgactctgggtctgggtttgagtccggatatgggtcctagatccaaacactgagtacgagtcaggtctaagccctgggtctagatctggatcacagtctcgagtcctagtctagttccacttggagtccaaggtcccggtctgggtcctaggtcaaggttcgggtccaagttcatatcctgggtttcagtcccagttatgatgcccgtgtcccaggtctaggtctgagacctaggtctcggtccgagtccaggacccgatcagggttcaagtctttgtctgagtctagattcaggttccgatct

SEQ ID NO: 174794 - DNA, 717 bp, Cannabis sativa
ctgttggagacttgatttattcatatatatcacaaaataaatcaaccatgtttacccatggatgacttgaatctcttactacatatttttcttctcatgatcttgatatatgctttctccatggatacttttctttgattgtatgaccggcatggcaagtcttttagaaagaagaatatgccatcaaaatgacttataaattgttggaaaagttctcattacaaaagagaataggaggattacaatcaaaatactcgaaatacgaataaaagtatttcatcaagattacaaaaaaaaactagagaagaagaagaagaatatcacacaaaaagcttgaccaaggctcaaggacctttgtcctataaaagtcatttcctccctcatatggacacttagggaaactcttgaaattctcttaagaatttatcaagcctcatatgttcagcctagctagtgtctaaagaggagcatatcctaacaaggttctaaccacaacaaatgatttcaactacttctttttcatgtgaacaatatgacctctatttatagagttttcactcacatgtgaacatgaatgactagggaattgtaaggcttccataatttcttctaaaaattcccactccactgtatcatatgccatctgaagatctaactgttggaaattattttaccaggatcttagatctactgacaagtatgtttattaacatccta

SEQ ID NO: 174795 - DNA, 593 bp, Cannabis sativa
gtgaactcttcaacgaagttcttaaattgaatgttcgtaataatactagaagatagcgaggatctcttgataggctacaagaggtattctctctctattcattagtctagttttaatatatatatatatatctatattatgttgagattctcgggcttatggttcatattggataaaaatgtttttatcaaagctgcttccacttttctaattctgatatgtaccataaaaaccaacaagtttaattgataatatctgtgtgatgaattatatgattgttgttattgcttttctttctgagtctttgtgactcatgggtgctttgtagtgcaggtaagggtaagggaaaattaggacagccatatgaggtgatagtcatctctggcaaatgtacatatcgacttattgacttgtgtggtcaagttgtcaggagttattttgaattgcacctgatgtgtattttgacttactattatatataatcctttttgtaatacttttgtaacaggggatcttcgaaacaactttttagtgatgtcatcctgtttattgatttagttttatattagtgaagtttttactattatcacaga

SEQ ID NO: 174796 - DNA, 697 bp, Cannabis sativa
gatatggcaagctgtgcaaatcccttaatcatgtattctgtatttaatgtataatcttaccaattataaacattgtaaacagaagggaaacttttcctcaagcttatagccccataaatggtgatctattctcactgggcaaagggtccaaagaataatctaatagagtattctcagagataccattataaaagctttaagagaagaatcactgcattctttgttcttaagtaaatacaaatcaaggggagtaggctattaccaaactgctcgaggccaaacctctataaaaactctgtctcctttatttattttactatattacacctatattatatcacttatcgcttacaattaagactcattgtctttggctaaaagcgaggtcaacagtttgtaaagaagaaaaacgggtcactgcgaatgtgtattgattaccgggagttggagaagcttaccatcaagaacaaatatcccttacctcaaattgatgatctttttgatcaactgaaggggaagacagtcttctccaagatcgatcttcgctcaggctatcatcagctgagaattcgagaggaagatctcccgaaaacttcattccgtactcgttatggacattatgaatttcttgtgatgtcttttggactcaccaatgccctggcggcattcatgtatcttatgaattgggtgttcaaag

SEQ ID NO: 174797 - DNA, 530 bp, Cannabis sativa
  modified_base (489)..(492): a, c, t, g, unknown or other
ctcaaacccaggactcgaacctaggtctagacccagattagaatcggaaactcgaacccgaactcaaactaggacttgaaccccaaccgggtcctagactcggactgggacctaggaaccggactaggaaggggatttggatccgggacccaccgagacccaggacctaaccccggacccagatcctaaacctggagtagcaccaagacctaagactcgaagtggaactagactgggacctgagaccgggatccttatttagacccggggcttaaaccttacccataatcgatgtttggatctgggacacatacccggactaaaacctagacccagactcagacctaaacccgtactcggacccagactcagacctaaacctgaacccagacccggactcggacctaaatccgtaccccgtgacctgaaactagatgcggaactgtaagcgtaccgggacccgggaacaagaccgagggactgggaccnnnnctcattcccagaactagaatctgactaggaccaagacc

SEQ ID NO: 174798 - DNA, 580 bp, Cannabis sativa
  modified_base (518)..(526): a, c, t, g, unknown or other
aacaagaattgatgaacaaacatcaacaccctagctggtctaggagggttcgaaacagagagcttgaaagagacagtgaaaatgtttctttttcaattttcttattttttgagtaaatgaaatgtaacactttttttttttatttaatatactttcagcccattaacacaaaaatcagattactaattaaaatcaaattcactaaatgacaaaaaattttgcccctcccacacaaaaagagcataaaaaatacataggggtatttttggaaaattctaaaatcccgactattcccgacatacctaatgtctaactatgttttcttgctatactaaaaatactaggatgtgattgtaatagccaaacaccgtgttccaatcttttcgggcacaaaacatgcaaaattatgaaatttctatctatgacataaaaatgcattctgaattcaaataaattatcgtaagtaagtaattcaaaattaaaaaatatttttcataattaagcactaattatctgcnnnnnnnnnaattaaagctaagcggtctttaaaattatccccccttaaaaagatttcgtcctc

SEQ ID NO: 174799 - DNA, 511 bp, Cannabis sativa
  modified_base (135)..(137): a, c, t, g, unknown or other
gcgacgaaaatgctctcaaaattaaatggaatagaagtgtaattggtggtagtgaatatgccttgacttgtgtgtttcaacaaaattttgcatgttctttatgtccttaatgcttaccaagagtaattcaatcannnaaatgtgcaaatacttcccaccaacaccttgaatttctataacaactaccctcgatcctcaagtttaataagttcgcttccataagttgtactagtgcaatcctctctactaatgtagcttagctttacaacttagatcaaaaggactttaataggcttgagatgtgaggtttaggtttgggtttggtaaaggatgatatttttaggctcatgacctaactacctcaatttatcaaggactttttctttttctctcaagcgctcatccataatttcattttcaacccaaaatgttcactccatctagttcccactctcttgctatatgtatgtactatatatatatgtatttttttttcttttcaaataaacta

SEQ ID NO: 174800 - DNA, 575 bp, Cannabis sativa
  modified_base (278)..(291): a, c, t, g, unknown or other
gttagcaagagcagtacatatggacggtccgggccatatatataaactctatttgattttcacaaaagtactaaattttgggtgaaggtttatatttgtactgccacacaatgtaggggtgttcatttaatttaatctgtactattttacttatagtgcattcgatttacactaagtgtttatttaatattttcgatccaatctaatctgcacaatagctcgaattcaatattaaattggttattctgaatttgttacttttcaatattaaattattnnnnnnnnnnnnnnaaaaatattttttttttcacataattaacaataaaataaaacaaattattgttgttttatgtacccaacaacaaattataataaatgaaataacaaataacaaatttaaaggaagaaaaaaaaaattatatgtataaagaaatatttaatttttttttaaattgtatgtaaaaaaaattatacataagaataaaatatacaagatctattaagttttgaaatatatttgttgtaacgtcctcgcttcaagcctccattgggctcttacacccacggaatgaatg

SEQ ID NO: 174801 - DNA, 504 bp, Cannabis sativa
aatttttggtatttttatttctcattatgatgatatattaacttttaaatatgattacgaaaaaaacaaatgtaatatatctactttaaattgtggtatatatttttgtataaaataaaaataaaaaaatggtatgtcttttatgaatattgaagaaaagaataaaaaataaacttattaattaagtggtatattaatttaaaagatttgtatattgatttattatatcatgaaggaaacaaaaaaaattaaatgcaacactaatattagttttgtggtttatttttattgttgtaaggtatatatatgaactccggggaaattttttttgcaccatcctcgtaaacattgtaaggcctatatcaaaaaacaaacgataaagaaacaatattgaattcaaataattggcaaaataaaacgaaatacaaacaaataaaaatataaaaacagaataaagaaaataatcacatattttagcaatcctttgctaatccaagcatcaaa

SEQ ID NO: 174802 - DNA, 526 bp, Cannabis sativa
tttgttcttacgtgtcattttttggttgccaaattattattattatcattaaaatattatatcatttatcattttttggttgctgaattattattattttaattaaaatatttgatcgtttatcattttttggttgctgaattattattattttaattaaaatatttgatcatctaccatgtagtacaatcactgaatgagattaataccattttagaatcttcaatcattataattttcttctttaaataaaaatatagggacacgattttgtctcgtaatgtactttcacagaaagtattccgtgataaattagatgggtctcgggtacattaaataagtgtcagggtacgtttctactttttaagccataagttcctcatctgacggctgccgtacatcacggaatgcattccgtaaaagtacaatcacagaacaaaatcatatccctaaaaatataaatgtattattagcctattgtttttttaacaaattattagcctattttttatcatattggaaaccg

SEQ ID NO: 174803 - DNA, 511 bp, Cannabis sativa
gccacgctacctatgagtgtaggcaattcaagatcgaggttaataggctggtaagagaaggatttttccgggattgcctagccacagattcaacactgcatgtctagcagggatgcgataagggccgagatcaacccctcccaccatacattaaaaagcctgtgaatgtaatctcgggagagtcggacctaagttggaattctgtgcaagcatcattagcccatactcgccagattcattccgtgaaagtgatggcggtaatcgacaatgagggacctgacgtacttatatcattcaaccaaggggaggtgtcacgccctaacaattaggcacgttacccaaggtgattaagaaaccctaatcccctaaacgggattactagaaagataagcacaagtaatttaaacattaatcgaaaacaaattgaaaataaaacttgtaataaacttaactttacaatcaaaagttacatgtttcgggatcccagaaaatattttacaaaatattacaa

SEQ ID NO: 174804 - DNA, 897 bp, Cannabis sativa
  modified_base (337)..(338): a, c, t, g, unknown or other
  modified_base (640)..(670): a, c, t, g, unknown or other
gagagagagaggggctgctgccgctgccgtttccgtgctcttttagctgtcgctgagaaaaaatggagagagtaaggtgagggcagaggtcgggcgaggccggaggtataagggtagggaaagacgagagagagacttgggtgagcgaatgaggggggaccggaatgagacttactgcggggcttttggttgaggtttagacttaaaatgtgaatgtaaaatttaaattaattttttttttttttttgaataatggttaaatttcaataaactaaatcatccaaaagtggtgttcgcggtgcgggtgcggtttttgaccattttttcaaactaaccnncacatgcggtttttctaatttcccaaactgcactcgcaccgcaaaaaatggtgcggtgcggtgcggtttttgcggttttgcggtttggactatccccaaatgattaaactatcacaaatacaacaaaaattgagcaacacttatcaaaaataccataagtcttgaaaataaaaatgcaaaaaaattaagtttcaacaatacaataattagtggactttgggttgaacattcacatattggacctaaattaatataaaaattggtgtttttataatgtgcggtgcggtgcggtgcggtttgannnnnnnnnnnnnnnnnnnnnnnnnnnnnnngcaccgcaccgcgcggtttaggaagaattcaaaccgcgaccgcaccgcgaagaatttcaaaccgcatttttttgcggtgtggtgtggtgcgggcggtttgagcggtttgatgaacacccctatccaaaaccaaagatgcaataacaaaaggtaaggagtctctactaaaagtacggtcagtctcagaaagagaagatcgcgccaaagcatgcacaaccttattagca

SEQ ID NO: 174805 - DNA, 532 bp, Cannabis sativa
tttttgtctataggtcttataaatgtttggggtcctggtttgagtgggccttaggcatgggcctagcccgccttagcccagggttgcccttggtctcataaccattagtcacataataaaattaggggaacttacaaaaatactgtaaaatgggagaaagtttataaaaatattgagacacaaagatttttacatttttactataccaagtttaggaaaatattgtgttaaagtttcaaaattacaaaaatactgtgtttcagtaaaataaaaaaaaaactcaaaacgactaagaaggtcaaaaacaaccctagaacaccttaataaacaacatgaaaacaaatattaaacaacaaaaagataactacaaagcaacaaaaaaataactaaacattgaccaaattgtaatagggaaaataatatcaactccacgatatggcttcgtattacgatttttttcacttagttttgacaacttgatttttcttttggtcctattatatttttttttcaatgaaatttattgttacaa

SEQ ID NO: 174806 - DNA, 593 bp, Cannabis sativa
agttaaagttgcagttgcgaaagtagtaccccatattgtttgaataatttcgaggacaaaatttttataaggaggggatagttgtaatatcctgaaaaatatattgatattttaattggacatattttattaaatatgtgattatggggtattagagtaggattataatcctacttaagctaatcatgatttgattagggaaatatgaattaatgaatagtaaagcgtaatttattaattacagagattgtattggaatatgtgggtatcgtagacacaataattcaaagaaaatatttttgggtttggaaatgtggatcttgacggggtggtcgtaaatgtcacgataataagttatggaactgaatggaaattgtatcgaactagtttagaatattaaaattattgatttgacgggactggctaagattacaaaactacccctaggtgtacttaaggtataaggttatttaaggggtgggggggtaaaagggtcttttgggaaaataatttattttgttttaaggtttattggctgagttaattaatttatttatttagttagaataatttatttagggtattatttaatg

SEQ ID NO: 174807 - DNA, 669 bp, Cannabis sativa
  modified_base (202)..(221): a, c, t, g, unknown or other
  modified_base (604)..(617): a, c, t, g, unknown or other
ctctctcctcttctcttcgatttgctctgtttgggtaaatatttgttcatgtaggagtttctttcgctaaatatatagatgacagtgagagtggatttcatttagcctacccattttaataatttttattttatataaaatttatattttttttaattgtttttatctaatttatattctttaaaaaatatacctatcaaannnnnnnnnnnnnnnnnnnnaatattataacaaaaaaattaaaataaaaaattttataaattttttttagaaaaaaaataaaaaaaaaagtatatacataagtgaaaaaattataaaaatctttatatattaaaagtgcatatttaacggcatttcttggtttaacagaatatactttaataataaaataatattctgttaaatttaacgatgttagccgataaataattaaacccaaaaaattaaaccaatctttttttaaacgtttaaactcaataattaaacccaaaaattaaaccatctttttttaaattaaaaaaaatcatcttagccacatatctctctaacataacaaaccatatattctctgatatttttaaacctaataattaaacccaaaaannnnnnnnnnnnnnttttaaattaaaaaaaaatcatcttaaccacatatctctctaacataacaaa

SEQ ID NO: 174808 - DNA, 715 bp, Cannabis sativa
aagacatttgccatgatttctctagtttcatcttgctagtagctcgggatgcacattttatttatgggatgtatcccgcgggtatccgccgctaatggggtgaagattctccatctaaacacgaaaaggagtgaggatagagattatgtttagtattgaaaactattttatgtttttaaaaagaataattagcaattttgccccctcaactttcgacaatattgattttggctcttaaaatatacagcttgttaagaatccccttgaacttttacacatacaaatttagtccttctgtcaggttccgtctcattattccgtttaaatgctgatgtgtctttttaaattaacaactttaccccctaaactttgacaactatcaaattgtacccctcacaataaaattgaaaaaaaattcaacattttttttagcaaatctcaaaaaattaacgtaaatcttaagaaaaggttattttgaatgattaagaaaattaaaaaaataaattaaattttaaaactaattaaaccatttaaaaaattatttattttttatttaaaaattcatttagataattaaaaaaataataaaatttaatttttataaaaattaatttttgttgactagattttatttttctaaaaaatgtaagtttgtttaagtaaacatgacattttttagtttaatttatagtttttttttcaaaataattttata

SEQ ID NO: 174809 - DNA, 572 bp, Cannabis sativa
cttatctgattcacactcttatctcataattattctagaatgcatggtaattgtaaagaagtaaaaaattggtacgctggtggtgtggtttttgtttattttttcaaactaattcgcacatgcggtttttctaatttctcaattcgcatctacactgcgaaactaaaaaaccgcaaaaaccgcaccgcaaaaaatagtgaggtgaggtttttgcggtttagactatcaccaaataattaaactatcacaaatacaacaaaaattgagcaacacttatcaaaaataccataaggcttaaaataaatatgaaaaaaaatttaagtttcaacaatacaatatttagtaaattttaggttggacattcatatattggaccaaaagaaacataaaaattggtatttttataatgtacggtgcggtttgaactgcatattaacaattcaaaattacaaactgcaccatactgtgtcacgggctcactttttcaagcagcggaacactcgtgcggcaccttgacttctctaagccaaggtcagccttccatccatccgagtaacaatgggctcattttt

SEQ ID NO: 174810 - DNA, 507 bp, Cannabis sativa
gccccccattatggcggctcacttaccgtcgtcacttaggctctttaccttggtggcttcatgcatgaagcgttggatatagtcttttagtagctcattgggtttctgcttgatggagaccaagtcactcaactctagtggtatctgtcgagctgaaaagaattgggtatagaataacccttcaaactcatcccaagaagtgattctccctgggggtagcttagtaaatcattgttgtgtcgtgtccgtgagggttgcatgaaagattcgacacctgaggtcatccttgattccttgaaggtccatttggattttgaagctctcaacacgagttaaaggatcttcactacccgtgtacttgcaagtgggcattttgaattttgctagaatggggagatcattgatcggttgggagaaggtagatcctctcctcctttccagctccaagtcaatgagttttggtgcagtaaggtccttgaccaatcgggttaactcgtccaaccgagc

SEQ ID NO: 174811 - DNA, 541 bp, Cannabis sativa
tttatgttaaatgcaaaatatgttcttaatcatttggtgagccctgtatgtcggctcatgaaggccaaagtacaagtcaatatttcatggtatattttatgtatatcttactgagtctgttgactcaccagtgcgctaccatgtgtagataaagaaaaggctaagacggaggaacaatgagtttaaagcttggcaatgattgtgtatatcgcagcagtacaacctggagggttttgaacttaaaacattttgggattgacttttgtagtcactatgtgacatgtaaaaaaaataagtaaatatatgctgcgttttcaaaatcgattttgaatacgggatctcgtcttgtaaatctgtattcatatatatatatatttatactttattaatatgattacagtttaaatccaagtggcttttaaatttgggccttacactttgccacctttcggtgcacaagtatacccttcaaactctctcgccatagtgcaaaatcaattgatccatcaaatttctctagttcaaatctagccatcgacat

SEQ ID NO: 174812 - DNA, 541 bp, Cannabis sativa
ggcacacccttaataaggttgctttatttttgtagttgtaatatataaattgaaaaataattattttttctttttattttcctttaaatatggaacattttatttttttagtgatttcattgatcttttatatgtattttatgttattctatcgccacttcatctaaatttactataacaagaaaagatagtagtagaagggacaaagttgcccctaaaaacttttataatcgtccctaaaatgtattagggacgacaagtcgccactagcacgtcgcttctactactttgtccctaatgctcctttttaggggcgacaaaacaaatcgcccctaaaagtgattattaagggtaattttttgtcgcccctattagtattaaaatcgcccctcttttatgcaaattaggagcaaaaaaaatcgtccctaagaatataataatgtcacccctattcgcatgcaagtatgccaacatttagtatcattaatcaaccctatattaattatttaacatcaacaattaaatgtaatatatcaaatga

SEQ ID NO: 174813 - DNA, 531 bp, Cannabis sativa
gaaggaccaattgatatatatgatttaataagaaaaaaaaaattattcataaatgaaattaaatccaaccattaaattatgagaaatgccaaaaggcaccagtggtgcctaacaccctcctacgtgtcaccagtggtgcctaacaccctcctacgtgtcaatatcgctattgatccaactaagtatcgactcccatataatttaatataataacttttagggagtatcactagctaatcgcaacgcgccatgtcgagaaggtagtgatgccttatagcaatgctcttaaattatttgtggtgtggtgtttaatattattagggttaatacattttgaattttgtgtttggtaaaaattattaatttgatcatttattttgttaaatgatataataaattttgtatttatcaagataatataaataggactctgaattcaatttttgatatttttttttaatataaccaacttaaagataattttcctaacacaagcagatacagtttacgtaaccagttttgtcataacac

SEQ ID NO: 174814 - DNA, 687 bp, Cannabis sativa
gggggggggggggggacctccataccctcctcgaaacacaaagtgttttcaagcaaaaaaaaattctaagtgtatcacatccccacaaacacattcttacccattttattagaatcaaaattggaaaaatagaggtaaattgaaactttttcatgttcataatgttcttcaatattcaagaacacaaccaacctaaaagtttcaaatttcctcatttttcaccaaattacaccaaatcaaagccaaaaacacattacccaccatctatactacaaaacccaagcatcaaacactcacattacataaagaaatccaagaatcccaatcaaccatattaaattcggccatagtaagaaagccaagaaaaagtttcaaaaataccaccaaaaatatgatttctatgcaaaaaatggctatagaggtgttggaaacttacccataatgaaaaaatgttccacaaagctttcaagaatcaatcaaaagcttcaagatctcctccaatggtgatgggaagctctaacctgaaatgacactaagaagaaaaaaattggtgatttttgaatattatgacactaaaaagaaagaaatatttgcaccaacaactattattattaaattatttaagaatttacccttacctattttaatactcacaatttaggcatttctttttgataggtataccaa

SEQ ID NO: 174815 - DNA, 703 bp, Cannabis sativa
  modified_base (649)..(653): a, c, t, g, unknown or other
tggccggccagcctgccctccataggggcttgtccgaccaggaggtattctgtagggtttcctgtgtacttctatacgtggataacatcctatgggctgtgaatggggccctaaaagcccaacaaaatagctaaataatatcaacattcaatgagattttggtcttttgtaattaactaataaactatgcaaatctttagagttttaagttgtaatctagggtttaggcctcctatataaaggccttgactctaacctagaaacctaagtttagtctaagcctcaaacctgcctcaaagctctaagcctaagtctgacaacttgtctcttcttcacttcctctctcacgcgtccatacaagcatcatcgatcaacagttgaatagtgccatttttaattccatcctttgtatttgttgtacccgaaagtgagtattttaatatttatactcgcaagtgcacgaatcgtttcgaaatataatattcgtgtaagtgcaaggtcgaacccatgggagttgactaacatcaaaagaaacttttttaaacaaagcaaggatattctaaactagttccaaatatttgatgggattttagttttgaaaaataaaatgaaagaaaagtaactaaaagacttaagattaaagatgagnnnnnatgaaaatgattttcaaataagatgtgtaaaataagattattaagatatt

SEQ ID NO: 174816 - DNA, 549 bp, Cannabis sativa
tggtttttgctcgatcgtagtcacaatatctttaattttaatgtttggttccgtgaggcgttcaacgggcaccaccctcagtttctcaacctcgctgtctgatgccaatttagccaaacagtctacgtgggtattcttttctctagggatcctttccactttataatccgtgaactcatggagtagctcccggacaattgctacatacacagccattttttctccacacgtttgatactctcccgagacttggtttaccaccaattgggaatggctgaagacttctacactcgttgctcccacagtttttgctaatttcagccctgcaatcaaggcttcatattcaacttcattgttagaagctgggaattcgaaacacagagccgcctggagccgaagcccattcaaagatatcatatctatcccaacaccgaatttatttttgtttgacgctccatccacgaataccttccatgttggggtctgtggtactggtgttcgaatttattttaccaggatcttagatctactaacaagtatgttgtttaa

SEQ ID NO: 174817 - DNA, 604 bp, Cannabis sativa
tttgtatgtcgtgcaacagtaacggtaggggcaactattggaataccaaagtaaccagaacttggacggccagcagaaagggtatcagtaacaccaggtcggacaatatatgtccagctggacagaagataacgtctccaacccttcttcagctcccaaataaagcgaccgtaaccttctcctgtgatctgctcagagtaagagtggtgttgcacttcgggttttggagtagaggaacgatcactactcacctccatatctttgaagcttgaattagaaagtccgtcactcgaagaggacggactagcgcgaagacaaggttgatcctcgtacagaagttgaagcagatcctggtcaattaagtgttcgcctccccaaaactaaccagggttcatctacaaaagacaatacacgggatgagtgtttggccaggatatcgaacaaaaaataggcaaatatgccgatgaggactactcaatagattaaaaagacgcgaaacgcataaaggttcagccataacccaagagtttgaaatttttgggttaaaggctaaatttcacgaagctttgaatgagcaagttgagaatcgaacattgcgagatta

SEQ ID NO: 174818 - DNA, 583 bp, Cannabis sativa
ctaagctcgatttacactaaaaaaataagaaaagaacgatcaaataccagggatatatttttgggtatgaaaaataaaagatttaaaaaatgagtgaaaacggtgaaaaatgatggaatgggggctgtatttggtggtggacagcgagacattcgtggtttggtgctgctaaaaaatgaagaaaatgaagagacgaatgcacttatcagggttttaacaccctatgtcgtcagttattagcaaataaccgatgacataagtgacacacattaggtgtaaatcttgatttccaatatcagacacgactaaaagaaaaaaaaaatgtagctatataaattaggtatactctataactacagtttttataatataatcgccattaaatgtcaatatttaatggacgggaacccacaaataagtcttagatgttttagcttcttttttttattaatcagttaaaaaaaactgcttctaaaggcttgtttgtagtagtactagaagtgtttaaaagaacactaataccacatataatttttttgtattaagtttttatattctgtactatcatttttattttattact

SEQ ID NO: 174819 - DNA, 762 bp, Cannabis sativa
tgtaatttaaatttttataaagaagtgtgtccccgaaaacggcctgtttactagtaatattcataaaaaaaaatctttcaattgatttagaggtggacattgatagtaaatatgtcctgcataaaaaaataataattaattatacaattaacaaactttataaaaattaataaatgaataaaaaaaaaaaccaacctttcatctgttggaagaaatcggtagtcctgtgagcgatgacgtgtccatcgttatatatatcccactctattatcttagcacctgagatggtaacagagccattaacagaagcctccgtcacttaagcattaattccactgcaagtaactaacgtagaacccttataaagcgatccggtttcgaaagctttcctatcaacttttgtggtgacaatctagttttcgagatttatctagggctcaaaacgcacaacttcgtctaacggaacaaagagagtaacggttgagttaccataacggctaaagatggtaaatctactgaatttgtctatcgattaagaataagaggatctccaatggtaaaattttagagaatatttggtgaggtggtcatattatattttaaaatattgagatgctatactattagagagaaatagatgttgttctaaaaatttgcatgtatgctatgctgtaccattgatgctattcattattttttaataaaaaactgaagctaaaaagttattgtagttaaaaattatgatatatattaaataataat

SEQ ID NO: 174820 - DNA, 572 bp, Cannabis sativa
gagagagagagagagagagagagagagagagagagagagagagagagttggtcatataaaagtataaggtaagtctataatacaccaggggtgtttcggtagattctttatctgtttcgacatacaaaagagttttttagtcgatttttttcataatcgtgtacgttatagttatttagaaccacttgtaaatttttagaaaattttaagtagttgccaaaaataagatttatatattttgttgctcgtgcgactattttttcttatgtacgtgtagtaaataattgtttaaatctaatttttggcattgtaaatatttagaattgtctaaaaatttacaaataatcttaaataactataatatatgcgataataaaaaaatagactaaaaaaaatttctgaatgtcgaaacaaatatagagtctaccagaattacccaaagagtctatagaaatttcaaaaagtatataaaataattgagacctagtcaaattattatgggagaaaatcttgatataagatcatcatatcataatcatagtaaagaagaacatattattattattattatt

SEQ ID NO: 174821 - DNA, 577 bp, Cannabis sativa
atattaattttgcacaaaaaacaatgtgaaagaaataatgatctataaataatctctaagtgtaacactgcattatgtgagatttttttttttctaaataactcactaaatattgaaatcactaaaattttaaaaagtaaataaaaaatgtaaagagaaaatgacaaaaaatatataaattaaaataaaattcataaaaagcgcaatgttatcacataagtttctcatttataacgagatatagatattagatagatagatgtagattgggcaagaatcatcaattacacatacaaaattatgtaatattaattttgcacaaaccaaagtaaaagaaataatgatcactaaaaccctaaaccctaaaccttaaatttaactcaataaaaagtgaaattacactaaaattttaaaaagtaaaaaaaaaatgtaagaaaaaaaaatgaaaaacaagataaattagaataaaatttataaaaggcatttgattactcttttaaacattttctttataaatatatatagatatagatattgatagaatatattatattttggaagagatttcaatggttac

SEQ ID NO: 174822 - DNA, 538 bp, Cannabis sativa
attgttagtattattatgtgattaggattaggaaggaatgaagatcatgctcaatgatttaaaaagtattaatttgatggtgccaactttgtaccatgttaggaattacaagatgaaaagaaaggtttattaggaattgtttcccaaactttagcatgttttaaattgtgctcttcggaaatttttaggcccttttaaattattgagattgttaaattcaataatttttgttcaattttactaatgggtgcctgacatagactgaagttcgggggtacaatttggtacatagacaatcactacgttaggcatagttagtaaaattgaacagaactagacaaaagttcttgaatctaacaatttcaataatttaggaaaatttttaatagtttgaaaaatttaagaaacacgatttcatacgtatcaaaatttaagaaataaaattcaaaatagccaaaaaaaaaaaaaaaaaccatattaatgtattttttacccttcaaaaaaataatatatgattgtattaaaaataataaaatag

SEQ ID NO: 174823 - DNA, 591 bp, Cannabis sativa
taattgtttctccaattttataatgttttatctcattatttgaatccataatgatctaatttctttgagtcgaaaattttctttccaattttatgagctcatttcacaatttaaatccactttgatcactttatttttgctatgacaagaaaaaatacaaaaaggtataactctcatagttcacttttcttatctcataaaatgagatgattatcattaaaatgaaattttatttccaagtaattatctttaatcacaatatagtctcatagtaataataatagaatgaacacatttttcttatcatcatctccattatcataccatatagtacatatattaaatatgataatttatatacatatattaatatacaaaattaatataaaactcccataaaatttgaactttcaaataattttatgttgattaatactacatgtatgatattatactatcataaataacatacacaaaatatcaatattaatttcacaattaaatatacatatatgagtgcactattaatgggtattacccatgaatggataaaattagaaaaaattgagtttttatgcttaatttttctat

SEQ ID NO: 174824 - DNA, 587 bp, Cannabis sativa
gatatcctggttatctcaggagggtcgcatattacgggagaaagcaataatgcccaaaagagatatgtgaatgaagtaaagaacgagcagtcagtctttgcttcggaaccttccaagaaagctaagaccgaagaacctccaattgtattctcaaaggaagatgaaaaaagacgtgacatatcctcacgttgacccactggtaattacatcctgtataaggatacactgaagaaaatggggcttgaaattgggcgaagcacctttatccaccacgataatgcaagactttttggttgtcaacctgccatcagcttacaacatattgttgggtcgaccaacattaattggactaggggcagtaagttcaattaagcacttatccctgaagtttcaaacacctttgggtgtgggagtagtgcgaggtgaccaaatgctggctcacgaatgctacggcatagagctgcaaaattgaaaggctggtcaccatcttatggcagttttgattgaagaaggggagaagaaggatgaagatcttgatcctcggattcaagatgaaagaaatgtattgaaaccaattgaggagttgg

SEQ ID NO: 174825 - DNA, 726 bp, Cannabis sativa
  modified_base (91)..(102): a, c, t, g, unknown or other
  modified_base (565)..(567): a, c, t, g, unknown or other
cagtggctgcaataaccctgcagggcgctgatgctcaaccttaattagctgacaggtaaggcactttgcaacatactcagcaatgtcattnnnnnnnnnnnnccaccagaacatggctttcaggtcctgatacatcttcattgaccttggatgaactaaataaggagtcgtatgagactcatccatgatctcccttttaatactttcatccataggcacacaaacacgattcccgaatcgtaacattctcgtttcatccactgagaaatcactagccttcccagccgaaaccctagctcgggtttttaccaattccagatcttgcatttgtacttctttgattcactctaaaagagtggattgtagggtaatattagccagttaccccacaaccaattcaatcttagctcgggtcatctcatttgctatctattgatagatttgtttcacaacgctcaactgactctgaccctttctgctcaaggcatcagtaaccacattggccttaccagggtgatacaggatatcacaatcataatccttcaccaactctagtcagcgtctnnntctcatattcagatctctctgggtaaagaagtatttcagactcttgtgatcagtgtatatttcacagttctcgccatatagataatgccgccaaatctttagcgcaaaaaccactgctgcgagttctaaattatgagtagggtacctctgctcgtactc

SEQ ID NO: 174826 - DNA, 582 bp, Cannabis sativa
tttttttagtaaaaaataattttttctaaaaataaaatggcatatgaccgtggtctatattgagcaacactctatagaattagtcttaaaaattgaaccacattatatagagaaaattatattatatactcattttactttatctattttaatttttacatttatttccatattttttaagatatacccactttatagatgatgttttcattatattttttaagttaatgtaaattatgtgctagacttaagtggagggtgagggtatattaggcaactcactcataagagcaactccaaggagtcgtcaaatttgaggatgcagtggctaatcttctccaaggtaacaccattttgaggtgatatatgcattctctgctacaatgtactgcatatatgcagtagctaggggtgtacatcaaaccgctcaaaccgctcgcaccgcaaaaaaaaaatgcagtttgaaattcttcgcggtggggttgcagtttgaatttgtctcaaaccgtgcggtgcagtgcggtttgcggttttgaattattaaaccgcgattcaaaccgcaccgcaccgcatgttttaaaa

SEQ ID NO: 174827 - DNA, 588 bp, Cannabis sativa
aatcctaagggtgcaatagcagattctaattctcaaagctcattttcaattttattactgcttttaagcaaaaaaaaaattcattacttctatttattatttttttaaaccttttatattcgttttttctattacttttttgttgtatttgaatcaataacaatttcaataaaatagttcaaatttgttagtgttttataaaatatataactatattataatatttaaaaatattatttgtaagttgtacattttttgtaggtgctcaatttttaaaattagaagacgacttctaaattttttaagacgatcatgtatatgatcttatatttaattattcattggtgttatattattatacttagtgaaaacatatctaatactaattggtatctaaaataaattgaatatgcaatcaaatattttcccatacgattttcaagggatttgaattgtaaacctaggatttaaggctttctatataaaggtcttaacctctagttgaaaacctaagttgcttaagctgcctctaagcttaaaacctcaaactgtctaagtgttagactctctctcttcttcattctctca

SEQ ID NO: 174828 - DNA, 566 bp, Cannabis sativa
caatacaaactttttctcttctccattaataattttctagctacctttgtatgcacttgtattatcagtgatcacttgaacaacaatgtcttttccaatttcttcaataacatcatcaagcaattggaacaattttcgttcatcttttacacaatctgatgcatcagcaattctcaaaaaaatactcatattgattgttaactaaaaaattgatcaaactcttatttctcatatctgaccaacaatctgataataatgaaactcttgtttttgaccatgtggcttttatgtcactcacaatttcaggtgttttcttctcttcttcttttagtatccaagtcctcaactcatatattgtaggagctttcaatcctcgaccataatttctagtgaaacgcagcatattaaaatatgatgagctttttgcacaattaaatggtatcccattctcaaaaaagaatctcccaatatctagacaaacctaacttcaatgctctttagcacctgttggagtcattttttgggtagcacctattagactttttatttgggcttacattaaattt

SEQ ID NO: 174829 - DNA, 537 bp, Cannabis sativa
  modified_base (504)..(512): a, c, t, g, unknown or other
cttttattcttttataaatcagggtgcaaaaataaattttaaaaaaaatgtttttagtgggatttaaacccataacctctatctaatatacaatttagcttaaccattacaatatataatcttgtattatacatatatattgtaactaactaaaatgtatatacattttttttttattttttaagaaacgactgtcccaccttacttctatatagattcgttgctgattatatgtataaaaaatgtcatgcgtgtaatgaaatatttaaatattaagcattataaattatttaaaaattttaaaagaaatctaaataattttaaataattacaatatatatacttaaaaataattcttcacaaataccgaaaattcttctttattaggttaattatgatttttaccccatgaactttgacatgtaccaaatcatgctcctgaatttttaaggtcgtaaaaaatgctcccgaactattgggattattggatttaaggacttttgnnnnnnnnnattcaattttactatttcagtgatt

SEQ ID NO: 174830 - DNA, 716 bp, Cannabis sativa
taaggcattcgatagggtggaatgacatttcatctaagaaatgatgactgctatgggttcccaccacacgatagtggatctaatctaccgctgcgtatctagtgtttcgtactcttttctcataaatggttcgtcccatgggaatgtgttaccaactcgaggcatcgccaaggagaccctttatccccatatttgttcataatatgtgctgaaggtctctctcaattgtttcaatttgaagaagaatctgacaacttatctggtttgcgtgttgctcgaggagctcctgcaatttctcacttattcttcgcggatgacagcctagttctatgcaaagccaacactcgatctgctgaagccatacgaaggtccttaaacacctactgtagtgcctcgggacagagattaaatgcagcaaagtcagttctctcattctcatcaaacacttctcagcatgttcaattgaactttcaacaaatcatggatatgcccatacagccatgtcatgaaagatatttggggtttccatcttactcaagaagggataaaaatttattgtttgctgatattaaggacaagctttggaaatttcttttctcttggcaagaacaacttttctcaattggtagtaaagaggtgttgttaaaggcggttgcacagtcgataccaactcatgccatgagttattttcgactatctaattcactcattgatca

SEQ ID NO: 174831 - DNA, 651 bp, Cannabis sativa
attagggaactaagtcgcgcgaatagcggttcgacctcacttgtataattctttttattattttaatgtaattttttttacattttatttaaaatgtaatttaaaataaataataattattagcgtttaccttactataaattaggcaacaataaaataatagagttgtaaaatgtcaatacatgttgcttttgagatctaaaaaaccactcaaaagatgagtatattgaattgtatgatttctttttattgtagattataaaaaatgtaaattattttttttttttaaaaaaaaaaaacatacctatttatatattgagaaagtatagcaaaaaaatttttagtctgtgtccgagagaaaaaagaaaaaaaataaatacaccacaataaattaaaactgtttattatttttattgaacttcaaacattaatcatatattaaactaacaataggagaaaattaaagtaaaaatataaaaaatcaataaaaataataattatttaagaattaaaggtcaaatagataaagaaaaaaaaaccaaaacatggatgaaaatgtcactctactcactctatccttcttttcaatttttcattttaattaattgaattatttttaccactaattaaagaaaaattacataaaataaa

SEQ ID NO: 174832 - DNA, 533 bp, Cannabis sativa
aaaaaaaagtgaatgtaaagataggataagagagctaccacaaataaatgatgagagaattaatttcattaataatttaaacaatatacaatggaagagattgattgttattatttatttatttaataaattatgtaattttattaatagtaataagttaaaataatagcctacaatttaattaacaagctaaataatccgtcgcttaatttcgagattatcttaccaaaaaaaaaaaaactaaaaataaaaccagattaaaaaaattgtaacattacagttaatcttaaaaacacctatattcaatttcatttaacgctcagaagacacaacagtataaactgttccaataggttcattcaacttcatagcttgatcactcaattattgtgcaaggtacgtaactgcactattaacaacccctttagtgtagagaacttattttctcaaccactaacaatgatttgatgacgagtcatcaaagaacaaagaagaaccaacaacgaaacaaaacaaaacaaaaccatgtcata

SEQ ID NO: 174833 - DNA, 541 bp, Cannabis sativa
ttaaacaccttatctttctcattttcggaaacataaaatctgatttcatcattcattatatgtataacatgtgtgactatactaaacaagtaaaagaccataattgaaactctttgcaaaaaaaaaaaaatagctatgcaccatacaatcaactatcgccttaccacaaaaactgctatgcaccattctcaataatattatttacattgcaatataacttaatatacagcacaattaagactaaaaggaaaattactttatattgaactctcaggatttatcttccaagacaagttccaatggcttaacaaagatagcaaaactgccacatgcattcctgtttatgaagaaggctttcaattcaagtagacaatctttaattttctccctaaggatgttgtggtattgtcatcgtgtcttggtatcatttgttgcagtagtttcttccctaatcaagaccaaataatctacatttccaatccattaaacaaggaaatgaccaaactgagttgggatgcacttggaaatgataacattatat

SEQ ID NO: 174834 - DNA, 526 bp, Cannabis sativa
gaactttacaaaataataacaatttagaatctacaggaaattttaattatatcctataaaataataaatacactctatatttaaaaaaaaaaataataaacttaaataatttttaaaaattactcttattattttttttataatttttttttcttatttttttgttaatttttttaatgtagcgtaatggtattacaatcaattaatagcttaaaaattttgagtttgaatccatgccataaattaaaagaaaaaagttaaaaaaaataaaacaattaaagatataaattttatagagtaatttgcggtataaataccaaaatttaactcctaattgcaaataaatacctaagtttaaattttatcggcaataatacctaagtatatttttaaacgaattctaaaaatataacttaagtattattatcgctaaaaattaaagttaaatatttatttgcaactgtagttaaatttaaaagtatttataccacaaattacttaattttatatagggtaaataccattt

SEQ ID NO: 174835 - DNA, 591 bp, Cannabis sativa
accgacaagaaaggtaaggacattggtgctaattcagcagcaaaactgagacggtcactagaatgaaaatttgccacaaaaacagcagggggaggatatcgtaagtaacccagagatgttgcttttgtcatttgtgaatctgaagagtcaagatcattgacctgcatatcagtccaataatgtaacctacatgatcgtttgagtaaaaccgccatatgaaaacacactttatataattcacctcagcagttaaaagaaatggagcagcgtgtgggtgaaaatgaacagctcgaagggaacgcctcgtcttcaatacaatatttgggggaagtctcttgtcgtagttccatatgaacagctgaacaatatttcacaggtaaaaattgtaatcatatagaaaaaaaatgcaataatatatttatacttatatacagaaaagtttaaagaaaacaatcaacaccttgtgaccggatgcaacagcaagaagatctcctttggcatggaaagcaatcgatgcaataggtcgatctgtgtcaaaaaggaaaggccacaaaaataatcagtatgaagggttggtgagaatctttttgt

SEQ ID NO: 174836 - DNA, 542 bp, Cannabis sativa
atcatttgtcggtccatcagtctccataggctcgttcgaagacttttccgaatatagaatacaattttcaacttgcaatgcacaccatggcccaactccatgagaaaaatctctaaccactctctcaactcttctaatggccagaatcggcttgtcgccaagagaagcagtttcaaatctaatctctgcttcttcacaagagtggttcgctcattaaaatcaaacgacggttgaacaccaatatcgatactcggagattttctttagtaattctgagagttaccaatttcgtcaagctcatgtaaataatcatccaaatcttttaaactaaaaactaactaaagactaaaattttatcataaactccttccaaagaagtctctctgttttgagagttttgttctgtctctctttttgagtgtatgcattgtgtttttctgttgactgctatttgttcttttctggtttttgtctgtgtacgtaatctgttttgtgtggttcgtggctttgtttcatatggcttctagcagcctcaatatgga

SEQ ID NO: 174837 - DNA, 655 bp, Cannabis sativa
taaatgggcgaatcagaacaatcgctttggttggattgatttgtctactgagattggcgctcttccctctgtgccaatagagatagactgcccttaattctctctttgttgtaggttttggattttatttgtttagtcagttagtagttttctttcgttgtttgtttagttggactgtggttgcccgtgagtttgcttttgttggtgttgttctctttgctttccctattcccaaggttatttaatcaaaaaaaaaaaagattacagttatgtgtaaattaaataaaatatatatttgaatttagtatgattaattattatttaattgtgaactaattgaaacacatcagcatatagataattgaatatgctaatatttttttttttttaaattacgacgtatataaatgtgaaattttaattttattatgtaacatatatatcatttaaacttaaatagtttaaaaaatgacttataaatcataaataaatcataaaaaaaaatttatcgacaacagtgaagtcgtcgattataaaaaaaaagtttatatttcttcaaattatcgagaaatattttgatgagtgagagaaagattgagaatctatatatataaatggaacacttcttaatgggtattactcatgaatggttact

SEQ ID NO: 174838 - DNA, 528 bp, Cannabis sativa
attaattcaataattattaaaaaagtgttaatatttaaaaataacaaataatttcagaaacaaataaattataattaaaaaaaaataaacacctcatagaggaggatgcaattccaggtcttaaagggatggaaagtggtggctggagactcccaaaggagatttcatcaatcttgttgcctgaagtgaatgcttcttggatgtctagcacaaagaattccctagcaagacggaagcatacgaataattaagatatataagagttttatcagagttaacactgttctcccttaccattgtaactctttcttttcctttagtgtaggaatgtctttttgttaaaccattattgttggaagccatagcaattcttagttcatccatgcccccatagctcttgcacgagcatttttgagattagagaggcttaaagtgttggattttgtaccctaaataaaactcatttgaatataatcagatttactaattaatataagatcaaaaatcattctatgttgcatgcttcac

SEQ ID NO: 174839 - DNA, 1116 bp, Cannabis sativa
  modified_base (786)..(787): a, c, t, g, unknown or other
caactgctggacacgagcttatgtggttcatggatgcatactttggatataaacagataaaaaagcatgtcccagattaggaacatacaagcttcgtaaccaacatgggactttattgctgtaaaatcatgccatttggattgaaaatattggggcaacatatcaccgacttgtgaatgaaatgttcgcgaaacaaattggacaaaacatggaagtctatgccggcgatatgttggtgaagtaggtaaagagtggaagtcatactacagacctcgcggactgctttgaaatatgaagaaagtacaatatgaagcataactcgaaaaagtgttcccttggagtttcctcagggaagtttctgagattcatattcaatgcgaggggcattgaagcaaaccttgagaagatcaaggctttgattgatatgccattaccaaccgaaccaaaggaagttcagtccttaacaggaagaattgtgacacttaatagattcatttcgaagtcaactgataagtgcctacaatttttcaatgtattccaaggcaacaagaagttcgaatggacagatgaatgcaaggaggcctttaagaggattaaaaagcatttttcaacacctccggttttggcaaaaccagtaactggagagacattactcctctacttggttgtctcagaaaatttaattattgttgcaatagtgtgagaaaagggaaagcacaaacaacctatttactatgttagtaagaggttactgggggctgaatcgagatatccccctcttgaaanncttgccttatgcctaatccacgcatctcacaagttacgaccttacttcctggcccatccaattaaggtgttaactgatcaacccctgagacaggttttatcaaaatcagatgcttctagaagattcataaaatggtcaattgaactagggcaatttgacataacttatcacccacgaacatccatcaaggaccaagccttggcagatttcctgataaaaggaaaaactacagaggaaaatctgcttgcttagcgagacgcggatacttggaaattattagtggacagggcatccaatgagcacggctcgggtgcaggggtgatattgat

SEQ ID NO: 174840 - DNA, 571 bp, Cannabis sativa
cctaaaaccccaaaattacccttacaattcaaaagctctcttctctcactctctctgtctaacttcccccctctctctcaatctgttattcccatcgagctccaaacctttcaagccttgactgttcacgagctccgaccgaccaagacgacccacgaccgagaagacccatgacgacttgcgacgacccatgacgacccacgagaagcacccaagacaacccacgaccaccgcatttttttttctggtttctgacccatctagcgctattttctgcatttttttctggtttttgacgatgtcgcgaaacatcgctagatgtcacgaaacatcgcgaaatcttgaaacatctctaaatgtctccaattcacaacaattcttgttttctgcattttttttttctgatttttgacaatgtcgcaaaacatcgcgaaaatcatgaaaacatctctaaatttctctaactcacaacatcgcgaaatatcgcgaaatatcgctaaatatcgcaaatcatcactaaacttcatccctgacctcagatttgttctatcattgcaaatacatcgttaaa

SEQ ID NO: 174841 - DNA, 519 bp, Cannabis sativa
gtctctatccagccataggatggctcgtaataagaaaacaacgcgtatggcagacgtgtctgactcttaagtggctcggcacgccactttgcctagcgccgaacgggatccagccgtccaggaggagggggatcatgaaggggacgctgaggtttaggagactgaagagtaggacgacatacgtcctagcagtccctccgaggtggaggaagaggaggaggctgaacccccaaactacgggggatacaatgaggctggggagccagtcgatgctgatggagacatcttggttgagggtgtggactacgtcagtgaggagcttactgttgtggttcctcacagaaggcaaggtgccttgggtgccagatgggtgagtcctctgcccagggttactgtgcttgcggactctcaaccacggtggctacctggtcgaattggactgctacattcccgcccacaataatagtgctacaaaccttgaaaaggggatgtgcgcttggtcgggtgctcatgcccagc

SEQ ID NO: 174842 - DNA, 578 bp, Cannabis sativa
  modified_base (134)..(136): a, c, t, g, unknown or other
tttttttattaataatcgttttatattaattattattaattgttttactaatacttttttattaataaatgttttatattaattattaatcatttttttattattaatgattaattattgttttattattaatnnntaattattgttctatttttttattcatatttattttatattatttattagttattgttttattaattattttttattaataattttttttattaattattagttattgttttattttttatttttttattaataattattttatattaattattaataattattttattaattttttttattattaatgaaacaataattgttttatttttttattattaattattaattattgttgttggtttttttttcaaggaactccacatctaataattccagtgtcggaccattacacaggccgtgtcacatggctcggcggtagttattattacctgaagattaagactaaatttcaagaattcaacctatgggacagggtgagggaatcccctttcaaacagttttttgagagagagcccattcaattttcaggagcatttttt

SEQ ID NO: 174843 - DNA, 897 bp, Cannabis sativa
tttatagcgatgaaaaagaaatagttctatattgttcgcctggaccacggtctcataatcaatgcacttccagaactgtacttaattgttgttgatatttaattcttaaattaaatttcattagtgctcctatactgatacccttttttgatgttttacacttttcttatacagaaatttaatatgagcagtaaggatttggattatttcattggaggtccttcattccgagcatggtgttgtacgggaaattttcatgggtgagttaacaagtagctgaattaagtgaactcatttataatttatgatatagtgagtatataatgtgtgtatatttttttttacagaggttacacaagattgttgcaaaaatcgaataatgaatcttatcttaatcatcataaaaatgatattaataattatttttttacagaggttgtttatccaaaaaaaattatggagaaattatcggtcaaaacatggaaaattcagttgtatgtagatctaaaacgaacaatgagtgcaaagtactatcaattcaccattcaagcagctgagtcgataaaagattaagaagaagtttcactactctttttagtttttctaataatattctatattaagactttatttaataattttttttctattttaagattgcacattttttttttaattttcattaaataatatttgctttaaattttgcaaaccctctaaatttttataaataaatattattttcatatattgttatgacttatatatacacaattatattttcaaaatcaaatataatattacaactattactctaataaaataaatcattcacataatcattacctttagttacagaaatctaaataaaaataaagaactaaactttaaataaaa

SEQ ID NO: 174844 - DNA, 523 bp, Cannabis sativa
tttttaaaaaaaaaaacaaaataagtcctaatcgtgcggtagaatatatagattgggttccctccctaccacgaggagaggagacagtagattattttagagaaataatcttagtatttatgtaaaatcgttattggtgtaatttaatattgtgtcatattatattactattagtataatttaatattatgttttatattattgctaatattattatcttagtataatttaaaattaagtcttatttattttattttattaaatattataaaaaatcgttaattttttttttttttttgattcaatcgtttatatattacaatatattttacctgggactcgaaccaagacttctaacactcacacatccacctatggccacttgagctagcctcaagttgttataaaaaaaaaaaacgttaattaattatatgagatttggtcttatggaccttactaggtgccccattacaatattattttaagattttaatttgttttttaaaaaaaaaaataaaaagaa

SEQ ID NO: 174845 - DNA, 1017 bp, Cannabis sativa
tattacttaagctgatgaggagacgccgctcaaagaggagttggttaatttagttatttctaactaacttaacaacctcgcttcttgcagccattgactttaagaacttgatcctaagcctataaataccaccttaactttgtcatttgaaaaatggaagagattcagaactcagagagatgagaggtagagagagaggtgtagagaaaagagagagattgaagttgggttttataagaagaatcttctgtagatgaagaagattcttgggtataagtgtgagaattgaaatactttgtgagaactaaacagaaaatctcatctcgatcgtattgtacctattcttactcaatcaataaagaaagattacggcggtgtttaagaactggagtaaaaccatatatcacatcgatcaaacttgaaccagtatatatcttagtactgatctctttattttctgcatttattattttctaattttaatactctatttgcccatattttactattgactggtgttcttggtttgataattttgtaattagtaattatttgatcgtttaaagtttaattgttttgattctataaatttagtcgtaattttctcacattatgtataatttttttgttttgtttgttcatttcattttcttctcaagaaagtattgagaatgggaggttttcccccaaatgattatcttaaaataaacaaaacactcaataaactcacatcaaaccctagtttagatcaccctaccattgacatcaaattcctcccagtcccctcaaccaaatttcccaaaaaaccattcaatagaaagcttacgtcctaatctaaaacatatccaaaccccataaaaaaatttaaacccaatctcatattatatcgattagaaatcaagttaaaaacacaccccaaaagatcatccccatctctaacattacttcaaaccgttatccgcaccttcccacaagatacccttatggaccgtcgataagcaaaagatccaaaggccc

SEQ ID NO: 174846 - DNA, 521 bp, Cannabis sativa
taggtaaaattataaaactaatgtcaggaaaaaaaaaattggggaaaatacagatttttctgccattaaaaatcgtcgcctatagtgtagggcacggtttaaaacgtcccctataccctattataggcgacgatttaaaactgtcaggaagtccacattacagacggtttttaactgtcacctattttccccgttttacgactttcgtataggcgacgactatagaaaccgacaagaataattttataaactatttaaaaatgttgggaaaaactatttttgcagtcgtgcagagttaacaggtgctgctggtagaggtatttgaagttcagtttgcagggaaacaaaccatttgatttcagaggctgcattgcaagagcacgaaactcactttcagtgctagaacgagccacaactggttacttctgttgggaatattttaccaggatctagatttaccaacaagtatgttgaattaacatcctaaatatgaattctctaaaacagtgaaataaacaaat

SEQ ID NO: 174847 - DNA, 576 bp, Cannabis sativa
tggtggtaattattataaatataatacccagaaaaagatcgatcaatgagtcaaaaatagcaactatattatatatcactaattataaattataattataatattgtgacttataaaaaatattaattataaaaattataatttcttatgattaaatgtatttttaatcacaatacttattgtgattaaaatttaatttgtaacagattgtatttaaatattatattttaatcatatcaaaataattttttattatgacttaaaaattatatttagttaaaaaaatatattgtaattaaaatattatcgtaattattttttatagtatacataagaacataaatagaatatatatatatatatgcatggttaaatattaagcatatgtttatttattttcacaataaataagcatatgataatatttcatataacacacacgaggacgacgaaggaatagacaatattttattttataaattaaattataataataataataataaaaagctatatagggtacacatatgtaatgtacgtgggaactttgtcgttcttttttctcttgtcaattat

SEQ ID NO: 174848 - DNA, 638 bp, Cannabis sativa
agtaatttatacatatagtttaaacaataacttataaaaattaaattaaattgtcataatttttattttaaacttaattttttttttatgaagattcattttaaatttatataaactttggagtactttgtctaatttaatattcttagttatattcaagtttattcgttcattctactattttaaattatattctttttttttcttaaactatataaaagaaaataaaatatatacaggcaagtatctttcacggagttaagagtaagagtcaagtatgttattttatcattattttaagagataattgatggaattctattgaccaagtactgtcttgttatggtatacgtatgaagtttcacaattgggtctcccagtgtattacgacaacaaccctcaacatctgtctcaatgggggccagtgggcacgattaaaccctcatgtggtcttcggcaaggattctctgtccccttaccttttcatctaaactgccgaaattttatcaacgctccttcatgatgacctctgtaagaacattattaaaggtattaggttgagtagaggaggcccagttctctctcatatcttctttgctgatgacttaattctggtgggcaaagctaatttgagcgaa

SEQ ID NO: 174849 - DNA, 508 bp, Cannabis sativa
  modified_base (197)..(198): a, c, t, g, unknown or other
  modified_base (410)..(410): a, c, t, g, unknown or other
ttaaaagttatcacaaaaataggattgcagcctacttaagggggatagctcaatcagtaggggtttaggacagcccttgtccgagaaaactcagtcattggctgcctgaagccgtgtgaatgccgagtgaggccctcgtccgtgcgcgtgtgtgcatctctttgagatatttttattcaaacttcaaaaaatcatanntaattcataaaaaattcaaattaagttatgtaatagcctaaatttattaattcttcatctactttctaggaaaaatactttcagaacgaaattaaaaatatttaacatcgtaaaattgtaatttccatactatcatcaaatatgcacataaaccaacatgaacacatctaaatcaacacaaacaacgatattttaaatccatatttcatganagtaaatcattaccatggctttgataccagttgttggggattattttacgatgatctagatttattaccaggggcggagccagcatgaaaaattaagg

SEQ ID NO: 174850 - DNA, 516 bp, Cannabis sativa
acataaacagttacgaacgaaaccttcattcgtcggtgcgacaaaaccctcctctctattaatctattttctttgattttcaatccaaaaccttgtaattcaagctccagtagtagcgggacaataaatcattgaagagggaaagcttgagataaggattggtttcgagttgaaaacaattagttttatatagtgactttgtgatttagagtagttatgaagatctgacttcatagaattgttctttggtagctatgggactagttttgatgtttacttgttgaatttgaggtgattgtgagttaaaaatcaactttggaactttttaaagctcaagtctgagctttaatagcgttttccgtttatgggctcgattttaatttttgttacgtaaggattgttgtatatatagtatacatgtgtcttgagaagtttggaatgatttggataggtttcgatagtgtttctaagagtgcaaattaaggatttttgtaggagatcagaaatcgtattttt

SEQ ID NO: 174851 - DNA, 511 bp, Cannabis sativa
tttgttgctccattgacctttttcccttatttccatacgaatagacatagatcttgtgagcaatcttagaggtcctcctcaggctgacaaggaatcccggaagaaagttggtgcacttttggatgaattcaggagggaagttggcgtggtttctattagagaatccaacaaacccaagacccaaacctgcactagaagacccttgtgccaacctctctatggtattgagaaatttcctgaggctgggaatgaggtttcggctccaagaaatgggatcttctaatgattagaatggggtctgtgcagagatcaaggctctctcgatgtaggccgtctttctcaagctacgtgtagctggtctttctccaagctatgtgtagacggtctttctcgagtttatcaacccctccctcctcattctttgtttaggaaggtgtcttaatggtttgcccctagtggcatttttgtaaagacaaatttgtaacccgacttgggttttttcttatcttaa

SEQ ID NO: 174852 - DNA, 601 bp, Cannabis sativa
gtaaaataatttccaacaaaagctgactcgacagagctgtgatccccattaaaaggtgtctggagctgattaatgaaggtaccatgagtgtgccttcctatagcgagatgggtgcctcgctattagttgtttggatttaaaaggtgtattatacactaagtgtcttaccagtcaccatgtctcgtctcctaatgcgtagcgaggtttatatctcaccttgtacatctaaatttgtatggtttctcgttaatgtacgaatcgacagttggcatatctttatcttgcataaaaccttccagttagcaagttgtaaatatactctgtcaattccgcattaatgagttattccattttcaaatataattaccgttacattcatagattcgcattcttcccaatttgacacgtgtcctcctttgaaatgatagccgaatttcgggtataacaaacttaaatatatttttctaattaattaaatattataaaatataatttagttactagaataactattaactatttagaatatatctcattaaactaagtatttttctaaattaattttaaaataatctaatgaaaaaattaatttcatttattt

SEQ ID NO: 174853 - DNA, 617 bp, Cannabis sativa
aatttgatgagtgaattaaatttctgaacacatatttatatatgtccctatctgagtccggtagctaagccctcacactcatctttcttcagtaacttttcacgtggtcatcaagcggtccatagtcctatatgtcacattttttttttttttgagaaacctacatcacattttattactcatatttattatcacttattattactatatctttatatattaaaagtgtctatttaacggcaattcttggtttaacgattctttttggattatctgtttattttaacagaatatattaacagaatatccataattaattttatattattttataaattattctaataaaaaaataaaaattatagatatatcgttaactgaaaagataaaaataatatacaatttagctacaacctaaaaatctgggaagtagttaagtactatcgacgatcactgatacatttattaacttctccttgagattaattctctctcaatttattcaaaaaaaaaatctccataactttcaattttcattgtatatataaatagataaatcttaaattgtgagtatgatgaatttcttaaattgatattttaagtttttgtaattatta

SEQ ID NO: 174854 - DNA, 747 bp, Cannabis sativa
gaagtcggcggccggtgaagtccaagggaagactccgcgacaacgttaaggcgcgaaatgccgtgggctacgacttggggaatcttcgggctaccgtggtgtttggtgagtctcgtcacagggaaggattcagccacgagagtgagagaagagatgtcacttggggaattgatgtaatggtggtctgaaattttccattaacatcgttaaaaattttgaaattttctaatttgtggcggtctacaattttcatgagacgacagataggcggtttgaattctgaaattttcgagccaaataatttaaagccaagataattagttttgtataaaaattaaaatgcatctttttccaacagtttatcactcttgggaatactaagtattccccacatttataaaatgttgggtatacttagtattcccaacagttataaatcgttgctattaactttttttttttttttttaagaaaataccatttagtattatccacggttctccaccgttggcaatagctatcccaacgtttttttacaacgttgctaaaccgatgggaaaaataacctcttacctttgccaacagttttcataatttatcctcttattaaccgttgggaatagtccattttgtagtagtagatctgcaaaggatttcgagacagtggactgtttctttgatttccaagagataagtgattggcctaagaagatgcagaagcctgttatggaacgtctggtatcaatg

SEQ ID NO: 174855 - DNA, 596 bp, Cannabis sativa
  modified_base (570)..(570): a, c, t, g, unknown or other
actcaaacctgaacccgtactccgacctaaccttggacctaaacttgggatccaaacccagtctaggatgagaacccagacttgggactgtaacaagacccaaacctaaaaccaaactctgacaagaacccataccgggactagaacccagaccaagacttgtgacctgggacctaaaccaagaccgggacctggacccagaccgggactaggacctagacgcagaccccaaaaccggggctaacccaagacccaagaaccacactcggacttgggacccgaaactcagagttagactgggactgggacgccaattcgtacccgaaccgaaactagaagcggattaggacccaagaacaggaccaggaccagggcatggacccagacccaaaactgtaaccggactagtttccagactcggacacaaacccaccatggtatcgggtctcgaatcccgatccaagttctgaagcccaagttctggtcccagtttgggggcccaattcctcggtctgggtcacctatctatgttcacgtcctaggtcccggttgttgggttttatgccctanataaaactctttacaatctgattagt

SEQ ID NO: 174856 - DNA, 506 bp, Cannabis sativa
ttacaaaaaatactaaattttgggggcagtttttcatttttactgctacacgaaattttttacaaaaatattgttcacaccttaatttttttcttttatagtgtacacacccaaaactgtacatcccaaaactccatacgaaacctccatcttcattatctacagacctaaccacagagcaacaccagaacagccaaaaatcaactattttttcaatcagaacgtaagtatttaaaattccaatcctgaaacaataacataaaaaattactaaaacaacagtaaaactacaaaataaaataaccaaataaaattacaaaaataaactatacctcaataactcttttgccagggaggactaccataacatcacgagagggaaccttcacatggaaaattttcccttaccctaaatacttttaaaaaaaaattcaaaacaaccaaaaaacaatcgttaaaaaatataaaaattaagtattgtaacgtcctaatctataggaacgccac

SEQ ID NO: 174857 - DNA, 576 bp, Cannabis sativa
ttaaataaacctttatcaagagcaaacttgacatgattctccccgactctatggttgtcccacgtaagtttgtctccattaataggcatgttaatgagccccctatagttaaccaaatttgcgatgaacgggataaaagggtccctaccctttgagccaactcttttcgactcattcagaacaaagttagtatcacccagaatgagccacggaccaccaaacctatctccaaccttcatgaacttagcccaaaacgatctcttggcattacaatatggagggccatttacacaaggcagcagccaagggttggtcggaggatccgattagacaagaccaataatatggttttgggagcaggaaatacattcaaactcaaaccctaacttccaagccaaaatgatccctcccgcattaccaacagctggaataagtatatgaaaatcaaaatgaagcgaagtgagtgtacgtaccaaaggagtggccttaactttgagttcggtcaggaaaagaacatccggtgaacgagaccggatcagggacttcagctcccgaactgtagaggtctgccctaac

SEQ ID NO: 174858 - DNA, 541 bp, Cannabis sativa
gatttgggaaagtccataaacatggttacgaaggagatagaaaagaaatcttgcatttgtgaaggcatgaggtttctaaatgaaagagagaaaaagataaaaaaggttaattaattggaggaagttagaaataattaataatttatttaaataattattatttaattcaagaatattattaaaaaataattttatgaataatctaatagtttttaagtattaaccatttatatacactcatcaatttgttaccactagattaaatatctatgactgtaaaaatatatctattatagggacaaaactaaagtgcttaccatagatataacctataattttattagctatgtatttttatttttatttgttgttattatatatatttcgattgtaaagtatgtattttttgttatatagcatataaattttattgtatagtcttaatatttaattttatatcatgtatgcttaatttttattttattatatataaatgtgatatataattttgtaagtatagtataattattttatggttgta

SEQ ID NO: 174859 - DNA, 590 bp, Cannabis sativa
  modified_base (544)..(563): a, c, t, g, unknown or other
attgaggactgcacttacaacgaattctgtaactgcaaggtatattcacaactcttcattatctagaggttttgataggatgggaggttgagatagtttcttttttaattcttgaaaggaaacttcacactcatttttccattcaaaattcttgtttcccctgaggatattgaagaaagggacacacttgtcagtggactttgatacaaatcttcttagtgctgctatctggccagttaaaatctataccttcttgatattcgtggagtatttcatgtcctaaagggcttggattttctcaaggtttgattttattctttgggaatttactatgaagcaaaggaacttgcccgagttatctccaaatgagcacttgaggggattgagcttcatcttgtattctcaaaggaatttaaagcacttgtttaggtcctctatgtgcccccaacctttttggacttgactaatatgtcatctacatagaactccattgtaacaccctaactagcataggtgtattgcgtgatttttaaacgtactgtgnnnnnnnnnnnnnnnnnnnnaggtttatggaaatcgtgattaattaa

SEQ ID NO: 174860 - DNA, 800 bp, Cannabis sativa
tgatatcatggtcaatatcaccgaccgttaagaacattcttaatcatttggtaagccttgtggataggtgtatgggcgccgagacacaggtcgattatatatattttgttgtatgcttttcttactgagtctattagctcatagattctactttcatgtgtaggtaaaggaaagacggaagctgaacaagagtgagttccgagctcgggcaatgattgtacatgtcaagacgaagcaacctggaatattcagtctcgagacattttggaatatattttgtagcgttgtgcgacaagttgtaaaaatattttcaaaatgtttatatataaaagctttaacacgggatcccggttatataatatatgtatatttataaagtttattaattttattcaaagttttgatttgacacgattttttgaaaaaaaatccttgattagtatggtagtatgtcatttgaaaaatcactgtagcgcgtctaagcatcagggcattacaaaaaacaaattatttatttacctatggtggtactactatatcttagcgctcaacaaaacaaacaatggttgcaacttcatcaaattattttgaattaattgcactacatgaagcgggccaagaatgtgtatgattgagattgctcattcaatatatttgggaatcatgtcatatttctaagaaggaaggtctcacaattctgtacgaaaataatgctgcatgtcagctcagataaaatgaagtttcatcaaaggtgatagatttaagcacatttcaccaaagttctgttccatgcatgagct

SEQ ID NO: 174861 - DNA, 1007 bp, Cannabis sativa
  modified_base (963)..(969): a, c, t, g, unknown or other
ttaggtcatgggttgcccccaacatttctaacacagaagtgcctcgctgcctcaacgattgatttgcttggttgacgggtggaatggcaccatttatctggtgggaaccatcaggtatgacttctcctgatgaattactagacatggtttgctcgcctactgcttcgcccatgagtggaactcgtgaccggggattgggcggatgaccctttgcggtccgagaagcattcatcgctggatctttgtctgtctcacccaggggaatgaagtttggcagtttctaacctacaattttgtaggcttttcgtatcagcacgatagcctaccgactacgatttttgatctctgcatgctgagcccttaatgcctccatctctctatctctccattcgacgaacatgcacctttgttcgttgaatctgagatttactacagcgcgtagttcgtcctgatcatggtgtagagtattgttatgaccctgcatgagtccgagagcgtcacagagattttataattcagtggcatctccgatggtcgtctgggcgttggttccaggcgaaatagttgtgttatgaatgccctagttgggtgcagaactgttattccgagtctcttgcacaccaggcgcaatttcatctataggaactgtcacaccattccccacgttcaccggctgtccaggattaacagctggtagaacccttgtgtttcgtgggttctgcgatgcaggatccagtgtttgtgaatttgctggatcagtcaggcctctacaagtttgcaccatcgtatttgtgatcaaatgttgaataaagagcaattcgtgatccttctctcaatgaaagtaccaaaatattgacctcgcttttagccaacgacaacgagtctattttttataaatgataagtgatttatagcaacaaatatatgataaagcaatgtaaagacacaggaattttatagagnnnnnnncccgagcagttcggtaatagcataatcctcattatttg

SEQ ID NO: 174862 - DNA, 503 bp, Cannabis sativa
aaccaaaagcctacttatctacacgccacctattggttgaatctcttatccctactgaaccaaggacagttcagcaagctttaaaagatcccaagtggtttcaatccatgcaaaaagaaaatacagctctcatctgatccaatacttggactttagttccatattaacctcacatgcatgtcattgacaataaatgggtatatcggatcaaactaaacgctgatggctctctaaacacatacaaatccaggttagttgctaaatgatatttacaaacacctggtattgattatgaagagacgtttagtcctgttgttaaaccagttactgttagaactgttttaacattagctgtcacttcagcatggccggttaggcaattggacgttagcaatgctttcctcaatggtgatttgcaagaaattatgtacatgagacaaccaagaggcttcgaggatcctaccaaaccaactcatgtttgtaaactacataaagctctctat

SEQ ID NO: 174863 - DNA, 706 bp, Cannabis sativa
tagtccaagaccaccagctcctttgggtaggcagacctgctcccaagctaccaatccggcacctgcaccagcctgagtgcctttccataggaaaaatctaaaaatttcctcaatttctctggtaatagcataatctgagaccaatatgcatgtattgatatgatcacagcattaatcagagttactctccccatataggacaagtttcgggtgctgcacactcttatcctacccaccattttctctaggataatttgacattcaggagtggatatcttctttgagcagatcggtattccaagatacctgaatggtagtgtacttcttttgaattgtgaggcctcaagaattcttcccacttcatcacttgacatgccagagcaataaatagatgttttctgttcatttggcatcagaccagatgtagcagagaatagtatgtcctctcaacatcagcatgattgaaacaaagtctccatgactaaacaccaagagatcatctgcaaaacagagttgatttaatttcaaagatgaacaactgtcatgaaactgaaaaactaggccagtcaccaatcttctgaaatatctgagataagtactccatccctaatacaaagagaagaggagacatgagatatccttgtctcaatcccctctttgcattaaaaaaccacacatagaaccatttaataagagtgagaatttt

SEQ ID NO: 174864 - DNA, 573 bp, Cannabis sativa
acacaaacacaaagaacaatcaaattccaactcactcaaaatcagaccctcacgttctttactctctctccatctctttctcgacttctatcttctcagagccaaatggaggttcgcaacccttgaaaacccctagatctagatctgcttcactctatctccgtcctcgcagtgtccctctctctgtttctcttagcttgatgccagacggagcatctcgacggagatctcggagaggcttcgatgggacgtctggtcttggtgggcaatgttcgcaaccctttgaagctcaagaattttttttgtatttttttctgggttttttgtattttttttctgggtttttttgtatatggtgttgatcttggtaggcctctggttcgcaagttgtcgagaagagaggaaaaggacgatgcactattggtcttggcaagcctctggttgatcgcaagatgttgagaagtgatgagatttgttctcattcgcagaagtgaagggaagagaacatgattttaggggttagggattttatgatatcagattttttaagttttaaatttaattttgtattta

SEQ ID NO: 174865 - DNA, 564 bp, Cannabis sativa
ggggacaaaaccctgtctgaagcctcggtcatgttgatccttccctccgcgcgcgtgcatgaaggctgcgtgcagcctgttgcacgcccaatgctcgcagcaagtgcacttgcacaaaaaattcgattttcatgggattattcccaattttgaattttcccaattttcaaaccctaatttcaaaaaaaaattattttcaatatatttaaatgaaatatcaattttaaattaatgatatttaatttttttaatagattattattaatttttgatattttgaagtttaaatttaaaaatggattattttaatttttaaattatggccagattttaaaaatttgttaatttctttaatatttatagattatttaattataaggttagatattttaatattgggtatattttaaattaaagatggcataatctttttaatttgaaatattatattaaaattaccttatatgataaattaataaagtaataaatttgaaattaacctagatatttttattgatattctaaccataatattttcacattcaaaatttgttattttgttaa

SEQ ID NO: 174866 - DNA, 765 bp, Cannabis sativa
tttgaatatatataatatttatctgacttattttgagtatgttatttttgcaaagtatgccttactatatacgtgggaaaattaaatattttatgagtttttacataatttatacaaaattatggcttttatcaatatagtcgttttatgggaaagattatgttaaagagttcggagaataaatcctaaacgacaaaatgacgtaattattaaatgttctttttattcactttcaaacgacatgtcctagattctcacaaattttaccgaactgaacattttggcaacccttaccccacccataaaattttcctatattttaataactactgaataacttttgttcaatttatttttctatctgtaatggagctgttaaaacattattcattaacacaatgattcatattaaaaagtgttctaatttcagcgaaaataattttgaggattcaatcataaacctgcaataatttcaacacttgaacagtaatgaacataaaccaattaatcaacacaatgaatcaaacccgaaatcaacaaagaacaacacaagattttatcctgattccggtcctagagatcaacatggtctctggccatactccagctgagaaacatcaccaattcttcattaatatgtgagtaagagagcatcaatacaaatacaataacaagagcaatcacagctcagatggtactcgacatacaccagagaaaacagtcacagttttctctctatcaacccgagtacaccccttgttcttg

SEQ ID NO: 174867 - DNA, 521 bp, Cannabis sativa
tttattcataattttatatccaaaatttttttatttataaattttaagttttgaaattataaaataagaaaagtaaaaaaattaattaaaaattagcgaaaaattaacatcgtaataatcataaataaattataaaacaactaaaaaataatataatataattataaaataaacattgttaggcgatcgaagtttgccaagatggacgataaaataatccaagatcgacgtccacgatctttttggacagtcaacttccgtgatagacccttcaagtacccgtccgagtatcacttgggtagtctttgagcttggaccactccagatcctggagtggtaataagtctttcgtgtgagagaagctagagtaaggcaaggtacatctctacatacctcttcacctattcctgaaaatttttatccccgaatgttaaacggggcggggacggggatgatactccccgccccgacgaggacccgtttaatttattaattatttttttgttaatattttatatttt

SEQ ID NO: 174868 - DNA, 534 bp, Cannabis sativa
gtcaaaacagttaagttagttagagaaagttggtaactgtcaaaattgacgataactccaacttcaagaggtcaaacctcaacaattccacctggtttgatcacttgaatacctctaaaaaaaattcaataggaagactgctttctaatatcaatataggttgtctccaataggagacatggctttagttgattcagagtaagtttagacaatgtctaaacttgtcaccagtagtgctctttgtgaagatgcctgctgggtcgtcatttgtaccaattttcttgacttgaacttgcttagaactgattatatctcgaatgaaatgtagttttatatcaatgtgctttgacctctcatgaaacatgggatttttcatgagatgcaaagcactttgattgtcacagaaaacagtgatatcttcagagtttatttccatttcagatgacattaccttgagccaaattgcttccttatggcttctgtagcagccatatattcagcttcagtggatgacaaagcaaccactttttgcaa

SEQ ID NO: 174869 - DNA, 733 bp, Cannabis sativa
aaccactgactttttatctaaatgaatgacccatgtttctataaccaaatccgtagtagtttcatctctgaaactaactagaatgaatcccgaatgcatcttggcaatatgttccattcctagattgccctaaatacatttgataaatccctcaaaacctgaaaaggtaggtttgccctcaacactacacaaaccacagagaattgccagtgcgaagcttcaatttctacttcatccacatcaactctagtaaggagttgatccccatgtttaatgggttcattaaaatcaagtttggttgatggagttcttgctctgtttgccttaaaattgccccatacatcctttgctgaactctgataattagtttcgacctcctccacccacaagtgaactccaggaagcctccgttctatttctaaagagagaacaacatcaatacccagatttaattaagtatcatggaagtcttctgtttggctagcatcttcagtcgttgtttagatcgaaaggactttcgactcagtttctacttacaatactgatgatcttaatgttaattttctcacactactacagaaaccccctttggaggcggaatttaagccctttcagtgtcggttttggcaaaatttgccatcgacgctgatcagggcgacgctaaagggtttttaaaaactgaagccatatatacccatgtggtgttagttattatctaggaacagacgccata

SEQ ID NO: 174870 - DNA, 519 bp, Cannabis sativa
ctagccgcctagaatgtgttttaagggcaggtgaaacttgtaaatctgtcttgatttaatttctacattttaactttataatccttgcaaatttatagtaaagctactaaattttatattgtgtgattgaatgttattattataattagtagcatccgattagatcgattttacatatataatgtataatatgtatgtatcatatacatactagaataatataatccctattatacgttaaaaatgatagtaaagacatgtattataggagatgacatattataattattataatacagaacatgacatattatttaatatttataatatactatgaaaataattattaaaatttattataatgttatattatgaaagatgatacatgtcatgaaatattataagggaaatttgaaaaaaaaatatgcataaaatactttaaaattttatgcttaaactaatgcatttcaaaattttaaaaatatgaccactttataataaacccaaaaatacccctct

SEQ ID NO: 174871 - DNA, 728 bp, Cannabis sativa
  modified_base (660)..(681): a, c, t, g, unknown or other
gaagaaatctaatggcatccaagatacaattcatcttcaatctcttcagataactcgtcgtagtactgaaaagagtcagggttgttttgaacatcttcaattgttggtcgaatgaaatcttcaataatgagaatcatctcgtcatcttcatcatttgaaattggctcaacaacttccgttcgtgcaacaacttctgtttcttggctcctcgtggtaaatccacttttgataaccattatcgatcaaaaccccaattaaatatatgcgcttccataatatgtaaaggctcaaatcgagtatttaagcatctaacacatggaaacctaatttttccatcagaatttttataagctgaagccatccaaaaaggcttgtagacacttccaatattctttaccacgtttctttaccacgttttagtgtaatatcctaaaaaaatgtaatagttattttattaaatatttgtgactatgttgatattggaataagattataatggtgtgataattagtgcaaatgtaataaatgattaaataaagtgtaatttattaattacaaattttggtggtttttctagtagtttctatgtgggttgttatacggattttgattgcgatttaaaatgcttcattagttttctgtgtagaattccgtaaaaannnnnnnnnnnnnnnnnnnnnnaaaaaaaaaaaaaaattacaacagaaaaaaaaaaaagaaaatttttt

SEQ ID NO: 174872 - DNA, 537 bp, Cannabis sativa
taactagtgacctaatcataattatatgattgaaattgaacaatgtgtataattcaatcagctaaggcacaataattacgttattcataagaagtcaattttttaaaaaattttaactaatagatcaaaacttaaaaaaatttataaaaatacgtcaacatatatttatatatatattttcaattttactctttcaattaactattttatttataagaataccactttagtaaaaataatatattatttttttaattattttataattatattataattatcgagagattgttttttttaattattttatagtttatttatagttatattctactttctgcttaaagtatatatttttgtaatttttaaccttacaacttacaagcatatttttataaataaaaattttacccggtacaattgtgtataatacataaaatataggaataattacataatgcaccattttttgtaaaatatttacattattacgttcaaagaatgttttttttttatttttttttatttttacagttt

SEQ ID NO: 174873 - DNA, 531 bp, Cannabis sativa
aataatatgagtttttttttttttcggctaaacactcttaattatcattccacttgtacttaattctttaagctcaattttgatgataaaattctctaaactactgaactgaataatttttaaataataattttaagtgtactaatataaacgtatcatgtgtacaagagtatataaataagtagtccatagtgacaataaaaattcgatgatactttaaattggctaccagttcagtttaaagggttttatctctaaaatttgaacttggaaggttaaatacaagtgaaatgacaattggaagggtttagcagccaaaaactctaaggtggcgtttggttgggtgtaatgaaatggaatatggaaaggaaataatttttatttattcctttgtttggttgcattttaaagtattggaataacattccaatagaatgctctttctactattttggtgaaatgaccatttcattttaaaaaagaaaaaaaagactattccaacgtaacaagaaaaaaaaatttaataatttt

SEQ ID NO: 174874 - DNA, 500 bp, Cannabis sativa
  modified_base (463)..(469): a, c, t, g, unknown or other
aaaaatttcactccaagaatcagaaataatagcccaatcgagacgctccttaacagaactatttttccaagtaaatttatttccctcacaaggcaacggagaaaggtgaaacttagtaagaaaatttgagaaagcatccatatccttattatcataataagtactaccctctttatcattataggataaaaaactattcaagtcacccattataagccaaggaagatcttcgcaaaaactatactgtaaaaatatggtatggtccttgagcggtttaatattattattattattatcaaagattataataaaatttagaaattaatctataaagttttaatattattaaaattttaacgtcataacatatatactattcatcaagtcattacatcaaattatctctaaaaaaaaataatataatatatacatacatatattatgttaattccatttttggcannnnnnnttgacaaaaatattttattattctttgtata

SEQ ID NO: 174875 - DNA, 529 bp, Cannabis sativa
gtctttcaaaaactttaatatatccatagctctcatcttctctctaggcaagatttgtcttaatagcttcaagtccacatataattcattcccattaatatcagattgttcattatgttttaatgccttttcaaaatgactacaacaagacttcaaatttacattggctcacgattgtagcttgtcaaaagtaaacaagaaaccaaaaatattttcatatttgatattgttcaaatatcttagtaagagaagcaatgacttgataaacaaggtaaagaaaataattaattttaaaagatatctctccagataactcaacaaatgaggtattcaaaattttatcaaattgtctttttctttaaattgtgtgcctttgaggaaatattagatcgatattcatttcaatagcaatttttttagcattatccaagacattataaaaacctatttctctatattccacgaaaaaagaaattaacccttttattttatccatagcaacatcaataagcatattatttgatgtaaa

SEQ ID NO: 174876 - DNA, 627 bp, Cannabis sativa
  modified_base (597)..(602): a, c, t, g, unknown or other
tgtatttagaatgctaaatttaataaagttctcatttcatcaaaaaaagaaaaataatagtgggcaggggcagagctaggaattcatataggggccaaactataataaaacattttttaagattttttttaaaatgttaaatatattattaatttcataattaacattaaaatacagaacatctctattgcatgtcacgaaattcatttacaattgaatttatactaaatttttaagaaatttctcttaaaaatttacactaaaaatatacactagcaaacagtcatttaaaaatttatctttcatcttgttgcggagtgtaattttcactaaattcattgctgaaaaatatcactttgctgtagctatagaaattggaagtataagaataagagttaccactttatacacaagtgggaaaacttctgcttttctagtttttatgagccactgacataaatcattaatagctgttaagactataaaatcatgaagatttgaacattttgattatgtgcgaaaataatttgatcatgtacatttcagaatatttttatttaaagaataaaataaagaattgattttgtgataaatgannnnnntatattcattgaatctggacaaaat

SEQ ID NO: 174877 - DNA, 502 bp, Cannabis sativa
tctggctccaagcttcgaagcccctataattgtggttgggtgtctcctcgtcccgaggtagccagtggtaggtctcggagactgaaggtttgatgcctgccaccaccacaatcttttcgagttggtgagcacacgtgagcgtggagtggagctcagccgtctaccatccgttagcacgggacttgtagttctcctgggccacaggaccctgcatgacctcctccagggtggccagttgaacctctcccttcttggaagacttagaactggacgcggaagcagacattttggttctgaaaaaattgagaaaatccagctgttaggccccaaaccaaaccctaatgttcaaaaaagggaatgggggtcccctaaccgctagaaagaggccccctccggacacttgccaaataagaaagccccaagaggctttccttggcaagaatcgggtgcaagaattccaaaggtagtgacaatgcaaacaaaaaaaaaaggaaaaagaaaa

SEQ ID NO: 174878 - DNA, 760 bp, Cannabis sativa
aaaactaccaaatttccacccatcaccgaagttctcaacccatcgttcattttttacattttttttctagttttcacgatgttgttaaacatcactaaatcgctaaatatcgctaaattgcaatctcgctaagcatatcgctaaatgtcgctaaatcacatttaagtttttacgatgattagcgatatttcgcgatgtgctttgtattttttagttttatatcagaatgcatcgctaaattatcacttaatttcatccttagcctcagattttgtttattattgcaaatatattgctaaatatcgcaaaaaaaaaaaataaaaaaaaaactaaacttggagagagaccgtgagagaagatgatagggacatgactgggtttcaagtttgggttcgacaatgggggttctcaatcgagttcaacatcgtagggtgagataggcatgtcaaaaacatccatttagttggagcgggttggagctccgacccgatggatcacctctgatctgaaacattcggatacttattggatctttgatcagatccgcttcgccccgcctaattttttttctggatcggatttgatcagacccgatttcaattaattttaaaaaaaatttaattcaagactcggatcccttgggacctggactcagacacggacccagactcggtccggacccggacccggaacttgacgcgggacccggacctggactctgacacgggacccggacccggacccaaacttggacccgaac

SEQ ID NO: 174879 - DNA, 619 bp, Cannabis sativa
gattttggcgaacagaattagacctattcttccttccataatttgcccaacccaagctgcctttgttccgggaagaaatatccatgataacaatgtcattgttcaggaggtaattcactcatttaataggaagagaggtaaggagggtttctttgccatcaaaattgacttggttaaagcgtatgataggttgagctggaaattcattgaccatgttctagagtgttatggtatccctctgaaattccgccattggatttctcagtgcatttctactacgacccttaatgtatgccttaatggagggcaagtaggtagagttaaccctacttgcggcctccgccaaggagacccgctctccccttatctttttatctgggcagctgaaattctctcaagactaatccataacgcccttgaccggggctccattaaaggtattactcttagtaggggcggccctgttttatcccatattttctttgcggatgacctgattttggtaggtcgagccaatttaactgaggcaaatggcttctggagctgcctagaaaatttctgctcttggtctggccagcaggttaataagcttaagacgacaattttcttcagtaacaat

SEQ ID NO: 174880 - DNA, 655 bp, Cannabis sativa
  modified_base (74)..(78): a, c, t, g, unknown or other
aaaaattaaacttggacccgactcggacctgtcccgattctgatctcggacttgacttaaataaaatcaacaannnnnaataaaaataaaatttacaaaatacatatttatttttaaaattaaaaaacaaaagtggttatacaacacattttgttttttaaaataaaattttactttttatttttgtgcttaaaaaattttaaaacaaaacatattatcaaataccacctaagtatttaatttattaaataataccaataatagaggttcttttggagaacttataaaaatattgtaaaattgaagaaagtttacaaaaatactgtcacatgaatttttttacatttttattctatcaattttacaaaaatgctgagtttaaatttttaaaattacaaaaatattgtgttttagtaaaataaaaaaataactaaaaataactaaaaaaaaacaaccctaaaataacttaacaattagcatgaaaaaaaattacaactacacagcaatagaaaaataacaaaataatgacctaattacaataaacaaaataatattaattgctcaatatatttttgtattacgattttttttacttggggtgcgtttggtaacactttttaattagttttctattttttaattagaaagtgaaaat

SEQ ID NO: 174881 - DNA, 579 bp, Cannabis sativa
ctgacattattagtagcggcggactaatccgcctctaatacttttttattttttttttttattacatgttaatattaataaaaattaaaattaaaattaaaaatattactcttttagataatttaaattatatttactgatcaataactctcaatactacataaaattatttattattgaactttcacatatacaaacatttaaataacaaatacataacaaaataaataattacacattgtaacattttagcaaacataatattcatcttcgacaacaaatcagctattttattaaaaacaatgttcatctccaacaacaaccgcacaattgaatttattgccgccaacaattgatgtatttctttggtatcaaatgattttaaagcagtcgacctttcaccttcaacaagtccttgaaatccacagccttggtcagttttattctgcatatagcaaataatcaataaagcttatcatataatatatgtatgcttgaattctcaaaattcaacaaaaattaccttccacaacggacaaccataaaataattcgccgttatttttattttttcttacta

SEQ ID NO: 174882 - DNA, 642 bp, Cannabis sativa
tgcagacagtgggtccatgttctcagagtgaggttgttttcgtcttttcattccttcatatcatctatgtatttgtgcgatggtagttaagtatattattgtttctgcatgatgtttagtaaaattagtgtacaaaatatcacttaccgagtatgtttgtttatgtttcgtagtacattggtaagaaaaatttcttataactcataaaattaagtgttgttatatattgagttttacattggtgtatttattttattttaattattttttagattaaaaattaccatagaaatattttttttcaccttataagattggtttttttaactaaaataatttagttgttcatcaataataattttaagatttgttcaagatgagataattaccttaaacacctcaagcataacatgaagtaaataaaattaggatttttgaagcaataattagtgtcatgaaagttaaaacatcaatgacaaaaatagctagtaatatgaatcactatagtatgactcttgtgtggaggcaggcaagtccgggaaatacgtgctggagtggtcattgaatgagtcagatcttacttgattgtgtgcagattgttgcccctgagatccattattctgttgacgatttgggcaccga

SEQ ID NO: 174883 - DNA, 504 bp, Cannabis sativa
acttaaagcgaccatcctccaccataaaatcggtgatggtacctggatttctcaactgtagcatgtgcaagtaaccaggtaattttgagtatgaatctttaggtgtaccccaaactaggtgtagtgccttctctttacacctccatgccttttcataactcatttggattccgaaatccttgtgcatatctctccttatataagaggccaaatgatccaaactatcaattacaaatttatccttaattaggtgggaaactatcacaggtgatgcttgatggttatcttttcctcgaagatcaagggaacatgtatgtacattttcaaatgtagtcacctcaaacatgttagaaagtacattcttcttcgctcttaatctccacccacaatttgtatccttacatgtaacgtaccaaacagtagtaccagacttcctaacaaactagtcaaaccctttcttcattgcatacaacccaacaaccatctttaaatggtctttgtctc

SEQ ID NO: 174884 - DNA, 607 bp, Cannabis sativa
ttattgcttcaatcatgtttcctattttagtttgtatttgattatttaaataatattttataatttaaatttgttaaatataattttttttaaataaatcttataattttattaatagtaattagctaaaataataatatgcaatccatttaggacatctttctcttcccgttggagacacgacaaggattagaattaaaaaaaaggaaccaaaactgcctaattcccagattgcctagttcccagaccaatcaaccatgtaacttgaaacttaactattgtacaagataaatatctccactactaacaacccattcaatcatagagaacttgtgttatttctaaccactaataattatttgatgatgaaccattaaaaaataaaaaagaacaacgaaacaaaacaaaaccacattacaaaaacaaaactaaaacacttaaaactatcacaaagataaactaattgtagtaataaaaatcaaatcgcaataacaaaacataactcttatcaaatggcatcccaagaggccagcaggcctgaccctgtgaattataaattaatttataaaataatgaaagtaagtcttttattaaaataatattaaaa

SEQ ID NO: 174885 - DNA, 639 bp, Cannabis sativa
caagagcaccgaacttataaagatacttgacttagtgtctaggaggcataaacggaatgtgaggattgagagctagggaggctttgcacgtgtgggagacttaatggagaatgagagaggattgttggacctatcctgcaatttgttcagctgtttggagttgtcttcgattttaactatatggatatgtcacgtcaagtggacaaaatttgggataacaataatttacttcggtagtttataagaaaataataatattactatttaagttttttcaaccgttcttttcatctttttattttggtatatttgaaaaaactatatataaataaaaatatatatttatttaatttaataatatattaatataaaattatttaaaataaatacaaaaataaataaaaaaaataccatcatttaagggtgaagactttatgtttccaagaaaatacaagtttggagaccaatttgtcaaaaaaaaaaaaagtttgaggactaactcgccaaaacttatatggtttgaaaactaagtgcatgtttgacatcataactaaaaaactattttttgtttttaaaaacagaaaattgttttttgaaaataatttggcttgtttggacttgttttttgaaaacagtttt

SEQ ID NO: 174886 - DNA, 636 bp, Cannabis sativa
cctcttgtgcggatcaagaggattttcctcattcaaaacccctgcctttatgggagtatataaaccccttttattgctaaaaaccctagcaacaaaaatactttcttttatctaaccctagcagccacccttctcttcttctctttccttcttgctagtaaaccctagcagccgcccctcatcacctccttcagccgaacttctcttcttctccttgctgcaaaactttacaacaaaacaatactcaacctgtgttttttccttcctccttcagcccttctaatcttcttccttctttcttcttgctgcaaaatatagcagatgaacctttctttctccaagctttaaaccctgcagaaaaaaccaaagaacaacacctgagaagaaagcaaaaataaaacgatcaaagagaaaagactatagacaccacaacaattgatttcggagttccctctaaattagaggtacgtctccgtcaagcgaccctcaaagttgcttgagtcttcactatgaatgtcaaaactcagttacaatgttatggagattccatgccacaaaccagcaggtaatctcaagctttttctctcttttcttcctttatttttctggtttgatagatgtaaagcccgcttagtt

SEQ ID NO: 174887 - DNA, 627 bp, Cannabis sativa
cttttgagtgacttaggttcaaattaggggctgtgagtgtgttcagtttggggtcattttttgaagttaatttatgattattcactgttttgagcttaattagagagttgttgtgctatttgagttaattgttattcaagagctcaagatggagctctaatggtgatttcttggtttaagttgtttgttgtgatttcaatgcttgaatgagtttgttgggacatgaataggtattctggaaagttttggaaagtttgacattgaattgaagtgaggggatcggttttagggttcccagcacagaatcgatcgaccggttctgggggaccattagaaccggtcgacaggttggtagccaggaactggggttccggttgggaaccgatctgccggttggggctttttcctgagccctaatttttcccgtttttacgtaatttagggtattagcatcctatttattgatagggttagtcttagttttgattttaaatcctcgataagtgttttaacgtgtctctcatcaaattatgtacgttatggtttagagccctgtaaagcgtcgagctgcgtttccagtcaggctgaccggcacacttgagcacggaacgaggtatgatagcataa

SEQ ID NO: 174888 - DNA, 568 bp, Cannabis sativa
gtttattggttattcttggctgatatggcaaaggaggaataatttcatttttcagaataaaaccttgaatgatcaattgtggattacttgggctcaagattttcttgagttgcaattgggcacaaacaagaaacctccccagatcaaagctccaaagccgaaactgccttggcaacctcctcagccaaactgccttctaatcaatactgatgcatctgtaattgaaggacagccgggttatagcttaagtgcagtgattcgtgactcggagggatcattagtaatagccaaatctgaatttatccttggctgcagctcggttttgctggcagaaggtgcggccatcttgcttggcatgaagcttgctatcagtcgatctttatggcaggttcaagttgcttctgatagcaaaactatcataaatgctatttggatgcagaatacaaattatgcagattggggtcctttggttcaacaaatcattcagtttcgggactattttcagtccttagattttttatttgttcctagagattgtaataaggtagctaatagtttagctaagtgg

SEQ ID NO: 174889 - DNA, 924 bp, Cannabis sativa
  modified_base (891)..(898): a, c, t, g, unknown or other
aaaaaaaaaaaaaagaagaatttttgtgtagctaaaaaggaagtactaataaagagaataaatcaaaattgattagttggaaaagctaatgattaagggtcagtttggcacagttgtgctgtgggaaaaagtagcagtagttgtgctgtgagaaaaagcagctgtagcaaaactgtagaaaaaaactgagctgagtgtttggtaaattataaattttaaagtaatgtgaattgttaagatctattataatgattatgataatgttataatttagtttattataatcacaaatatgtaaaatcttattttatataatattttattttttttatacgtttttaattttttttcaaatataaatttatatgaatttgataaaaaataatttatagtatttgtttattatgttttatcaaatataaaaaataaaaaaattagaaacacaagtatataagaaaaattctaagttgatattgcttgttaatattaaaaaaaataagagatttaataattattattttattataattagtttatttaatttttttaatgtgtaataaataagtaaatatgattttagtacaaaaaaaaattattatagtcttttaatcaaaataattttttctaaaagttgggttggagcagctttagcttttagctgtagcttctccaaaaattcttcaaaaagttgttttttgactgtttgccaaacacattttttttcgtagctttttcaaaaagcagcttttagcttttccaaaagaggaaattacactctatactctttttatattatcctcttttatttttaccctcttttctaaagtttatcatttttatcttttttttttaaaaaacatagtacaaattttgcccctgtcacttcaagannnnnnnnatgtgactctcttatgtcagggtatt

SEQ ID NO: 174890 - DNA, 550 bp, Cannabis sativa
tgatgtatggtgtaatgtaaaagtgcgttgtaaaatagaaaacataaaaactttggtagtgtatttcaaaacatagagtaaaataactctttgagagtggtcttagtcggtacaatttaggtcataaaagtagcttttattattaatagaaaaaataatattttttgacaataaaaattaagtaaatttttgtttgtacgtttagaagacataaagaatgaaagataaggcttctacttaaaaaaaataacaaataataataagtatgtagtttataaagctatgcgtaaattagaccatgtatttttttaaatagtactaaataatactatgaactaattttttgttaaaataaaacttaataataagtcgatctaaaaaactacaactgttattacaaaattggttatgttttttgtattgttctgtgttagaaatagtcttcaagttggttatattcaaaaaaatataagatctattttgtacctcagggtcttatttgtaccatttgaaaaatataaagtctattttgtcattttataaaatagga

SEQ ID NO: 174891 - DNA, 549 bp, Cannabis sativa
acattatttaaatattatatttttcaatacaatattattaattaaaatacaaaagaaatataataaaaaaataacaaagtaattaatggggaagataaagcacaaaagtgaaaattaaatacattaaaataatatatagagaatctcaaatgtgtatctacatataagttttaaaggatgtttatttcacatatacttttgatgcatatgatattagagctcgatcggtttgggcggtttattctatgtattttttaacctaactttaagtttgggttgttaaaatttaagtgcaacccgcccgatttagaaaaaaaattataaaccgaccaacggtttgagcagtttggtcaggttaacccgcccaaactggctaaactttttttttttgtttcaaagtcaataaaaattaaaaatatcaaattccaccaaaaaacaacactatatatgactttgaaactaacaattaagtatataattttatattattatatatttaatcatttatcttatatataataaaaattaaaaagtaaaaaataaaaaaat

SEQ ID NO: 174892 - DNA, 659 bp, Cannabis sativa
  modified_base (603)..(617): a, c, t, g, unknown or other
gatgaaaagcttttgacttgagaaactggtaagattttagcccactcttaggccatctccaacggtaaaactcaaatttaatgttaaattaacaccaaaaaactactagtactaaatttttttccaattctaactacaatactaaaaattacaccaaattttatattctttattattctatgataaaattacaccaaattttatattctttattattctattattttatcaatataataagaatattttaatactaaatatttattaaatccaataaattatattattaaatccaataaattatattatttattaaatccaataaatattatttaatcattaaaaactaaaaaaaaaatatcgtgatctatagtgcccactattaatagtgggacactgtaaatccccataaaaatagagtgacaattgcaatcccattggagtaaaaaaagaaaatttcacactatatataggaaaatgccgttgggttggagatgccctaaacatttcattcaaaataataatattacatcaattaaaataaaaactatttatttaaattattattcatttaaatgtatgtactgttgggttttatgcccnnnnnnnnnnnnnnntcaatataatcagatttactttattaatatagatcagaaata

SEQ ID NO: 174893 - DNA, 843 bp, Cannabis sativa
cggggtaacttttctcttattgtcaatggtggaatcaccaccatacctaccataagtaggagtaggaagggtgggggttccaccaacactcggagtcacttggggctactaaagaaactttaccacaccctcgactcccagagccttttcaacaatctccgcataagatgtcacctcatttatagtaatcaccaggtcatgtctaattttaaaattcaaactggacaattatttttctttcttgctgaagtttgtaggcacaatacccgaggcgagcttggccagacggtcaaactttgttgtgtccttagttactgacataccctcagtctgtaccaactcagtgaactctttttgcttagtactgcggactgcctaattataatacttggcgttgaataactctcagaactcctcctaagtcattacagtgacgtcctgggtgagggacaccaattcccaccacataagggcgtcttcctacaattgaaatgtagcgcaggttacccgatcatttccaactaccccaatgaaattaaaaattcgctctattacaatgagccactgctcagccttcatcacatcaggacctccgaagaacactagaggtgcttcctaacgaaacctctcataaagtggctccatacggttgccagcaacaggttgttttgttggcaccgcaggaattagtacggcctgagcttgaggttgaggcactgcaagaggaccatactgccttagtctcaaaatttcttcatcttgctgacggatatgatcttgcatctccgcaaacctctgctcccaatctggaggagcttatggtggattcacaagatgaccacc

SEQ ID NO: 174894 - DNA, 503 bp, Cannabis sativa
actcccctagcctaatccaacgacgattagctttacatctccattatcaatatcaagtacgttgtttatttgtctatggattatattttttgaatttgtcgtttcaaactatatttgcatgttttgtttaggaatgaagttaggattttctgtttgtgcgattgccatcttaagtagatttaagcatcacgaaccatattaatttttgaaatacgagaccctacgagggctcgaaagggttcaggattattttgaaataggctctccattcttggggagaggtccaacaagcactaccacaaaaaaactcttttaatgtctcttttttaagtccaacaaaattattgttggacatgaaaaggttttgtagagttttctagtccatactatatatagagccataccagtagggttcctgctataagctaagcatcatcaagatcaaagataacttgagcaatgttctcacaagaatcagcacgacttacgactctacagcgtga

SEQ ID NO: 174895 - DNA, 783 bp, Cannabis sativa
tattattatgatatcgatggtcactcagaatccgaaaaagtgatgaggactctttaccatgagatgggcaaaagatattcagaaagaaaaaacattaagcatactttctttcaaaaatattatgaaggaaaccatgataatttagaggtggcactcaatgctacacctgagcactatgtaacaagagagcattggaaagagattattaatttgtttttgagcctaaaatttatagagtgttccaatcaaaacaagaaaaacagaaaacaaatgaagtacccctcaactcaaggcacaaaatcaatggcagctcagcgtcatgaatttgtaagtatatcattaattcatttaatgaaattataatttttacagaatctaacactgataacaatacagaaggagccaaaaaaatatgtttcactgatttggaaagacagccatcttagaaaaaatgataaatcttgggtcaatgatgctgctaaagagaaatgggtgagttacactaatatttcttttttttttcttaaaattaccacacaattgaatatttaacaatttttatttatggttaggaggaactcaccaaagaaatggaggaagagatggcgagaagtaggcttcaaagccaatctggcagtgattctggatcctcagaggtgccacctgacatccaacacaaggtcatgggaaaggtttttggtgagaggagtgactatattcgaggagtcggttacaacatagcaaagaaggggaaaagatcaacatcatctagctcttcaagcc

SEQ ID NO: 174896 - DNA, 562 bp, Cannabis sativa
gactcctaagttcagtgggccctaaactcgagcctagttcaccttaactaccttattaatgttattttttttacagtttagttaatcagtcttatctaggttacaatgtctatagatataattttttattacaaatatatgttttaactatctaaaatgcttactttttttcttattttttaaggggccattgtctcttattacttttacgtaggtccgccctgttaggttacattgttagagatatcattgcacattataattataaaataaaaatatataaaatctattcatcttttattttaaaaatctaatacttaattacactatttttatttctacataataataatattttttttcctaagtctcactttccatctctttgattgagaaagtgacttaataataaagagaattattaaaaaataatacgattatttttttttatcttaaatcattattagtgtaaatgtaattaagtaacgagtaatactattagggctcgtttggaacgccgtattaagtcgtattgtattatattatattgaattggattata

SEQ ID NO: 174897 - DNA, 505 bp, Cannabis sativa
gatatatcaatatttgtgtaattaagtatcatgtcccgcacaatttaatttaagagtaatttttagctaaactctcctaactatcatttcacttgtacttaactctcctaacgatttagcagtttggagggttttactaccaaaatttgagactggagggttttaccccctgaactattaaattagacaaaagtccttaaatccaacaatctcaatagttcagggggcattttcaatggccttaaaagttcagggggcaaaaatcctaattagcctaaatttaatgtgtcatctatttatctcagttaactgttgacatgaactgcctacacgtaccattatgtacacgtggtacatttatattggttcacctaatatagttatttaaaaattatatgaaaaatcttttgaaaatttattttaaaattaaaaagaataatttaaatttattaaattatttataaataaataaataaatttttctttaattttttattttctccta

SEQ ID NO: 174898 - DNA, 600 bp, Cannabis sativa
aaataacacagagacaaactaccccttacaaacaactacgtagatactcactcagtttctaatcatcatctccctcagtcttgttctagagatgtaaacaaaccacgctagccgcgtccttgggatcaacatctccccaatagaaactccaataacaagcccactcacaagtcctgccaaaataaatttccaatcgagttcaatcccagaatcagaatcatcatcttgattggaagcagatggtggaagcagtgagtcttggcatttcttcgacagtggttctccccacaatccttgattaccctcaaaggagttgttctcaaacgtatggaattggttctcttgcggtataagacctgtgagattgttgtaagacacatcaaacttctggaggaattttagatcagttagttggtgaggaatctttcctgatagctggttttgagaaaggtctaacgactccaactctgttagtgtccccaacgatggtggaatgtgtccggtgagcgcattgtttgagaggttgagtgagtatagagccttgaggcttccaatgattttaggaatctgaccactgaaattgttgctcgataggtcaat

SEQ ID NO: 174899 - DNA, 517 bp, Cannabis sativa
attgcatatttgtcttaatgttgtttaatattaattaatgctaaaagtgacatgttataaaaatattgattatttaaacaattttcattcataatggttcgaaatcataagtttaaatagacgctatcccaccaaaaaaaaaatagaagttgagtttgcagattggtcaaaagaaaagaacaaagcatttgacaagcgatttaaatcctctttttagtgatattatttaataatataatatgtagattaaaatgtggtagtatatattattatcttaataatatatattaagtgtttggtaaacaaattgtgtaacatataatttatttgacctaaaattataacctacactttgtaatatggggagaagttacaaaattaattatttttgtaacttcttttggttgatcatattttgtgtaataaaagagatgctacacaatttatgatggaattcaaatggtatgaaatatagttgttacaaactatattaatactcatttatacgagagaaatg

SEQ ID NO: 174900 - DNA, 755 bp, Cannabis sativa
atactgtaactataacgaatactactacaaaaaaatttgaaaaaaaatatttcggcatgtgattttgaacgtaaaagttgactaagaagtaatatgaggttgtaattaggactaatctaattataatgattatgtgataacaaaatttattatatatatataaatttattatgtaacacaagaagttgacggtaacactcctcaattaattattggatcaacattaaattaatctaatggttgaaaatcaaagtataccaaatcaaatttaaagcatactacatcatatttaaagtacgtcaaacaaaatttatatttcatcagataatagtttcacattaaaattataaaatagagtactagttacaccctcttattacaatttttgtactatttggatcttatattaaaagttactgattggactttctgttttgttaaatgacaaaatagacactgtaatttttaaaatagtacaaatagaaccctaagctcaatttctgatttttttttttaaatataaccaacttgaagataatttctagtacgaacagatgtaaaaaaacgtaattaattttatcataacacttctatatcgggttattattaaattttattttatatatataaaaaaaaacagtttagggttctatttaatattattttacaaaaatacaggatcatgtttttcattttaaaaaaaaaatagaaacttttataaaacacaaggtccaaaatggtattaaccctttatt

SEQ ID NO: 174901 - DNA, 1330 bp, Cannabis sativa
taaaacgataaataaacacataaatggaatagaatccatacattagttgcagcgaaaattagtgacttattctattcaatcactctaaccctcgatctcattctatagtagggtattgtcaaatgatgaacttggataacttacttaaacccgttaagtgaccattctacatagtcttccctaaaattttgagtaccaccttgtataatgtgggttagtactcaactcactaatggaatataatttgagagagagataaaactatggaattttttaataaggctaataaaattagtctctttgaataatctaggttaaggaatgagttttctaccaagattgtcattttattccttatataggtttttcatggtgttagggttagatgtaatgggctataaaaaaggataatggacccaaaaataaaaccttggtcgaattgacatatgtggccatggactttgatttttaccattttatttcatttgatgaaataataactctttttccaatttttcatttatcacatctaattatttaaatactaatttttattttaataattataaaaaaaaatatactatttaaacatatttcttaattagacacaccaagtgtctccaatttgctcaaaattattaaaaattctcaaataagacatagtctatttttaaattctaattgatttattaaattaatcaattgagtctacaaggtaatattatcccagataatacggggaccacgggcctatgaaattaagctcctaataagtagatctagaatttattgagtaaatttcataacttattaatttctcctgactccactatagattcagaattacacatttattatataaaacgctctatatgcgctataaattattcattattttaatttaaataatcagtgatcctctataaacagtttacatcgagtagggacaaaattaccatgttaccctttaatataattttaaaacacttagttccttataaatgatattttagtaaactaataaaaataccaaaataagagctcttccatttatattgtttagccaaactctatgaaaaccataatttcacttctaaatagttatagaagctatatattctatttttatgattaactctcccactcaattgcactaccgagttctcaagatgtaagtatgggctagtcatatgtgtaagctagtaatgaacaagtcaacgaacccatatagtataattaagttaaagcttaatcatctcaggattgagaacaattgacctaagatcaactaagtgacattgacttaggaaagatatatcggtaagtttat

SEQ ID NO: 174902 - DNA, 530 bp, Cannabis sativa
taattaaattgtttgagagttaaagtaaaatcgcatctacctaaatccccaaatattgaagacgaaaatcgtttaggtaccaaaaataagtcgattttgtccatatcgtcccttttgtcctaattcttaagataaattcctaaagcttgaagagatgataatagaggtgcccataaatcaatcgaataatggaggaggacaacgatggagatacaatcccatttttctttttcttgatttttgatagtttatttgtaatttgaatgaatgaaaatggtgtttactatcactttttctttcctttgaaaatggtttttactctcctttttttttcaatttgttttactaaaaatggttttttaagttttttatggtctctttctctttttctttttctttgactgaataaaaatagttcttacttgggaaatttaattttttatgctcacatttagttaaaaagaaattcctatacaaataataactaatatttgtaggatatgataacttttataatatccctaaaatac

SEQ ID NO: 174903 - DNA, 700 bp, Cannabis sativa
  modified_base (163)..(168): a, c, t, g, unknown or other
tttaaattatacccacttttatagggagattgctcaatatctccccacattagcatcaaagactgaaaattaagtcctacttttagattgaagaaaatgtattataaggacattaactataaaagtaggtagaaaaaatgaaatattaaaaagagggtaaaannnnnnatggctaacttaaagtgggtaccctacataatttcctcaaatataaacagaatccaaatggagattccaacctcatgcctttgggaagtttacaataaatgagaatacagttagatgatatcaatatgagaagtttacaataagacaatacgtgaaaaacgaaaaaaaatctaaatatttccagtcattaattgtttgagcctcaataagttttgaatctacaaaagataaaaaaaaaaaaaagagttagtgtgagtagtcgaattttcaagctctctcactaactttcactaatggtcgtttatggaagaattaatatgcacagtgaacttagggactaataccctatctatatatctatataaaaaggaaagcacaaaaaagattatgtggcattttatatgattttcattctatttttacttacttgtaaagttttctcatttcgtgaagaaagtttaataatacatgttttcaaaatagtctcacattgtttaggaatcatgttgggtgttatactatatagtataaa

SEQ ID NO: 174904 - DNA, 527 bp, Cannabis sativa
tggagccttaacaataggggtgtccgagttgaggatgtctttctctatgcttctcttgttgttgacaatatttggcagatgtgtaatgatgtggttcacaacaatagccctcccgatgttttgaaatgtattgacattatttgttcttcttatgcagagttacatactactcttttgcctagtccttcaccgctgtttagggattgctagactccaccacctctgaattggatcaaattgaactgtgatgttcgtgtgggcttggagagtatgtgtacagctgtagttgcaaggaatcatcaaggaagggtgattcgtattcacacgtcccggttggatttctcagatgctctctatggagaagctacggcctgctgcttggcggtgtctattgcgatggagctacagtataagtatattatttgggagagtgactcgaggctagctatcaatgctcttaatgggaaggcatcccattgggctctagagaactatgtctccttttgtactaagtcttctccttattt

SEQ ID NO: 174905 - DNA, 665 bp, Cannabis sativa
  modified_base (204)..(206): a, c, t, g, unknown or other
ttttaaaaaaaaaaaattaatacaatagtcaaaatataataagttagctaataaaaattataaaaatacatttagtatattaattttttaaaaaatatataataactaagttaagttatataatttatttagtatttcatattaatatattgtaacaaaaacaaataaatatattagattattaaatatatacaacagtatttnnnatattgtatcactgaaaattaatatacagtagtaataaaattatataccattaaaagatcataataatactaaattaatactcaaaaaaaatatatatcatgctaacaaaattatatataccactgttaaaatatatatacatacaaaaaaaatttatacctaatcattctatataattaaatagctactaaatatcatcttaaataaatgatatattatacacaacaaaaattataaacctattagagattttattacaatgaaagaaaatcaagatacattagaaaggtataatatatataattacacctttatctaaaagcttattttccctatctctaagcactaaggaaattctctaggaaataaccttagaaattatcaagtcttagggttttttaacaatgtatttttttgatagaaaacttctcatcctaaatgagcaccaaagacttctt

SEQ ID NO: 174906 - DNA, 590 bp, Cannabis sativa
aattgcaaagactaatcggtctaaacaattccaccctctctgcattcggaaccttagggatcaagcagatatagttgaagtttaagtcctggtccgaaatggccgatcgaaaaaactcttgcacacactcaatcaccttagttcccacagtatcccaacaattccaaaagaaaatacctgacaccccatccggccccggagctttgagcgggtgcagttgaaatacatgaccatgctcctatttcaccatcctaaaactcatgcggtcgctaccaccatcaaactccttttttttattatttatttaaatcacacctaaccaagcatttagctaattaccaaaatcttagaccatcaccaatgaaaaatctaaaatttatgaaaaattaagcacaaaaattaagtttgtgctatatttggcctactatttacaattgtgctctaatacacaagatgtaaaataaagaaaaaatataattaattatattgatgatcattttatattggctaattaggatttttgtcttctgaactttgacatgtaccaaatcatgcctcctgaactataaggccgttaaaaatgccccatg

SEQ ID NO: 174907 - DNA, 806 bp, Cannabis sativa
  modified_base (320)..(328): a, c, t, g, unknown or other
gccctccccataccctcagtgttggactgataatagacaccatgagtttcataacagatggcaatcctcaaccactcactattttaaaaagtgtttgtcatcattaaaactattttgaaaaaatagattttaatcattaaaataaaccatttaaaatacattaactaaattactataatataagcttaaaaataatttaattaattccatattactaatagatttttgaaaatatcatattttgaaaaatattggttaattatatgactaactattctcactctaactatttcaaactatttttctttaattaatcacannnnnnnnnaaaaaaaatcataattaatttcttttaacctttactaatatatgattctttaacttttattcttttactcatattcttaaacactctttctctctcttacaaaaaaattaaaagcattttcctatatttttttatcttttacatgatttataaaagtagtatattttttggatgttttgtagcttatttagaattaatttatgaatgatttgcatattttaacaagattgatgtcttgttattttctgttaatttgtagctattttttgttattatatagttattttatattattgtttaggtgttttatagttgttttataattgtttttctgttatttttatgtagtattttggtacagttgttgttagtttatgtgtattttttatcgtgtatgtttttagtttatttcgaacaatatttttgttgtatgtatgtgcattttgtttttctattttttagttgtttttaagtggtt

SEQ ID NO: 174908 - DNA, 650 bp, Cannabis sativa
  modified_base (406)..(433): a, c, t, g, unknown or other
gagggtctctagggttgggtctggggatatctagggtagggctaggggcagggccagggttgaggctgaggtctgggtctgggtcagggtcagagttcaaggcggggtcaggattgaggttgggtcagggtcggggaataagtttggggttggtatctaggacttgggcttgggttaggatcagggtcgggttggggttagggtatgaggcccaaatttgggatcgaatcgaggtcgtgtctaggtctaggtcgaggcctagattgaagtcttgattttggtttgggaacaggcccgaccctatgtttaggcgggctaagcccgtacttagggcccactcaaattgagggcccaaaatatatacatatataatatacaatctgtatttagaaaaaaaaaaaaaaannnnnnnnnnnnnnnnnnnnnnnnnnnnacttttactttgtttgcacttaaccctcaaaactcaaattttagcgacaaaacccctaatattcgtgtcctgatagcaatttaatatttccatctgttttaggtattaagtgtcatgttggattgtccacatgtacatctacatggacatagtgtacacatggcacgagttttttagtcaacgtaaaaaattatttaaaaaattaatttaaaattaa

SEQ ID NO: 174909 - DNA, 887 bp, Cannabis sativa
gcttgacaagtgtggcctctacacaaaacaaaaattgaaatttagaatgggatctcttgagtaatgattttgaaattttgttcatcctattgcattttcttaaaccatttttcatattacactaactgctgcaaagggtcaatttaataacacaaaccttcaacaaaaatcttttgttaacaagataattacagaaaggtattgggttgttcaaagattggatttggatggacacaacaagataaatctcataaaatggtctcaatgttcatcaaagagcaaacaagtttagtcaaagaacagcacaattgaaaagatttacagaaaaaattaaaagttgaaagaaagtgaaaagatcagatccagaagaagaagagtgggttaatggtaccatagacggagagagagtcttccttgataatcttagaatgaggtctgtccaagtcgaagctttccgaggaagaagaagaagagaaggacgctggtcttactcggccaaacattttggtttggttttctccgtactccaattctctttctcttttggacaaaaatggattaggagcgcggcaaattctaaaacacctgagcgggaatgaaatgaaagtgtgctacgaacttgggctgggcctgttattcgtggggtgttctatttgtacaattttgaaaaatagatggcctattttattattttacaaaatagaatgtccaattagtaacttttataaaatgtccaattattattttattattttctaaaatggtaaaaataagactctgaaatggctttttgtcaaaataagatttaataataatctaatctagagatgttatgacaaaactggttacattttctgtatttgttcgtgttagaatttgtcttaaag

SEQ ID NO: 174910 - DNA, 586 bp, Cannabis sativa
gaagaagatcagcggctgtcttttgacagcgcagccaatgatgttaaaaaatgtttcatttattatcttatgtgttttgttttttttgtcaacttatatgtgtttttttggtaatatttttttgaaaaattattttatatattattttttaatttttttttttaaaattcacggtttgggttgttttggtagtttctttagttatttttatgtgtgttgctatgtgaaatttagttgtaatttaggttgctccgttaattgttatggaatttttatgtagaatttcttaaaaatacaaaaagaaaactgttttgaagtgtaagaataaaaaaaatttctatctgttctagaagtgtaactgcattgtaaataggagtgttcatccagttcaatccacactattttacatagtgcatctgatccacactaggtgcggattttatttttttagatctaatccaatccgcaaaagtacggattggatcgattttttttggatcggttactttttaatattaaattatttaatatttatgaatttttttttcacataactagcaacaaaataaaataatttattattatt

SEQ ID NO: 174911 - DNA, 507 bp, Cannabis sativa
  modified_base (363)..(368): a, c, t, g, unknown or other
ataattaataactaatggcaagattgtcactaatgatgttgaacgtcatcactaatatctagtactagtacagcagaacttttatttaaaaataaatttagaactaagcaataatattttaattaatgggttataactaaataaaattatactaaaaaataaatcagaataccaaaaaatatgattgtaataataataatattaaccaatccttaatactatatcataatacaattatttctaagtaaatataatatttatacatgtattacattttaaaataaaataattaattttacataaataaatttataaaatatatgtaaatattttattaagatataattattattattattattnnnnnnattattattattattatatagagataaaatatatattttgtcaatacgagatttaaattatgtataactaattacaatttaaaggttattcttatttataattgaattaaattgagacttgaattttttataacaaatt

SEQ ID NO: 174912 - DNA, 591 bp, Cannabis sativa
aacgttctggcatgtctaactgcagtttatgtcctactcttgttgacactaagtctaaaattagtgctacaagagagactccttttgatgatccaactaattattgtagtcttgcaggggcttttctgtatcttattttcacttggcctgaaatatcttataccgtgcagcagatttgtcttcatatgcattctccgaaaaatgagcatatgagtgctctcaagcgtatcatacactatcttcagggtactttatcccacggttgcatttgtacgaatccaccattgatctgatagagtaatctcatattcagatgctgattggggtgggtgtcctgacacacatcgttccacttttggatattgtgttttccatggagataatctggtctcttggtcttccaaacggcagtatactctctcttgcagcagtgcagaggcagaatacgtgggtgtggctaatgttgtttttgattcttggatcagaaacttgcttctcgagttgcattgtccaattcaaaaggctactctagtttactgtgacaatgtaaatgcaaatacttatctgacaatcctgttcaacatcaacaca

SEQ ID NO: 174913 - DNA, 651 bp, Cannabis sativa
gctccttgcgcgggattgttggaagtgcacgttgccgaagtcaaagctctactctatgggctttcttagatggggtatacggtgaatactgccttctctgattgtcagcgggtagttcttgctgttaatagcaaggtcccttgtctcaatgagtttggtattgttctcaatgatattaatcatattaggaattctttcagtagcatatccctgtcgtattgtaatcggtcaaaaaaccatgttgctcattctttagcaaaatgagcattagatttagatgaggctcaggtgtggtggctgggcttgcccgctaatttagctgtttaaattgcctatcttttatatcccgaacttttggcttgatgccttttaatggaatttctcaattttcttttaaaatatatatatatatatataaatgagtaatatttatttacatttaatactttgacatatctttctattaactatgtatgcattaaatggttgtaaattggtattgtatgttgtacttttgtaatatatttatatatatttttttgaaacaataggtagcttttttcggtaaattttagagcatctcctatcagggccggccctgaaacaaagtgggccatagggaaaaaaaaattttgggcccttatgttagaa

SEQ ID NO: 174914 - DNA, 662 bp, Cannabis sativa
  modified_base (609)..(611): a, c, t, g, unknown or other
catgtgtaattgagaatttgtattaatattcggaacatgcttttatgtatgagcttatattttgtggttctaatgcctgaaaataccttgatttagcatggtttttgcttgtgtatgacttaggtgaagttaggtttgtgtttgggcatttttagaccttaaaaatgggatttttgggcgttttgaacctagttgtcgcgaccggattattggtcgctgcgactaaggttggcagtgggcatgcctgtttttctccattttgttttggccataacttttgactcgggactccttttggacattctttatatcgttggaaagcttgtttcgagctataaatgttaatctgtaaatggaatgctagttatgtgagtattaaaaatgaattttgggattaaccctatttgtaagatctcaggaatgtgtgactaggactactgacgcttgctcaagaacactcgaggatttggaatctccgcatacttcagataccaggtaagacagtagttagcaagagagttaagcgcagtggcgctcatgtttggtattatggttgtgattaagtgagaaatcggaattagggttatttgttgggttttatgctctaannnaaactccatttcaatgtaatctatgttattcaacatcaataaagaaacaga

SEQ ID NO: 174915 - DNA, 620 bp, Cannabis sativa
  modified_base (249)..(250): a, c, t, g, unknown or other
attatcaaccctaataatgtgtattattaatttctttttttccaattggaaaaattataggaattatttcacaaatacataaaaacaaccaaaaaattacaaaaatacggtttcaccgaattttaaacatttttatgatttttttaattttatttatagaaaatacggtcttttgatgttgtactcttgataatttgttattaattttttgttgttgttttaatattatttttatgttacttttatgtnnttttcttgttgttttcgtgttgtatctatagaaaactgtaaaaatataaaaaaaattcttaaaacgtaaaaatatatatatttttttaataaaaaatagtgacttatgtaattattcaaaaattatatttgatacatattctacgataaaaaaaagaaattacactctatacttattttttattttaattttttactttcattttattattctttattagaaactctaattttattatatttaatactttgattataaaagagaatatttatcaattaaaattattttaaaattatgtttagttaatgtatttaaaaatgagtaattttcaacttattccaaaaaaaaaaaaaaaaaaaaatcagttttt

SEQ ID NO: 174916 - DNA, 525 bp, Cannabis sativa
tatatatatttattattatttttgttattgtaacgttattaatgtaattaaaaatttaattacatataatttaagaaaataaattctaaaatatatcgctaatttatagtgatatattattttaaaaaaataaaaaataataggcaccactaataacaatcacatatttatatttcgttgtgcaaaaataaaatcaccacatgaaatagttttttatttttctttgtttttttggaagagatgacatgaaatagctacgtattacacttttttttttttatttctatattttctatacaaaaaaatatacttcaactaatctaatagaagaaaatgtaatcaactaatcataatacaagagcctattacaaaatagattgattattttaaattgattatttttaatattaaattatttaatatttattttaaaataaatcatacaagaataataaaataaaataattattattttatgtcacttagggctgaacattttgaacgggtttgacccgaacccgagca

SEQ ID NO: 174917 - DNA, 665 bp, Cannabis sativa
ttttacaaagtattagagaatatttttcatgaattaaacattgtaaaattattgagccatatataagaatatgagttactccactaattatcaattggttttgaaataaaactccatgattcttaacatggtatcagagtcatatatccttagtaggttttcgatccatacttatccagatagttagccagccacatgagatccagatggtgcaagacgtttgagattcgaacaaaaataagattcagatggtgcaattagacgcttaaaatctgaacaataataaaagcgagtaaaatggcacaacctgttataaggtgatttaaaattggtgcgcaaaaataactaccatcttgaagagagataatagagaacattgtcatatatagattaaatataaaagtattaagtcatatataaaaacatgagctacttctctcattactaattggttttgagatagaattctataatcctcaacacaaagtactagaatctaatgatacatgataatttgtactaactgattaatatacacatacttgcatattgtaaagatgaaatcatcaccttaatctaatttagtaaatttattactttttttttgaaaaaaaaaaaagcagaggcttttcaatatattaacctaccatcagggttagaaataa

SEQ ID NO: 174918 - DNA, 579 bp, Cannabis sativa
ttttaacgtaaaacatgaattcatgcaaacactttttatgtaaaattttactaaaatactatttattctaattaaaacacaattaaatagttaattaatcataattaattataataaatacatacatcaactaataaattataaaatctatttcattttatatcatagacagtaaatggtattacaaaaatacattttactattttaacaaaacttaactatttttttaaaattaaattaggaatcaactaaataaattcatgaaaaatataaaaatgatcgaaaaccaaatctaactattctaacacagtttatagtctatactaagccataaataatttactttgaattttctaaggaacctaggtatttttcataattaaattaagaaataacataataattcatgaaaaatacaaaatcgcatgaaaaatcaatctatcaattttatagcagtttatatcacatagcccatcatataaaataaacctagatttttttgagcaacctgagtgcttttcataattaatttatgaaataaactaaataattcacaataattctaaataaattcaaaaa

SEQ ID NO: 174919 - DNA, 722 bp, Cannabis sativa
ttttagaaaaaaagaaataaaaaagtaaaaagtatatatgaatttcatttctttgaaaaaaaaaattaaaaaagtaaattagatagctgatgttattaaagaattgagtactagtttaaaaaaataataaaagaaggagagggtctccatgtctggctcaaactggttaagtggttaacaaacaaaaaatagtgtatttcggtacacgcatactaaattatcttagcattaaatgttgaagggtattttcataaatattttataaagtgcgcatgttgaggtaattttttcgaaaaataaattagtaatttatttaaaagttcttaactattttatttttattttgttttaataatattattatttaatttcattttatgtatggaaacaattatatatgtttatttaatattttgtttttaattagtttttagtcaactatcttttatagtattaattattaatattaatgatattcatattttattatgggtaattttcttacttaataatattaatgtgattgaaaaatgttattattatttttcatttgaattgtttgatttttttaatctttaataacattaattgataatttctttttatttcgtttttggttttttatctattttttggttgtggtaatattattgtacatttaatttgtacttactcattttttatataacatttatattttttggtataatataatttaatat

SEQ ID NO: 174920 - DNA, 513 bp, Cannabis sativa
aagtctgcaagggcttgaccctttgtagctattcttggttggtatgtgatctcacaaactggccaagcttaaaatggcccgtttgagtagtcagcctgatgcttcaggtttgtgcaaaacctgtcgtagtggttgatcggtgtaatcctttatggggtgtgactagaagtagggcctcaactttctagaagctaagagcaagctgtaggtcagtttctccatgagtgggtatcgactttctgcgtcgaccagccttttgctgatgtagtatacagggtgatgtacactgccttcttctcttgtgaggacagcactcacatcgtgctctgtgactactaggtacacgcctaactcttcattgtctaagggtttagacaacactggtggttgggccaattacttcttcagctcctggaatgtgttttcacattcctctgtccactcgaattttttgttgcctctgagaatgttgaagaagggtacacatttatctatagacttggacacaaatct

SEQ ID NO: 174921 - DNA, 663 bp, Cannabis sativa
ctctctctctctctctctcatacgcagaggcaacatctgcccagaccactacccacaccacaaccacccttcctccgcccagaccaccgcccagaccacccttcctccgcccagaccactgcctagaccaccacaaccgaactgtccaccaccaccaaaaccacatctacccaccacaaccatcaccgagacctctttttcagatccaaacaaaaccccacatctcagatccaaacacatcaaagaaacctaaacacctaccaaaattcggatccttccataaaaacaaacaaatacaaattaaatccacaagaaaaaaaaacttcaaattagagagaaagaaaatcgcaagagtgagagagagagatagcttactgaaaatcacaagggttctgtcgatgtggggggctcgtgagatctgagatcctgaactccaggccgctcttggggacgacctctccgtccgattcgccaaactcaaagcctccttgtctcagtcgcatgctgcttccatctccggcactggtggcgttcgtcccaataaaaaattagagagccttggtgatgaagatgaagaggaggatgaagatgatgaggttgagaagttgattaggttgagaagttgatgaagttgatctggactgagagagaaagagagaggag

SEQ ID NO: 174922 - DNA, 519 bp, Cannabis sativa
tattaaattttagacgagatatatacataagaattttataattacttccaatcaatcaaattttgcggataaatgcaatgcataaactaaataaaaatcaaatttttactagtcttagggatcgcagaaccgcatgagaagaaggattgagtgagttatggaagaaatgggaaaaaataattagcgaaagaagatgttggttagtagtacctacctacctatctgttggagtcgagaacgggagaaccagagatggagaggacagctgagccctgcgttttctcaaccgggagattgggctggcgtgagcgatggagtcgacggcgccggagatagagagaagagagagtagtccaaacaatacttcatgtacttcgacccaaataaaagttacacagaactgagttactaatttatgttgtaaatgtttaagtttaactctaatacagtttaatttttttttgggaattttacaaaaatactgcttttggaccaaaactttacaattatactgggaca

SEQ ID NO: 174923 - DNA, 510 bp, Cannabis sativa
gtttatagccaaagaagaaaaattcaatgtgttttgatggatatttgagttttttgcagttaaattctctcaactatcactttacttgcacttaattctctaagtttaaattttgacagtaaaacactccaaattaatgaattgttagcaaatttaaggtaccatccaaactagtttggagggttttaccgccaaaatttgagcttggaatgttaaatgtaagtgaaacgacagttaagaggatttagtcgctaaaaactcattaaaaatgacaaaagatttataaaaacacaaatctataatttttttacaaaattacaaagggttatattttcgttgttttcacattgctgttacagaaaattaacgtgaaaacaatgttattttttggaaaaaaaaaaatacaagtgaaaacctgtaaattaatagaatccataaaaatgtaaaaaaaaaaaaacatacaatttttaagtattttgtgtaaattttggatgtttttacctggtgcaa

SEQ ID NO: 174924 - DNA, 620 bp, Cannabis sativa
taagtaattaaataatattatattagagaatataagaaataaaattataagataaatgatatattaattataatagtatatctaaaaattctttattcgtggagaatgtataatcttgtgaggacgtacaagaaaattaagattatactatatgaataaaataagtgagtagtttattaaagtaataggaatctttaatatggaactactaagtacggtttactatacactatacttctagtgtgtttgattttgattcagatcacatatgtggatagacatgtagtaaaggtgttgtgtataattagattatcgatccatgactgcaccgatatgtaataaatatttttcattaatgtgtcgtttactatgaaagagttattcatatcataatgatgattattagtagattagcctgaatcctaagtatacatgaactttaagttctttgattcacttgttaaagtttctcaaaaaagatgattcttacaacttctattttgtgagcttgataccatgagtggctggaaacatgttatacaatagtggaatcagattgaatattagttcccttatagtattaattctaggagtattaacagttggatccaaatctataa

SEQ ID NO: 174925 - DNA, 544 bp, Cannabis sativa
tgttaatcctgaacagctagcaaacgtcggtcatggtgtaacgactgctatagatgaaatcgcgcctggaatgcaagagactgggaatactagttcagcatccaattagggcattcataacacagtcgttccacctgttaccaacactcaaacgactattgcagatgatactgagttacaaaatctccgtgctactcttgggctcgtgcagggtcacacgaataccctacatcatgatcaggaagatctccacgctgcggtaaatttcgtgtttgaagaacaaaggcgcatgtttaccaagtggagagatagagagatggaagcgttaagggctcatcatacagagattgaaaatcgtagtcggcaagctaccgtgctgatacgaaaagcctaccaaactgtaggtcagcaacctccgggtgtcatacccctgggtgaaatggatgaggatccagcgatgaatacttcctagactgcaaatagtcagccgcccaatcccaagtcacgagttccacttgtaggcctagcggtaggcgggcagacc

SEQ ID NO: 174926 - DNA, 509 bp, Cannabis sativa
ggcatataagcttgggcagtatgatgaaaatatggagctcattctagtaccaaggtattagaaaggaaaacatttgaggaagtactcccagtaagtgtacaaggtcggatgaccactttaagtacacaatgcaagaacatttacttttaagtagatggccttctgggcgaaccccgctcaaaggtttcaatgaaataaccaagtatttaagtcgaatgaccactttcaaaagtacaactttttccttaagtatttatgtttaaatttattgttgtcataaatgtaagttaccacggtaacaaaactgttcggaccaataaatgaataaagatattaattatcattccaattttgtcaattatgttagcaagttatgaattaccattgtgtacaaaaggtctgctcgtcccaaatagccgaacaaacaaaaatcatacttgtcaaatgtaagtgaccaagagtcataagtctgcccggtcacttggggggaaactatacccgtacaaagc

SEQ ID NO: 174927 - DNA, 783 bp, Cannabis sativa
cgacctgcaaaggacaaatttctcaaactccaactcttgatactagcagtcatcttttcagccaatagttcacattccttcccagatattttttttttttttgaggaaataggaattccaagataggtaaaagggagtacctgttgttggaaacctgaattttccaacaaccattgaacttctctcctagacatgttgctgcagtagcaagctgttttgctaggattcagattcaggccagaagtacttgaaaataatttcagtgcttgtaacatgtatttgatgctcctcgcatgtccattacaaaataacagagcatcatccataaatgctaggtgattaagttttaacttcaagcagccactatgaaatttaaagtcatccttttccccaatccatctcattagcctagacaaatattccatacctaggacaaacagaagaggacacataggccttgcctaagccccctcttagattcaaagaatccgtgcaaggatccattgaacataagagaaaacttaggagttcgaacacaattcataataagttgaatgaagttcttagggaacttgagtccctctagcatttcttcaataaattcccactctacagtatcatatgcttttgaagatcaagcttaatcatgcaacttggtttattagctttccttccataatgtctctctaacgccctgaacctcaggaacgccacgtgtgtgcttttataatcttattatcaataatctattagtttaggaaaagtgtggtttaattcaaaaaa

SEQ ID NO: 174928 - DNA, 713 bp, Cannabis sativa
ctagagcattgattttcctatttcgaactataaatatctcaatttactgattatcccaatttatcgtataatttatagttttaagaatcctaatgtaatctattaacctttctggagtgatgatagatttaacttaaattaacaaacaagatatctctattcaatgttaatcaattaagcactcataaagcaatatgattctctttaaatgaaactcatagaattagtggaatttctcaatctcacacatttcctatgtcatgcaattctaagtccgattttagattacctctctcaagtgtaaaatctaaaatctctatactaattaatagtgatcaagcattaagaagataataattagcaagaaattgcataaacaaattacaagaacaaatatggaaataatctaaaaacttaattcataatctaaaatagttccatcaacactctagaatgagtgtttagtgttagataaattaaacaacccaagatacaaaattgtatataatatagaacacaataatgatagataataattcggtttgcgtacatgattgatccatatcaattaccgcaatttgataatgcaatattatcaactaagtcttcctccctaggcctctaaatcagaggcagttttaatttctgattatcaaaagtatacaattgtgatgagactatgtatttatagagttagggaggggacttagcta

SEQ ID NO: 174929 - DNA, 514 bp, Cannabis sativa
taattatgactataactttattctcaaataaatttttaaacctaaaaaactaggagaaatttgactaactatgtatttattggaccaatttttttttctacacttaaactatttaaaattagaagaatatgtcattttttttactcaaaccccattctctctctctctctctctttgtaaacatgcacacggaggagcacacaatcgacccacaacccaccacccacaaccttggtcccttctctcaacgaccaccatgactacagacccattgacccactgacccaatgatcaccacaggcccaatgacttctctatcaaccacggcctcaccaatatggtcaaaggaataaattgtatgattaatgtttgttatctatgagtagaaattaaatttagggtcaaaaaatggctagatctgagttttgggtaaaaaaatgatttttttgtgaggtctgatagtggtctgatgtcttcctgttgttaaaatgagtaaaggttgaagacaaaggtc

SEQ ID NO: 174930 - DNA, 582 bp, Cannabis sativa
gtagagatggtatgcacgtgtgtatatgggttgctgttgtattagtgtaattgcactaatctcaactgtgattgttttaatttttttgcaactctagactttggaccaattgtttgcccctgtcaagccaggagacctgaatttcagcgaatttgtaaatatttcttcaagcaaggactacccacaacaacaaaatggccacgattgtgtagtgtttgtaataatgaagtacatggaatcactattcgaggaaaatgaaataatggtagaggtaatttaatactgatttctttagtttaagttttcatccagttaactaactgtttataacgaaattgaggtgtcaatcagtaagtggagttcttggtttgctacagcctagtcgattttgggaaatcgacattgttttaattgcattttaatcttatttgaaatttttccttttgtgaaattataaatagaacaaaactaacaagttacaaaatccattttttaggcatattggtccattgtatttaacagtttccatatagtacatttaacaaatagactatagtacatataatgaaatgatgttatata

SEQ ID NO: 174931 - DNA, 529 bp, Cannabis sativa
  modified_base (146)..(156): a, c, t, g, unknown or other
tttatttatttatcatatagaattactagctaatgaactgccctttgtgtggtctttagatatgtatgttttattaacatcttaaatataaatatctttaatacgataaaattaaacacataagaatttagaaaaccttacattgnnnnnnnnnnnataatatgactccttccgctcagatctctaaccttttgttcctttccatcgcagagtattatcaagatctgaacctagatctatttttctccttcgggttggttaccatcgtcttctgcactatgattgagtacttaacttactatgtgtggccatggcagtctatcactatagctcactatagaagatgtttcatctactagttttctgacaaagaaaattaggtttgatttggttgaaggcaatagctggatgacatgagagcatgttccttttatagtgtttcaattagcgtttaggattgaattatatggattaaaaaaaaatattgggcaaaaattaacctagtgggcggccacttaatgtgtgcctc

SEQ ID NO: 174932 - DNA, 708 bp, Cannabis sativa
  modified_base (371)..(384): a, c, t, g, unknown or other
tattccccatatagaaaacggctatggagattgtatctatatgagctcgtttggtggagctctcgagatcttggagaaactttggcacttgtcacatttcttgacataattcattgaatcctcaattattgtaggccagaaataccctttttatgagtattttctttgacaggcttttcccccaacgtgatagttgtaaacatctttgtgaacttcgagcatatagccatccaacttcttctttggtgacacatcttaagagtggcattgaaaagctaggacagtattgttagggtttatgtcctgaaaagcctataaagacatttctaattatcattaaagagttgaacattttgatatacgcttgaatnnnnnnnnnnnnnnatttattattgaataatttatataaaatatcaaaaacttctttattcatatatgaggctttgtcttgtagttgtatagagaactaagaccacttagctatgaataaaatagtcagcaacatattaaatttataaaatttttaatcaatggttcctagtacagttcattgatgctcgttctacgatgcaagtattcgtagttcagattattgatgtagggagacagctagtgaaggttttgtatataatagagattatatataacaaagactgatatgaataaagctatctttattaacatgccatttatcttaaaggcctaatt

SEQ ID NO: 174933 - DNA, 636 bp, Cannabis sativa
gcagccctccgctcgcagccctcgcctgcagccctccgcccacggccctcgcctgcaaccctcgtctgtggcccctcgccttagtgttcgctccctcatatgcgtcaacaccctgccaattttcctttccttcctgacaccagcagacctagtaaaaagatatcaggcgagataacaatggcacgataagtataaataatgaggataaatttcatttcgcctgaggtacaaaatagaatgggcatttttagtgtaacttaggatttcagatgtgtcagatcacttaggatactatgttgtaatagatgaaagtgacttaacatagggagtatggggatatgctctgggtgcaaagggagaagggcttattataaatatcgggttgcaaatatttaattgtaacccgctcaattaaaaattagaaaaagttcaactcgcctaataatttcgtcggtttggtcgggttaacccgtccaaactaatctttactttttttttttttataattattgttgttagtttcaagtatttaaataattagatttttaaaaaataaaatatattatttatattttaaattaaaaaatgctgtagtctaaattaattttaagaacttaatataagataaatataatt

SEQ ID NO: 174934 - DNA, 1377 bp, Cannabis sativa
ctttctggactttattctatgaaatgtactgctaacgcaaattttcgttaaccaaattaaagcctattttgtgatgaattggcacagaaataatagtaataaaagaaatagaaagaacacaaagcttttttacgtggttttgtagttacaattttgcctagtccacgagtctatcttattagatttctgatacaaaactaaggttttttctctaataaatttttcatccttttttcaatgtatcctactcctatttatagttacataggagggcagttaattacaatcagattgatatcccacaataataatcccctaaaattgtgggattttattatgtcccacgtaaaataaatgcaattattatatgaaaatcacacagttgtgatttatctgtttttaccgggccaatgcgtacgtggattaaatacgctgcgaagcatctcgtgctgggacatctcgctgggaacatagcaataataaccctggcagcaagctagagcttttcccatgtctatctgaggttgataatgtaaatctcgtcgtttctgcgattgaagaaacaacgctccatttgacaatcacagttcttggtgacaagatgaacttcaacagccaacatcatttgaatgtcagcttctatctaagagagctgactcgacggagcagtgaatctcattgaaagatgtttgaagctaattagtgaaggtaccatgagtatgccttcctatagcaagatggatgtctcgctattcattgttcaagttcattcaactgttatgcttagtttgtataatgtatattatacactaagtgttctaacagtcaacatgtcttatttacatctcttcatacgtggcgaggttggtgccttgctttgtattactaatgttgtcctcatgatcatgtcttcatatacaaaatggttttcttgtcaatatgtgaattaatagtttgtgcatccttatctcgcttaagactttacagtcaggaagttatagatatactctaccagttcagcacttaatgagttatgctattttaatgtcctctaatataattaccattatattcgttgatttgtattctcccacgttgacacgtgtccttctctgaagcaccaaccgaatttggggtataacaattgccccttaaaaatttctttttaataaaaagtgctttataaatgattacagagggtatatttgtcataatcccttttaaaaaaaaatgcatgtcctctgattttggcagttttgtagtttcgaggtacatcaacatttaatgaccatcttctccacttctctttcaaattctactcataggatctccctgatctaacggagattaacccaacagtataaaatagaaaaagga

SEQ ID NO: 174935 - DNA, 503 bp, Cannabis sativa
tttatagtagttcattctctatattacgacagtaataaaattacatctacttcaagttttatttctcacaatatggattacagaaaaataggtaagtctcgatactctaatttttaaaaagagaaactagagagagatgctctgagagatgctctgacctttctgaccttatgactatttttctaaacttaaaaaaataagcttatggagctctcattttatagggaatgaagtcttattaaaatgacaataaagtcatccaaaaaaatatagaataatacatttaggtgatttttgatcgtagatgatgatctaacagtgaaattgacttcaaaggtcggtcgttagtttttggagcttgagtcgtgcctgcgggacctatttcaagtaagttgtagcttaactttgcaactcccttggggtgaaatttggagtctatactttagaattgtgatttgagtgtgagacatgacttgatcatagagcattaaaatagcttcgaa

SEQ ID NO: 174936 - DNA, 501 bp, Cannabis sativa
tttggctttgcattttatgtagttcctttctcttctaatataattagtaaacaactagtttttctggcggatgtttaaatttttttaatttatattataaaataaattataaattttatttaatgataactaattaataaatattttaaaattttaatcttattaattataataatatgctaagttttttttttttttttgaaaggaaaccgatactaattaaaataacaaaggtaataaagttatgcaacagaggaggattttcttccatctataacagttcattgtctatcctaagggcatgtaaagatatcctaggaaaattagataataaaactataatatcaaaaaagaaaacctcaaaattgagagatgtcacttctgatccactactagaatacctacataataaatatttaataaaatgaaatttcccttacaaataaactaaaataaaatatgaaattttatataaatagtcacatagaattctctgatgta

SEQ ID NO: 174937 - DNA, 699 bp, Cannabis sativa
aactataatataaaaaaaaaaccattataacaatgagattttatttaagtataaaagaagaaatttttaaaagtaccattgttaaattcaataaaaggaaatcatccattgatttttatttttgttaagataatacatataaacgagagtgaaaaagcaaaatggttgattttttgaacatgtttcaaattgcgataactaatcgcctaatggcagtcgagcaagtatacccccatcatgtaaccgtttaggacatctctcttccaaggataatacaaataaaagagcaaaaatgcaaaatgatgttagaattaatattatggactaatataatcataggtttaataccataaacacaatcattaactatgtgcccaataatcctcaacaactataatgggatggttaataattaattaatgtatcagaggcacatgagagcaccctaaaactaaaattggcccattaaattatagcccaccactaattatacacattaacctaataagcccaataaaactccttagggttaggtgttggatataaaatgggctaatatgtgtttagtataaggtgagtgtgtgtgtggtgataaggaattgagtttgctatcataagttcctcttctaccatcttagggatacattgaaggattttggtgtcatagcaacaatagaaaatgccaatatgggaggtatg

SEQ ID NO: 174938 - DNA, 658 bp, Cannabis sativa
  modified_base (573)..(576): a, c, t, g, unknown or other
tccagcatggctatgtcctatgttgtactaagctggataatgtcttcgaagaatacaacttgtatgatcaacgggaagtggcccactgtagttgtttgtgtggacgtctctccaacatgtctagcagtttttgggaataggttgagggcggtgacgttggttggtcccacacctcttataattgtatcatgtgggtttgttccatctcctgggataggaacatggatggtcccaacattaaaggatcccgagttcatttttctggttggcagccatgatgattttcctctgaaattgatatgaaacttcccacagatggcgccaaatattgttggaggaattttgataacaccaaaatttatacaaacaataaatgatcaaaagaaaaaagcaaatactttacttagaatagcgagtattcaaagaagactgcccagacactagcacaaatggaaaagtaaaatgaacacaaaagaatatagtgctttagtcagattacggtttgcttaatccactgttgtaaatgatttttgcttagtttattcatcttggatcactcctttatatacaaannnngtgtccttttagttacacataactgaccggttatagaattgttttacaattaacaacaatattaaattagaataaacgtaaa

SEQ ID NO: 174939 - DNA, 519 bp, Cannabis sativa
tctctctctctctctctaaaaccccgccctctctcagccctgctctctcttcgcctcatgttaggttgtttttagtactatttttagattaatttttagtgtgtttttaatttagttctactcttgtttggagcaattttatgttttttatcttttatttttacaaatttaaaatacaagaagattaaaaaaatatcaaaggaataagatagaaaaaatataaaaagatctcactaaaagatgagctataaaatagaaaaaattgtgcaaaaacaaaaaaaaaaaaagctgaacttcaatcctaaattcgactatggcctgatcagatttcagagaaagtctagggacctttctagtgactggtcgcctcatgcgggtcatcagtattcccaactttggtgctaggaccagtgtaatgaagacctaacttggttcgggtgaatactgaagcaaatgagagaaaattgtttttatttctgatgctctcttttagtatatacaaagggtatatataataca

SEQ ID NO: 174940 - DNA, 684 bp, Cannabis sativa
cttagcatagcatttttttttcgcatctctgctacagaatgctaaagtaatgctataacaactgggatttccagcttctaaaaaaaatcttgctctttttcttacaagggatgtcacaccccaaacttaattttaaacacaaaatatttctttgcaaggggtggcacaccccaaacttaattttaaaaactctttttttttcttttgtttttgaataactaacaatacaaatataataatggcaatatacacaaaatatggtaactctcccctaacttaaaattcaacactgtccccaatggtgagaataatgagtagcacaatgaaaacactcacccaattactattcaaccaaaattacactcctcacatccccttcatgatacaacaaacaaatatcttagaataataagatgctcatagggtatatggaggaaagatttgtatttggctaggcttacatgtggtaaaaaaataaaaggatcaattatgctcaaaaagggtgattagggataaaataatatcatgattggctcaaaaggctcaaacggtccaaaaataggctaactcatgtctttggttaagcgttgtctaggattttgcctcaagagagaatcaaacaaattttaaaacttgtgagatcacaaaattatatatttgcacaaactttcaccaaatcactca

SEQ ID NO: 174941 - DNA, 516 bp, Cannabis sativa
ttggtggggccactactcttcctagcactagttatggtaggggtggtagtgactcaaatgttgaccagaagcgaagggcaccatctgcacctggtggctcaaataagacaagaggttctaagggaaccaggatcgagccaactggcaaggtggttccaaaactcgatacacttagccggaatgtcccaactgtaagaagcctcatttgggagagtgtaaagggtgatgatgttttcattatggtttgcctggatagtacaaggagactgcccgcaactcaagaaagaagagcaaaagacagtagaaaagcccgctttggtaagggtgttttctctttctcgggctgttactgaagctatccctcagttgttataggtcagctcttggtcaacaactcttatctctctatattttttgactctggggtcactcattcttatgcggcagccagaatttttgataaattgggtagaccgttcgatagtcacgataagaggtgtaaagaccgcttagttt

SEQ ID NO: 174942 - DNA, 661 bp, Cannabis sativa
tactacaattataatataagctattatatatacatataggataatactacggtagaacctagcaaaagttccctaccggtagggaactttttttttaaccgttgattttagatcttgtggtcattatgatgtaaggtatatactcttactataggtctgtttgtatacaattaaaactttatccatattataataatatttaataatatatttatttcaaaaaataaaataatattaataattaaaaaatttattaattcatctcaaaaaaaacttattaattttaattttttaattattattattttctaaaataaatttaaattatttttatatagatatttattttcaaaaaaaaaattgatgtgggatcgcttgaatgattttagatgctctttaattggaaccgtaccaacttgcttctcttaaactcaattattttggtagaaaaaataatatcaaactaaattaattaatttttttttataagtggcatctcaaaagagcagccaaataacaagataaaaaccactgaaaaatggtctataacatcagaactacacacaacttaaaggcaaaagaaagaaaagactaggtgtaaacataaaaaaaaaaactagcagtaaattatgaaaagccaaaaaataagaagcaaaaaaaa

SEQ ID NO: 174943 - DNA, 530 bp, Cannabis sativa
tatggttgtttttgtagttttttttattcttattttttcctaaaaatatatttgacgagctcactggcaaaataattttgaggtgtgtggttcttctatatttttctcagtgattatatctactttattgtgtttcatttatttttgtgttgttttagtagtttttttattgtgattttcaggtctaggcttacaaatatagccactattgcatttggtgttaaggctgtgcaaaaaatagttcgtttttttaatcttttttctttttgttttgtttgatttattttagtgttgttttatagtttttttgctattattatttatttaacatcgatttcactgttttcgctcaatcttgccagaattaatggttattttctaggtgttttcgtattgtcgtggtggttctgtgcataggtgtagtagatggaggcattgttcttgatattcggtgtcagtataaaagaaaaaaaaagtccaaggcaatataaaaataatttttgcaatgtagcagtaaaattataaatatt

SEQ ID NO: 174944 - DNA, 698 bp, Cannabis sativa
accttcaaaaggcttcacaaaacctgcaataacctgattcgaagaattcaaaacaacagccccaatgctaaatcttttacgagaagtatcaatggctgcatctgtataaagctggagcgaagcccctgcatgtgagctatgcgaatctaacaagtccacctgttgagaagaagatacttgctgtgcatctatatacttaataaagaaatcaatactccaatcataaatatcaacaggctgcatagaaaacttattatgaaaaagattgtttctttggttccaaagagcccataaaaagcagcaaaaaataccaacattattcttatccagttcttgagtaatattatagaaaaaatcatataaactaagatgtttaaactgagagtaataattaacaaatcctgagtgtttccaagctttcctcaatctggaacagtctagtaatgtatgcttaacagtttcaggttgagttttacacagaggacacaaaggagaatcaataatacatttcttatacagagaataagcaacaggaagtgcctgagaaagcatacgccaaataaaaattttcacttttggaggaatttttgaggtccaaatttttgaccagaactttttagatttatccggagaggaagtagaaggaagatcttgatgtgaaaaggctaaatgataagcagatttaacagagaaaatcc

SEQ ID NO: 174945 - DNA, 508 bp, Cannabis sativa
gtacgattcttccctactgagacagccgacactcttcaaaggatccaaattattttataggtcaatttttactaagggtgtgaataaattaatttaattcaatgataaccgaccattaaacattatatatctaattgtgatcggatcgaattgaattttttttttttttaatatccaattggatcgcatcgaatgttagatagagtgtccaaaaatctaatacatccgacatctaatcgaactaattagtattttcatttagttttgatgagagtaattaaattttatattgttatacctaatatatatatgaaaattaacagtaaaattttactcttttttttttatagattggatggatccaaaccaattcaatacatactggacctaaaatattagatgcattagatctgatccaaaaaaattaggtctaaaatattgaataaacccaaattaaatcaataaatatatataaaatatatttaatagatagaaccgatccaatcca

SEQ ID NO: 174946 - DNA, 534 bp, Cannabis sativa
cattcattctaagccttcttttaattactttaagaaataattaatttttttgaaaaataatcataaattatttattgacaatatatataattataggataactctatggtagtgactatgtttttgttcctatactatagatacacttttttaaccattcatttatatgacttttaaagtcaatattgtgtaacatgtatttgtttgtagcttattaaatttactattttttttttttaaaaaaaaagaaatagacaccaaattaaaaaaaaaaagttaacaaccaatcaaaattaactttatcattcaaaaaaataattaattaaattatttttttggacaaataataacattccacgtgtttaaaagtattatttcatgtaaattttatcagtttttctttttggaattttattacaaatcttcttctaaacatatctttctcccatttaaattgttttctttgaccaaaacaattaagacaataattatttattttgttgaaataattaattagtgaaaactcatcttatc

SEQ ID NO: 174947 - DNA, 537 bp, Cannabis sativa
tccatgacttgtgaaaaagagttttagaaagaaagataaaattgacaccaaaaaaaaaaaaaatagaaaaagttatcataataaattggtatattataataatggggtgttcattggattacatataatatttttaggtctgtccaaatccgatccaattatatattggatgttaaaatattatgtgattcgatctaattaattctgtcatctaatcgatccaacatctaattggatcggttttattcattggatgtatttcatatatattaatttgtttaattggggtttatccaatattttatactagtatttttgggatcggatcggatccatccaatatttagatccagtatgtattgaattggattggatccatccaatccaagaaaaaagagaaaatttttaatgttaattttcatatgtacatatagattaaatttagaacaatataaaatctaattactcatccaaactaaatgaaaatactaataagttcgatgggatattggatgtattggatttttagacacccca

SEQ ID NO: 174948 - DNA, 792 bp, Cannabis sativa
aaaaattactaattaccctataatttatattattataattaatacttttataaaatattatatacatgggtgtctaaattactcatatcataatatcataactacaataaaatttttatttaagagtagacttgaactaaataaattataactaaataaagttacactaaaaataaaatcaaaacaaacaccaccaaaaaaaatatcaatataactaacaacaatataataaataatccttaatattatattataaagaattatttttgagtaaatataatatttatacatgtgttaacacaaattttagttaaccaataataattattttcgtaataaatttaacacagaaataataaggaataagtaaagtacaaatagtatatcaataacattagatatttttacgtggttttacagttaaatttgcatactccacgagtttatcttattcaagatattttctgagttacaatatacaattgatcgtatttctaattttctttcaaaaattatctgtgtatttttctgtgggatctacccctatttataggaatatacgttggcagttatttatatttaaattcaaattataactgtttaattaatgaaacgtgattaattcccacgtttcatttagataatgtgttggataacaattaataattgcatatataactgcttattactcttatcattttgatggttaatgcttatttggacaatagcatctcgcttgacttgtcgatggtcaatgctaatttggacaattgtatcttgcgtatttctaag

SEQ ID NO: 174949 - DNA, 968 bp, Cannabis sativa
  modified_base (121)..(123): a, c, t, g, unknown or other
aagtccagggaacccagccctatacgatatccctctgaggggaaccagcggaaaaatcctacttccacccccgagaaaaagaaaaaggtgtaggaatcgcgaaaggtccgctcagatttcnnnaaagggaaaggtccgcagagaggcaaactccaaaaagggagtcttggtcctcaggatcgagaggaccgaaaaagtatttctgtgcaccaagaacccaaagagagaggaagaaggagccaaagataccctcccgtcgacctgaggcatcagattaacggaaaacatggtgaccttcgggatcacctagaccatgaaaaacatgggccagcggtctccacgggaatgctgaacgaaggaatcatggctgagtaatgacagtcatgagagtcagcaatgacgccccaaacaaatgttgtttatttatgcttcccgctcgctaacattaagtaggtccgcggaggaatggttcaagaagctggaactaggatcagtggactgctggaacaagctgcaagttagtttctgcacacaatttgtcgccgcgagaaaggttaatctggaggtcagcgccctgactaacatcaagcagctgcccacagagacattgaaaaatttcataaagaggtttaaggacgaagcctcgaagactaagaaagttgatgacagacaaaaacttacacttcttcaagcaaggatctgtacagggactccattgtggaacgacttgcagcaagaaggagcctccaaccttcaagatttcccgaaaagaatccaaaagtacatcaacttagaagaggcccaaatagtggcctatgggggatattatccgaccagaggtgcagggtatcagcccggagtccagctcccaggaaccttaccatcggctactccaccaataatcagaatacagttctctgctaacccaggatacaatcccagccaggcattgttgggttttatgccct

SEQ ID NO: 174950 - DNA, 663 bp, Cannabis sativa
gctagacaaccgaaaataaagggaaacaattaactaattctttaacagacttaactaacttaatgtatagtaaaaataatgtaacagtaactaatcatttttacttctaacatcccccctcaagtgacactggtcattgccgagtgttaacttgttaaaaaaaaactgaaaagaaattgctggtaaaggctttgtaaacaggtctgcaatttgattctctgtttccacatatcggatgtctagttgttttgccacaaccctgtctcgaacaaaatgcatatcaacctcaacgtattttgttcgagcatgaaacacagggttagaggctaaacagactgctccaagattatcacaccaaagaattggagattgaggagttggaatactgattttcgagagcacaaattgaatccacataatttctgaggtagccaaagcaatggctctatactcagattctgtacttgatctagctactacagtttgcttctttgaacaccaactaattaagtttcccccaagaaagatgcagtagccagatgtagatcttctatcatcaaagcaccctgcccaatcctgtaatatacagtttatatacatatattggtatttggtatattaagtgtgatgcaattatattgttatcattattattattattat

SEQ ID NO: 174951 - DNA, 584 bp, Cannabis sativa
caattgtagtatttttcttttttttttctaataataaggaaaatatatgaagtttttaacttataatttttttttccggatttgtttttattacacattttttgtaagggtttttttctataattttgttttaaagaaaaactaccatagttagttagaaagaaaaaaaaaataataacttctatcagacaagtgtccatttttatctctccatctatacactctgttagtctgttattgtaaacgaaacactgtcaagtattttttctaaaaacaaaaacagtatccattttcatttttcattttttcaaaagtgagatcatagtgttttaaatttttcagagtggataattgattgttagtattttcagtttttcagatcctaattatataattggttttgtttcattgtgttttaagacatataactatatgattgtgcaaaccctagctaggttatacactcatttactcaaacacagaaataatcgtggtcgcgctgacaagaatgtattaggcatatttctattcctatataataaatatatagatagatatatatgtgtataatgtatattcatata

SEQ ID NO: 174952 - DNA, 600 bp, Cannabis sativa
ttttcgagatgattaataaataaatcgagctttagcatttaattagaatacctaaaacttgatacgacattgtaggagattataacgaatagtctagaataaaatcaactaaactttaaacagttaaataattagcaatgatgagattaataaatcacaaacaataatcaaagaaaaatcagagatgaaccgagtaagaaaaactagaaaacaatttaaggcagaaaataaaaaatcaacaccaagttatatattagttcaagtctgatagatcgatgtaatctatgactttactccaaatcttttttattgattcagcaagaataggtacaataaaaccgatatcgattctcatatgagttctctcaaagtgtttcaattctcacactctcacccaagaatcttcttcattcacagaagattcttcttacaaaatccaaactcaatctctctctctcttctctgtacctttctctctctacctctcactcttttttttttctctctctcaactcaatctgatcgttattctaaaaataataagtgttggtgatatttataggtttaggatcaagatcctaaagtcggtgactacaagaa

SEQ ID NO: 174953 - DNA, 512 bp, Cannabis sativa
ctctacaacagaattttgttgtgggcgaccaacacaggaattgtaatgcatgagtcccttgctggcaaaataacttgttagagttagttcatttgcattgtctgttctaacagactttatattagatttatattaagtgtggagaagggagaagaaatgtttgattatggcaggggcatcagatttggcatgtaggtccatgtatatcgtgaatgatcatcaactatggtcaaaaaatatttatatccttcaatcgattctatgtgatatggaccccaaatgtccatgtgtatgagattaaaggctgcaggtgcaatgttgttatgggaaataaaaggtaatttattttgctttgcataatgacatgttttgcaatgaaaattagatgatgtatttatgaatgttgcccttaattttgtccaaaatacgtggaccaacacgactgtgacacgtggactgaaggagtaagactttaagataattcgactaagtcttattaatgaaaaggatca

SEQ ID NO: 174954 - DNA, 784 bp, Cannabis sativa
gttaagtttataattttcattaaagttttagactccgattcagggttaatacacgagtctagtctgtcttagtccaagaccgactcgtagaataattttaaatttaattcaatttagtttaaatatttctatggcatctttttctcactcctttttttcgtcttctccttttttactttttaattttgttttatcatacatataataaagtgaaagagattgatgcattttaatctaccgtatatatatactaaataaataattgtttctaataatattatatgcattgttagtgttccatatatattacacgtatattagtaacatgtgatgcatgtttgtttagagttgtattactattagagttgttattatttaattattaatttaaataataataaaaattaaatctaatacaatttaattatatttttaaatatatgaaattaaattttgttttaaatttatttataaaaaatatatctaattaattttatgaaaaaataaaataaataaataagattagatattataaactatataactaaataaatttattatataaagtgtgattaattgattgaacaaacgtccaatttatatttaaattaaaaactatataaaaataattatttaattttgttgatatttttaaataattattaaagttatattttaataaatataaattaaatttagatattaatttaaaatatttttttaacaaaaaaaaataattaattaattgatttaagagtgttagttttaagatcggaagagcgtc

SEQ ID NO: 174955 - DNA, 633 bp, Cannabis sativa
ggtgacagtgacactaactttttcgtcgccggtgacttttttcggtgaaacttattattattttacaaatttgagatttttatttttttgacaaaaatatggcataaaaaagcctagatataagtaaaaaaataataaaaataattcataaccccatggtattatttatttatgctataacaaagtaaattcttataattttcccatatattgtgtaatttctacatataagaattgtattgtattaaataataaatagtattatatttggataaagcaatgtattgtattaattattatgacgaatttttttaatacaagttatattatttaatatataacaaatagtccgtattaactttgttaacgtagatttttgttaaccaaaaatattaatcttttcgtaataaatataccccagaattaattatagtaataaatgaacactagaaagtttttaacatgggtttgaagttaattcttcatagtccacgagtccatcttattatagataatatttataatataaaatacaataatatcagtagttgttgaccgagattttcgacaaccaataaaataataataatttagagagctgcaagaaattaagaaggagattttttacgtggt

SEQ ID NO: 174956 - DNA, 791 bp, Cannabis sativa
accacaaattaaagaaaatcaaactctaaaaggagaaaatgccacattattagacctaacaacaggattatatatatatagattttaagagtttatttttttatggcataaataaataaaattaagtgattatggattttttttggttttttacatttatatgggtttttttatgttatatatttgtaaaaaaagatggaaatcccatatttgtaaacaataataagttttgtcggaaaagtcatcggcgcgggagaagtcaccgaaaaagtcactggcgccggaaaaactattggcgccggaaaagtcaccggaaaaatcatcgtcgccgaaaaagttacagtcgccggaaaaagtcaccagaagtagatgtgtcaaatataaacaaaaatagaaccggttataattgaaatataaccagttctctaatacaaggaataaaaacaaataaaacaaaataactcaaactaattataattaaattataaccggttataactaataaagaactagttatataatataatgaatacaaacaagtaacacacaataattcaaaccgattactacggagctggttcttttcatatttatgcttcagtattttttcgaattgatcctcaccttttaaaaaaaattataatcggttttatgaggtactatgtgttaagatgtagaactctagttttgtttttaatttatattttagtgttttaggaactgatttcccctttattttttaattgtaaccggcttaaattattgtgtgttacttgtttgtattcattatg

SEQ ID NO: 174957 - DNA, 674 bp, Cannabis sativa
  modified_base (614)..(614): a, c, t, g, unknown or other
acagtcatttgtttgaatatatatatacgaatgtagcagcataaatacttactgaaagataaactttatagaagaaaatggtttaagtactaagatccgagagttgaaaataaaacatattttgagtatctaaagtcataagattttaaagaataccataaatcccaatagaaaaacatgtacacttaagagttgtttgtaaacatcacatctaatgtggaagacatatgaatccattcctctccaaccaacacgtcgatgtgtcacacacaccaatcaaaatttgtagtgtacgctctttcataatgtaggtatgtatgtatcgggcgtttagtataaaggatttaaaataatttttttttttgacgcggtgattaaaatcacacatgattaacaaagcagcaatccacaattagctgagacacttcatcgaaccaggatagctcatcgtctaataaccgaagggcatgttttgtcaaaccatgtgctgccgaattcttatctcgagccacataggacaaaactgcccctggaaatttagacaatcaagctatgtcttcaaaacagtactacatcacattgaaaaaataccttctcattattaataattgtcnccaaagctagcgaaactgaaaaaacaatgcaacaccaaactaaaaaatacagttatatta

SEQ ID NO: 174958 - DNA, 631 bp, Cannabis sativa
ggtgagaaattcgcactataacactgggtgtttgattcaacttaggcgatgggtcatgaactgtctttagtaaaacagtcataactcactcaatattgaactgattgacgcaattccagctgcattttgaagctaattcaatgctttatcaagtcatgtatcacacttcaatagcaattgtaaatctatcagtactaaaattcaatattctatcaagtcatgctgtattaatggtaactttagaggtgaaaaaaatagtatatacatatatatatttaatggaaaattcttaagtgagatcatcgctttttctctcacctatgagggtatttttctatacttttaattagttgaatagcttggttgtatggtgttatgttgtgttgtagagcatgttagtatttggttttatactatttttttttattgtgatttttttcttttatcacgttggtgaatgtattcttggcagtttcattctttctttctttaattaattataaagaattagtgatatttttacttatctatgttgttaaatttataaaataagaacaatcacgagagcgcacttcatattatttttttgcagaattattttaacgatattaaggatttaaatgttcaattt

SEQ ID NO: 174959 - DNA, 565 bp, Cannabis sativa
tagcggcggttattataaaataaccaatgacatagtgtttatgtaaccctatttagccattcgtcttcctcactttgtcttctccccaaacaaaataactcgcagccactttatgaaactctcgcccaaccaccgcctccaatcctctatttctctatttttcatccgttttcacccatttttttaaatcttacatttttcatacctaaaaatatatccctagagtttgaccttcttttgttttgttttacagggtaaacagaacttagaggtggtagttgtggtgattgtagcttcggccaccacttttggttgagaaatcgttgaatctcaacgtccattaaagtataaatgtaatctgtaatagttttagtaatttacattgcttttatctttgattttataattttttttaaggtttttctaaatttttaagattgcgttattgtgttggtacgtggtaccactacaaaaaactactacttttagtgacaactttttagtcataacataacttttttgtgactaaatgtgagttttagtcataacaaaatgttacttgtga

SEQ ID NO: 174960 - DNA, 510 bp, Cannabis sativa
  modified_base (333)..(352): a, c, t, g, unknown or other
agagggaaacaactacatataaattaggtcttcttaatttgtagttaattattacaattctttgttgaaaaaaagagtaatagattattaattctttaccacaagcaccacacacaattttttgttgaaaaaaagagtaatagattattaactctatatgttcagttataatgttatgcataaaatatatatgtatatataaaaattaatattaattttttttttattggatggattcagtccaatccaatacatactggacctaaaatattggatggatccgatccgatctaaaaaatactaggactaaaatattgaataaactcaaattannnnnnnnnnnnnnnnnnnnaatacatccaacggatagaaccgatccaatcaaacatccaatggattggatgaaattaattaattaggttggatcaaatggtaaaatctaacatccaatatataagtggatcggatttgaataggcctaaaaatattagatgtggtccaataaatacc

SEQ ID NO: 174961 - DNA, 627 bp, Cannabis sativa
caaaggaagctgctgccagttctttgttgggcgatatggagcgcacgaaatgatttcgtgtggcagcaaaaaacgactactgctgctactattttgaacacagcaatgggattccttgatcaatggagtaaagctcagaatactcttattgagacgtcttggtcgggttgcacgattaatgacggagctgagcaatgggtcgttccaagtgaaaataaaatcaaggtaaacgttgatgctgcgttgtttaatagtagtaacaagtatgggtgcggtgttgttgctagagatcattacggcatgctagtccaagggaaaacacttttgttcaacggttcgccgtcgcccgaacttgctgaatcaattggcatacgggaagcattgagttggataaaaggtcatgggtggcaacatgttacagtggaaaccgattgtcttacggtagttcaagcacttagaagcactatagacatgatttccccatttggtcaagtcattttggaatgtaaaaagatgttatttgatttgaaaactgtttctgttttatttgttaagcgatcagctaatatggtagctcataactgtgcaagagcttctatattatatcctggttgtatcttcgatatg

SEQ ID NO: 174962 - DNA, 555 bp, Cannabis sativa
tctcttttcaaaataaagagtaaaataaacactttaaataaaatactttaataaaaagggctgaaacaaataagacaaaagggttaatcacataatctcttttaattaatttaatttctttttcctttaaataaaaatcaaagattttaaaataaaataggataataattaacaagggcattttagttaagaactaacccgacgaaaaccaacactataaaatctaacgatgacgccccgaaaaataataaaatgctttaatacccaaagtacgactctctaaaggcccaacgtcgcttttcacagcttccgaacacaaatacagaaattgaataatttacataagatagcataataaacatatatgatataaaatatatttccaaaatatgcatttcacaattattaattaaatctcatgcataaaccctaattattccataatccaaaacattaaacttaggcggtcattacaattatccccccgttaaaaggatttcgtccccgaaatctacctgaacagctcaggatgttgagttctcatatccgactcca

SEQ ID NO: 174963 - DNA, 573 bp, Cannabis sativa
ttttttttaaaaaaaaatgattttcaatttaaaaattaaaaagtgaaaaaaaaattataaaacatgtttttggaaaatattttcacttttctaattaaaaaaaaataaaaaacactaattaaaaaattgttaacaaagggagcatttgcagtaacacttctgtttttttaattttttaatcacaaaaatgaaagtaaaatttgtatttttaaaattatgtttttaaaataagaaaaaatgtgttctataatcacttttgttttttaattttaaaaataaaaaataaaagtgttccataacttttattttttatttttattttaatttttttaagtcatgtctaggttcgggtgtggggtcgaagatcgtggttcgtgtctaggactggagccaaggctagagtccgggttccaacgttcaggttagggtcgaagtccaaaatatttaagaaaaaaatatttaaaaaaaaaattaaagtgattttgtttttttgttttaaaattttttaaaattttgattgtcaattaaaaaattaaaaattgaaaacagttttatagaacacgtttttgaaaa

SEQ ID NO: 174964 - DNA, 570 bp, Cannabis sativa
gacaagattgtggtggatccagggaaggttgaatcgattaaaaattggccaaggcaaaaaatagttactaaagtacgaagttttctcaaattagcgggatattatcgacgttttgtagaaggattctctaagattactgtgccattgaccgagttgactaaaaagaattagctatttgtgtggtcagataaatgtgaagaaagcttccaagaattgaaacaacgattaattacagccccggtattagacctaccaactgatcaagaaaaaattgtggtgtattgtgatgcatctagatagtgtttagggtgtgcattaatacaagcagacaaggttatagcttgtacttcacgacaataaaaagactacgaacaacattatttgacccacgacttggagcttgcaacggttgtctttgccttaaagatttggcgatattatttgtttggagagaggtgtgagatttacattgatcacaagagtctcaagtacttccttactcagaaagatttaaacacgagacagatgtggtggttagaactagttaaagactatgattgtgaaattttg

SEQ ID NO: 174965 - DNA, 808 bp, Cannabis sativa
taaaattaactcaggaccgatcctgttttcgatatacatacacctaaatagagagcaaggtggggataaataaaatttttcatttccaaattttaaataaatgagtttgtcatatcataagaataaccagccaaatggagatttttccacaaattgtgtccatggaatatgtttttattatatttttaatagtgattttacataaaataatacacaaaaaaaaattgttgaaaaaaaaaatgttactatagagaaattttcatttatacgatttgaactttttcatttataaaaaaaaatacgttatttttaataaaaaaaaaaaatatatataatactcatatttttttttttggttttataaatcataatttatagttttcatgaagttaattttgttattattttttgttattttatagttgatttatagttgatgcaaagttaatttcttgttgttttttaatttttttcttatatttttttcattttttttcttgaaatatcgtatttttaaaaattaagataaaaaaatttaagttgtaaaactgtaaataaaacataaaaaaaaaaaaatacatatttatgaagaaaaaaaaaaaccgccgataacatacataaatctatgatacataagttatgaatcttttgttcaacaaataaacaaaacttaaatttcaaaattttccccaatatttaaagtattattcatattagatatttatgtttattttgctagccttcaaatattaaatatttgagaatgatgccatattttttattgacatcaaacaaaacttgtcatgaa

SEQ ID NO: 174966 - DNA, 729 bp, Cannabis sativa
ataaaaattttggctttttatatgctgttgtagaggagtacagatataggagagttagttacaaagtttgttaaaacactttgtaactaacttagctaatctgtctaggttgtttagaggccaaaggccacataagtttttactacttgtaatcatattgtaactgttctggttttacagtaaatatggggatttactttcaagagagatgatactctatacttatcactttattactcgaaaggattgtgtacactagcatattaattttcacaacaactgttatccaattataaagtgtcacatggatttatgttggacaccttaaagtgtcaaataacaatgctcatttataatgttataattatgtacattctatctttctatatgtacaacaactaacataatttttgcattactattatgaattgctaatcaattataggatgtcatatcaacatcttaaaatatcgaataacaatactcatttataataaaataattagcaattttgtctcatgaactttcgacactataacatgccccttaaaatatattgtttgctaaaaatttccccacaacttttacatttatagaaatttagtcattctgttaagttttgtctcattattccatttaggctaaatagtaatatttccccttgaactttgacatgtaccaaattatgccctctgaactttttttgccgttaaaaatttcccctgaact

SEQ ID NO: 174967 - DNA, 625 bp, Cannabis sativa
tgttgatactttcatgggtagtttctggatggttcttatatcaagttttgcatattgtgcggtcagtactctctatcttttaatcattttaaatattacatatatagataccaacggtgtcctcttatgttttaatattattattaatctaaataagtatcacgtctcatatagtttaatataataacttttatgtcgctaatcaatctcaaagcgacatatttagaaatatggccggcccaaaggctgtgcaaccagatcaattgcacagaacccacaataatatagggtccatttgaattttttttttttttcttcttatgaaaaatttgtatttcttcttatattgtctattaaattttcactttctttatcaatctcaatttcaaaaatacacctccattattactatttaattttgtaaaacattctatataaaataattaactaaatattttctttatttaaacagtagtttttgatttttgtgtcaaactattatttttttcatcttatatatatatatatatatatatatatatatttctattcattttctctcaaatatcaaaaatcaaaattgttttgagaggaaagaaattaatcctttgtgtttggtgcccct

SEQ ID NO: 174968 - DNA, 562 bp, Cannabis sativa
agaatacacaatctttgaaaaaaaataatgaactaaaaaacttttctaatatatattgaaacacataagagatcaaccggaacactggtgtcactacacaaaatctacatttaatgataatcttttaatcacaacataaactttttgcgactaaatgtgacttttaatcacaacaaaaattcttccaaaaaaaaaaaaatcacaacaaaaattttataactaaaatattatgtatatttagatacaagctgtcattaatttagttttataagtcagaacaagtattgtgactaaaaacatattttttcacaataaattatatttttgtaactaataatactttagtcacaaattttttagtcacaatataagaatgataacttataattagtcacaatttttttatttttaatcacaaattttattctaactaaaagtaataagtttttttgtaatgtgtatcctacaaaagtttcttatattttgaatcataagaaaattaatatttttcttgccaaaaaaggtaaatctctttaagtaatatagtctagctagtctatat

SEQ ID NO: 174969 - DNA, 551 bp, Cannabis sativa
ttttatttttgaccaatttatatgtactttttgtttttaagtattttttatagtatttaataggtcatatataaattaggttttcaaaattaatattttttattttttaggccgttttatttgatgaaaaaactaattctttcatgaagaaattaattttttaatagagaaactaacttcttaatgaaaaaatcagtttcttgataaattttactgtaatgggttgcttcaaaaccggggtaattttaagatgggtgacctcctgagaagtttgcgatcagttttttggtgatttttcctgtgacagtgctaattctaacgactttttcagtgtcgacagtaactccgaagacttttccgacaccgacagctactccagcgactttttcagcaccgacagcaaacttcagtgacttttccggtaccagtgacaactccggcgatcattgcaatttcatttgatttatttttttgaaaaaaaaaatatgaaagaaattttaatattttttatagtaatataaataacatatgttatatatgttaagtttttt

SEQ ID NO: 174970 - DNA, 592 bp, Cannabis sativa
ggaatttctagatgtttttcttaaatttaaagaattaaatgttcagcttcaggggttgcttgacctaagattttcatgacctattgtgtcaccctggggagctctcgtattgtttgttaagaagaaagatggatccttacgcatgtgtattgactattgagagttaaataaactgaccatcaagaacaaatatccgttacctaggatcgatgacttattcgatcagcttgtggggaaaacggtcttttcaacgattgatctccgatcgagctatcattagctgagaatccgagaagaggacattgcaaagactgcttttcgcactaggtatgggcattatgaatttctggttatgtcttttggactaaccaacgcttccacatcttttatggatctgataaatagggtatttaaggatttcttcgatatttgtgttattatttttatcgatgatatccttgtgtactctcaatcggaagaggagcacgggcagcatcttcgaatggttttgcaacggctacgagaacataaactgtatgccaaattcaagaagtgcgagttttggctatctcaggtgtcttttcttcgacac

SEQ ID NO: 174971 - DNA, 688 bp, Cannabis sativa
  modified_base (623)..(633): a, c, t, g, unknown or other
aagtgatttcactcgccttatataatttttcttctagaatttaaaatcccttaaccataggtgccccttcgcataactatagtcaggttaggtttaaaatacaaaataataataaaataatcattcaaaaaataaatatctctttacttatcattttttgactatattctcggaatagcttttagagcgtgtgtcttttgcatttagcggatcctcatgggcacacaaggggagccaattgggtcccttaataattcgtgctaatcaggtccttgaggtaattcggtagctgaggagctctttgtgccttagcaactgacgaatcagggagcttagtacgcccaatgtgctccactagtagaaggtgcaatgtggcaatgtgctccactagtaggagaagcaatgtgctaatgtgctccactggtaagaggtgcaatgagctcattgggttggacttccatacctagaacaaaatccatgcacaagtatcttgcattttttagggataatatttacccccaagtttatcatgattttagagtattatgatggacttatagaaaaataattcccacatttttagactgcaaacctattggaaatattttaccagaatctagatnnnnnnnnnnntatgttgattaacatcctaaataggaattctaaaaaataatgaaataaacacata

SEQ ID NO: 174972 - DNA, 618 bp, Cannabis sativa
aaaggttttattatgaacaatgttttgcgtacacctaagtgtccttttagaatcgacgcaaaaaaaacttgttgtatcagttaagtattgacgcatagcttgttgcttcactttaaaactgtcgcaaatgtttcaatttttgtttttgtattttacgtcggttataaaatgacgaaaaatagttttttgtgtcattttataaccgacgcaaataaattactatttgcgtctatggcttatacgtcggttttataaaccgacgcaaaatctttattagtcacttgaaagctgacgaaaatactcttttttgtggtagtgacacaatagaaaaaagtgttgggctttgtgcccaaaataaaactttatttaaatataatcttctatgcaattatcatgaataaattaagaaacaaatttaatttcattaattacttgtataatgtgttatttagttcatttatttgatttataaatttatccaaatccttatcacactgatatttgtctattgtgttgtcaacacagtagaaagtaatcaagattgtatgataaatgcattcttatgatttatcagtacacaaggtttaactgataggataatctacaatgtagtttact

SEQ ID NO: 174973 - DNA, 771 bp, Cannabis sativa
attatgtctaattattagagttaaatcttttaagacagaactatataatagccaatataacatgcactatacatatgtttcttttgtcccataaacttatttggtatctaactttgaataaagggtttaaggggaatcagtagatcacttgtctattttggtatttgagaaaaaaaattcgtccaaatttttttatacaataattttgtattttgtatagctatttaagattatttgtaaatttttaaaaaattatataaatatttaaatattattttctacattgtaaactacttaaaattttcagaaaatttacatgtaaccccaaataattataatgtacacgaaattgaattaaataactctcctaaatactgaaacaaataaaagatgtatactgaaacacttttgaaagggtttactataacttaccctatacagtacaattatatatatgtatatgtaatttttattatatatatatgtattatgtatatgtatatgcagtttatatataccaataaaataaaataaagaagattaatttttatgattctaagtatggagtttaactataagaacaaatgtcaatgatttggtaaccttcaactttcttttgtgtttttggcccatattaatttatggattatgaatttataaccacccaaaataaatttttgagcatttcaaataaattaggaaacttacaaaaatactggaattttgattaacttttacaaaaatactcacacggaatttttttcaaaaata

SEQ ID NO: 174974 - DNA, 638 bp, Cannabis sativa
tggtcgcagaagcttctgggttattgcagcaggttcttcgacgtactcgagagaaaaaaaaaatcacaccaggagagagaaaatatcgcaccagtttaccaggagaaaatttcgcaccaattcttttatttttcttttcagccatgttatattacttagttattatatatttagtatacattgttatgcatataaataattttaaccatgtagtcctctgtatttatgattagtaattacacattattattacatgcaaaatttacttataatttatctaggaaagaaataaaaaactattacataattacattgtaacatgtcacctcaccaccacccgaaagaaaaattttatatataaaagcaaattttaccaaataaaaggatccattactttcttgttttcataaaatggtaaaaatatttatatttttatatattaatatatatatatatatctattctatataaaatataatatgtggctatgtaacaaaattcttggtttaacgttattttttggtttcttacgttaactttaatgtaatatcctattacttaacagaatattctctattaattttattatattattatgtatttaaaaataaaaattatgtagataaaaattatataga

SEQ ID NO: 174975 - DNA, 723 bp, Cannabis sativa
cgacccgaactagaacccaaactcaaactctgaaatacatttggaactgaaactggactaggactaggactaggaccaggactaagagacagacccgaacccaaacccaaataaaaacccagaccgagacacaaacctgaacctcgactaggacccatgcctgaacctagaatgggacccaaactgggacttagacaaagaatcgagatacgaacttgggcaacggaactaggacagggacccaagacccgaccctaaacccagacttcaatctaagaacaaactcgtgactcgacacacgaaatggaacccgaccgagacccgagatcagaatccagatctagacctggggcttggaccgaacccgaagtcggtgtttggatctgggacccagcctcgaactcaaacctagactgggacccgaaactagacgcagacctcaacccagccccaaattgcaacctggacccgaacccgtaccttgtgagccaaaattagaaccgaaactggaagtacactgggactcgggaataggttcggaaccaggacttggactttgacctggaaccgtaatcagacctggacctagacttggaaccgtaaccgaactaggacccaaactccaacccatacctagaaccgaaccgaaactcgtacatagatcccaacccaaacctacactcgatgccgaacctggacccaaactcagacccaaacatggaa

SEQ ID NO: 174976 - DNA, 602 bp, Cannabis sativa
agtgagacagccttgatatgtgacaaattttatctacttcaaagatgtatcattttcattttttgtttggatggaaaaagaatgataatgtaattttgaatgggattctttacatgtcatgaataatgtgttctactaaattttatggggctctgctggaggttgtgcatttaaggtgttttaacttttattttaaaaaaaaatatatgcttaatttaatatatagaaaaaaccacataaattttaattatttttttaaaaaatagtaaattaaaccaatcaacccgctgacccagccaacccgaacccatggacccgtaaacccacgagcccaaaacccgtaaacccgaaccatttcacgagtctagttcaagtatattttttgaatccgaaacccagtcaacccacccaatgttcactcctaatttttactacaatttatgtgctaactaccaaactaaacatgtttttttttagtctaaaaagtgatattaggtctatcataaagaaaaaagtatattggtaattgacataaaagtgtattaataataattaaggtttattatgtatgtcgaatgacattgtctgagagaattctctga

SEQ ID NO: 174977 - DNA, 527 bp, Cannabis sativa
caacattaatttggcataggagacgtgctcacatcagtaatggaggaatgcaagtgctcaagaagaaaggagtttttgggaaggatcaagtccaagaaattgaattctgtgagcagtgtgttctaggtaaatcgacaagagtcaagtttggaaagggccttcatgtctcaaaagctatttttggattacatccattcagatctatggggaccttcaaggactgaatccagaggtggagccaagtactttctatcctttattgatgactttaccagatttgtttggattcatattttgaaaaacaagaatgactcatttaaggtgtttttgaaatggaaaaccttaatcgagaatcaaactggcaagggaactactgatgttggcctagtttatggataaaacaacaacaacattgactctgatgtaatgagatttgtcgactcagactatgttggagacattgattcgagaagatctcaaactggatacatttttcaaatgagaggctgcactataagctggaaggc

SEQ ID NO: 174978 - DNA, 581 bp, Cannabis sativa
tttattactgctagaaatatattaggagtggtgactaagtaattaactgttgcagtggcaaaaaaaaaatagccgttgcaattagcaaaaagaatttagccgttgcaaacaagatacatataatgttgggattttaccaaaatttacagctttttatctcaaagcaacttcaaagacagatttcaccaaaagaaattagccgttagtcctagacagatatatatatagctcattagttcatgtaaaagaaattattcatgtaaaagaaagacaaaagagagatcaaagttgtaaaagatcaaatcttttgggtgaactccgagatcaaagttggtgttcttctcctactttcatcctactttcatcacggtttgtattctttcatctcactcttatttttctgatatttgtatttgtgtgtgtttgtgttcttgtgtttcggtttatttttcggttcgttactgccattagaataaaaaagaaaaacagttacaaaattagtgttttcggctgtagcaagaaataggaaaaagaagaaaagaaaaatattagaagaaccctagctgccattaaaggagaaa

SEQ ID NO: 174979 - DNA, 592 bp, Cannabis sativa
ctaacatacctacaccgcaagtccaggcgtggaaagtattcgtagatggcgcctccaacgagaatgggtccggagcaggggttgcaatgatatccccaaacggacttcgactccaggcagctctacggtttgaattcacagcttctaacaatgaggctgaatacaaagccctaatagcaagactgagattagtaaaggtcgtgggagccaaaagagtataaatctacagcgattcacaactggtagtaaaccaggtgtcaggagaatatcagacgcgcggagaaaagaaggctgcatatgtagcaatagtccgagaactgctccacaatttcacggactataaagtagaaagaatccccagagaaaagaatgctcacgcagactgtttggctaagttagcttcagacagtgaaattgagaaattaggggtagtacctgtggaatgcttggcaaagccaagcatcaaagtccagaataccatagcaacagttaagcaagagcccagctggatggtccccatcatcgaatacataacgaaaggcgagtttccccaagagaaggcactatccagaaggatacaatatcaagcgca

SEQ ID NO: 174980 - DNA, 537 bp, Cannabis sativa
ggtgccgaaaaactcgtaggagtttgttgctggcgtcgaaaattcgccagagtagttgtcagcgccggaaaagttgtcggagtagctatcagcaccggaaaagtcgtcggagttgctgctggcgccagaaaagttgtccgaattggcattttcgaagggaaaattaccaagaaactagtttctcaaaaaactggtttcttgatgaagaaaccagtttcttagttatttttctggtgattttttcagtaacaatgctaattctaatgactttttcgaagtttgctgtcggtgccgaaaaagtcgccagagtaattgttggtgtcagaaaaatcactggaaatatcaccaaaaaactggtttcttcatcaagaaagatgaaaaaaccagtttcttggtaatttttttgacaacaatgccaattttagcgactttttcggtgccggcagcagctccagcaacttttccggtaccaacagctactccgacgactttgaaaacttaatttacatatatagcatattaaatacctaaaaaaaa

SEQ ID NO: 174981 - DNA, 637 bp, Cannabis sativa
  modified_base (465)..(467): a, c, t, g, unknown or other
cgatatgtccggcggcaaaaaaggaggtttcattgtctctagccatttacaacatatgtcctcgttctccatgacggcaatgctgttcgaattcgagattcggctaaggaatttgggttggctcggatcggcggtcatgggatttctgtagatgagttacgatcgatgttgtttcgtggtggcgagtggaatgggaatcagaatcaagaagaggagatgttgttgtgggtttcttgttctccgtctgaatggacggaatggtttgggtgccgatggtgtcggtgaatcctgaagctcccacggctgaagcccaagctctgtgcagttgtcggcagtttcatggtggtttagttttgtcgtcggttgccatcgctagtggctgaagtgggagtccgtttttcttgggtgatggcgacttgacttctcaattattttgtaactgctttctattattattattattannnttattattattattacttaaataaatgttttaagattttatttaaaattttctcaaaaaaaaaaaaaagattttatttaaaataaacgtaatataattattttttaaattaatttttttctctaaaataaaatattatttatatacattatttttgtaacgacttctttt

SEQ ID NO: 174982 - DNA, 605 bp, Cannabis sativa
acacgagatggattcagaaagaacactcaatagagaaatagcgatctaagagagaattactcagatatctattgtaagagttttagagagagaatactttgttctttatctcataagttaatacaacttaaaaggctattaccatcatcactgggccgaacctctagaaattctggtgttctctttatttactgtttttactttctattatttactttatctaatcgctttattttgactcactgtcgttggctagaagcgaaatcaacattttggtgcttccattgagagtagaaacacaagctttttgtctcaaggggtatttttaacgaccttaaaagttcaggggatatgatttggtacatgtcaaagttcaggggaaaaaaatcctaattagtctatccacttatatagatgaagtccacattagactctttaagttaatgtaaattatgtgttagacttaagtagagagtagggatatattaggtaactcacttatataagtgaatatattttaataaaatataatatgaaagtatttttgattaatgaatatacaaaataaaggctaattaagattttttttctcctcgaactttgac

SEQ ID NO: 174983 - DNA, 595 bp, Cannabis sativa
tagtaaattgataccactgaagtctctgaacatagaatcacagtaccttatcttagtgggaggatttttcatcacattattatatggatgatactagtgataacctactatgatatgttcaacaagagaaactttaaaattgaacaaagaaaaattaatctaaccattcatatggatagtaataacttatcgaattatgaggataagaaagaaaattttacaatgtctattcgaaagactcaagcgcaattcttaattcttatgaaatgttttatggtatctctagtgattacttaatctcaagcaagtattttacattaaggataatactagaatgctatgttgatgacttagcctagaaggaacttattgtttccagattaatataaaatggcacaataagatgtccctaagtaccaatagtaagaggttatatgcacacttgtgtatgcattaaactatatatttaatgttgagtgggagccatcaaagatgaaataaaataaggaacattgggagacaatcaagaaagaatatctaaaagtgacctatatgttagataggggtttatttataatccttatatctacaccaa

SEQ ID NO: 174984 - DNA, 520 bp, Cannabis sativa
cttctaaaaattctaaagaaaaaaataaagtaaaataaattgggttgcctcccaatagcgttgtctttatcgtcatacagctagacgttgatttctgttttcaaagaggcgctagaatcatggcggacttggcttggtcaatttgacctcccaagtagagctttaaacgctgtccattaaccttaaaggtttttggaccttctcctttcaattcaacagctccataaggaaacaccttgaccacgctaaacggacgcgaccatcttgactttaacttgacaggaaacaatttcaaccttgaattgaaaagtaaaatttgttgacgggttgaaactccttcttgactaagcttcgatcatgccactttttggttctctccttatagatctttgcattctcgtaggcttcatttctgaactcctccagttcatccaattgcagcaatcttttctctcctgccgccttcaaatccatgttgagagtcttcatagcccagtaggccttatgttctaattccacc

SEQ ID NO: 174985 - DNA, 528 bp, Cannabis sativa
gacatatccaactattcctaaatgtataaataaaaaaaaattcacacaaacttctattgaaagaaaaaataggacattaaaacccaaagttagcttagcagtggcaacagattccacttccctaccagaaaacaacatagctccacgtaatcagctccacttgcattttattcagtaaaaaataaaaataattaaataaagccttttttttttaaaaaaaaattactctttatgtaaactttgtagttaagatactccaaggccttgcccaaaaaatccaaacatatattatacatagcaaaaaaaaaaaatagtcaacgacagcctgtttcttgaaaatacgtggtgaccaagatatccaaatatgtttcagcaaaaaataaaaaataattagtactatttttttcttttttaaaatatttatatttttacataagaatatttttttttatattttttacagttttttaaaaaataacacgaaaataacataaaattaacaaaaaaaataatataaaaataacataa

SEQ ID NO: 174986 - DNA, 549 bp, Cannabis sativa
acctcttgtttgatgttcgctagggttgtgtaaggtggtctatacgtcatcgtgatttggaaatttgataggaagaggtccaagaaggtttcccaagtcgatatggatgcttctgacaactggataaaccaatcgtgagcattatcctccaaggttgccgcaaggatacgacattttgccagctgaggtgcctggtctacctccataattgtattaaaattttctaaatagtctacaggattagtggtacctttatatttcaacgactcggatagtctaaatcctttaggcaatcgagcttgtcgcacttccgtggtaaaaggagaaatcccgtgaagcttgcaaatgggctttctctgttgctcgattatcttcagctcttgtagtaaaatgctctgatcaacaccccctggcaatatagctttgttttgagtcgttacaggtgcagttgcaatagcaactatgtttctcgagataaccactctagtagtcgcagctggtgcgttaggcgggttggcaacatatgtaaagaccgcttagtttgaattt

SEQ ID NO: 174987 - DNA, 532 bp, Cannabis sativa
gtgctccggatgctgaaaaatgaaagtgttctgaattttattctgatgcctcaaatatgttcatgacatgtataattcatatcccagtataaagtttgactcatttgcactaagacggtcccaaaaactgaaaccttagttggaatgtcaaccttggcactgggtgaaactctaggtgcccgggttgacttccaatgtgttatttcttgtattttcaactttcgtgcctcggacttggattcttcttgacttagttactcaggatattaaaggatggtgacttggaaacaacttggcgggatccaaatacccattccagagcctcaaagttaatatgggtgtagggctaaggaccctttcccatgttgactgctatgactcgagtttcttcactcctggaatattttttttctttccacgtgtcaaacattgatgttcacatcatcaaagctagttttggcgtaagaattttcccctcaagtcaactttacacttgtatgaggttgaattaatgacgtgaactaagcccatt

SEQ ID NO: 174988 - DNA, 509 bp, Cannabis sativa
tcaacacaagaatgatgctctctttgctgatgtaaaaaaacaaggatgtatctgccttggagtttcttaaattccaggttagcaatgtgtttttcaacttgtcaaactaagctcttggagcttgtttgagcccatacagagatttcataagtttgcaaacatgatcaggccttgtgggatcttcaaaaccttcaggttggcacatataaacatcttcttcaagattcccattcagaaatgcgttgtttatatctagttgtctgatgtcccaactctttgctgctacaatacttagagcaattctaactgtagaagctttcacaataggactgaatgtttctccatagtccaaaccagccctttgatggaaccccttagcaacgagtcttgatttgtatctttgaaacgagccatctgcatttcttttgattctgtgaacccacttacaaccaaccaaattgtttgcctctgacctgggaacaagtatccaagttttgtttcttttgaga

SEQ ID NO: 174989 - DNA, 507 bp, Cannabis sativa
  modified_base (130)..(143): a, c, t, g, unknown or other
ataattatatataaataaatggtgcataacatatattttatttttaaacaaacaacacaagtatctcatgttgtgagacttggtttgactattatttcttaacttgaaaatcaataataataataataannnnnnnnnnnnnnataataataataataattaggagcaaatttacttaacgtaacaaatgatcaactacgttaaaaaaataaaaataatagtgagtcaattcaaagaagaaattaatttaatgcaaccataccaacctaataaactataaatataaaataacatatatttgaattaatttgactaatgttcaggtgaaaaagcataaaaaaacatttattaatttatatattatatttttttttgagagaatttatatattatttatttattctaaaaaatatttttttatttatggtgtgttgaaaggcttgttgagaaaaaccaggtggaaagttggatctaggaagcatggatgaattactagtaccagcccct

SEQ ID NO: 174990 - DNA, 630 bp, Cannabis sativa
ctggaaaattcctggaagccccaagcggtagaccgattgctaaaggcttccctgaaccggaattctggttcagtgcaggaaacttcaaaatttcatttctcactcaaaccaacctcaaacttcatgcaaccttccagacctgttctaaatactccaaataacataacccaagcaatgaaaccaagatttcttctgctcaaggagggccgaaagagagagggctagagagaaaataaaattttgtctttttctttgatttctcccaattttctaatttttgaataagtgataaaaagtataattctaacctttatttcagccaacaaatatcaaagaaatcacaacattacataacactaagtccactaaaggacaaaagcttatggggcaaaaatgaccattttgcctctccacaccaaaataacataaaagggtactaaggggtaatttgggaaattctaaattctcgactaatcccgacattcccaaggtctaaataaactgccccaacatactaaaatactaaactgtgattctactgagccatacatgttacgataattttgcacacgcaagtgtacgtattgtttcaagtagtagacttaccaggagtgaggtcgatcccacagg

SEQ ID NO: 174991 - DNA, 674 bp, Cannabis sativa
tggagaagcccaactgtaggcgctcatgtgctgatattgttagaatatattttaccaaaatttaaatttactaacaagtatgtttttaatatcctaaatatgaatttttaaagcaatgaaacttaaatacatataaagtatgaggaaccttacattgattgaagcagaattaaatgacttattccactcagatctttaattatatattgttcctttttgttgtagagtataattaagatctgagcctcacactcatttagttgtttgaattcttcacagtcttacagtacactatgattgaggctaacttgctatgggtgggcatgcactcattcactaattggctcgaatttatttgtgaagaactctatagaatttcgaaaatagaagagagaaaataagaagaagaagtctcaaactctctagttgtctgacaagatgtaaactaggtttagagtcattagttggattatgagactattttttttctttttatactaattcacttagggttaggttaaattatatggaataaaatgataaaataatagcaaaatagagacttagtggccggccatgatgtgggccttacgctaattatatttttgtcatttttctcaaccacttatctattattttacaaatgtgatattttccaattctaatcctataaa

SEQ ID NO: 174992 - DNA, 697 bp, Cannabis sativa
atttatacttaataattagacatactattattgctttattacatatatgccattataataaaattaacccactaattttttacttagagcatctccaatgccaaaacttaaatttagtattaaatcaaaactaaaagaatattattttagtactattttttttttcaataatcacaatactaaaaattacattaaaatttatattttttttataatattattttattaatataataaaagtatttaattcataaatgaaatatgtagttttaaaaaaagaaaattaaaatattttatgggaaaaattacacttaatataaatttttaaagtgtcattggaaataactttaaacctgaatatatattagaaaaaaacttctttaaaataaaattataacagatgtttacaattatttagtaaaatgaatagtcacaacaaatatatgtgattattattttatttattaaaaaaatcatgtccaactaatatagactaagaggtaataatttagttttacttttatctatacatatatattatatttatgtttttgtaatatgacctaaaaaaaaatttagccaaaaaaaagaaaaggagaaaatctaatataatttgtccaattaattgtttagaaaaaattataaattagttttattttattatattcttttttatatgtatattgttgcctctgaa

SEQ ID NO: 174993 - DNA, 538 bp, Cannabis sativa
gtttaaatctcgcatttttaaccataaagataatgtcaccatgtctttaaagaaaaaaccacagtagcaagttctaggtcatgagttagatagcactactcataatccttcagttgacgagaggcataggctatgactttgtcagcttgcttcagaacacatcttagaccctgtctggatgcatcacaataaacaacaaatttctcttgataagatggcaaagctaacaccggagctgttatcaaatgttgcttcaactccagaaaacttgcttcacatttatctgaccacacgaattgctaatttttcttagttaactcggtcagtggcacagagattttagataatccctcgacgaaatgtcgataaaaccctactaaactgagaaaactttgaacttctgttaccgattttggcctcggccaattcttcactgaatcgatcttgcttggatcaaccataattccattctttctgacaacatgccccaaaaagatacctctaacaaccagaattcacacattttgaactttgcata

SEQ ID NO: 174994 - DNA, 529 bp, Cannabis sativa
tgtacgctccaggtctaactgccctaacatttacaatctccatccgcttgctctaatggctgctcagccttagccttgcccttatctacacatgcagacaataactgttagtcgacagactcagtaagaaaagtataatcataatcataaataaaactcggattaaatttagccgttcatacacccaactgtaaccctatcctcgcaccctaggcggtactgagtctagaatgttcatacgacaatactatcaaccataatatcaacctatactcggtactctagtcatactctaatcgaaccgatgtgataatatcgattagtatctgagccaaacatacatctatcagtatccaatacaactctacgtatattgatcctgctatcgatgtaatctatcaggcttaataaacatatacactaaatgtaacatccccacttcaagtctccattgggcccttacacccacggaataatagctcttatacatgagtacgtcactctatctgcttcatggactgatgactga

SEQ ID NO: 174995 - DNA, 585 bp, Cannabis sativa
  modified_base (217)..(217): a, c, t, g, unknown or other
gtatgctttttctttgtattgataatatagctagtggtgatgagtattaatttatgtctacatatatataggtgcttctatagtgcactattttaaatttggtattggtacctgtatctgttttggtatttagaaaaaaaaaaattactttaattttataatcgtgtacgtcatagttgtctaggagacatacatcttgcaaaattttgagaaattnagaataatttacaatataaaaagaaatgtccaaatagtctattttacacacatataaaataagagtgacgcatacaacagacagtttaaattttattttcaacagggttaacttttttctgaatttcttaaaaaaatttagaatatcttaaataactataatatgcacaattataaaaaaaaaaaaatatattaaaaaaatctctcagatactgaaataggagtacatcaatacatcacttttaaagagtttattgtaaaattttctaatctattgggtatatatagtaagtacttgtgttgtctagtgttattaattttcaaaacgcaaatatatgtatcgttttaacaagtaatactcacaaagag

SEQ ID NO: 174996 - DNA, 568 bp, Cannabis sativa
  modified_base (502)..(506): a, c, t, g, unknown or other
aggctgcatgcatcctccagtgctaatatttctcggttgatcccgtcacctgcgcgaatgcataccatctgcaccaaatccattctttttttcaaatttttcattttttttttatttttcaaggagttaatttgaattttttgtgtaattttggatgtagatttttatttttcatattttaaatgtaattagtagtttgaaattaattattatttttaattaagtttagatattagtagattttgaatttgaaaaagatgatatctacatttttttttcttaattggttatcttattttttttaaaaaaaaaaaaaattgcttattttatcttattttaaatttaaggtcggatgttttatattttttttttattatttaaataattttataaaatgaccttatttgaaatttaaaatatgatatgttttaattaaataacctagataatttttaaaaattaactagaaatttaatcaattttttttatttaaattaaattnnnnnattagataaatgatatttatttatcattttattttataagatatttaattttattttctttt

SEQ ID NO: 174997 - DNA, 596 bp, Cannabis sativa
cattgtcgataattggatacatgattttttaaaattgttggtacactctcttatattttattttcggtacactttcgagatttaggtgaatttgttaatgtatgtagtggtttttttttaggattatccataaattttttaaaataatttaagatatcaaaaataaactccacccatatataaaaaatattagtgcaataaaatatttaaattttattttcaacacaataaattatttgagtatcttcattattaatagtgattcaattatggtaattggttagattaataagtttcacattaattttaatttttagtctattttattaaaaatctattcttgcagggccattctgcgaacagcgaatggtgttgcccacacactagcaatctctattactagtttaagagattgtccataattttttaatttttttgtaacgacaaatttatcttagtgaaatttatctttctttaaaaaaaaaatatttaggatcataaaaaaaatatgaactaataagttcataatttttatttatttatttattttcatgtgatgagcagtactatacttctatgggttttttttttttttt

SEQ ID NO: 174998 - DNA, 529 bp, Cannabis sativa
tgaataatacgtacgtgtaattgatttttgtttttagaaaaaaatagaaatagaatgaagaagaagcaatagattgaataatacgtacgtgtaattgaattttttttaaaaaaaaattaaaacaatatataggaaatagattgaataaaggtaccggtaatcgatttttttaaaaaaaaaattaaaacaatatatataaatttagggttatatgtattttaaaaattggagaacatttaaatttaaagttaaatatttaagttttttttttaaaaaaaatatatataaagaaaataaaaaatttgttatttatacttaataaaaaaataaaaatgtgagagaattaaggaaataagagaaaaatagctttagatgtacaacaataaataaataattaaagaaaattcaatggtagatgtacaatagtaaaagcccaatcatatttttttttgaatttaatgaatttattttattatatataaataaaaagttacccatgaatttctcctaaaccattttatttttaata

SEQ ID NO: 174999 - DNA, 719 bp, Cannabis sativa
acataaaaactccatcatgatggaagcttcattgaccaatactctaatgcaggcattgcccttataacacctaaggggcagcaactacacaaactaatcaaattttgcttcaaatcctcaaacaatgaggttgaatacaaagccttaatagtcagcttcaatctagcccatgaagtacaagctgaacacccatacatattcagtgactctcaataagtcgtgaatcaagtcctaggtgaacacacagctcgaggtgaaaaaatagtggcctacttgagcaagatcaaagacttattaagctagatcaaaggatgtacaatcaagaagatccctagagaacagagtgctacagcaaacgcacttgcccatctagcaaatcgcaccattaccgacaaggcaaacatagtgcaattacagttcctaaaagaacccagaattacaatccctgaagaagtctaaatgttagatgatagtaaaacattgattactcctattgcagcttaccttcaaacttgagccttgccagaaggcaagaatgaaggaaaaaagataaggagaaaggctgctaggtttcgaatcctagatggagtaatgtacagacagcgcttctcaatgccgcctttaaagtgtgtcaagaaggctgatgtcgagcgattgatgatagaagtgcatgaaggcttcttcgataaccatgttggggcgaagcctatccaaaaaga

SEQ ID NO: 175000 - DNA, 943 bp, Cannabis sativa
tttaatcatttaataataaatattatcctataaaatatttagttaaataattaatttattttaaattatttatataataaaatcatcaaaacaaatcctatttttcattattttcataatcaaattcgagtataataaatttgcatttaattttaaatgctcatgtttagttctttatgataatttcaattttcacctcgtagacaataatcttgatctattacatactttactaattatcttaataaactattctttaataagagcaaatgttatctctgatttaaattatattcaatcctatcttgatgtgtttgaatatattgaataaggttaataatgaataattattagataattatattttttcatttcagtttaaaattagaaaatgtaaactttatcattaatttctttttcaatctaatttaatcttcgaattactaagtaagcactaatttaagaaatttttacaccaaaaatctattttgcacattttattacatttttactcctacacgcctacatcaacttttttacttatcatctttgttttattacaaaaataccacttactcatcattcccatgcacagacatgtatgccatccccatcacacatcaataaaatcccactctcttccctctcttttttccttttctttcaatttcattttcgattttccttcagtttttttgttgtttggaagatcaataacctccattgataagcttaaccacccattattcatcacatttttttcctctcgttttttgttcatccaaaaaatttcaactcccactcaacccacgatttcccaattttttttcatctcagtttcatcttgtttcaaatttatttataaaatggccatcactcgttcatcatcatcaccttctccagttcaaaaacaaaaataaaaaatgggcaagaaaactttggc

SEQ ID NO: 175001 - DNA, 569 bp, Cannabis sativa
aagtatttgtgctttgctaaaatagccttctcattatatttgaattgtgtaatagtgtgcttacaaaatgtttttgccaaatggtccactttcttagggtaaatactattttagaccttgtattttgtaaaagttatcaattagaccttttattttgttaaatgacaaaatgaaccatgtattttccaaaatagtacaaaaaggatcctgaactgatttttttatcaaaataaaacttaataataattcgatctaaaaatattatggtaaaaccgattacattttctatatctgttcattttataaattgtcttcaagttggttgtattaaaaaataaaattgttaaaaattgagttcatgatcctatttttactattttagaaaatataaggttcattttgtcattttgtcattttgtaagacagtatggctagttttaattttgtaaggtcaatatgactaattttagttttgtaaggccaacatggatagtttttgttttgtaaagttattatatggctaattttattttgtaaggtcagtttggtctaataataacacatcaaat

SEQ ID NO: 175002 - DNA, 507 bp, Cannabis sativa
ctcctccatcttagactcggtgtcggaactcttagcccctattcaacatcaggcgcctctgcctgaccgacctctagatctacatcatcatggggttgtgtggcctcctataaagctctaactctgcccattgttgccaccctagcaacatgagggtcatatggtggcaccctacgatacgattgttttgttctatcaatccaaaatcactcaaagggagcaaggggacagacgaaatgctatctgtcgaaggcaaagttgatgggacatatgacacagcgattgtcacctcctcagatcaacactcaaaatcacttgcatggaagagacaagaggagttgagcaacctgataaagctacagacaaagttctggtcgactatacccaagggtactttccaggtaaatcacattgtacaaggctgtgtatcaatgaagtattgtctcaagtacatctacttagataaatagtgagtcttaagttgtgcacttgactataatggactca

SEQ ID NO: 175003 - DNA, 643 bp, Cannabis sativa
ctcgatacttgatcataaaatagccctgatgataatgttcttgcttataatacaatatatacttttatagagtctaagaaaaaaataaaaatagtatacttaacatttgttaatataatagaactcaacaaatatactcaaataaaactaagaatatcaaattaggcaaaatactctaaattgtatataaaatttaaacgaatcttcaaaaaagaattaagattaaaataaaaattacgataaataatttaatttttatatgttaaaatttaaactattgtatattactgcaagaaaaatgcataaatatttcatctaatttttatttaaaaaaattaaaattacaaaatattaatttaaaaatatcattacattcatcacttataaatgtttttttaaaataagaaaaagaagaaaaagaaaaacacatataattaatgaactttgaatatacactgaactctacaaatatttcaaaaaaaaaaaaaacacaataatttaactttcatatgtaaaagtttaaactatatgtacaaaatactataagaaaaatacttaaattagttcattaaattattaatttttaaaaaatagaaagaatcaaaattataaaataatgattcaaaaatattaatactattca

SEQ ID NO: 175004 - DNA, 676 bp, Cannabis sativa
tctttctatattttccataaaaaaaataaaagcctaaaatctgctaaagtttttctttcccattcttattcatctatttttttttcttttttttatcttaatctcacaaagtcacaactcacacaactcacaaaaataaatcaaaataatatcccctttatcttcttcaaaaattttgggtactctctccagattcaatcatgataagtatttttctctcaattttcatcctctttcttcatacatttcttcactcatttttctcttaatgtcaaactcatctctcactcattttttttttaattattattacagaacttaaactagagcagattcaagagaaaaaattgagttttgcagaaattttctctattttctctctacatttttaatgtatttgatttgtgtggttgtgggagaatcatttaatatgtactattgttatttattttatttgtgatgtattatgttgtgttttagactttagacttttaatcatatattctaatttgtatgtttacacttataaatatgcttatgtaatatattagattatattttaaaaaagaaaacagattcagtttttggcggtttgaaccgaccaaaccgcggtttagattggtcggttctaaataggtttctagattggtcagtcagttttcggattgcaccaatc

SEQ ID NO: 175005 - DNA, 514 bp, Cannabis sativa
  modified_base (289)..(298): a, c, t, g, unknown or other
taaatttttgaccaaagcctccaattaacttggatttcatatataatcataataataataaaaaaaaaaacaaacaacatatgtaaaatttactacatttcgtggtatgtataagaaagtaagttttgtttgtatttcagttgtcaatcttagtttattgtacaattatagggctaattagaatttttgcatctcgaaatttgacatgataaatcatgcccttgaacttttaaagttgttaaaaacctcactgaactatttgatattgttagatttaaggaattttgtnnnnnnnnnnagaaaagtctaacatagatgaaagtttttatttagtagatatcaaagtctgtggaacataatttagtacatggacaatcaacgaattaataaaattgaatgaaattaaacaaaagttcttaaatctaataatctcaatatttcaagatgaatttagtgattaaaaaaattcaaaggacataatttagtacatgtcatagttttttttttttttttt

SEQ ID NO: 175006 - DNA, 711 bp, Cannabis sativa
tatgtgatgagagtgtcacttttgctctagaggaatttcttatcttatatttgatgtacagcatacattatagttatatatatatatttgatatttagtaagtttttgaaaaattctgagtattttaaaagtcacgaaaatatgatttaaatagatagtcacacacatacatgttttattcaataggcgcaactcataaattatcatagttagctgattttattatcatagagtttttggctctatattaattgttatctattttgttgagccattttttcatttgatgaagatgaatttattttttaaaaaaatatgtctgcaattgaatattttgaaattttttttttttttattataaattatttataagttctcaaaaatttacataataattattataattatagtgtaatatatcaatttaaaatttacataataattattaatttttataattattttttatttaagtactaaaaataaaaaatatcttcgaggtaaaatcaaaagtgatgcccccacgtaaaaaatctcaatatataagactaattatgatttttgtcccctgaacattaacatgtatttaatcatattccctgaacttttaattaaggtcgttaaaaattttctctgaactattgagattgttgaatttaaagttttttttttctaattttaataaagaaattataacatagataaaagttc

SEQ ID NO: 175007 - DNA, 557 bp, Cannabis sativa
tggttctacaattaatgtcctagacgagcagtggtagcctgatcaaaatcagccctttgtggcttcgtgtcatcctgccctccaacaagctaaggtgtgtaacttgatgagcattgacagatgttcctgggatagtgaaattttagatgatctgtttgaagatagggataataggttgattatgcagatccccctgtgttcaaactagtcaagtgatgtattgaactggtttaaagaactggtgtgtactctgtgaaaagtgcctaccagttaattcaatcgttgaaaggtttgtgcaatgaggtggaagcgtctgagttttagaagacattgtggtctttgaaactgccaccaaaggtaaagaatttgatgtggaaggctttaaccaactgcctaccaactttagctcagcttgctactaagtgagttgttgttaatcctcgctgccctttgtgtgatgagtttcttgagtctataaaacacagtttgatcacttgcagagtgattcaggaagtatgggaaagagtcggcattggtacaatggtggctactgctag

SEQ ID NO: 175008 - DNA, 533 bp, Cannabis sativa
  modified_base (470)..(474): a, c, t, g, unknown or other
tagctactgttctaggacagatcgactacaatgatgattggatagtcgactctgtctgctcatatcatatgacgggagacaaagagaagctgaaagacaagattgagtacaaaggagtggcgttaggggtgtatgtcggtcggtttggtcggggtataacatatttttattaatccaatataaatattgggttgcaaatatttaatcgtaacccgcctaattaaaatttagaaaaagttcaacccgcccaatgattttgtcggtttggtcgggttaacccgtccaaaccattcttcactttttttataattattattattagtttctagtatttaaataattagatttaaaaaaataaaaaatatgttatttatatttcaagctaaaaaatactataatttaaatgaattttaagaaaatataattgagtaaacataaaataattgaataaaataataaaaaaatgtgannnnntggtatagattttaaactttaacttcaatatccaaatacactaaaaattattaactata

SEQ ID NO: 175009 - DNA, 523 bp, Cannabis sativa
  modified_base (292)..(300): a, c, t, g, unknown or other
tccaacttattatgctacacgaggcaaagaatttgcaaagagtgttcatttatctctatttctgttaaggattttaattctatctttgttttttttcattaagaatgggacagagaattctctattgtaaaataaagtttattttaaaaatttaaatgtttaaatttttaaattatatcaaaattaaaatattacacattatttattattcaatctactaactattatacaaaaacacaacttcaaaattgtaaaaataacactaatatattaaaaaaatacaaacacatannnnnnnnnataaaatattaataaaaaaataattaataaattaaacgggagtgtcatccccgttgcctctctgttcttcacttaaacagagaatccccgcttcattaggagcgggtccctacgaggttcatccctataagaaaaatatgcatccctaactccaacttattacgctttgattcaattttttttcttttaaaaaaaaatccagcattcaaaagatatcaaaact

SEQ ID NO: 175010 - DNA, 520 bp, Cannabis sativa
ccaagtaaaagggtctccagtaaaaggcaattcactgagattacacatatccaaaacagttctgaaatcttctatctgagattcacaatgcctgttacctccctttttattgtggtaatatagaatctcattaaaatccccaatgacaacccaaggaagcaaaggagcaacatctttcaatcttttgagaagagtccaagtgtgtacacgatgagcaacattaggggcaccatagaaagcagtaaagtgagaactaggaccattgtggaaagccaaataacaatcaaaaacatttgcattgaaactattcaaagttacatcaacatcatccttccataacaacattaaaccaccacctaagccaactctagggacttctagaccattactaaaatgtaaaagactacaaaagcgagaaattgaattacaaggtaatttagtttccataataaaaagtacagtgggggtttgctctttaacaagcaaacgaagtttccggacagcactcgggttccccaaa

SEQ ID NO: 175011 - DNA, 680 bp, Cannabis sativa
ctaaccacaaagattggtcttccaaacttctcaatgatctctgggcataccgcactgcatacaaaactcaactaggcatgtctccttaaagaatagtctatggcaaggtctcccatttgcatgttgaactggaacataaagcatactgagttgtaaaaagcttaaattctgatctcaatgtggcatgccttattgtaagcttcaattgtcagaaattgaggagttaaggaatgatgattatgacaattctaggatctacaaggctaaattgaaagcggctaatgaaaagcaaatcctaaggaaagaatttgagccaaatcagcgagtgcatctttatgacactcgccttcatctacaccctgggaagctgagatcccgatggactaggccatataatgtgaaaattgtcttcccccatggtgttgttgaggtcgaaggcccaaccgatgggaggaaattcaaagtgtttggccaaagattgaaacactacatagagagggtgccctagcatgtcgaggatatcctcgtggccccgatttaccaaccctcagtagtgtttccctgattttgtatataggtttgttttttttttttttttctttttttcttttttttttgttatactcggtattcgattcaaggatgctggtttttgaatcaaaagaaagccgtgggagtga

SEQ ID NO: 175012 - DNA, 675 bp, Cannabis sativa
ttgagtgctcaatctacgaggttgaataaacctagtgcaaaatttctatattctattgtcgtgtcttctgagcagtggataaaactgaatataagtatattggaggttaaatgtgatgctataatctttttcttttgattttattatagttttttttgtcaaataattcgggaatcaagtagctgatgaactgactcgtttttctaattttaattctggtcatgtttccaacgtaaaatatgtcccgattatattgtatttattattttagcggattgttattaataaaattgcataattccttatagaaaaaaaaatattgaattatataccatgatttataagaagatagcaatattaaagggtagcaataatatctatcattaatttgagtcatataattgaataccaacttccacattttttttattttttttcttttcttttataaaaactttcccgaaatttaatttaattatttttataaaaaaaattactaattatttgcaaagcgtgctaaaaatgttggatacatgttaatgaaagtttgatcaacataatcttgctatttaaaaaaaggaaaaaaaatgtttatatttggagactaatatcttattatatagaaatacaaaaaacaacaatgaagacttaattgatattgttcttaaaggacta

SEQ ID NO: 175013 - DNA, 565 bp, Cannabis sativa
tggtacaccaacttttaccgccactgatatttcactgcttataggtgaggtttcataactctaaactttaactacagtgatattatatgtcgttggacttgattttgaatgtagaatgcaatgatgataattatttaaccatttgatggtataggtgaaagtaatatataagattggactaaataattggagctcgggacttgagagcttaagatcgtcttttcgacaaagtttaacgacttgggagaggtagggactcaacctgattattggacttgatttttatatgtgttgtataacattagacatattctaatttttatgatttgtaaattgtttgaaaaattgacaactgaatctgcatatttttttggattgttctggggcactgagtgccaaatatatttttgaataaatatttatgcaggttatgatttttgggtttattcaaaataaaattgttatgttgccaaattttttagaaaataaaaagaaatatgttcttttgttattcttattaatttcctgctttggttatactgatgagagtcatattgatcatgtt

SEQ ID NO: 175014 - DNA, 606 bp, Cannabis sativa
ttttaatgccacttgtaattaaggatctgtttggaaggagggagccatgggtggatggagagggaaggagggagaggggtggtgggagatggaaaatccatttgtttggcatagaggattgtgggagggagaggagaggtggaatgatttacaatccatttgggcccaccattttaaatccttcctcaaatggaaggatttatactcttttttctaatttattttaaattacaaatacactatcataaaaaaattataaaataaataaataaataaataataaaataattttataagtatatagtaatatatccctccacctctccatccttctttccaaacaacttgaaaggataactaccatactctccctcccttatattttgtatcctccctcaactctccatcctttatcctctccatccatcttaccaaacatagtgtaaaagtcataaaaggccacttaggggtattttgggaaattttaaaatccgaaatattcccgatattctaatatctaactttattgtcccgctatactaaaatactaggatgtgattctaatagccaatcactgtgttccaatgttgccgggcaccgaacatg

SEQ ID NO: 175015 - DNA, 515 bp, Cannabis sativa
tgggtggaataagaagaggaagaatgaattttatggaaggatcactaaggctaaaaaggttattaatgaacttacattgattcaacaacctgggatttgggcagagttaaagcaagcggagaagcatttgaatgtgttgttggaaaaggatgagcaatattggagacaacggagccgagctatgtggttaaaatggggggataaaaatacaaagtactttcatcataaagcttcggcaaggcgaaagaaaaatgacattagaggactgatggattcaatggggatgtggcaaacggatgcagttatagttcagcgacttattgaagaatactttgatcatatttttatggctacggaggtgaattcaagggtggttcatgaggttctagcagctgtgacaccgaaagtgtctaatgacacgaatgcttttcttttggagccgtttacggaggatgatgtggttcgggcggtcaaagatatgaatcctacgaaagcacctggggaggatgggttac

SEQ ID NO: 175016 - DNA, 501 bp, Cannabis sativa
ggtgggtaaccaagggtatattttaccgcaccgagactctatgttcgagcggtttgtgaagctgcaacctccgacttttctaggaggtattgacataattaaggtcgagtagtggatgagcacaatcacctgtatcctcgataatatgggggtgacgggaactgaaagagtgaactgtgcagcctttatgttacaagatcatgcccgcgtctggtgggatattgtgggccaaacccaggatgtcagtgtaatgacctgggaggaatttaagaatctttttgaaaaaaagttttacaatattgttgtgagaacttcacacatggaggactttgtgaagcttactcaggggaaaatatcggtggccgaatacacgatggagtttgatcggctatataagtttacttgtgatctggtgcccacagatttcaccaggaaacaaaaatatctgagaggactgaatgccacaatcagtcgggacttgaagattaccacttcacatga

SEQ ID NO: 175017 - DNA, 651 bp, Cannabis sativa
cattaacaaccatgaagtgtccataaactctgttcttaaggtaggtgattgcatttagacaatctgacttcaacacaatagtatgataactaaaccgcaacaccatagatatcgccttcaactcagccagtaacggagaatgatcaatgaaatgctttaatagaacaagctgatgatgccattgccaagactgtcatctttggactgtgtaagaactagtttgtaccatgaaactatcagcacaatgattcaccaaatacttagcctagtaatcaaccactcagttagtcatcatctcttatgcataaggctttttctcctataccacatcctcccacatagtgatgtaaatatggactagactttttgacacggcacgaaactggcatgagcctgagaggcaggaacacgactcaacacgaaaaagtatctgcttaggcatgacttgaaaaatatggactgaaacacgacatgacacgaaaaaaatataaatttaaacacgacacacgacacgaaaaacatgggcttaagcatgatacgacatgaacaaatataagtttaagcacgacacgacacgaaaaaatataagcttaggcacgacaagcacgacacaacccatatttttttttgggctttttcatttttacactt

SEQ ID NO: 175018 - DNA, 708 bp, Cannabis sativa
gttgaggatgttacctgcccttttatggggtggaagaggaatctctggagcacttatttcttaaatgcgatctagctttccgtttatggaagtcttcgctgtggggtatctttccagtggtcaatttaggaatacgtatgtgggactaggtcaaatttatttggagtctcaataacaggggcatcaatgttgaaaaggtctttatctatgcttctgttgttgttgacactatatggcgagcctgaaataaaaaggtgcataatcataagatggttgacttgaatcagtgctttgactctattcaatgttcttatgctgacatactctataatctccactccttatcctatccgggtggaggattggcctcctcctccttattggataaaattgaaatatgatgtcagtgggatcaaaacgcttgtgtatagcagttgttgctagaaactacttgggtgaggtcatctgggtgagcacggtgggctcggatttttcggatgccctttgtggagaggcgacagcttgttgcttggcgattgatttggcaaagctcaaaggttacaagttcatcattgtggagagcgattttatgattgtaatcaattttctaaaccgcaaggagatgttctgggagattgaaaactattcctctttttgccttaagctttccactaattttgttggatgtatgttttttttttttttttt

SEQ ID NO: 175019 - DNA, 535 bp, Cannabis sativa
ataattttttttatataattatatttaaaaaatgtatattttttaatatgtgattcaataatatattactacgtatttttcaattgatacttaacgagtttagttaacatttaagggtacggtcattgacggtaacaaaaaagaaaaatgagataattttacatttttaacaactacaaatgttaacgaattttcaccgtaaatatcattatatattatagagaaaattgcaccatatacccttttttgttaacccatttcattttcacctttcttttctatataattaatttatgtgaaattttatttacacctcaaaaatttataaagacaccccattttaataatttttaaattttttcttccgattcatatttttagaagatatacctatcaaacaaaattaaattatattttaaatatttcggcaaaaaaaaaaatttaaaaaaaaattatatgaaattttcttagaaaaaaaaatatatacatgagttagaaaaaattataaaaatgaaatcaaaataagtattgaaat

SEQ ID NO: 175020 - DNA, 522 bp, Cannabis sativa
agagagagagagagaggaaaaaatgtttttgtctaattttcttatttttaataaaatgaaatgaaaattggttttatttaattaataccagccataaaagattaaattaaaaatcaaataaacttttaccaaaagacaaaaatctcattaggcaaaaagaccataatgcccttgcccacactaaaagtcataaaaatcacttagggatattttggtcaattctaaaatctcgactattcccgacattcccaaggtctaactatatttccccgctatactagaaatactaagatgtgattctaataaccaaacaccacgttctaatgttgttgggcacaaaacatgcaaaaatatgaaattccatatatgacatataaaatacattctgaattcaaataaatctctgtaaaataataactcataactaacatgcaagtttcataattaaatcctatttatctgctaatttctaaattaaagttaagcggtctttacatgtacattggcggaggccgcctgtag

SEQ ID NO: 175021 - DNA, 539 bp, Cannabis sativa
ttgctgcctgcgtctttacacgagagaaacggccaacatttggccttgggttgctgtgtctttgcaggagagaaacgacgaacatttggccttggtcacttcgcacgagagaaagaaacgaccaacagagagggagagagagcggctgtagattagagttttctttttaagtcaagagagagacaaagacatatatatatatatattgtattaattttaaatttttatgtcagattttttttgtactttatatttaatataataaaaaaattaatatttacttattattttaaataaaaaaaaattaatatagtaattgattaatttttttatttacttattaatttatttattataaatagttgtataattattttttttaatgaaagtatttagctattttttttaataaattaaaaaaaaaattaatacatgatatagtgacacaccaagtgtgttggggtatgtttatccaatcacgtttggcgtgtcactgtaagccaatatttttttttttaaaaaaaataatataaattatg

SEQ ID NO: 175022 - DNA, 507 bp, Cannabis sativa
  modified_base (77)..(81): a, c, t, g, unknown or other
  modified_base (393)..(403): a, c, t, g, unknown or other
tcatcaaatcttcaatataattctcatcttcaagttttttgtagccttcaacatattcttttttttttatttaagcnnnnntatattacaattatgttttacttgagattcgaatccaggacctccaacacacacacacccacctatagccacttgagctagcctcaagtggttaaaaatttacgggtgcaacacctgctatccttcaacatattcaatcttaagttttatatttttcaaagataaaaaagaatcgaagagggagaaaaaaaatttaagcaatccataaacaattatattatattttctataacaacattatatataatttatgtagtgtaagttatgaaaatgaagagatattatcattaatttttaataataataataatnnnnnnnnnnntaataataataataatgaatattatatgtagaagttataaaaataaaaagtcacacttgagaatttaatatatgtgtatttttctaagaaaataataaaaaatt

SEQ ID NO: 175023 - DNA, 608 bp, Cannabis sativa
agctaagatttccttggagctagaaactcctagggctaaaaagatgcctcaaactagaagagagaagaagccttgactaaacttaagagtgaccaaacccaatcgaagaagctggtggagctccaagcaaaatctaggctagagtcagctacaaacaaggttgtatcagcttacaaggattaaatcggctagagaaacatgaagatgattataaagttaattacaaccaagccaagacttgtgctaatgtattggaggcccatgtggaatgctactcctgaggtggaaagtttgaaggagggcatcactgagaaaactcttaaatccacaacctagaacaagaggtaaagttgctgagtggctttcagaatttgttgttcaagcgcaacaagatatctcttccaagcttactaacgtggaagctgaactgaaagtagctgcgaagctggaaggcgagaaaaaaggttaagcaaagagaacttaggaagaaagtgttgggctttgtgccctaaataaaattctatttcaatgtaatctttatctttcaattatcaataaagagacagaagtattttcatcacttatttagtgtgtcatttcgttcatgt

SEQ ID NO: 175024 - DNA, 577 bp, Cannabis sativa
caagaatttcaacaaattttactcatcctcccgctgctcctaccaacgctcacttacttatgtgcaaaaaaagggaactaaataatccaccctttaaataagcgaggctttctcgatagaaatagctgcatgcgagagagatcccaatttcgtgtattcagtgtttcaattgtaaaaactacctatttaacacaatgttgatactatagccctagggagtggtgaaccgtaggagtagtcattcaacatcctatatttaaaacgacggtggctccataccttgatatggattgtgaggggcctcaataccccttaatgatccccaggggaggtgaattaagggtgagaggaagccctcgtagtcaaagtgttccctcatttgaaccggagtaatgatcttcaccgtcaaaggcttcaacatgttagcaatcaaaagtttatagagcacattacataagctaataggccgaaagtgattgtaagttttactattttgggaatgagaacaagtaaagtcatactatctaaaagtctagcatatatttgttgatatctcagtgcaactctatgtacactt

SEQ ID NO: 175025 - DNA, 752 bp, Cannabis sativa
cacccaatgcccaggttgacattccgaactaaggttttagtttctgggatcgtcttggtacaaatggatcaaactttgcattgtgacatcaactagacataacaaggacatatttgaggcatcgaaatcaaattcgaagccaattcatttttgagcacctggagcactcgttgcccgagcacccagtgcccaagttgacaatttatcaatctgggtgccttccaagtatcagattaacaatctgaattttgcatcatctttgtgttcatcacgaatagggaaattggtactttcggggaagaaacaacactttttgggtgtcagaagcaaggcctggcgctcaagttgacacctggggttggcccaacgcccattttgtcaacctgggccaattttgatgaagtttttcgagaactcttccaaccatcttctccgtttttaaaaaatattaagattccactatttttggggactaaatggattcgaagggccataactgggacccaacgcccaggttgacacatggcactaggcccagctcctaggttgacatattgtcaacctaggctgtttccaatcaagttctcaaaaaagtgttctgggattttttttgtcatcagaaataatgaagattcaagcaaactcggcgagaaaaccacaatcccaagaccctggaaatagggcctagcacctaggttaacaatcaacctgggcgctggtttcaatcactcaaatgccaaatttgattcaac

SEQ ID NO: 175026 - DNA, 567 bp, Cannabis sativa
tgcatttcaatcaatcaattgtctagacatctagatcaagtgtagtgtatttgactaaacccaagttactggaactataagtctgtggtaaactactgctttctccaccattacttttttagtgttaataaaatattatgcaacatcattttttatatgcattactcatctagggatattgaattccttactgtttattagtgcatttgaataaacagaagacatatctctaattctatccaaatagaatagaggtaacacagttaagaactatcctcagtttaataactttctagtacttttcgaaagtaacttagttatgtaacttcactgatggagcttaaattataatagatgggtttttacatccttctagaataatttctccacccccagagtaaccaccatctctaataggttatgagttagtgtagatataaggattctaatgtacacccctatcatctaatatataggtcactttcagaaattcttccttgactttctcctaatgtttcttgtttgattacatcttagatggctcccactcaatagtaggagtctggt

SEQ ID NO: 175027 - DNA, 676 bp, Cannabis sativa
tttttaataacacaaaaatatatataactgttatactattaatgtatttcatttatagttaggggcaagaggtagctattatgtgacagggaccctagtccctcctctatgtctaaaagtttaattagaatttttacttccgaaatttaacatgtatcaaattatgtttattgaacttttaaggtcgttaaaaatactcctgaactattgagattgttggatttaaggacttttatctaattttaataaaaaaaatctaacatgaatgaatattcagggggcatgatttagtatatgtcaaagttcgaagggcatgatttagtacataaacaataactgaaatagtaaaattgaatgaaattaaacaaaagtctttaaatctaacaatctcaatagttcaggatgaatttttaacggtcaaaaaaattcaaagaacataatttagtacatattaaaatttaaaaagtaaaaatcctaattagcctttctaaaaactctaatgttatttataactttagtaattcgtaataatatatataaagttctataatataatacccttattaaattaattcacatttatcatcgtagacatgataaaaatataatatttttgacattggtgggagtgtctaacttatcatatatcctttctctctatatatatatacattta

SEQ ID NO: 175028 - DNA, 625 bp, Cannabis sativa
  modified_base (559)..(568): a, c, t, g, unknown or other
tgtatattttgagttaaatttaatccataatataccacaaaactatatttgatccaatttttatatttgtactctaatgtaaaaagtgcaaattagttataaaatcaataatatcattaatattcattaaaaatatacaaacaattaactttatttacattattttaataacttataaatacaaaatattttttattaatgaatagtattaatgagtggcaaataggtaattaaaaaatgtgacatttattgtgggttaaaacttagcacatgttatattttgtgctaaatttggcacaatttttaacttaactaaatttaacacacattttacatcaccattagagttgatatttaacaaaatattttaaaaaatggcaatacatcatatttatagctttccattgctcttaaccaagttcaaattttgatggtaaaaccctctaaattactaaattgttagcaaatttaaggtgtcatctattattaaagttaactgctaatatgaactgcttatctatacactcttgtacgtgtgacacgtttatattggtacacnnnnnnnnnntatttaaaaattataaaaaatttataatattttttatttttcaaatattttattttt

SEQ ID NO: 175029 - DNA, 584 bp, Cannabis sativa
catgccgcgtatctcttcatggggttttcagggcgtccaggagctcatccattggcttcgctgcttaactgccaaaaaagcagttgttattaaaaacatagtgtgtcaatacagcttgcctcgtaagatagtctcagacaatggaaagcagtttgactgcaaagaattcaccaacttctacaaccagcacggagtcattaaaagtttctctgcagtggcaaggccacaaacaaatgaacaagcagaaaccgtcaataaaatcctaaaggtcaccctaaagaagaagttgttggcatgcaagaacaactggcttgaagaattaccaaaagtgttatgggcataccagaccactccaagaaccacaacaaggcactcgccattctcaatggcgtacggttgtgaggctatggtcccggtggaaaccttgttcccatcccacaggagaacgacatacgattcggtaacaaacaaggctttattacaagtagcagtggatcaaattgacgagctccgggatgagtctcaagtacggatgacagcctatcaaaagaaggtagctaaacacttcctgttgggttttatgc

SEQ ID NO: 175030 - DNA, 630 bp, Cannabis sativa
ccactccaactgcccctattgctcacaatgcttagtttttactttaacattacttttgccaaactttcttaagcggtacaagggtactcgtagtttgtacttagacaaatttacgtttattttccttttgaacaaatttagatcccttcagggatacttacttatgttatatttttgcagtacacgggtactcgcgtttgtctgtttatttatcatctcgattgcggtttaattacagctcggtgtaataaatactaaggtagaaaaatttcaaaacttcgaaaaaaatcataactctttatgagaaatagattaatcaataatacagagtgagtgggttatatacccccaatacttagaatatttatgtagataaattataaattcactaagtataaaaacacagcaagtacaaatgatacaatgcgagtactattgataataaaattttaagctttcgccattccaggctcttcgaattacagttccatcaagttctgcaagttggtatgttgtgttaccaattttctctgcgatgagatatggtccttcccatttatctccaaagaccccatgcgttgggttcttggtatttggcattacccttctaaggaccaagtcccctgctcg

SEQ ID NO: 175031 - DNA, 633 bp, Cannabis sativa
tttcagaaggaaagaactataagtactttttaaagtctggcaacaaaaaatattttgatacataaacctgatgtttagaaacactgtttagaaacactgggacaaccaggataagaaaaaccaacttggaggacaaaatattataagcattaaaatgacatcattaacataagagaaatttgcggcaaaatcttcaaaaagttcaatttgatacagataagtctccaatctcgaaaaatagcggtaatagtcatcaacgtcatattttttttatttgtccgttagtcctaatttttaactgagccgtttattttttcaaaattgccacgtgtcgaaatattattagtctaaattattattttaattttaaacaataaaaataaataaataaataaataatttaaaatattttttttctttttctttttatttattctttctttttcttttcctttcttttcttctttgtcgtcttcttcttcttctcactgtcagaccctagcttctcaccaacgtaaccaccctgcaagcttgggaaatttgagatatggtggatcaatgattcaccaccctgcaagttcaaccatatataatcaaacaagattcaaccatggaaattccccccatagaata

SEQ ID NO: 175032 - DNA, 632 bp, Cannabis sativa
taccctgaattcttgttcattcctcggattgatccaacattcgtttcgtacttaataataataataagcaaattatgtcataaaacctcaaccacattctcagggatttaacacctccaccgccgttgaatttaggaagtttatttttcttatttaatattgttagccgttcaattacatttttccatcaatttagtcccacatttattgcattaatattaagaatttgaataaattaagagttaatatttctacttaaatcaactccagatttctctatagaagtatttttgtgatgctttagcctcaaattcatatgataggaggttcactaatttatgtatattattataaatctataatctaacataatgattctaaaaccataaataaatgtgtaaaagtactttaacccatgttcatttcttttggggagtaaaaacaagtatttattgtcaactttaattcgttattctcgttctttctattctctttcattgtctaattaaaatcaaagttaatttagggtgaaattgaaattgtttacaattgcttttattatttattgtcaactttaatttgttattctcgttctttctattctctttcattgtctaatatcattcgaaatt

SEQ ID NO: 175033 - DNA, 1006 bp, Cannabis sativa
ccgcggtataaatttccatctttacttgcattgcataattatttgattgaagtaaaaatattatgtatcattcgtataaataacgatccacacttcattaattgtagttattaagagaaaaatgaaaatagttgagactcgatccacatggaccaaccataacgtgtaccaaaaaatataaataacagaaaaacatgatcgatatcagtacggatatataccggcccacctttttccatgtggcatgtgtactaccttataagtacatttttattcttatctatcattattattattatttgtcaggattctaatttttattattttgaaaatgacccttacttattgtgattaaaaatacttatttaggtttatatatggttatatgatttgttttgtaagataaaactagtaccattaggtaaacattagtgatcatagccggagacatatttaagtaagaaagaaaggacaatgtcgatgaacattaaaaaaaaatgatagaaactttggaattttatgtttttaaatagttagtatactttcttaaatgtatatgattaaacagttgggtcaaaaacatggtgttatattatgttgtaatagtattagtacatatagtgtaagtaatgcatgttaacagtacttgtatatgactggccaattgaccaactcaacttataattattatgagtcttttttaatttattttctattctttcactgatatttgctttgagttaaaaaggagcaatcttttttctctctttctcattgactgtactgtccatttatacggaaagctgcacaaataaagtaaaacaaattagttaactccctcttcctagctacctacctacctccctctaatttcattcattcatttatttatttagaatattattatgttattcataaaaatataatattttagggtaaataccattttgaaccctgtgttttgcaaaagttacagattggatcctgtgttttgttaaatgacaaa

SEQ ID NO: 175034 - DNA, 604 bp, Cannabis sativa
ttggacctagccctaaaacgcgagacccaaactcgggcttgggacaaagaccagagactcgtggccagatccaaacatggacctgggacccaaaccggacccgagacccagactaaaacccaaaattgggacttggatttggatccagacctaaacacgaacccagactcaacccgtagttggtgttggggtcgagtttataaaaaatatattataattttacacattctattaatacaagtcattatcaaatatagtattgtattaaataatactaatacaaaattaaaatagatataaaattataagtttaaacataaaattaaaattctttaaaaaaaagtcgggtcagatcagatccaattcgagtatatgatctagcggggtggggcagatccttacatgatctagatcaagttagatcataggcagataagatttgacccgatccatttacacttctagcctgaatggggcccccgcgccctcaccatctcgacccaatagggtcctcgcgctgtcaccatctcgagtcaatggggtcttcgtgttggattttgtgccctaaataaaacacattgcaatctgattagttatcaattta

SEQ ID NO: 175035 - DNA, 540 bp, Cannabis sativa
  modified_base (438)..(448): a, c, t, g, unknown or other
cactccaaagtccaaaacaatcgggagacgaaaatagaaatagaattttttttttttacaaactaaaatttgaaaaaatttaatgctgaatttttttgaattttttatttataaaaatataaataataaattatcttttttagttattattttatagtttatttatgtttgatttttgattattttttactctttgctaagaaaaatataattttgtaattttataatttttaaaaatatttttataaataaaaaatttaggttataaaattgtaagaaaaatatataaaaaatatttttaaaaatttcccaaaataaaataggaatatggattatttcacaaatacaaataagtgattgatggattagcgccacatggaaaaatgtcatttaattcctcaaacacaaataaataaggtgacgtttggtaacactttnnnnnnnnnnnttctgtttttaaaagtaaaaaagtgaaaatatctttcaaaaacatgttctataaaactgtttttactttttaattttataattagaaatcaa

SEQ ID NO: 175036 - DNA, 966 bp, Cannabis sativa
tatgacttatatgttagagtttcagttggtgaaatgtatggaaagtcaaagttggatctctatttagatgaccaagtgttaccgaggactgataaattctttaatatatccaactattggaagataacaggatccaaatatcatgtgttgaacattactaccattacatatttgatgtgccagttagcactgttagttcagagtcatcattcagtattggtggtagacacgtgagtccacatcgagcgagacttcatcctactactttgaaagcattggtctgtactcaaagttggttggtaattgacaaaaaaggtataattatttatttcttattatataagtctatacattaattattaatattttattctattattttgataattttttttaccggcacacgaactaaactaatcaccgtaaatgatcaagataatgatgtaaattcaaatatgataattgttttcatttttaaatttattatttaagttatacatttattattaacatattttttcttttcactactacaaaattaagctttagaggcagtttttaaggccattcagcgtcggtttcggtaaaattcactaccaacgctgctctaggtgacgctaaaagggttaaaaatgactgacgctgtagggaccctacggcttcagttattatgaaataaccgactccgtagggatgcggttatttcataataactgcctcggtaggggtttcctataattttttttcaactataaaattttgtgttttaatatttttttttatttttattaaaaatctaattttatttttttcgtatatatatattatattattattaatataattaaattaaatataaattatatataataagcataaataaaaattcaattaaaaagtcttataaatacacatttacattaatctaagtgtttgtatattagctatctttttattaatatttta

SEQ ID NO: 175037 - DNA, 545 bp, Cannabis sativa
tgttctaaattagtgatacatttccttacgagtgaaaaaaaagaccctacatcattgatagcagtgttcataaaatatataatttaattcaatttacacaatttgatttaatttaatctataaagtacgatatatgcacttttgtatattagattgaattaaaaaaattaactcttagatatgaagagagataagacactttaaactttattcaaataactctccttaattcttttttttttttttttatgtagcatcaaaacaaaaaacgaactcaacctccatagtaaaagtagcagtcaaagtttgtttgttactcctccaggaaacagctctaccagcaagcataaacacgtaaccatatgttaatttacgtgaatcagtacaatcgacaaaatctcaatttgagtacccaactacttctagattataagttcgtttgaacattagtttgcaatccttagtaccctgaagatatctcattaccttctttgcagctttccaatggtctatccccaggttactctgaaatcttcctaacactc

SEQ ID NO: 175038 - DNA, 547 bp, Cannabis sativa
tagtggcctacgggggatactattcgaccagaatgtcagggtatgtacccaaagctcagctttcgggagccatgcccccagccactcctcaaatgagcggcataccattctccgctgcaccaggatataatcagagcctagccttggctcccgcatcatcacattttaggaatcccataagtaacccctcggggatgagtggtcaagctccgtctcactccgctcctattgcaagcatgacaggacctcctcagagctccctgagaaagaggtcctcaaagggcagcaaccggacggaagataaacgacaacaaaggggatacacccctcagtatactcaatacacagagctcatggacacacaggagcgggttattttgccacaaggcaaaatacacattaccggaagcctcttcccctgtatagggacaattcctgaagacttgatccgattggccacaataccaatgaatgcaaaaaattgaaggacgagattgaaaacttgattcgattgggtcatttatatgaatggattaagaactggcta

SEQ ID NO: 175039 - DNA, 671 bp, Cannabis sativa
aacttttggtcaaaaagcagtattatgtaaatttcccatatttttttagaccggattggatccatccaatatttttttagtccggattagatccatccaatatttttaagggatttttttaataatatacataatcaacaatttatttacaaaaatgacattatacaaataattagtaaataataacgttccatgtcagcaagaataccgtgtatacgtattcagttatatactattaataaaagcatgcatttgactcattgcacttaacattgaccttttttttttagaaaaaaaaccaatatttatttctctttttttgttttaaaaaaaaatttaattacgctactaattattttgtctcaaaaaaatactattgcaatctattttttaaaatgatcattttaatatgtgagaaacatatattttttgtcaataaaaaaaaataaaacaaaagcatcattttagtttctttaatatttagtaaatcaaagagtaatatttttttttacttaatattcaaagtgcaactaaatgacttacacaaaatttattataccaactaatttccaaaaattattagaaactgttgttatataaattaacaattaacccaacatctatttgtatataacatagaacacaataataagatataataattaggtatg

SEQ ID NO: 175040 - DNA, 632 bp, Cannabis sativa
tagttcaacaaatttacccttcattcaatcacctcttggtaatagttgtcgaaggacttcaagaaaaagttccaagcgacaagagataggcgaccccaggtgtcctcactcactaacataaagcaacagccaggcgagacacttaaggcctacttaagtcattttagcataactactgcaagggtgagaaatctggacgatagtactcagcttactgctcttgaggcaaggatcacgactaatctctccaccactgaaggcgagctatgggatgacctacagggtcaccgagtaaaaaaccttactaaattcaatgatagatctcaagtatttgttcgaaaagatgaagcaagaaaagagatgaagctattaaaaactggctcgggaaacaaacccaacactttctcaacaagtactgtctcgaccaaggctgatgatccaagagcctatagttcaaagatgaaagataaatctaaggagtcagccaaggacaagaaaaagcaaaagaagcatgacaagtacgtcccaatctagaccatttataccgagcttaatgaaactcgagaaaacatttatctcgcacatgagcacagggtcacatttcgtaaacttgagcccatgaggcatgcgag

SEQ ID NO: 175041 - DNA, 596 bp, Cannabis sativa
ggatcgaccctgagtatttaaacaattttggtagaatgttggggattgaccctagacttcaaaacccgttttatcaaaagctgatgcttctagaagattgataaaataaacaattgaactggggaagttcttttgagattgatgattgtaaatcacattactgatggaatattttaagttccaattgtgaataaaataattatttctttcaaacaagtgattgcaaagcgtaaaacctttaaaattacttgaggggcatatatgtatgattaaccggaattgatttggaaacacatagtacaatgcaaacccatagtttaaaaaaataataaaaattatgaaaactttttaaaagggcctcgaccaaacctttttggtggaagaggggtcaaactgttataacttcctgacaaaactttttcgacggaagaggggtcgaattgttatgacgccttgaccaaacctttctgacgacaaagggatcaaacaactataatttttgatttataacctatctgatgagataggaaaatcaaaagttacgactagcgcataaacctgaatactaacggctcgcgctaagggaaagtattaaa

SEQ ID NO: 175042 - DNA, 508 bp, Cannabis sativa
acatatgagatatattttaaatacatattgagttataagtacataaatataaaatgcggctatataacaaaactattggtttaacagtatttttcagttttttacattaactttaactgttaacagaatattttttattaattttataatattataatgtatatttaataataaaaattatgtagatattttatattaaaaaaatatatatttaaaaataaatatgaataaagaagaataataacacttgaggatgttcataaaagtaacccctaaaacatatggtcatatggggagaataaatactattactctcttttatatatttattagggaactaagtcgcgctttgcgcggtgttgtctacattttataatcttttcatacacatatatatatatatgtatatattgtgcttattaactgatataatctaaaatataatattttgatgtgtatattataacaaagtagtagtattgaaattagaaaaataatttgttatttt

SEQ ID NO: 175043 - DNA, 518 bp, Cannabis sativa
taaaaccaatctaatggaagctaccaattaaaacaatggtattcaatcacacaatataaaattggtagttttactataaattaaaaaggattattaaaagctaaaaacataaagtaatttacaagcttcacctgccctaagaatacattctaggcagttagtgcttaggttcccctaaccagagtaaataatttccaataagaatcaatatcaagatacgaactctagtttgtaaatcaaatgtatgtaaaacaatacaacaaaaaattcttacactatttaatttaccctaagatctcgattaaccaaccaagattcaaatctaagtccccttagattcgaagaaaagctctcattgcttcgatttagctgaaatccctttagctatgactctgaactccctttagataaaacaacctccattattattactctttaacaatggagaaacctgcaaaaaacaaagaagaagaagaaaaatatttctgccctagcagagaaaaatctctatcaaagaa

SEQ ID NO: 175044 - DNA, 516 bp, Cannabis sativa
tttgaatatttttatttataaaaaatatttatcttttcagtaaaaataataaattaattttttgattattttatagtttatttatttgtaatataattgtgatgtgagtgtttttttttttggttgatttcttgttatttttaagttttttcatattttttacttttaaaattttacaaatatatttttataaataaataaatactttagatcgtaaaattgtaaaaaaaaaaaaacaatgtatttttgaaattctccatgtatattaccatgcgtacgtagtatatataactcaagtactaaacttatgttttggtttttcaattttagtaataatcaatattgtgtcaatatttatataatagatatatatatatatatactagtatattattacgtgcgatgcacctatgttatgttttatattaactattatattatgagttcggaaggaaataaatgaatcaaaaataaataatatttaatttagagagatttgaataataaatttaaatt

SEQ ID NO: 175045 - DNA, 524 bp, Cannabis sativa
agaggaagaggttgaatccccaaacttcggtgagtacaacgagtctgggcagccagtaattgctgatggagacgttttggttgagggcatggactacgtcagtgaggagcttgctgcggcggttcctcataggaggcagggtgccttgggcgccaggtgggtaagtcctccgtccaagatttcggaggcacgccttcaaactctcgaccaggacgggtgcctgggcgagctggactgctacattcccacccacgacaatcgtgccacaaaccctgataagggaatgtgtgcctggtcggtggcccacggccagcaaggggtgctgatgcccttgcacaaatacttcagggatgtggcagacttctttggtctcttcccagctcaaattactcctaatggcatcaagtatttatctgccctattgtcctctacgcttcccaaggaagcgatgctccttcttcccacgaggtcgcttggttctttgacctgaagtctacccccaagcaaggcaggtcggggtactt

SEQ ID NO: 175046 - DNA, 765 bp, Cannabis sativa
cctgaaactactggccttcatgctggggaaacatctacactagcagccacaacggggcacttccacccttcactccggcgccggtgtccgagggcattgtccaactgaccaccgatcagtataccgcaatccaagaccagctacgcgccctgcaagctgaggtggatggacagaacagggctcgacgtcctcctcgagcacccactgctcgcacagaaaaccctcaagtaactaactctagacgtcgtaataaccgtactcgcagggaacgaaggataaacccagaaggatttgacttgaatcaaccaacctcgagggaccaatctgcgagatatcccaaccaggaggcacagactgaagaagaccctgaacgacgcaatcctcgcagcagacctcagtcgcgagacaatgacgtggaattcgcctcctcatcctcgcatgctcgcacacccagcaggtatactaggtccggttctgtggagatctacgcgatcaccttaacgctgttttcagggcacgctcccggcacctcgtgacgttgaagagccccgtgatccccgaatgggcgatcagggtgtaaataattgcaccaatccgcctaacgcaccagctgcgactattggagtcaatatcctagcaaacctcgctgcattagcaacaccacctacagcagcagcagtccctgctcccttagccgggaatattgatcaaagcatgctttcgcaggctttgaaaatgctggagcagcagagaaagcccatatac

SEQ ID NO: 175047 - DNA, 501 bp, Cannabis sativa
  modified_base (299)..(300): a, c, t, g, unknown or other
ttgttttttaatttctattttttaaattttagaaatattctagtaaatactaaaaataaactagaatgagcactaattacaatctcttagtcaactttgactttcaaaatcacctgaaatatgtttttaattttttttttcataacgatattcattatagttacagtatcatcactgtaaatttttgaaaaatttcgaatagtttacattgttgaaaacaaagtttctgatattccagtttaccatgcgaattcaaaaaacttcaaacgtatttttggcattgtaaactattcgaaatnnttcaaaaatttacagggatgatgttgtaagcaaaaggtacaccactatgaaaaaaaatttgaaaaaaaatattccgacaggtgtttttgaccgtggagattgactaagaagttgtaatagtaggttgacggtagaactcatcttatttttaatttaaatatttaataagatattttttaacaattaatatttataaataat

SEQ ID NO: 175048 - DNA, 973 bp, Cannabis sativa
tgtaagagtttattttcagaggaaaatgagtgattgtcttattggttgaaaaaaagatcacaagagctatttacatgtttatactgttagttacttttatctgaaactaacgctctcacatcttaaactaatcactcaactaactactctgttagctgattaacaactccttcaaacttagtatggctttagagtcgacacaaattttgtgtctacgttcggcaaaacaagagcttttggatctcctttgtaagactatctccaataattaccttaatttggtgtgaaatctaaactaatttagtataaatttttttattttttttgtacaacaactctaataattcatactaaatattttactaaataaatttattttacttaaacgatttcccattttatattatttacattaagaaaaattagaatttttactcattgaattttcgacactacatgatcttacctcctaaaatattgggcttgttaattttttttcccaaaatataataatgacataattatgtctcagattctatttcttataccattaaaaattaatatttttaccatttaactttgactaatacaaaatattgccctcttttgttaaaaaaataattttaaaaattataatatttgattaattttaaaaaaaattaaaaaaatattaattaaaaaaatattaagtttacttaaaaatctaaattattcttaaaaaaaaattaaaattttattttatttataaacacgtatcataaaaaatagcgtcaaaattattaaaaatctaacaaataatttacacaaattaagatttttttgaagaaaaaattaattttatttatatttataaactcgtatcctaaaaaataaaagaaaatattattcaaaaaaataaaggaaaataattaaaaattcaataacaaaaatataacctattttgaaaaagaattaaaaattaaactaaaaaaat

SEQ ID NO: 175049 - DNA, 584 bp, Cannabis sativa
tcatcaaccaagtaatgtagagtgactactatgttatgagaatgataaaagatctagttcagttgccctaatcaatgataaaacctaaaatcacttgatgaaaatgatttaaaatatcaatctttaaatcttgaaaatattttaaaatacaataaaatttctaatattgatggttgtgatttgttttcagaattaaaagtgttgatagaaatttttctaaataaaaatggtagttcaattgagatacttgattacataaaaaaaattgatgcatttccaaatgcattctaacaattccagttacagttgcatcgatagagagaagtattttcaaaattaaatttaatcaagtcttatttataagaacaactatgttgcaagagagattgagtggattagctatgttgtcaattgaaaataatttgctagataaacttaaatacaatgatttgattaatagatttgcatgccaaaaagcaagaaagatgaatttttagatgaatcaatctgtgttacttttttctaataattttgaataaactaatgttattattattaagttttatagattggagattgttcga

SEQ ID NO: 175050 - DNA, 963 bp, Cannabis sativa
  modified_base (411)..(412): a, c, t, g, unknown or other
aataataataatttataatcttatttatcataatcacaaataaatataaaaaaaattatgttatatgaaatttttattttttatatattcttaatattatttccccataatataactttatatgtatttgataaaaatagtttaggagtttttctttttttaattatttttagacttcaaagaattatttatttatttatttattttttgtatttttacaaaaattcacatcgcaactagtagaacaacctaatttcatataacaacctacataaaaacaaccggagcaacttaaactataaaaataaaaaaaaaataaaaaaaatagtatataaagtaatttcccaatattataatatttttaaattatatttttatcacttgtattgttaataataaaaatataaatannaaatattttttaaaacaaaataaaaaaattcaaatattatttattttaaatatttttttctttaaattttttttttatatgtataataaataattaaatatatttttagtacaaaataatttattttaggctaattagtaattttactctctaaactttcacatgtaccaaattatgcctcttgaacttttaaagtcattaaaaatacctcctgaactattgagattattggatttaaggactgttgttcaattttaataaaagagtctaatactttagtacatttcaaagttcgagagtcatgatttgatatatattaaaatttaaagagcataaataattactgaaataattaaattgaatgaaattagagaaattaatcaaacaatccaaaaaaaataataaaatttacattttaaaggacagaatctataatatccaaagttcatatggtaaaattgtaaattgtactttataaaataaaacaaatgtaaaaagaaacttaggggaagactagtgagtacgtcggttcaaaggcctatgccaccatt

SEQ ID NO: 175051 - DNA, 569 bp, Cannabis sativa
ataatattttatcttatctatcatttacatcatttttggcgaccctaaaataatccaatgcaagtaatcctaaaaatatactctaaaaaaataatatttatgtttagtttttaacttttattatttttcaaaaaaaataaaaataaaaaaaaagataaataataaaatgtagggataaacatagtaaaatatatgagaagagatatctaaagatcttgtgaatcattgactctcccacacgagcagggtgaaagtaacaacactcaatcgcctcgcattatacaatgtagtggtcatctcgcatcactaatacaaataaatgggtacaacgagataaagtacttctaacacttagttttttttcctaataattaagatgaataagaaggataacccatgtttggcgagatgccaccttcctagtcagcataaccgtctaaaagataaaaataaggagcaattagacagttattaaatattatcccttgtgtaaataaatagcctttttagcaataaatacactatagaatttaataatagtaataaacaccaaatattttacatgtttt

SEQ ID NO: 175052 - DNA, 611 bp, Cannabis sativa
attgcaaccgccgcaccactaccttcctcgctattctttttcttcttaatttctctctctaaatttttttttctctctctctctgtcactgtttttttcccatcgacaccaccacaccaccactatctgagcaacccctttccaccattgcaccactagcgttcgagcaaccccctctcagtaggtattttttattttttcaaattttttatttcttttttaaaaaaaaatataagtttatttttgtgtatatatatgttattgactcagaaatttagactagacttctaagtcatacccgctcgctagattagcaagaatgaataagtagttaagtattgataagggagacacagcaaatttatagtagttcactccctatatcacgatagtaatggagctacgtcaacttcgaatttttatttctcacgagatggtaatctagagagagaagctttgactttgtgggtagttttctgaatgtgaaaaataagctgagggaactctccttttataggtgaaagaggccaacaaaaataggggaacatacaaataatgtgtttttgaccgtagatgatgatctaatagtgaaaattatctcttggtggtga

SEQ ID NO: 175053 - DNA, 562 bp, Cannabis sativa
aagtagagtaaatttattttaattctatatgattttaatttgcgctttttaaccaaaaaagtaacaatattacaaaaatacttccaactggtcaaataaataaatatacagctgaaataaaaaaaaattacataaataccacttacacacaccttcaacttaggatccatgctttctgggcaattatcgcgcaacaacacaacaacccaacgcaaccgaaataaaaattcaaccagaaagaaaaccaccattaatttcggcaactcacctgaaaagacaatcagaatcaattaaaataggggctgtttcgaattcataaaaaaaagtgtagaaaaactactacgtacgaaactaaaatttaaccggaaatccagtttaatttgcatacaactaatatcctgacttcaattttcaaatccatgaaaggcatatctcaaacaattgatttggagtttcgaaacaatccaactcaagtataataaaaaaaaatttacatcaatactatagtaaaatatttatcctggtgtatttttgttaatttccaaatttctaatggtaaatt

SEQ ID NO: 175054 - DNA, 663 bp, Cannabis sativa
aagaataaaacaaatgaaattacaatgatcgctggagttgtaatcggtgccggaaaaagcaccggagtttgctgtcggtgccggaaaagccgccgaagttgctgctggcgccgaaaaagtcatcagaattagcattgtcgaaggaaaaatcaccaagaaactaactggtttcttgatgaagaaaccgatttcttgatgaagaaaccggtttcttagtgatttttccggtaattttactggtgacaatgccaattccgacactactctggagtttgatgtcggtgctgaaaaagtcgtcaaagtagttgtcggtgtcgaaaaaatcgtcggagttattgccagcgtcaaaaaagttgtcagaattggcattgtcgccaacaaaatcactagaaaaatcaccaagaaagtagtttcttcatcaagaaatcggtttcttcaccaagaaagtggtttcttcatcaaggaaatagttcgttacacaacaataataaagattataaagccaaaacaaaaatgatatacactgaaaaatattgaaaccagtttcatcaatcacaacaataatctaatacaaaatataagtgtgaaaaccagtttcaaacctagaaacaaaataataaaaagaaactttaaataaaaaatatacaataacttcataaaatt

SEQ ID NO: 175055 - DNA, 602 bp, Cannabis sativa
tagtgaggcaatacaaaattgactaatagagtaggaaattatcacttagattattaggtttagtgactatagttgcaaaatttcttttgaattttagcattttattttggttgatatgttaaagtgtccttaaggatcaaatttgtggcattacttgatgttggtgttatttgcagtgctttgcaaaccaaatcagatgtgcctggtctagaaaacaccttggtttcttgcttagaaaggatattcaaaacgaagtatggtgcctctcttatcccacattatatggtatgcaactgacaactcagatttctcgagtatttcacttttagctgtttgggaggaaaatatagtatacttcttcttggtcatcaagatttgggatttagttgttccttttgatttttcgctgcttaaatgtgaacatttattaaacaaaatcatgagaaacaaagattttgactctttcattaatgaagacttgaaagtgcaaaaattactcaagtttaagtaaatttcatccttgatctcgcaccttcgtatcgtgaaaagaaaaagaaaaagaaaatgttaaaatgaacacaacagatacaagcaagcctccc

SEQ ID NO: 175056 - DNA, 594 bp, Cannabis sativa
tagaaaaaaaaattatttttacattaaatggctgagaaataataaaaaaaaagtttttcgacaaaaaagtgataaaaaaaagttgaatttgacttaaatattttttcatataaacatatttttgatatagtgtaaaaataagtatttttttatactttctttaattaagtagttaaattaagtatagaaattcaaatttctcttttgttattcgctatcggaccaaaatttaatggtttaatattttaaaattaatattttatagttaaatttgtttattacccattaagaagtatttcatacatatatataaaggagagatatgaaatggtgacataccactctaaaatctctctaaaacaatttttctcttttctccttaattctctcattttaatattttattagagcataaatcttcaaattagtatttgactaataagttatttttctctgctctcataattctctcattttttaatattttattagaacataaatctacaaattaataattttatattattttaataatttttgttttaaaaaaacacactacatatatactatcacacattattattattattatta

SEQ ID NO: 175057 - DNA, 520 bp, Cannabis sativa
gaaatgggggaatgtaaggtccttccatttgaagctgttggaatctgttgcattgcctgtgtatgaggcattgcccgatatgaggttgaagattgagagttaaggccgagaaggttaagacaaaagaagaaggcgataagaaggtaggtaaggaggataaagttggaaaaaagaagggtcgaatttttttttttaataaactgagagagaattaattttcaaagagaagttaatgtatcgataatcgtgaataatacttaactacttttcagatttttaggttgtagctaaattgtataatattttttatcttttcagttaacgattgaaaataatatctataatttttattttttttattagaataatttataaaataatataaattaattatggatattttgttaaagaatggtgtattctgttaaaataaacagataaaccaaaaagaatcattaaaccaagaattgtcgttacatagacacttttaatatacaaagatatctattctatataaagt

SEQ ID NO: 175058 - DNA, 622 bp, Cannabis sativa
acttacccatgtgatcaaactcgtcgtccatcgcattttctattgttgccgagcaaaaattacataaaatagcatatttcatatataattcataaaatacccctagagtttaataaaatctccgtaattgaaaaattataattctagtgcccctttcttacaatggggcacacaaataattaaactcataaataattataaaaatgtcagaaattagtgctaattgtctttactaatctaaattactcaaccggtgattacagaaattcttctcttacaagaagtttccaaacaaggaaaaataaacttgcatatagaatctttccaatgatagaaaagagcaataaaaacattcaaataaggtgagaaaatcgattttataaaagccaaaaaatcgtaccctaaataaaatatagtttggcatctaaattgcctaaaaaataactttacaattgaaatgggatttatttagggcataaattccaacatgagtctcaccaatgaacggtgtaaagttatttggaaagatgggcttggtaagccctaggttcatagagccattcgagacacttgagaaggtaggcagatatcgtatcggctagccttaccaccagtattatcg

SEQ ID NO: 175059 - DNA, 729 bp, Cannabis sativa
tctttgtctctaaaaaagggccatgggtcgaatagatacaaaaaaaaaaaagaaaagataaggaaacgtgtttaaacagcaaaggtctcaggctctctgtatggattggtctggtctataggggcctggtctatgggggccggaggttcaacattctgagcaatatgggttttgttgctctggtcggctggaactatagaagtggttgcctcgagctttcctttggccgcctgactcgcacagtaatcaagatacatcctcttggattcaccaaggtaatcaaaatttcctttgggattaaccttccaaaattcataaaaaacctcgagggcagctgtttccaggctttccacctccttcacgagctcttcctctctggtctacttaatccggatgtccccctctaactttgtgagaagagtgcagagactgtccctctcatctttaagctcattgacctccttagacatagcatcattttctgcctccagctgcttgaaactgggtcgggcagaggtggtagtagtccgcaatcctcttgaagtacggaagtaaaggaagcattgcaccctactttgtatgagcactcgactaggcacaaaatccctatcttggactagttgcccagtgatttggagaagggaagaagcatttaacattccccaagtagccgtccttctccaaattcttcctcttggcctgggttactatagatagaggagaaaccca

SEQ ID NO: 175060 - DNA, 631 bp, Cannabis sativa
attttttaataaatttaaaacctctacacgacatgaatatcatacactaatataaattattaatattacactaataataatataacaccttacattcaatatttgtcatgttgggaagtctttagtacaatctctttctcaacctttgcattcaaaaaaaatacatgccaaaatacaatatcatttttgtaaatttctaaataaatctaaatagtttacagtatggataatagagttcctgacattctattttactaatcagtataaaaaaaacttcaaatttgtttttgacattgtaaattttttgaaattttttaaaaatttaaaaagatagtgttacaactataatgaatactagaaaaaaatttagaaaaaaatattaacatatattttcaaatacaaaagttaagaaaggggttgcgacttattttgtaagtatagtagtatgtgcctagtgtgttttgtctggtatcaatatatagtggtgattgttttgtgtttatcttaagaatgtcgtgaaacagcagtgacacataatctgttccgcagttagtaaagataagttttttcttcataatataatatttcgaaatatttttcgtttaaataaaaattctcattttaatattac

SEQ ID NO: 175061 - DNA, 604 bp, Cannabis sativa
tttcaatacctgcgaggaaattagcattgagacttttacatttttgaaattttttgatactatttgtgttaagatttgaaataaaatagataacgtttggtgcacacacacacacacacacgcacacaactctgttgttacaactgaaaaaacgttgataacaatttttgactctccactaatattttgaaaatacttggatgcttttgtttggtttgacttgtttattcgactcgattattctttttctccgcttgaattgctaggaactagcaataagctagttgggggttgtgattagtggttaaaaatatatttttattaattttaaatgataaaataagttgagtattaattgatattttcatgaaattattgtaatatattttaggctaattagtaatttttccccctgaactttgacatgtagtaaatcgtaccccctgaacttttttggtcgttaaaaactctacccgaattattgagattgttaaatttaaggacttttatctaattcgttcaattttattgattcagtgattgcttatgtactaaaccatgctccccacactttgatatctaccaaatcatgcccctcaaactt

SEQ ID NO: 175062 - DNA, 509 bp, Cannabis sativa
ccacttgaagtctggctgaaaaaagtagaaatatcctgacctaccttgtttgggagtagacttgaaatcgaagaaccagccaacctcattggcagaaggcatatcccacttctaggtggcatagagaacgaaaatggcagatagatacttgatgcccttaggagtgaactgggtcgggcagagacaaaagaagtctgcaccttcctaaagtacgggtgcagaggcagcaatgcccttgtttagcatgagcaccctgttaggattttatgccataaataaaacccattacaatctaatttgatttgttatcaataagagattagaagttatttattttaacatgtagttttcagtcctaaacatatagtgattcacaattacagtgatgtcaacacaatagaatgtgattgtgattatatgattcgaaagataataatgtccttgtttcatcagtgcattggatttacactattgtgataatcagcgatgaagtgtacttacactttgca

SEQ ID NO: 175063 - DNA, 551 bp, Cannabis sativa
gtttatactttcttcaaaattccttcttttttaatgcaattttgaccttgaattttcaatgtttcaaatttataccctttctgaactatataaatatatatatattttgcagaactgaactatatatttttattggactgaactttatatgtaaatatatatttatatatactgtggaattcgtgtgaattgatcttgattatctcccctcaatactttgaacctctaattattagtactataggtccttttttgaaaagatggatttttttaatgatgtcgcttttataattactaatttttttttaaaggttaaatttagagattttacactgcatactaaaatttccaattttttttatcttttaatagaatttttttaaaaaatactatataaattttatattatgtactgtgttaaacttttactattattccaaggtttttttttagtattttcactgttgttttaattgttttgttttgtagttttatggttgttttataaaaaaaagtaatatttttgtaaaaaaaatcgtatgatagtaaaa

SEQ ID NO: 175064 - DNA, 585 bp, Cannabis sativa
attctaattcggtcattgccccaaaaatatttagtttcaaacaataaatttttagggaggactcattatttctactaaaagtaaaatattacaaaatttttacaatgcacctcttaaatataagtgcaccaatagagtccctttagtgttttcgatatccacaaaactttagttttaatttttaaaatttagtccctacaaataaattctaatttggtcattatcacaaaatatataggttcaaacaataattgtttatagacgactaatacattaaatatatctattgaatataaaatataagaaaattctacaatacatccccttaaaatatatttcggtatctaaaaaattacttagtttaattttttttacagtcatatacattataattatttaagacatctaacaaaattttgagaaattcagaaaaatttaacacgtaaaaatagtgttcgaagagtttgttaggcgcgtgacttttgtattttatacgtgtgtgaaatagacggtttaaacattaatttctatattgtaaattatttcaaatttcttaaaattttgcagaatgtattaaataactat

SEQ ID NO: 175065 - DNA, 517 bp, Cannabis sativa
acctatctttgaagtttcaaacatcaacttttctgggtgtagtgcgaggtgaccaactactggctcgtgaatgctacctcatagagctaaagaattaaaagatggtcatcaactaatggcaatcacaactgaggaaggcgagaagcatgtcaaggatctggatcctcgagttcaagatgaaaagaatcaattgaaaccaatcaaggaattggaggaagtcattttagacttagaaaatcccacaaagtgtgtattcattgggaaaaacctggatgaaaaactaaaatagcaactaataagttttctgaaggcaaaccaggatcagttcgcctggagccactccaatatgatagggattgaccctaaagttctttgtcaccatctgaatatcgactcgaattacccaacgaagagatagaaaagacgtccctttgatccttaaagacaaggggtactcaagaggaagtggataagttgttgactaattactttataagcgaggcattctacccctcat

SEQ ID NO: 175066 - DNA, 559 bp, Cannabis sativa
tattgttattagtacaattaagtaattggttctttatagtttaaagtaatatagtttttataaaatattgctaactcttcgtaaaatgcactggtatcttataacaatgctctaatatatataatatcacacatttaggactgaccctaggttaaggtagattagacccgcgcctaggatctacttaacctaagggcccaaatgataaaaaagatcttttaatatatataatttttaaaaatgctatttattcaaggcccttgtaaatttatttttgggtaaatattattttagaccttatattttgtaaaaattactaattggacattctgttttgtttaatgataaaatggatcctatatttttcaaaatggtaaaaatgggatctcgagctcaattttcgaccatttttttaaaataaccaatttaaagacaatttctaacatgaatatatacagaaaatttaattagttttttcataacatctctagatcggattattattaagttttaatttgataaaaaattaaatcagggtcctatttgtataattttgaaa

SEQ ID NO: 175067 - DNA, 505 bp, Cannabis sativa
atgcatgattttgtgatttttgttattgtagctactgttagggtttgatatagtttttagaggttaatatatgtttagaaatgttgttttgagcatgaattaagggctgttagaggttgttttcaagttttgagttttagaactcaaacttagagctttaatggtgaaatttgattctgagctttgattgttgttttattgcttggaaatggtttattggggtataatatgcaggtctggaaagtttggttgggtttagaaacgatttggttagggtttggagctttttggtttttctgggtaaaactggctaagcggttttacaatgcttgtaaaactggttactcggattttgcagcagggaaacccaaaaattcagcttgtcattttgcgttagtttcaggtttctagttggtcgattctctgctagtttagggtattgccatattaagttgcagtagagagggttttggttttaaacctaagtcccgggtgtgatttagcg

SEQ ID NO: 175068 - DNA, 506 bp, Cannabis sativa
tgctaccatatagtcattttatgagtaccaaattaatggctcttataaaataacgaagcactctaactattgctttccgatgttcaacacatgggttactcgtcaatagtgaaagtttgcacactgcaaacgcaattccattcttgcctaatgtaacctatatcaaactaccattaatactagcatattccagatatgttattgtttgaacatcattctctggaagtttaactaaggtgacgtttggttgaaatgaatgagaacataagaataggaatgagaatgagaacaggaatagaatggaattaaacttaaaatgcataaaagtcattccaccacaatgatggaaaagtcatccattgaaatgacattccaacactttaaaatacaaacaaacaaaggaatgaaataaatttttttcctttccattccattccattccattacctccaaccaaacgccacctaagtggtcattcgggcagttgcttctttacatttgaagtg

SEQ ID NO: 175069 - DNA, 587 bp, Cannabis sativa
tatttacatataataattaagactcactatatacccatttcgttataacaaagctaacttagtgcataccttttgtttgtggggaagcagataattctagtgggtcacagcatagggggcgtagggtaacggaagccttacatcagtttcccaacaaaatcaatatggtcatttatgttgcagcaatgatggtcagttaaattatggactttttttttggattgttatgaacttgtatggactttttgaagaccttttctagattgttatggagtagtatggactttattaagttataagccttgttatagaatttataaagattgatatgaattttttaaggacttttatgcattgttattaacaagtataaatttttagttaaatattttttttcttgtgacaatatacattgaaaattttgatttttaagcaacccaaaccgcccaaaaaaccgcataaaaccgcccaacccaaaattttattggccaggtatgggttgtgattttaaaaaaccgccaaaccgcccaaaaaccgcccaacccaacccatgtgcagccctaatgctcactgttattcttatactt

SEQ ID NO: 175070 - DNA, 520 bp, Cannabis sativa
ttagggttgggagttgtctgatcgacagccgtgatagtgtttccagtctcttgtatgcgtggtgtgatcctagctagaggggaagtcactctatggcctactgtaggtggttgtgtattaacttgttcagggtttgtccctagtggtcctctcgtgtttccaggagtttgcacgtttggatttgtcaccattggattaccttgatcagtaaggcctccctttcaagtttgtacaaccatcctgttaacctgtcaagattaaaacaaatgcttatgtttttgctctcaatgaaagcaccaaaatattgacctcgcttctagccaacgacagtgagtcaaaataaagcgattaaataagagaaataatagaaagcaaaaatagtatagtaaaaagaataacaaattttaaagaggttcgacctagtaagaatggtaatagctgttggaattaattttatcaggatcttagatctagtcacaagtatgttgatttaacaacctaaatatgaacttctaaaatg

SEQ ID NO: 175071 - DNA, 521 bp, Cannabis sativa
ggctaacagtgattaccagaatctgaattttatgggcgtcatcgacaatgatagggtggcctgtgccaccttccaatttcaagaagacgctctggtatggtaagacatggtgtccctgactcaggatgttacaacgatgacttgggaaaagttccaagaactgtttaatgcaaagtattacaatgaggcagttagaagcgcaaaaagaaaagaattcacccagctaactcagaaggaaaacatgagtgttactgaatacacaactcagtttgaccgtttggcaagattggcctcgggaatcgtgccaattgattttagtaagaaagagaagtatctagatgggctgaactcaaaaataagacatgacttaatgatcactactgatgacaacaccacctacgctgatatggtgggtaaggtgctgcgagctgagggcgcagtggagtgcaccttagagtctcgagggactttggttgttggtggggctcttactccttctacattaggctttagtaggggag

SEQ ID NO: 175072 - DNA, 590 bp, Cannabis sativa
  modified_base (168)..(185): a, c, t, g, unknown or other
  modified_base (425)..(431): a, c, t, g, unknown or other
tattagatattattatatatatacgtatataaataaacgatctaaaccattgatttactacaaaaattgaagaaaattatgttatattatttaatatagtaatatgtagattaaaatgtggtaatatatgttattatatgaataatatagggtaaatagtggcataannnnnnnnnnnnnnnnnnttgtaagcggcataaacccaatatttatatttagcggcataagtacccaatgtttgcaaaactgtaatttttctttaattttgtcagtacaaattctgatattgtcttaaacagggcacatataaggcctaaatttttgatcatcgggcttagatagaaatatatagtatcagttacttctaaatgttcttttaataaattcaaaacagagtttgtactgacaaaactggaagaaaattnnnnnnntacaaacattgggtacttatgccactaaaaataaacattgggtttatgtcgcttactgtaatgcatgaccgccttagtaatttggattagaaaatgcaattagcactaatttctgtcattttataattatttgtgaatttatttaattgtgaatcccaa

SEQ ID NO: 175073 - DNA, 744 bp, Cannabis sativa
  modified_base (393)..(396): a, c, t, g, unknown or other
gggccgactcgacggggtggacgcagcctggatgttttgtgttactttctggattttcggcccgacccgacacatattctttcggacccgggccgcccgattaaggttgatctttttttgtttttttttgggtcaatgcctacctttccgatttaaatattaattaaaaaaaattatcttcttcaccaatatgacaaaccgaatatataagaccatctctaatggaaaatataaaaattgtactatatttgacacaaaaattagttttgtggtaaatttgcatcaaattttaactttgtgttccaatgcacaattataaaattttgatgtaaaatttaatatcaaattaatttattaaaaaaataaaaactaataactttataatcaattttnnnnttattttaatatgtaagacaataaaaaaataatataaatgtttcatactttaatgtcatagttaaatatactaataaaataatacaaataacataaatgtaaatgaaaaagtagtgtatttattatggtgtaaattttatatcatagcaaatgttatgttaaatttggtacaaaatttgttatgtatcaaatttatattactttttgacacaccattgaagtacactttttgttaaataagttatattttaactttccaccactacatgctctaaactacatcaattgcaatagacttcaaaactgtggcagagtaatgatggaaagattaatagaatattgttattg

SEQ ID NO: 175074 - DNA, 511 bp, Cannabis sativa
cgggccacccaacccactccaaattgacgatttgtttcgaagattgctgcatcaacattaacctttacttcatttgcatttggaagcacccaatgctcggccccatctccttgtactaaaccagcagccaagaactctgcaccagcagagtgagcaattttccattgtgaaaggtaaccttttgctgacgaaacaatggtctccaccgtcttcattttattttgccatacacggtcattccttgcattccacaccgcccaagcaactgctacaaacagctctctattgtctcggtccagttgcttgaagtttcgcacgcaccagtccataaagctttcattttgctgtagcaccgtggaaaaaccagcaatttcccaacacattttggccctcggacaggtaactaaggcgtgagttatagtctcatcatggtttgaacacacagggcatagaacatgagatacaacatgtttgattctgagttgagacatcgtggggaggcagtttgtac

SEQ ID NO: 175075 - DNA, 527 bp, Cannabis sativa
ctccatctaggattaaatattgagcatctttcctccttatttttcttgttttgttcttattttcaagcaagattccagtctggaggtatgctgcaatgggcatcatccaggttggactgtcatctaacatgtctatttcttttgaaatagtgatggttcttttaagaactgtatgggcatcaaatttgccttgttggttagggtgatacttgtaaaataggcgagtgcatcagtcagcattctcttctttggggacttgccttatagtatagactttgagcaaacttaacaagtattgcatttttctcaaataggcaaacaaagtgtccctaaaatattatggatctatattttgtgaaaatacaaaaactacttgttgacctcatatttagtcatctaacagcggagccttattcataattgacaaacaccacgtgtaaattataaaagccaaaaataaagttaacacaacaatttataaaggtttgactcccatgttttaagggtaatgacctattctccttttt

SEQ ID NO: 175076 - DNA, 543 bp, Cannabis sativa
tgtgaggctgaagcatttgaaaagaatcgcacgagaaagagagggctgaagtcagtattttgtgttttttagttttaggatttgttgcgtcggttattaactctcactattgtattttgcgtcgtttttaaaagctcgctaatacaatacacgagttttagtaacagacgcaaaataaaacgtaaatttttaaatttcttacttttttcgtcggtttagtttttagcgtcatatatctaaaagacgcaaataacatattattagtgtcatttttaaagtgacgccccaactatttgagtactattcacgtcggtcaacgctatgaacagtagcgttgaccgacgtaaatagtatattttgtagtagtggctttagatatgttctttggggtataaataagaggtctggagtgtttggtagaattggggttgatttgaatgagtatgaatttttgactcattcctgcactgaaccggaattctggttcagatgggcctgtaggaactggaattccggttagctcccaggaaaccccacagaacc

SEQ ID NO: 175077 - DNA, 520 bp, Cannabis sativa
ttttacatctcaacccgatttgtattatcttgaccgaaccattaatggttcctttttgagatttgtatcatcgtgttttaatggaaaattcaacaaatcaatccaaagaaccaccaatcacaaatcaatccagagaatttatgtgggtttgcaagaagtatcttcatgtgggtttggtcatataatgtgaagaaaagattcaaaaggaatcctaaactcatcaaaggtcaaactacgggtgtatccactatttttttttgcatgatccggaataagatgagtcggttatcactacgtacaggtattttgcatgttctagaataaaccttgatttattattataaaagttgtcttgtcgttttgacatgtctggtatgtgatttttgttgttgagttatgagtttgttgagttggaattgcagtgggcttgggaaccccagtttgttcaattccttaaagaaatagtttttcaaaagagacccaatttaatttttttgtgtgagacaatttgcaagaaaga

SEQ ID NO: 175078 - DNA, 544 bp, Cannabis sativa
agcctcacggtagtgatttcacactgaaaaaaaaaggtgtaaaaataaaagtatgagcacagggttttttacgtggtttagcagttacaattatgcatagtccacaagtcaatcttattcagatttttgtttgtttctcagggcctctcccgtatgaggtttttttttcgtcccccttttgatcttacttcccactatttataatttcatagtgggcagttaattacaaaattgtctataatatgtttagaacaatcacccctaaaatcatgggatttgattacatatcacgtagtgtaaatacggttatgatttgaaaatcatatagctgtgattttcccgcttttacctggtcaaaataatcgtgatttaaacacgtctttaattattgtatctggagatgccttgacagaagcttggatcgagtgatctcaataacgagctggggccatttttccttctgagatcgatgatgcatgtcttgtgtcgatcgcggctcttatttacaaagagttcttcgaagctcatttaaatgttagcttct

SEQ ID NO: 175079 - DNA, 578 bp, Cannabis sativa
gccttaaatacttctttacccaaacaaatttgaatatgagacaggggcgttggttggagttggtaaaggattatgattgtgaaatcctttaccatcttgggaaggccaatgtagtggttgatgccctgagtaggaaaggtccagggcaagtaaatagcatgattaagatttcacctcagctagtagatgacatggtcagatcaagcatcgagtttgctctaggaaaacttcataatttgaagttacaatctgatctgttagaatgaattaaagctgctcagttaattaatccagaattagtaaagatctaagaagaggtttcagcttgtccagctaaagattttacgatatcagatattcgaatgatgttgtataagaccagggtttgtgttccaagaaatgcaaaactaagaagtgaaatccttgaggaagctcataccactgcatattcagtatcggcactaccaagatgtatcaagttcttaaaccctactactggtggtgcacgatgaagaaagatgtggtggaatttatatctcgatgcttaacttgtcatcagatcaaggctgaacatcaga

SEQ ID NO: 175080 - DNA, 589 bp, Cannabis sativa
gtagttgaagtagtaaagattgaagaagctaagtgaaaaagaggcagagaggagagatcgagagatagtgatttagggttttttttcccaaactcctcggatcgaccttggagttgagaaataagggagtgagcgagtgagggtttgagatgagaaagaaaacaaggaaattaccctctatatttttttatattgtctttttttatttttactttttttcttagagttcatcatttttttttttttaaattgtactaattttatctctgtcacttcaagatactctctatatgactctcttatgtcagagtattttgagtacaatacatataaaaaaaaagtatgtttcaaataaatataaaattaaatgtatatttaattaattgattaataaaaggggtatttttcaacttaccccaaagagaagggttattaaagagaaatttacaaaaatactggaatttgagttaacttttacaaaaatactgtccaacggaaatgtgtttcaaaaatactgtgtaaacaccagtagaacacagaacagaacaactcaaaacaacagtagaaaaactataaaacaccagtagaa

SEQ ID NO: 175081 - DNA, 764 bp, Cannabis sativa
  modified_base (515)..(517): a, c, t, g, unknown or other
caaatgagagtaaaaaacaattatcataagtagtgacatttgctaacttattatattcttgttcgcgtgggatcattttgctcgcttacaactggctaactctttgataggtgtggattgaaagcccgttaaagatatggctctgataccatgttgagaaaaccgttaaattaaagactaggggtgtgcagaaagtcatccaatccaattacaattgaccgatcaaataaaatcggatatctaatcataattggatcggatcggatgtaaattatgaaaatctaatcggattggatcggttgttggatggaacatctgatccaatggataactggccaaaccgatccaattatcatctaatggtcatccaattatatttatatatttttaaaatacatttataatttaatatattttatttaaaatatatattgattgatttaatatacatttagcacatgagattaatgaaaaaaaatcttaaatctaaaatattaattctcatctttctaaannntaataaaattgtcaatgcgtattgaataaatttattatttagtggttatattatgagatcatgaaaattaattaggttggattaaattaatatttattaagttttaaattatatttatatatatatttttttttttaacgaaatcaacataaatggtagttaaagtagattagatgcatctattttaatccaatagaaaactaatcaaaggcaatatctaatggttggaaccgatccaatccaatac

SEQ ID NO: 175082 - DNA, 541 bp, Cannabis sativa
  modified_base (400)..(428): a, c, t, g, unknown or other
  modified_base (499)..(504): a, c, t, g, unknown or other
aaatatcaacctgcgcgctgggtctcgtttttggcacctaaaaagtgttgtttcttctctaaaaagacttattcccccatttttgatgaagacgaagaagatgaaaaagtcaaatctctaatctgatacttgaaggcgcccagattgacagaatgtcaacatgggcattgggtgctcgagccccgatgctcaaaaatgaacttgcttcgattctaattctgatgcctcaaatatgtccgtggtatgtctagttgatgtctcaatgcaagttttgaccctttgcactaagacggccccagaaactgaaaccctagtttgatatgtcaacatgggcgctaggtgaaaccttagatgcccaggttggctttcgggatataggtgttgggaatattttaccagnnnnnnnnnnnnnnnnnnnnnnnnnnnnntaacatcctaaatatgaatatctcaaaagtaatgaaaataaacacataagattttagaaaaccttacattnnnnnnagcggaatataatgactccttcctctcagatctctaa

SEQ ID NO: 175083 - DNA, 504 bp, Cannabis sativa
acaaatgctatttgtattatatgttgtccttctctgttgtttgtttgtaaccattttcatacaatataccaactatatatactattatactgtataaacaaaataataataataaaaaatgatgaatgattacttttaaatgaacttgcacattctttggaataataaaaaaaagtacaatgtaatgtaagtattgttgttagtgtgattagttagtatattcaaaaataattattatattaaaaattgatatttaattatattaataacaatattatattataccttagaaggtgttccactacccaaatttgctacctttgtataggaaatttctccagcacatctctcaagaaatattttggtaaattcttcttatttgttttggcatttagaaaaaaaatttagttcaattttttttcttttatgattacgtatgttgtatttatttaaaactatatttaagtttttaaataatatttgaaaataaagtttaaataatta

SEQ ID NO: 175084 - DNA, 709 bp, Cannabis sativa
aatttatgagaaatgccaaagggcattactagtactaagactggttatattaaaattttaaattttaattaatttagatcaaaccatttgagatcgaactaaataaatttagtgtgaataatttgatcaatccggactattttaaattttttggtttggtcacggttttaaaaatttcaataacaatttaaactaaatcaattcgtataattattttatatatacttaatatatatttttttagacgaaatattagtatttaagaacaattttaggtagaatattgatattaattctatattgttatgataataattctatattgttatgataataattttttattgttatttatatattataaatttattaaaaagtaaaaaaattacataaaaaatgaacaattattgtaaaaaaatttagaataactataaaatacaaatcatgatttcaaaccaaaccaatctatttttgagtggattggtttggtttggtctgataatttaattagtctggtttggttttgaatttttaaaaaaccgtaatactggtttagtttgaaaaaattaaaaatcagaccaaattaatttatgaacaccattaattagtgcctagtactatcctcagtgtcataatgttattagtgtaatcaagtattgagtctcatatagtttaagaaaataaattttaaagaatattgttaaccaat

SEQ ID NO: 175085 - DNA, 564 bp, Cannabis sativa
caaagcaagatactatcctcatggggactttctttcagcagagctcgggtcaaatccaagctttgtttggagtagtatctttgctgcccgggatgttgtaaaagcgaggctgaggaaaaggattggtgcgggattgtctgtgcaaattacatcagatccatggctacctattgttgatcgagcctctccaattcctgttgtgccaggccttgaacacttcacagtaaatagtctcttccaaataaacaatagaagctgggatgttgatgtggtaagggatttattctctcctaaagatgcttctataatccttggaattcccttaagttcggttgatgcagacacttggtattgggtcgctgagaagaatggtttttattcagttcgtagcgcttaccatttgctccaaactctaaagcacccaccgggcttgtcggaaccaaatattagttggaagattctatggtctcttaaggcacctccgaaagctaaggaccttgtttggagagcggcctctaattgcctcgccaccaaagtcaacctttgcatcaagaaggttttgat

SEQ ID NO: 175086 - DNA, 530 bp, Cannabis sativa
gtgagaagaagaagaagaagacgagtgagaagacgaagaagaaggcgaagaagaaaagaaagaaaaagaaaaaagaaattatttttaaataatttatttatctatttgcttatttatttttattttaaaaaaaataaaataataattcagaccaataatatttcgacatatgacaatttttaaaaagtaaacggcttaggtaaaattaggactaacggacaaatgaaaaacatgactttgaggactattaccgctatttttcgagattggggacttatctgtatcaaactgaactttttcaggacttttgtcaaaaatttccttttactaattaataaagatcataaatcataataaagaagaaaaataactataaaatgtgacccgaaacttaggctaaaaatagtctaacacattatagcataatcgacacttacttctcagatcttatatcgaaatcataaacatttaattgatagccaggcaattaaaggacttaagaacgaatgaaatagaacacatagaaaatt

SEQ ID NO: 175087 - DNA, 711 bp, Cannabis sativa
cagagaagaacattgaagaaggagatcacgaatagggaggtgtagctgtatttgttgttctctgctagggtttgatttttttaggttgtgtatatatgtgccgtgtgtgtgtggctgagtgaaataagagatataagataatatatatatatgagtgtaattggcatttagggtttctattgggataaacgatttgtagctcaaagaatagtgagctgtcgttttgtgtttatattttgagggtcaaacacgtgggttgagtgggtaaatggtcagatttgaccttggcttttgttgattaaagcttgctgtgtgtagggcaaagaaggaataaaattcctacagtggtatcagagccaaacaaggcacaatctgcagcaaagattaatcaataaagcataaagaaagcatagaaaaatatcaagaatgcatcaagaaacacattcataccagcaagaattcaaatacacaaaaccaagattgcaaagaacaacagcaagattattctaaattcattatctatataatttctttgaaataactttatacatatacaattatgagttccgtgaaggttaatatagataagtttgatggttcaggtgattatcgtatttgaaggaagaagattagggctctattagctcaacacaaactgttaaaggttctaaaagatcctgtggaatggtcagctgatacaaccaaagatca

SEQ ID NO: 175088 - DNA, 519 bp, Cannabis sativa
atgggaaatagggtgtagtacctgaagatgagactgcctcgctataggatggctacaaagaagagagaatgagaacaaatgatcttcaagggttttaggaaaaagaaaaatcacatctcccaattttcctatcccaaccattcccctccaacaaataactgccacatgtttctattagcattccctccgccttggcgccaatgtgtttttattttttatttgatttgagggaaaaaaaaaactattaagtaataatagcatgacatttcaatttcaatataagaatttttttttatttttaaaattgttacaatatgtataatgagatataaaggtatggaaaattatataatgtacatttttaaaagagatataaattataattatttaagacatcttgtaaaattttaaaaaattcgaaaaagcttaatatactgaaaattatgttcaaatagtgtgttgcacgagtgtctattttattttatacgcgtgtaaaataaactatttgaacattatttt

SEQ ID NO: 175089 - DNA, 565 bp, Cannabis sativa
cacccatagatatgaaatatttctgaattgagatccaatagtttggtggttactaaacaatttaactataaatattaattttaaaaataataatttattaaattttgatccaatgacgaatagtaaaagaaaaattgaatttctatacttaattaaaaaaaaatatcaaaaaatgtcactttttacactatctcaaaaacatgcttatatacaaaatgcttaagtcgaactcaactttttttgtcgaaaaactttttctcttaattttttttttcagtcgatggaacaactccaactcatataatacaaaaatgagagatttttaaattagatagaaaaactaagcataaaaacttaaatgtttataatattgcccataaataggtaatacttattaagagtgcacccacataaatatataagatgatctgtataattcattcaaagattaaagaataagaacttacaagctgtttgtaaagcaaggacgactatgtcctcataaccagaaaattgccttcttcccttagaatgaaaattagggctgtacaaaaaaattcgtaaa

SEQ ID NO: 175090 - DNA, 519 bp, Cannabis sativa
gtaaatggcggtggtggtttgtagattgtggctgacggtggttccggtccattataagctatatctgaattattttcattgtattaggtttttttggttccaagtttgttcattaagattttgtattctttgattttattttctttttatgttaaagtcaatattatgttttcgaatgtaaataacattcagtttttatgttaattactgttcagattttatgtaaataacattcatattttttttttgttaaaatttaattgatgaaagaactctctttatgttaattactatttaaaaaaataatatattattaataatataaaatcagattaaatataagctaaatataattaacagaaattaaaaaaaataaaaaaaataaatacttttgccaacatttttaaactgtcatttaagctaatctttctcaacatttataaactgtcatttaaagtgacttttcccaacagttataaaccgtcttttaaagttttgtatttttatgacacccacata

SEQ ID NO: 175091 - DNA, 593 bp, Cannabis sativa
agttgccgtggctatggccaaggttgcaagtgaggtaaaagctggagatataaaggtcctttttgtgaagcctttagtgtattggactcgattttttatcatcaccacagcattttctcgtcctcaaattaatgctattgcgtatgtttaaagcctcaatcttgatttgtcattttcttaacattttcaagtagtatgaatagttattccatttcattgtattgtaggtccaagataagagatttggctgagaagaagtatgggagagtgccaacaggtgacacaaaacccaattcatggacccttttggattatggtaagaattctcaattagatgtacttagaagggaaagtttaggactatgcatgtaagaaaaccttcatagtaattcgtttcatattctttccatgcctaacttacaacatatgaagatcaccaaactatagaaattgctatttaggtaatcgagagactcgaaaatcatatttcgtgtgagaaaattacatctctggccatttgagctacccatcttgattgaatgattggattggctaatagaactagaattgttatcagcctacatagcataatt

SEQ ID NO: 175092 - DNA, 529 bp, Cannabis sativa
ttaccattattattttctccatatatatatatatggaccgatcgtagtccccatcccatccttaaaagaacaatataaagcattatttaatattatttgaagcaataacaactgttgcatctgcatgtgcattgctcatttttttttttgttatggatttttttaaaaaaaattaattaaaagaaataacttttttttcttttcaaaataacgccacattcattagaagtataaaaatatgggaattacaaagggaattccctgctcttaataggaaccaataaactggctacacaatctaacatgttttgctaaaccatctactacagaattaaacttgcaatattgaagaaaaaaaacagtatcgaaacttcttgatggtttgagaataaatttgtattggtttagatttgtattggatggatattaggtagtatatagtatgatgatgttgataagttgataagttggatgattggtgggacaaggaagagttatgtgtttaatttttatgtgtgtagtaagagag

SEQ ID NO: 175093 - DNA, 548 bp, Cannabis sativa
agccttttttaaatttctacaaaagtttctaggttgtttaattatttatagcattatttataaatttttgataagtaaaatgatataaaatattatttttcaaacttataattcataaataataaaatattcactaaataacaaatttatgaatttaaaaatattatggttaagatatctataaaaaaaatatctaggttaattttaaatttataattatttaagttgtcatataaaataattttaatataatattgataatgttatcttttaatttaaaatatatccaatattaaaatatttaatcttataattaaataatatataaatattaacaaatgaacaaattttttaaaatctgaccataatttaaaatataaaataatcacttttaaatttaaaccttgaaatatcaaaaattaataataatctattaaaattaaaaactattaatttaaaatattggtatttagatttaaatattaaaaataatattttatattgatatttgtggtttgaaaatcaaaaaaattcagatcggaagagcg

SEQ ID NO: 175094 - DNA, 629 bp, Cannabis sativa
tagtttccatgggttgaatgggcttccacgtagaaagatctttagttaattacttttaaaattgaagtttctctctaaaaaataaaatgtgtgtaaaaacatttctattaggcactatagtacctaatactatactatcttatacgtgatagataatttaaataaaaatatttttaaaatcccttaaaacaaaatttacattatagactaaaaacttgaaaaaaaaattacaaaaaatacatcaacacggaaatttttttatttttactctttgaacttaattattttttttaaaaaaaacattttcagtaaaaataataaaccgttgttttgattgttttataatttatttatagttatattataattgtgaagaggtagtttatttataaatttatagttatcgtaaggttaatttctcgttattttttagttatttttttacttttgttgattaaagtgtatttttgtaattttaaaactttacaagcatatttttataattaaaaattttaagccgtaaattataaataaaatataagaaaaatatatttttaaaaattccccaaactaaaatatgtaaatgtcaatattgcaccactattgcatttttgtaaaaaaaaaaaaaa

SEQ ID NO: 175095 - DNA, 520 bp, Cannabis sativa
tgcatgctcattgctcacaattttgttttgacggggaaagtgacacccccgaaatctctagaaatcactaacgcgcttactccggaagaagtcgagatctaattttggctaagacattttaggttatgtatttttcgttttcctttttaagtttttagacatgttaatatttgttgttttagttatattttaatcacaatataatatttttatattttacaatcttgccattttggagtagttggagcaatagttttgtaagggtagttaaaattataaaatatttataaaatacatgttattgtttaattgtttttctattttaattttttttccacggactccttttgttggccaatttgttgtctttttgtcttgcttaagtatttagactcctcgtcaagtggtacgttgcgcatggtgacttggccatcttgttgacaagttgtactccatgtggcatcaatcgtgcctctgtaaacatgccacatcatgtgggaaaatattaggataacaaaaa

SEQ ID NO: 175096 - DNA, 674 bp, Cannabis sativa
acaatccttgggcctcactcaagtgtccttgaagatacgtgttttttagcctcatgaggtcgaagccattggggtgaaagaagctttgagttggatcaaaactaatggatggacgagcgtgattgtggagtcggcttgtctaagagttatttcgaatttacaaaataataaaattatagcttcttcgtatgaccatattattttagattgtaaggctttgtttgcagatgttggtaatatttcttttaattttgtcaaatggtctgctaataaggttgcacatgctttggcacaatcttctcttgtggagactgatcgtatctttagtagtgtttctttacctactgtaattgcttccttgattttagaagatttgaattaatgaaatttcattattactaaaaaaaattatgcttataaaaataaaatgtttaaattttaggttaagttgagaaatacttcttttttatatccattaatcaaaaatattcttatgttatattttattaaaatgtactcacttttgtaaatagattgcctaatatacttttatcttccacttaagtttagtacataacttatattaacttaaaagtataataaaaacatcactagtatatcttaaaagaatataaaaataaaagtaaaataagtgtacaatttaatttgggatt

SEQ ID NO: 175097 - DNA, 519 bp, Cannabis sativa
acaaaatatcaacagcctgttgacaacctatcaatattatcaaacagcaaacatagcatcaataaaacaaattgccgataacatgtcgacatactgtcgacatgctatcgatattccaactgaatgagcacataacaaaattgtcgacatgatatcgacgtgaggtcgatattatcaaacagaaagcaatcaaatcatattgtcgacaagatattgacatactgtcgacaaattatcgacattttaggtcaacacttttattccaattaagtcgacatcccatcgatacaccaacgacatcctatcgacatacactaacaacacagacaattctaatggtcaaactactttcaatcttggtcgacattgtatcgataacctatcgatatctcatcgataactttgtttgaacaaacagacaccactgatgaaaatgcagaaaaacatccaaatcgcatacacaatctaaaacaatctaatctaaagaacatacacaaattcacatccaaatctatgaaa

SEQ ID NO: 175098 - DNA, 509 bp, Cannabis sativa
  modified_base (386)..(386): a, c, t, g, unknown or other
aaaattaatattaatttataatttctttcaagtcggtccttgcacgtggatgaggatgttgtgagggacctatttgttagtcgtgatcaggaccttattttgtccattcaacttagtgattcggccgctaatgatggttggagttggcgaattgagacttgtggaaactattcggttaaaagtacatataaattcttgcaagaatctaagggtgcttggtgccgagatgccaatactgatttttggaagcggctttggtcattaaaaatttcacctaagattagtaattttttatggcgagctatttcgggcgtgcttccaacttgttttcaactccaaaagcgtcatgttcctgtcaatgctgactgccctttgtgcaactctantactgaaactattcaacatgcgttggtggaacgctcgtttccaaaggctgcttggcatcgcagcatagtggatgtcggggctagggctgcaacgttcagcagctggttgttgggaattttcac

SEQ ID NO: 175099 - DNA, 862 bp, Cannabis sativa
agagagagagagagaatttgatttcttaattttttccttttcctttgaataaaatgaaataaacatatgtttttctaattaattaaaatgaaaatcagattgtaagacttaaataaaatccacaaaaggacaaagaataaaatggccaaaaagattattttatccctcactaattccaaaacccttctaagtcacttaggggtattttggtcaattctaaaacctcgactaatcctgatactcaatgtctaactatattgccccgctattactaaaataccaaaatgtgattctattggtcaaacgccgcgttccaatattgtcaggcacaaaatatgcaaaacataaatttaatgtatgacataaataatgcatcctgaattcaactaaatctccataatatgataaatcataactaatatgccaatttcataattaaattgtaattatatgctaatttccaaaacaaagttaagcggtctttacaattatcccccgttaaaacgatttcgtcctcgaaatctaacttgaataactctcgatattgagccctcatgtcggactctaactcccaggtgccttcctccaccttactgtctttccagagcaccttgaccaaagctatggtcttgttctgaagtactttatattttctgtttatgatctgaattggttgttcttcgtacgagagatctggttgtagctcaagattctcatatctcagcacatgtgtgggatctgaaacgtatttccatagcatagagacatgaaacatgttgtgaactgctaaaagtgttagaggcaaggctagacgatatgccaccagtcaaactttcttgagaatttcgaaaggccctgtaaa

SEQ ID NO: 175100 - DNA, 575 bp, Cannabis sativa
atgagattatctttacctttttttttatgtcacgtgtcacctgttcaaaaatacggataacaatatatgtctaaattttgaagtgcctatcttatatatgattcggtcagatgatttatgtaaagaccgcttagctttaatttagaaattagcagattattagggtttaattataaaacttgtttgtcagctttgaattatttatttacgataatttatttgaattcagaatgtattttatatgtcatatttagaatttcataattttgcatgttttgcgtccagcaatattgtaacgcggtgtttggctgttagaatcacatcctagtatttttagtatagcgggatagtatagttaggcattaggaatttcaggaatagtagaaattttagagttgtccaaagtacccctaagtgatcttttatggtttttagtgtgggaggagcaaaatggtcattttgccaattttttatttgtctttttgtgggttaaaataaggttaataatttgatttttgattaatttttaaatatgatattttaataaaataaaacttttttctttatcatttaat

SEQ ID NO: 175101 - DNA, 516 bp, Cannabis sativa
ccgcataagagaattgagaactctctggctgagttggagaagggcaaaggtaaacgtaagtcaccagtgtcgcgatcacgatcccgtagtcctagagggaagaattccagaggaagaagcccgagaagacgcagtccacagagacagcgaagtccgaaattagccaagtcccctccaaagaaggaatcatccccgaaaagaaaaggcagtccgcgctttgtaaactatacagagttggcagtccctcgggaccatatctacgccatcaaagagaagaatggggtcttcaaaaagcctcccccaattaggggaaaccgcgataaaagagaccctaaaaatttttgtaagtatcacaaagatattgttcacactactctggagtgttggtttttacagaacgagatcgaagagctaatcaggagaggaaaattcagcaaatacaagaagaatgaggaaagtcatcctcgagcggatgacaaagaagaaaataaaaatgcgagtggttcaagaactcct

SEQ ID NO: 175102 - DNA, 590 bp, Cannabis sativa
attatttgatacaactcacaccaagactatacattacgtctcaccacttgatcacatatatatcttaatacgaaatactatgtcaaactaaacttcatgacttgcaagtttattgaaaattatcaatttgactatattagagtttttaaagaaatttgaatttatatgcattaattcattaggctaaaattatttttctaaatctaagttaattcatattggtagaatatattaatattttaattataaaactcatttctaccatttccatttcaaacacctaattctctctcttcctcccttatttctcttgctccctgaactcactctaaggattcaaacccacaactcaccacccacaacgttggtgtcccttctctttacgaccaccacgactactaacccaaggacccccatggagtcaatgaccatcgtggatccagtgacttctccatcaaccacggtttcaccatcaacaatgttgtcaaaggaataaattgtatgattaatgttcattatttgggagtagatgttagatttagagttgaaaataatcagatctgagttttgggcaaaaaacaggtcttgaa

SEQ ID NO: 175103 - DNA, 688 bp, Cannabis sativa
  modified_base (654)..(655): a, c, t, g, unknown or other
atataaataatattatgtgagtgaagaaaaattacatatctttatatataataatattgtatttgtagtatatatggacaacgttgtaactttcaaaatggcaagaaaataatgtttgcaacaaattataacccatatgcaatatcactatccttgtttttattattggcttttgtactatcaacatgtataaatgtaccttacatatatatataactcaaaccacacaaattccaaaatcaaatattgctattttcagtcttatgtgtggaactttctaaaccacatgaacatttcatatatgatatagaaaaattatacaatggaccccataaaagggatctattgttgcacttgttatctgttttgaattttttgtctaaatttttttctagtcatctatgtgttgtattgtagttatttaaaaaaatttgacacgctgaaaatagggttcaaacagtctattttacaagcgtagaaaataaaagagtctcgagtgcagcaggctggttgaactctgttttcggcgtgttaattttttttgaatttctcaaaattttacaggtcgtcttaaatatatataactataatgtagacgaacataaaaaaaattaaactaaaaaattctcttaaataccaaaataaataaaaatnnattataaaccccttttagaagtgtaaagatcgg

SEQ ID NO: 175104 - DNA, 530 bp, Cannabis sativa
  modified_base (314)..(321): a, c, t, g, unknown or other
tggaatcaacgtcaaatatataatcataccaaaataactgtaaaaaaacattaaaacaaatcaaacaaaacaaaaggaaaaaagaattaaaaaaaactaacaatcttctgcacattcttaacaccaaatgcaatagcagctatatttacaagttcagtcctaagaaatcagaataaaaaactactaaaacaaacctaaaacaacacaaaaacaaatgtaaaacaatgaagcagatataactgcttagaaaaacataaaagaaccgcgcacctcaaaacttttttgtcactgagctcgtcaaatgtatttatagnnnnnnnngaataaaaaaactacaaaaatagccaaaagagaacgaagaagaaatgaatttatagccctcatcttccacacccacagacagaaccaccacagcaacaccaaataaattaaaatgattagaagacatagatatgagaaaaaaaaacctagaacatctacaacaaaaaaggaaaaaaaaatgctaaaacaactgaaaaacaacataaata

SEQ ID NO: 175105 - DNA, 590 bp, Cannabis sativa
aaattttgaggaagaaaaggagaggaattcaaaaatcttaatagctctttttattttctatttgtcaaataaaaagaatcaaaaattaggttatgaaaataagatttgtaatgttctatttatagggtagcttttagagttagattttgaattgaaattgaataaaagtagataaaaatagctttattaaatccatcatggttgaaccctatgtgggttatagtagatttcaattttgccattttattgaaactcatctttcttttcacaaatgtcatcttttaattctaactttataaatgttagttctatctatttaataattataatcaattatcaaataaaattttcatttaacttatttattaattagaccttacaacgtctctcaattaataaaaaaaatcttaaatcctcattttcttctcaaataagcccttacttagtgaaactcataaatagaattctaattgattaattaaaattaattaattgagtctacaagacattattatctcaactagtacaaggaccatgggcctatataatcaagcactcaataagtaattctagaatttatcaagtaaatt

SEQ ID NO: 175106 - DNA, 725 bp, Cannabis sativa
tcccatgagcctctgttcataagccttaacatagatttcgtctagaaattctttttgtattaacgtccacacacttttgagaacataactctggtgtgttagacaaaatcaataaaatataaagtagatgtagctctattactatcgtgacatggagaataaactactatttattttgtgtctctctaaattatttacttaaactcattattcatcttgttaatctagcgagctagtattggccattttcaacgtcaaccgtgtggattaaattacattattctttttacatgtcaatcaatatccaatccgtataaatgcagattttaaattttgcaatccaaaactatctaattatcccaacaagaggatggatggagatcattggattgctacatcaatttaggggctcattgttatttgatagaatttttggtatctctttatggccaatagggtcgtccgtgggttaaccaatcaagctttgatatacaaagctagtgttacgtggattaaagttaatcctctcacgctattcagcaagacttgtctttttttttttattcaagcgtttatatattacatcatgttttacctgggactcgaactcagtaagacttgtctaatcttatgtaattgtgtttgttgaatgaacgaattccattaaaaaaaaaaatatttatgttatatcaaatatgttcaaaaaaaaaaaaaataaaatttta

SEQ ID NO: 175107 - DNA, 649 bp, Cannabis sativa
atttagcataacattttaattcattgcatgttgttcctccattatgaggctcgctcgagatcatggctaatctttaaattagactaggcagctatccaagcactgactggttttggggaaaagctctcagaggagcctgtgcaactgggacttgcactctaggtggcagtggtgctcgagcttgtcgcccaaatcatgtgtggtaatgtattttttatccattcgtacaggtggcccagccatattaggctttcgatctcacctttcgaattttgcattcattggtagtatgtcaaatgttgttgagatactcacatctcttgtttggatccctccataaattctcccagtatagaggaggcagcctctggtagtgagtgttctacctcgtggccaagtacacaatttcttaggtgtccaccaaatcagtatactaagttgatgtcgcccaattagttacactgcggtcgtggtagtaaacgggctaatttcgtatccacagggaggtaaattaccactaaagattagtatagatagaaaaagatagaatttggaatgaattaaaaataatgaaatgatgaggtgagaaagttgatcagataaagagtttggtaaggtagaaatgtagttatacaaatcctattctaat

SEQ ID NO: 175108 - DNA, 503 bp, Cannabis sativa
gctaataatatagtgaagttggggttgttgtgttttatgtctttttcattattgcttcttacaatattctcctttaggctatgtttggtaaggagtgaaagtataaaatttggagaatatgatgaacacagataaggggcggttagaaaatgatggagggaaaaaataaaaatgttaaaaagtattaatagtgcctaattacttatgaaatgtaatttcgctacaactaaatatcaaattttacttgttttagtttaataaatattataaaaaaatcgctaattaattataagacgatatttcagtactaggcaccaccataggtgctttgtggcaatgcttaggaaaaaattctcatattatagttactttttataacactcccaacaactatactctactctattgtttaaaattttaaacgtatccacgtacaaaaataattattaaaattaaaataattaataatttatgttaaaagcaataaatagtattctataaat

SEQ ID NO: 175109 - DNA, 528 bp, Cannabis sativa
aatgggctttgaccaaaggtgggttaacttgattatgacttgtgtttctagtgtgtggtactctatctttcataatggtcatgttatggggccaatcactccatcccaaggaatccgacaaggtgatccgctttccacttacttgttcataatttgcgctgaaagtttctcagctcttatctctcagtttgaaagagagcggttgctacaggggtgttgtgttgcttaaggtgcacccgtaatctctcatatgctgtttgcggacgatagcaatgtcttttgtcaagctaataatggtgctgctagtagtatcctatcccttcttcggcaatttaaatcagcgtctggtcagcaaataaatttgggaaagtcatctgttttcttcagtccaaatgttcatggtcatcttcgcaacagtatctgctctatgctccatatgcctgaagcttctgaaaacagtctttatctgggtctccctaacataattgggaggaacaaaaatgatattcttggttttctgaagaataa

SEQ ID NO: 175110 - DNA, 575 bp, Cannabis sativa
ataattaaattatacacgacacctatactacatgccatccacatatgtgattcgaatcaaaactacacacagtaaagtataatatttagtaaaccataattagtagttctatattaaggatccctttactttaatacactactaacttattttattcatattgtataatcttaattctcttgtataaccttacaaggttctaccatctctaaatgaataagaaattttttgatattaattaattatacttctataattaatgtattcatttatcatacaactacatttcatatattctataatatattatccattaattacttgcttctatagcataaatcccaacaccaataagccacaagagaagcaaacatattgagagaaagtaccatctactaagagatatagtagagagtggtgatatgacggtcttgaagattatgttagaacataacctggtagatctagtcacaaagatgcttccagtgaaatattttatgggtcatataactaatatgggattaagatatatgcccaatttacttttaggacaagtgggagattgttagggttta

SEQ ID NO: 175111 - DNA, 573 bp, Cannabis sativa
atatcaataaactaaattaaattaaataaacgtattttctaaataaaaaacagtttttaaaaaatgaaagtatgtgtaattaatatttaaataacaaatgtttgtagcaataataataattagttgaaacacaacatatatgtttttttattaaaaaaaaattagggtgtctcgttcttaaatctatagctatcgaaagttattttttttggccaggctcgccgactttacttaggcttaaatacagtttggtcgaggttgtgttttgctattacaattagtcttgtctctgatacattcttttgagtattttaatcttatctttatgatatggtttcgagtgtttgtcttgtctatgtaacatgattttattttattttgttttgtttcgttgttggttcttctttatttttcaatggctctccattaaatcactgttagtggttgggaataacaagttttttgcgattgaaggggttgtttgtagtgcagttacgtactttgcacaatagttgagtgctcaagctacgaggttaaacttattgcaaccgtttctactgttgtgtcttctga

SEQ ID NO: 175112 - DNA, 631 bp, Cannabis sativa
ctttaccagaaattcatagtgtctgtgccgggtctgaaaagctatcttgggaatatcctcttcccgaatccttaactggtgataactagatcgaagatcgatcttggagaagacagtctttccctgtagctgatcaaataggtcatctatccttggcagaggatactggttcttcactgtcaacttgtttaactcccggtaatcaatgcacatttgtaaagtttcgtccttcttttttacgaacaaagctggtgcaccccaaggtgaggtacttggtcttgtaaattttaaatccaacatcccaagtaattggactttcaattctttcagctccacaggtgccatcctgtagggagctcttgatacaggctctgccccaggtattagatttatctcaaaattaattttacgctttagtggtaacctgataactcctctggaaaaacatccaaaaattctcgaaccactagaacatgctctggtcccactggtggttcctttgtagtatccactacattagctaggaagtcgatgcacccctcacacaacaagtctcttgccttaagcgctgagattaagggaatccgcgatccctgcatcttacccacaaatataaaggggtcctcgccct

SEQ ID NO: 175113 - DNA, 524 bp, Cannabis sativa
  modified_base (395)..(408): a, c, t, g, unknown or other
ttctttttattttattttttttaccaaacttttatttaatttttttagcaaaggtgtcctttggtaaaacttttgtttttccattttaaaaacaaaaaacaaacgtatgttctgtaaagttcattttcattttcatttttttattttatttaagtcgggtctaggtctggggtcagattcgcgttcgagtcagaagccgggttcagcgccagggtcatgggagggggatttggattcgggtctgatcggaatctaaaatattgattaagaaaaaaaactatctaaaaaaaaattgaaagtgactttttttttaaaaaaaaaaattgattctcgattaaaaaattaaaaagtgaaaacaatattatagaatatgtttttgaaaaatattttcactnnnnnnnnnnnnnnaacaaaaaactaattaaaaaagtgttaccaaacgccactaaagtattttgttgacaaaaatttggttgttacaatatgaggactttagacctctttatatagtgtaagatatcacc

SEQ ID NO: 175114 - DNA, 524 bp, Cannabis sativa
  modified_base (463)..(464): a, c, t, g, unknown or other
tttacggtgttcatcaaaataacacaaaactaacaagaaaatcccatgcaaataacatccaaacaacataagaaaataatatacaaataacaaagaaccaacaacaaaataacaagaatacaacataaaaatgaatacatcaaaaagtaatatttatgtaaataaaatcttaaaaattataaaaatatttaaaataccgtacaactgtatttttgtaattttttattattttttaaacaatcccataaaaataaggaataagttgagaactatcttttttaattacacatcaactaaatataactacaaaataattttgattgatatatatcttctcttataattaaaatatcaaatataaacttacataatttatgaaaattagaatccctaatgtatataataggaatataactaataaaattgaatacaaattaaaagaaaaataaaataaaaataaaannaaaaataaaaaataaatatacaatataatttctttaaaaaaataattgattaaattaact

SEQ ID NO: 175115 - DNA, 512 bp, Cannabis sativa
agtaagcatacccttccaaaatgtgaaatatgcaattagctcatcatgaatagcatgacatatttgaaaattggatctccatcgaattaagccctacatattttaatatgaattatataagaaagaacacttagctgggtttgggccctaactaaattaaatatcatgcctatagtaagaaaaaaagatttttacactacatactcaaatttcctttttttttttttttttaccgtagagtagaattttttttttaaatattgtgtttttctaaaaaatactgtattttttatactgtgtattgtgataagttttcactgttattccacggttgtttttttaattattctattgttatttttaattgttcacttttgttgttttacaaatgttttatataaaaaaaaaataatatttttataataaaaattttcgtgtggtaataaaattataaattttgcctaaaatccagtatttttataaaaactcctaagaaaaaagttccaaatttt

SEQ ID NO: 175116 - DNA, 659 bp, Cannabis sativa
aaaaattgaaaactaaagattttatattttacgatcgaaaaagtaaaaaatttatgcttacatacatactcctatacaatgattatataacttaaaagattataaacatatataatagaacattttaatcaattatttattataaaattatggattaaatgagtattatatataaacatatattgaaaaaaatttatatgtataagtcactatgaatataaatgtgtatatatataaaaataattattgttttaatgaataagaaatagtagtattaagtttatataacaattctaacaacaatacatactaaaatgattaaaatcgattttttttaccaatcttctatgaatagccaaaaacacagatatatatatttatatatatgcatatacatgaaaaaactcaaaataattaagacataggtttgataccaactgttatattacatatataatataaagcatatatgatcgtgtatgaaaataagaaaattaaatcgaacatatatgcattatgaataaagaatcgaaatatctctagtcattaattttttgagtttcaatctcacacgagctttggatctacaaaagaaaatgaaactagtttgtgtgtgttgaattgcctattgagctgtcttgccattgatgaaccagaag

SEQ ID NO: 175117 - DNA, 608 bp, Cannabis sativa
agctagaacgagaggcagcctcggtcagggcagcgtaggggacgaacactcagaaccaacctaaacttggagtgagaagaccacgaggcagacctcgtggctcacgaaccaggagtcaggaaaaggcccgggaagaacaacccagggaagatgagacaccctctgagaattaagatgaacagccagaaaggagataatcaaaaattgatgaactagaaatccctcatgaaaatgaggaggatcttggaactcagtcgaaagaacggagatcacctgctagaaatcaccagcgttcttcccaaacccatagagcgaggactcgtacctaccctgatgggggaaatacgacaaactgctctcggggggaaagaacagagcgtgaagaggcaagtgtgacttcaagttgatctagaactcatagccgatcaactcgaagaggagaaagtactcaacgagctaatgatcaggagagtacgacaacaagtaactcaagaacaaaatctataagtagaacacagtgaatgagtaagacaagatctgccagcaattattcccaaccgaatctgcgagagcacttgaatcggaagaaacctgaccttctccaacag

SEQ ID NO: 175118 - DNA, 526 bp, Cannabis sativa
acgggttgaactcaaagataagacgtgatttaatgattactactgacgtcagcaccacctatgctgatattgtgaataaggcattgtgagctgagggtgcggtggagtgcaccttagagtctcgggggcctccggttgttggcggggctcctactcctcctatatcaggctttagtaagggaggtagtggctcggccactgatcagaaaagaaaggcacttactgcattcagtggctcaggtcagaacaagaggttcccggggaaccagggtcgaggtaactgtcagggtagctctgaaacccgatacacttacccagagtgccctagttgtaaaaagcaccacctgggggagtgtaaagggcaggggtgttctcagtgtggtatgtccgggcattacaaaagggattgtccccagctcaggactgaagcaccaaagactgcagcaaaacccactccaataagggtgttcgcgataactcatgctgatgtagaagccaggccttcagtgataacaggtcagctttt

SEQ ID NO: 175119 - DNA, 507 bp, Cannabis sativa
aatatgaataatatctttaaaaatagagttagaattgaactttaggggcgccaaaaagaagaaattaaaatgaaggggtcaactataaattttaaagcaagttgtatataaagtagctcactcctaaatatcttattcttagctaaaaaaaactgtttatacacctaaaatacaaacaaagaaaaaaatagtatttttatcttttaaattttcgatactacttaattttgtcccttaaaatatgcaacttgttaaaattcttcttaaaatataacagttgcataattatgatctttctattaggttctgtttcttttgctattaaaagttaatatttttactttttaaactttgaccaatacaaaatttggcttcttttattaaaaaaattaattttaaaaattataactattaaaaaactgataaaaaatattaaattatttaaaaagtattaagtttacttaaaataaacctaaattattattaaaaaaatattttaaaatttta

SEQ ID NO: 175120 - DNA, 588 bp, Cannabis sativa
  modified_base (354)..(371): a, c, t, g, unknown or other
tgatgatgacttgtgagtatggatattgctaaactccattttttaaagccatatattggtaacgatgatgatgatgaaaaatagtttcagtcatggacattgccaaaattttatataaaaataaatttaatttttgtaaaaaaaatttataaatattataattaaatggtttaactgttaaaataattatagtaaggatttatatataaataaaaaaaaatatttataaattttaattactaaaaaaaagtcttgttaaatatttatttaattataattaattaattctaaaaataaaatttttacctgttcataacctgctattgcaggtaaaaaaaaaatataaccatgatnnnnnnnnnnnnnnnnnnaccattgaatagtcacccttacaagatttaaatataagaaacaatatcttcaacaaatttctttttttttgttcaatcgaggggcttgttaatttatacataaataaataatgaaaatgaattgacaatatctagttattttcgatttttttttgagattttttgtttattttgtatgattttaactaaaatagtgtctgctttcaaaaaaaaaaaa

SEQ ID NO: 175121 - DNA, 646 bp, Cannabis sativa
ccattgggtcttggtggcagaccaggaacttgttgaggttccctggggtgagcgactggtgccaatgctctgggcgcaccccctggtgctccttggggcaacgatcctggtgtttgaaccgggttgagatgaggtaaccggttctttatccactcataaagatggcccaatcgaatcaagttttcgatctcatctttaaggtttttgcattcgttggtgttgtgtccaatgtcattatgatactcgcaccttttgttgggatccctttgggagctatctctgtacagaggaggcggtcttcggtagtgcgtattttgcctggtagcgaaatacacacgctcctgggagtccttcagttccgtatactgggtgtattgaggactgtacacccttttctgccgcttgtcctttgtccggttgctaccttttgaggacctcttacttcgagagccttgagagggacctgctaggcttgcagtaggagcggagtgagacgggacttgtccactgatcccagcaggattcccgtcatgagaagatgcaggggccaatgcctgattctgattatatcctggggtagcgaaaaattctataccgctcattggcggagtagctgctgatagggttcctgggagttgagctctag

SEQ ID NO: 175122 - DNA, 886 bp, Cannabis sativa
  modified_base (369)..(370): a, c, t, g, unknown or other
ataataaaaaaaaaatatatattgggaatatatatagactatactaagtaaattatataccacacttaaaatatatatcatgatgacaaaattatataccagcaatgtatagataataaaatagaaactaattaaatatcatttaaaataaatatatatcataaaatatataaatataataattaaatatatgtagcatgccaataaaattatacacatacattaaaattgtttatgataataaaattatatactactattatgcatagcaaaataaaaaataaatataatttaagaatgataatatactatacacaacagaaatatgctgtacaataaaatctatatactaacaacccacaacaactnntaaaaaattaaaaaaaatcgacataactttcaaataaaaaagattttaacaaaactagtatagatataccataatctttaagtaatttgcttctaattctaaaaataaaatatgaaaaaaaaaatcaaaagataatatataaataataaataatctaaaagggtattttattacaagttttgaaataagaacatttactaacatagccctataatttggggtcatttactataattttccttagaaaactctcactttaaaattatatagtctaggttgttccatcagctgaaaaaaaaagttaaagttttcggcaaaaaaaataagataaaaaaaagttgagtttgatttaaatattttgcatataaatatatttttgatagtgtaaaaaaaaatatttttttaattaaatagctaaattatgcatataaattcaaatctttctttattaaaaaaaatcaaattttgtttcattgtccgttaattgatcaaaatctaataatttaatatttttaa

SEQ ID NO: 175123 - DNA, 705 bp, Cannabis sativa
cttgacacatggaaaaatgctcaatcaaaggatttaataccattactgaatgttaattttagtaatggtagggagcattggatgaaaccagttacaactaattcaaatcgatttccagcttcgaagatagccctgtcgacgttgatcttgagcttagttgtaagggtatctcctgagattgctgaagtggttggagtgaaggaagctttgagttggataaagttgagaaatttgtatgatgtggaaattgaaactgattctttagtagttgttcaggctattaatggttcagttcaaatgccatctcaatttggtttacttattcaagattgtcaaatgcttctttcagcattacataatgtctttatttcttttgttaaacgatctgcaaataaggtcgcttattgcattgtgagatggttttgttttatgtccaattgtatttttgatgagctttctgctccatctgatttgctttcaattgtaagagatgataatttttcaagttgattaataaaatttttcttttaaaaaaaaataataacagtttttctcaaaaaaaaaaaaattattttttattttattgtatttttttttcttaaaacaataatctatatatctatatatttatataaaggaatgcacgagacaatgtgaggtggcattctaagaattcatttctctatgttttcttttttgttattt

SEQ ID NO: 175124 - DNA, 517 bp, Cannabis sativa
acaacttgttacatttttgtgaaatattttaagtaaatatacaagaagatttaaatcaccattactccttgtcaaaatagttacttatttaccaatcaactggttgaaattagaataacacattaaaaccaaaacatcaaactaattattgctattaaaagtttgaacatgactttagcttgaataatcccaattggcagagtgaattaaaagaagcaatttgatgaaaatctttgagactcaattataatcatcatcacccataagtactgtttcctctcctgcaaatatgttgattagtattcaaacaaatatatataaatcaaaatgtatttgctgaaatcaattacctgccttcaaagtatgtcttattatgttctgtttcttcggttagtatgttttgtacgtgttgaattttgggccaatcttccccagttccttccttgcacctcggaattaacagactacatcctcctattgacaaataattaacactctgaggcagttctgttggtgg

SEQ ID NO: 175125 - DNA, 766 bp, Cannabis sativa
  modified_base (733)..(737): a, c, t, g, unknown or other
acccacttgctagattgcgagaatgaaaaggtagttaattagtaattataagtgagacacaacaaatttatagtagttcactccatgtattgcgatagtaattataagagagacacaacaaatttatagtagttcactccatgtattgcgatagtaattgagctacgtccactttgagtttttatttttcaggagatagttattacaaaaaagactaagtatcataagctcaaatttctacaaagataagctatgaccttgtggggtagtttactaaaagtgaaaaacgagctaagggagctctctttctataagtgaaagaggcccataaaaataagaaaaaatacaaattgaatgtttttcattgttgatgatgatctaacggtgaaaattaactcttagtggtaatagccatattttggagctcggaggtcccgcagtgggtaacccgaagcttatttttgtaactcccttaggtgaattttacatttacaattacatcacttatttgcatgtccattgaagatgttctcgttggcttacaactaggtccgaccatgagaatatatgggcttaaggtaaattaaattttggggccttcaaaactatatacaaaaaaaaataaaagaaaaagtgttatgtgatttgaatcatgtccttgtataatatggcttcaacctcaaccaactaagctatgaatatttgttgtttataatacacttaaattttactnnnnnaaaagcctaatatttttttttattttttt

SEQ ID NO: 175126 - DNA, 596 bp, Cannabis sativa
ttttacgaaattctacatagaaacgttcacaactagcgctgtaacttaaattgcaacaaaaaatcgtacagaaatttctattgcaactagcgctgtaaccactttagaaaccctaaaccgtaaatttgaaaagaaaaaaaattaaaaaaaataatgtatgaggtaattctccaaatttatttattatttaatttatttaaataaacactttaaataacatttatgtttattaattattaaaaaatatgtttaaaaaaataaacgaaattgtaattaaatgcagccttatgtataaacaatatatttatattattattgataatgtttattaattattaatctaatatatttgttatgataatatttgtgatgatatgtttttttttactaagtatgtgattatatgttaatataatatgtttattaaaatttaaatataaatttttaaataaaacatggataattattatttattttaccatacatagtttgtacgtaaaaattaagaatatgtttctcatagttaataaaatgtatgataaattataaataatttttttgcacatataatgtaattaagtactataatatacata

SEQ ID NO: 175127 - DNA, 559 bp, Cannabis sativa
taatcttgtttcaagaaagcttgaacatattttcaatgatcttgtccctttttatatatttttattgcttacatgagtagttagatcttctacctacgcgttacgtttaagtacttttttcaaaacaccttgatgtctcgtttaataatttcctttagtgcgagctattagtgttcagctttatacgtgagttatgagttatatctcatttataatttttgattttcctttcccgtcagataagtttttaatcaaaaaattatagttgtttgagccctttctcgtcaaaaaggtttgatcaggaagttataacgattcgacccttatctcgtcaaaaagatttggtgagggagttataacatttcgacccctctttcgtcaaacaggtttggtcgagaacctttaaaaagtttttcaattttttttgaagtggtgggtttgcattatatcatgtatttcttgataattttcggttgatcatacatatatgcccctcaagtaattgtaaagggttatgttttataattacttgttcaaaagaaatgattactttattcac

SEQ ID NO: 175128 - DNA, 729 bp, Cannabis sativa
  modified_base (190)..(193): a, c, t, g, unknown or other
  modified_base (331)..(335): a, c, t, g, unknown or other
cgtgattagtttttcaagatttgtggctggtggcacccttgcatttctagaattctgcagtgcgggacccactactggtggatctacctgatcgaccacgcctctacgagtttgtaacaccatcgtgtttatgatcaaatttgaagtaaagagcaaatttatgactcttgctctcaatgaaagcaccaannnnttgacctcgcttttagccaacgatagtgactcttaataataagcgataaaggatacaattcaaatataatatgaaaagacaaatatagaacataagcttttttaaagaagttcaaccccgagcagttcggtaatagcnnnnnccccttgatttgtattgacttaagaacaaagaatatattgattcctctcttaaagctcttacagtgaaatctctgagtatgctttcttagatctctctcaagtaattctctcgaccccttttccactaagaatggatcaatatttatagggctatatgcttgagggaaggtttccctttttcttacaatatctataattggtaagaatacatattacatatttagaatacaatgattatgggatttggacagctagccatatcccagtgatacgatcccagatttatagggattgttcttatgcttcacgatgcaaatgctgaaattgctaagcgttgatatgctgttcggattaaccacggctcggctgggaggaccttgtccgtgcaggtat

SEQ ID NO: 175129 - DNA, 500 bp, Cannabis sativa
  modified_base (468)..(474): a, c, t, g, unknown or other
aaatatcaaggtttagcgaaataatggaattggaccatattacccccagggctacgagataacttggcaaggaaataagggcattttagtcttttcacccttagagcttagtcactctttttggaagggatagggggctatggatcatccttttgaggatgaccagcttcttaggaagcaaacaaaaatcaaaagcaaaattaaaaggaaccaaaaagaaaaagcaaagtcaaaagcaaaagaaaagtaaaaaaaaaacaccaaatcaccttctccttctccttctccctctacttcatggcttctaaatcagggccaaaattcagatttttaaaccattttcaagcctcttcctagttggaattcatcaaggagtttaacccctagctcctccaaatttttaaggtaaaacctaacctgaaatttattggttttctagggtttttgttagttttcagtggctgtttnnnnnnnaacatgttgaataagtttaggaaggt

SEQ ID NO: 175130 - DNA, 606 bp, Cannabis sativa
caccattagtccccctctttctctgtgtatcacttccttattttcttcttattcttcttttgtattttttttcagatcgacgacgtacgccgttattggggaagaagatgctcctaggatgatgccggagctaaggatgacgctgagctttggacgtcggaggttaagaaatattgttctcatataaattataagttagtcatcttttctttgtttgagaggtataaaagttctttttctctttaattagttttcttattttgtctctttttttttattatttttttctcttctaggatggtcactttccatatcaaaggcaagaactttcaatatcattgtaaggtgtttttattgattttattttttaaatagggttgtttagactaatttttttttattattatttatgattaataagaatttattgatgaatatgatatttatctttgttagtattgtatttttttattcttccattgataatttggattattttttttcctaatgtacatgttgtttatttgagtttatttattttgaaagatttttgttattattatgtattgatacttgtataaaaaattatttttgctttatatcaat

SEQ ID NO: 175131 - DNA, 572 bp, Cannabis sativa
tggctcaaactttgtacttggacacgaataagacatttcatgaacatatttgaggtaacaaaatcagaatcgaagcagtttcaattctgagcacccggagcaccaggtgccccacgcacccatagcccaagttgacatattgtcaacctatggcactttcaaccacaatactaaagaactatcctgagcattttcttcgtcttcatccaaaacatagaaataagtactttttggggagaaacagatcaacttgagggccaaaatggggacccaacgcccaggttgacatgggagctgggcatagcgcccacgttgacactttgactacccaggccacttccattagtatttcagatgaaattttcttggcatattctctgttttcgtcaataattaagatttgagtgcttttgagaaacaaatggatgcccaggttgacctggtgttgggcccaacatccaggttaatactttgtcaacctaggccatttttaaggagttttttttagagtcttatgggcatattctctattttcattaaagattaagataaaaatgtttccaagaatcaaa

SEQ ID NO: 175132 - DNA, 696 bp, Cannabis sativa
aactataatttgatttttcttgtaaaaattatatactgagttgttagtgtaattaatcaaacataagtcaactagttataatcactataaatttgtgaatgaaaaaatagaaaataaaaaccaaccaattatgtgatacaacataataactaacatttcattaactacgaaattaactcaagtggctataggattgaaattcaagttgtacaaaatatatacaaggttggccctaggtataggcaggctaagttcgtgcctagggcccacactatacctagagcccccactttttgggggcacaaaataaaaaataaaaaattttattaggatcttaaataaaactaaatgaattataaacattaaatattcatagcttagttcgttggggtgtataatatattacccaatgttatgggttcaaatctcatgatactcattttcaatatttttttatatatatttttaatagtgacctcgaaaatctaattcaccttaagctcatatattctcagggccgaccctgagtatatataaacattttaataaataaaaaaatatttgattgactaaatagtccaccaatattgtgttagacatttataatgtataaactgaaacatatgtatgtgtatataccatgcggaataaatgaacatatacactatatgaatataggatcgaaatacctccagc

SEQ ID NO: 175133 - DNA, 640 bp, Cannabis sativa
atctatttcggcatggtaaaaaactttttagttcaattattttttttcatgattgtgtacgttatagttatttaggactacttttaaattatgaataatttacaatgttgataataaggtctaaatattttgttacacactgaactattttttcttatatgcgtggtaagtaactatttgaaccttattttttggtactgtaactattccgaattttttgtaaacttatagataatcctaaatagctacaacgtacgcgattatgaaaataatagactaaaaaactttcttaaatattgaaacaaattgggaaagtctactgaacatccactaggagtgtactacaaaaatttcctacaatttattaatactgttcattttctacattacaatttttttttttatttttctatgttgcaatattagggctcgtttggtacgccgtataagggtcgtattgatttaaataataaatagcactactatgtttgaataaagcaatgtattgtattaagtattatgacgaaaattttcaatacaatgtatgttgtattatttaatacataacaagtggtccgtattagtttgtattataatatttacaaaagatttgggatcaatcccaatctccgacccagac

SEQ ID NO: 175134 - DNA, 545 bp, Cannabis sativa
tgtccatttatttttcctatatataaatagctataatttattttctaattattataagctccaccgacagtacccagtaaaacaaaattagctagcattttatttaaataaacaaaacttaccatttcatgtaatttgtcaatcaaaaaaataaaatcataattattttgttgtaaaaaaataaaaaaaataaattagtaatttgtgacgtaaatatttaagtttaactttcaataatactcaagttcaatttttaatcgtaataatacctaaattatatttttgaaactcgcgtatgtatccgacgattagtaaaattattatttacatgtcattttttttaatggtatatttaaattaacttttaatctgatcgttactgtcacataattattgatttatatttaatggtagatgctactgaaattcttgagtattattaacgttaaaaattaaatttaaatatttataaaaaaaaattctttaaaataaaaatatgtacactgagaggacctcatatgaaaatatgggtatcttgtttttaa

SEQ ID NO: 175135 - DNA, 714 bp, Cannabis sativa
ttgtactggctccgggttgtttttcaaaatgctttcttctttgctcgtacactcaactacaaaattcgctaaagcctgtcctttgattgctatttggggttgaaagattatttcatattgacccaattccactgcccatttgagtaaccgtctagaggcgtcaggtttttgtagtatttggcgtaatggttagtcagtgtatacccgaacaggatgatcttgaaagtaaggccttagctttcttgttgctaagattaggcattaagtgagcttttctatcagcggatatcatccttcaacttcaacaagtcttttgctgatgtagtagaccagatgctggatattgttctcttccctgatcaacacggcacttacagcatattttgtaacagctaggcatattcctagttcttctccgtccagaggttttgagagtacaagaggttttgcaagttgtctttttagctcttgaaaggaattctcgcattccaccgtccattcaaatttcttattccctcgcaggatgttgaagaaaggaacacacttgtctattgacttcaaaacaaatctattgagtgcggctatccgactagttaagctttggacctctatggcttttataggcgatttcatatccaagagggcttgaattttttctagattggctttaataccttgagcattgacaataaaactaagaaacttacccgagct

SEQ ID NO: 175136 - DNA, 580 bp, Cannabis sativa
aaaagaataattgtcatcctaagtacttataaataggggcagaattcatgggaaaagggatggcaaatttgagagagaaaatattgttattcaaatactgatattgtattctgtattcaaaaaagttccttaataataaggactagtggagtatatagattttaactacaaaaccacgtaaaatatctggtgttatatttatcatttatgacttatttatttctgtagtaaatttattacgaaaaggctattaatttggttaacgaaaatctagggctgttcaaaaaaaattacaaactgcccaacccgaataaaccgcccaaactaaactgaataaaccgacaaaaaatataactcgaataactttacaaaaaattcaaaccgtccaatgaatatattgggcaagttgaatattattctaacccgcccaaataactcgaataaaccgatttacataacttttactaaaattatctgaatataatatgtaaattatgtttaatagttaaactattttacatttaaagtttgtattttatagtgtttaatttgaaatttagaatttataattgataatttt

SEQ ID NO: 175137 - DNA, 500 bp, Cannabis sativa
  modified_base (316)..(320): a, c, t, g, unknown or other
cttatttataggttccactaacaaactccaaacttaataattttttactttttattttatatctatttaaaatttgattctaataataattttttttaatttcaaatttacatagaaaattatttttattacatttatttttaaaataataattatacttatagaaaattataacatattcaacttacataaaaattttataataatcactcttaaaataattaaaatattatgagttcaatactttagaagtaatattttcttttattttcttatatttaatttaagattttaattaatttaataattttaaaannnnntcatattatattaattaattttattttttatttttttgtattcaatctaatctatataatagctcaaatccaatctaatcagcaaaagtacatattgaatgcattatttttgattggttactttttaatattgaattacttaaaattttaattctttttcacataactaataacaaaata

SEQ ID NO: 175138 - DNA, 543 bp, Cannabis sativa
cacttcttatcataacccaagcaaatcgtcatagtttccaaaaagtcccactcaactctatcgtacgcctttgacatatcaagcttgacgaccattttctttccatttccaaaacaaccttttcgcatacaatggaggctttcaaatccaataatggcattatcttgaataatccggcctccaatgaatgcactttggttggctgaaatgacggagctcatgctttgcttcatcctatttgctaaacacttcgagatcactttgtatatgacattacatagactaataggacgaaattcagacatcacggtgggctgttgaactttcagaatgaggcatatcagggtttcgttgagcattctacagtcggcatcattgtttaacacatctaggcaggccgaggtgacttcttcgcctactacatcccagtttttttggaaaaatgtcccggaagaccatctttaccttgagctttaagaggatttgcttggaatatggctgactttacttcatcactagtaaaaggtgttgggttttatgccc

SEQ ID NO: 175139 - DNA, 540 bp, Cannabis sativa
aatgcatgtcgttgaccaagagtgtaccggcttcaggactgaaaaggggggaaattgttacctggtcatgcccttcggattgaaaaatgccggagcaacctatcagtgcatggtcaactagatgttcaagggtctcttgggacaaaacatggaggtatacgtagacgacatgctggtcaaatccaaaacatgcatgggccatgtagaccacctgcagaatgctttgaggtactccggaggtatggtatgaaagttaattccaaaatgcacttttggtgttaaatcagtagaatttctagaattcatagtgagtcaatgcgggatagaggcaaaccctgaaaaaaatacaagctttattgaatatgccttccccaaagaaacacatggacgtacaaagcctaaccgggaaggttgctgctttaagtcgcttcatctcctgctcaatcgacaagtgcatcccgttctttaacatcttgaagaaatgtcaaaaagtttgaatggaccgaagaatgcgaagaagcattcaaaaaattgaaagaa

SEQ ID NO: 175140 - DNA, 506 bp, Cannabis sativa
cgccagctacgggtttcgatagaaacagatttgtaaatgaggaggctcaaaatcgtttcatgaggctcaaaataaggccttacattgaagatcggggtattgaattccctgaaaatcccttgaggcgtcaacctaggttcgaagcaattcgggctcaaattgagaggaagaaatggggtagtttcgtggatgctcggggccgggctaatgtgactatggcatgtgaatttctcgtcaattggcccgagcgcagaaaaggagaggtaaaggtgcgaggaaagaaggttcccgccattgctgatgcattcaacgttatgttctctgtgccggattattctagggaggaacaacgcctccgaattattgaggaggaagagcagtttgatttggtggacgtggctgaaacagtgggatttttggggttgaggttccacgataatgatggccaagacggatcgccaaacattctacacatgtgtgagataaacccggtggcaaagacatgg

SEQ ID NO: 175141 - DNA, 502 bp, Cannabis sativa
atagttaaaaaaaacttctcaatttttacatatttgacatatttgcggcagtaaaatatttaatgtttacaaaatgtaatacttaattatttataattttcttatggtagaagcattttaataactcttaaagagttaataaaaatatataaatatatattttatttaatattgttgtctattaaaaaaaataaaaaatacaaaaaattatgagtattcgagattaataagaacactcatgttcaaaagtgtgagtattcacttagagtggcaaatactcaaaaaattaaatgtgaataagcgaataaaaacatcagtaacgtaaataagacaatgaataatagtagttcagtcagagcttaatctgcttagtttacttttgtaagaagcgtgtatgttggttatgaagcttgtatgttcttgatctgggacgtacatttttatctggttatatccagagtatgcgtccataaatgacataagctcgtgcccagtagttgca

SEQ ID NO: 175142 - DNA, 546 bp, Cannabis sativa
  modified_base (481)..(513): a, c, t, g, unknown or other
tgtcttttcgatggtatttcgacaacttgttgatattttgtcgacatgtatttgtgttgcattttttgagatattgtcgatgccatgttgacattatgtcaatacttatgtaatttatttattatattactgtattcttaccatatttttttatggatatattttatcaggccactgcttcaaaccctcagcccactgcatcatctttaggccttggtggtgccgagtacaatgaattagtggggaggttggacaggattgaggctgaccagaagggtctttatgctggtcatgccaagctgaagatgatgtatgagaacagccatgtagagctgaagggtggggagaacctcattatggagcagctcagaattatttgagcatgctgcatcgtacgccaatgacatctccaacatcggagcccccatcagctgcatcacccccactagcaactgttgcgatttatgccctaaataaaacnnnnnnnnnnnnnnnnnnnnnnnnnnnnnnnnnaagatcagaaataacattttatattgcatggtt

SEQ ID NO: 175143 - DNA, 527 bp, Cannabis sativa
aggggtctaaaatttcaaattctagggcaattcaatttttcattatttctattttggtgaagttcatattgttttattttattttgtgaataaataaatttttttttagaaaggaagtttgtggtaacttttattaagggaaaaacaaagttaaagaattgttagaaaaaaaaaaaatggaaatacaatattggaataatatgaagttaaaataagaagatatgtttaagatcttgaagtaaattcatttaaacataaatattatttaattgataaatattagcataattattgtaaactattagtagaaaatattttcaagtggggttttcattctatattctatataaaatatgactatgtaatagaatttttagtttaacgatctttttagtttcctaagttaactttaatcggatattctattacttaacaaaatagtctttattaatttttattatattattatttatatttaaagttaagaattatgtagataaaaattttatagatattttatataaaaa

SEQ ID NO: 175144 - DNA, 588 bp, Cannabis sativa
aatttttttataattataatatttaagttatattattagaattttggtagatacaatcaacaatttcacaatgttaagtattaaataattatctatttattatttttttattagtatatttaaattaatttttaaataaaaaataaaaatttaatgactttaatcgatcaaggactgttacgtgattaggaatgcacacgagatgaggagtgttgttctgttcacattcccattaagaattttaatccccatccccacttatttttcatcgggcatgcgcaaaggatcctctaataggaacaaagacggggcagaaacacaacttaaaaatcataaaaaataataataatatactaaaaaaaatacaaacataaattataaaatattattagaaatattattatcctcttaaacttatttttctttacgaatttgagacgtttgttaaatattacggttaaatactaataaaatgaccaccgtgtacaactgtgtatacatgaaagtaaaactttaaagccgatacagtaataattcagttggtatttaatggtgatatccaactaacactttaaatttataaaaaaa

SEQ ID NO: 175145 - DNA, 508 bp, Cannabis sativa
atctagaatattcttgtaatattgacattaggctatttaatgaaatgaaccctgcagtagcttattgagctatattttaataatacatatcttcactctaaatcttaagttacctttcccccttgcctgaaatattttacaaagttgctaatggataaaactatttctccctaatcagttaactattgaaaaagtttcaactgattacacagaagaagcaaattaagtaccttcttgaagctgcagaagttaatgatgaagtgcttgccatttctcggagagacccaatctcattaattaataagtcttggagccaaggaagaagagcagcaataactataaagaacctgttgagtcgttcaaatagaatatgcgtttttttttttggaaagaaaaataaaatatgagataagtttggatagtactatatattgactaggcacttcaatgtcagtctcaaaaatattttgggttaagggtgcacacgggtcgggttttcgggttttcg

SEQ ID NO: 175146 - DNA, 510 bp, Cannabis sativa
ctaaattgtttatttaaaatattggataattaaaattttagtctttcaattttcacatatatattaaattttgcccctaatttttatatccttataactcttttcaagctattaaaattgttggatcaaacaacttatatccaatttcgttcaattttactaatgatgtgattatctatgtactaaattgtatctcgcagactttaaaatatatcaaattatgtctttaaattttcaactacgtcagacatccattagtaaaattagaaggaagtccttgaacttaacaatctcaatagttcgagaataatttttaacgatttgaaaagtttcgagatcacaatttaatacatatcaaaattcaaatggcaaaaatttaaattagtctaaaatataatttatatttttttattttataggaaaataatattagaatgtttactatttttgttatactaagaaattgtagtttatttttttttatgataaaaatataaaaaatactattca

SEQ ID NO: 175147 - DNA, 585 bp, Cannabis sativa
ttagcttctctccaaaaataaaaccaacaactcaaaaaataaataaataaaaaaataaaagatcaacaaattaattttacaattatacctgtaatagttaataacatagatgcaggttgattgattgcccggcaacgacttaatttatggtaccatatattatataagagtaattagaggtataaatacttaagtttaatttttaattatagataaatacttaagtttaatttttaggggtaataatatatttttgaaagtcggtagatacctgaccattaaatattaaatcatcattcatatatttaaattatttttttaaaaaaataaaatttaatgactagaacaattaaaattatcacgtaataatttatttaacacttacaagtatctataaaaattacagaattataacttaagtattattacgattaaaaattaaatttaattatttatttttaattgataattaaatttattaactatttaaattattttattatctttatatattaaaagtgtttatctaacgaaatttcttggtttaacagaatatacttaaaaggatattctgttaaatttaac

SEQ ID NO: 175148 - DNA, 631 bp, Cannabis sativa
tacaattgtacatgattgtgatgttgctttcatccatatttctccattgatcattaattgtttgtgatttcgtgtaaatctatcttttggtttttctttgtctctatcctcatattcagccacttgaccagcaaatgactcaacttcctacaaacacaaatatagttgattttaggttaaatgaaatcattactatgtgttatactgtaaaattaattatttgactaaatacaatgtaactatacaagcaataatccactacatggtttccattgatcgaaatgtctaggcatctaataataagatctatttttgttcaattatcatataacatagtcaaaactatgaattacactacttgttgtcaaattagttttgagttagaacctttatacatgagcactaacggagggaggaattagaaaatgaggaggcaaattgataatatttatgtatatataaatttgtggttaattaggatttttgccccctaaactttaacatgtaccaaattatgcgccctgaatttttctagcccttaaaaattctccttgaaatattgagattgttagatttaagggcttttgtttaatttcatttaattttactatttcagtaattgtttatgtac

SEQ ID NO: 175149 - DNA, 511 bp, Cannabis sativa
  modified_base (222)..(224): a, c, t, g, unknown or other
  modified_base (473)..(485): a, c, t, g, unknown or other
ataattttttattataacattataggagagaaaataattaactcaacatacgaatatccaatgtgttaatcatgttgatcataaaatttgagcaagcattttagtactagctaattaggttggcaaatgatgtagccgaccacaaagcaattattaacaaaaaatgatcgtaattaattagctatatataatatccattactatacataaatatatatatannnatatatatatatatataatgatctgatatgtatgcacttttcttttgccaaaatatagatgtacgtaagtgatatatatttcagcatatacatttatataaggttccctgtttattataaatgacaacttaatatatttaatagagctaatactaagggtagttctcatatattttagggtaaataccattttggctatgtgttttgtaaaagttattaattgaaccctgtattttgttaaatgacaannnnnnnnnnnnnttttctaaaatagtacaaataagatc

SEQ ID NO: 175150 - DNA, 549 bp, Cannabis sativa
  modified_base (207)..(226): a, c, t, g, unknown or other
  modified_base (477)..(515): a, c, t, g, unknown or other
aagttagcaaaaatatcttatttgtatttaaaataccaggattatagtaatcttattttaaatctaaagaaggtcaaattacttaaaatagaatattttataaaaaatatttaatatctaactttagatttaaaaataaaataaaataatcaaatttttaaaaataagaaaagaagtaagcaaaatgatttttacctattttcaaannnnnnnnnnnnnnnnnnnnaaaattaattttaaaaattcaaatgaatttatttgtgataattagatttgaaaaataaaattcaaaatacaaaactacacaaaaaatcggaagttaattccgtgaaatagcatgaaaaatcgaagaaaacgaaaaaattagagagctgtaaggatggtatgcacaacataccacccgcgcgcgctcaagggggatattggctgagcatcctgagcgctaacttttctcaaatcttcaaaaaatcataactnnnnnnnnnnnnnnnnnnnnnnnnnnnnnnnnnnnnnnnaattgcttaattttttccatactttccaataaaa

SEQ ID NO: 175151 - DNA, 500 bp, Cannabis sativa
  modified_base (211)..(215): a, c, t, g, unknown or other
  modified_base (269)..(271): a, c, t, g, unknown or other
  modified_base (436)..(438): a, c, t, g, unknown or other
ttagtttttggtatttctacaaacatatttgctattcttgttattttctgaattagtgtatgaatttattgaaccaaatgatttatgtctgtttattgatatttgtagtgtcaaaatgaacaacccacaccccaatcatcatctagaatatgcctttaggaatgaactttaaagtgtgaagatgactcctggtcagagtatcacttcacannnnntcatgatgaacatgaaattccaaaaagcagctaagctgggaattgttttatctnnngagtagagagttcattgctccgacaatcctactacttcaagctcagttgagaagaatagagaaagtgattccacttcctcagattatacttcacaacagattgaacaagcaataagaacattccaaaaacggttaagcaatgatgctttagtttttgaatcatgnnntttagagaatgataaatccatctagattcttgattctagatctacaaaccatgtcagttgtt

SEQ ID NO: 175152 - DNA, 617 bp, Cannabis sativa
tgacaaaataaataaaatatatttcaaatatcaaataaaatatttgtatatgaaaacatgtttaagtaaaaaaaaaaaaaaatacatatatacacacacgactgattccgaaatttggtgagacataaaaaaaaatatttttgaacccttatttaaaacaaaatgtgttattttcaaaaaatatatataattttaaaaagggaaagaaattggagtctagactaggtgagccttaggtgtaaaaatcccaaaaaaaagggttttataaaaatactgaatttcagacacaaaatttataattttactgtggcacgaattttttttacaaaaatactatccttttataaaacaagcataaaccaacaaaacaaaaaaattaaaacagtagcggaacaactagacaatcgtggaaatttaatgcagtacacagtataaaacttatacaataaaagaagtaaaaaaattagaattttcagtatgttgtgtaaaaatcccaaaaaagattttgaaaattattattgaaattaatacaaattaatgtaagaaaaatgaaaattaaaaagttaaaaataatagtgttatatgatttctttaaataattatatctttatatatta

SEQ ID NO: 175153 - DNA, 551 bp, Cannabis sativa
  modified_base (389)..(389): a, c, t, g, unknown or other
accaccagcattcttcccagacccgtagggaaggagctcgaacaaatcctaatgggggaaacacaacaaaccatgcccaaaggggaagaacggggcatgaagaagcgagtgtgaccttggggcactcaaggagccacagtcgatcaactcgaggcggagaaagtactagtcgctataatgatcgagaaagcacgggaactagtaagactgccagtcactcaaggaggaagtccatgagcaggatgaggtccgtaagtaggacgcagtctgtgagtagaacgagatccgctagtaactataaccaaccagatctacgagagcacttgaaccagaaaaaacctgttattttccaacaacctggtccaaagcaagaggatcctatctaattntgaatagatgagttggagaataagttcagaaggtatcaagttggggaattaggaaaacaatccggatacgactcaaatgaggaacttgagccgtaccatccagatatcatgaatactcctttccacaaggattgaaaaactctcacgtctcgttgtatgatg

SEQ ID NO: 175154 - DNA, 508 bp, Cannabis sativa
ttggagtggaagagaatgggtttgagttagggtagaaagaagtgaaagtgaccttttaacttcggttaatatgtaacaaccgacgtcgaaagtcctccatggacaacgaaatactaaagccttagtccttattttttctaaacatttaggtgatgtttagtaatacatttttaattaattttttgtttttaaattagaaaagtaaaaatattttttaaaaatatattctataaaattatttttattttatgtttttaaattgaaaatcaaaagttgttacataacgcatttttattttttgaaaataaaaattttacttttattttgtgaataaaagattagaaagcaaaagtgttaataaacagcaccttagtattctaatgggataattaaaaaaaaacccaaaaacaatcaaaaaaaattataaaaatatagtacggaattttcaatatttttatggttttttagattttatttacataaattacagtcttttatgtatattttt

SEQ ID NO: 175155 - DNA, 500 bp, Cannabis sativa
tttaattactcccactcgtaatattagtcctccacttgtagcccactgttcaaacatacaccacgtacgtatatacataattataattatataaataataattaacatctgatagagatagtagaatggcattttctttgcataaaacgttaacttattatatataataattattatatacacaataatgtaaaatcgtgtaaaatatatattttttttttgttgtcttgaaagttggaatatactttccatatattagtgcaaatttttattttacctaccaaaagaaaatttcttccctaactttaaattataagaaccagttgattaattaaaattcctacagaaacttagttatgcaaaacaatcaaattaacaattttcacacaaaaataaaatgagtaaatacattaataaatataaattaatatgagtaaaaaaatacctgatattcaaatggagagtacgacacaaataatctaaaccgacaataaatggca

SEQ ID NO: 175156 - DNA, 599 bp, Cannabis sativa
aaaaaaagatttactgcttagtccctatgaaatcagttttgactctataaaaaatcataacaaaacctgtgaaatcataaaataaatttgtaaactcatacaatatgacaaacttaaaataaataaaatatgacaaaatatatattttttttcctcatataaaaaataaataaaatatgataaatttaaaataaatatatatattataaaaaaaaaacactaagacataccataaaatttttttaagaagtaacttataaacttaaacaattgaaacaagtaaccagatatatcaaacaatcaattataataataacaaaaaccaataaatctataaaatcagtttcaaccctataaaaatcataacaaaacataaataataaatagtaaaaatagttgaaaccaaattcattagtgaaacaaataagaaaaaaagcacacacacaacaaaatactcacagatatataataaaaacaatatacaatgtacaacaaaaatataaaagtgtgatacttaaagtgaaactaatttttatctgtataaaaaccagtttcaatttttgtctatataaatgaaaacaaaatatacagataaaaaa

SEQ ID NO: 175157 - DNA, 604 bp, Cannabis sativa
tacacaaggattgcattcattgtcgatccgtttgtacatcgatttacaataattaggctaaaaacgtaaacattaataaatgaagaacagtttctattcactaaatatagcaacgtatgcgtcttataatatgcgagttgactgttcacattttagtgtaagcttgcgggcttaggatagacctaacatttaattaagtctaggatatctgcattcttgtatagtcgcacttatggacatcatataacgaactgatagaacctagacatgcgagtctatattggtttatcgaggctggtgggtcatcgagaccagctcgctttacagagaagcgatctccatcgcataaggattgagaggatactcgcatatatcgtgatcgcggcactggtgatttacgcttatctttgcctttctctaactctactagagaattctcaatcctcttatgttgttctgccatggcaaagaactcgaccagggattccggtcttcgagcttgcaattccttacagaaatgggttcttggcaggacacctgttattaacatacatactagcgaagactagggagccttctcaacttttgttacctcagcattaaa

SEQ ID NO: 175158 - DNA, 502 bp, Cannabis sativa
acccaaaaataaaaaacatacaacacaacaaaaaaacaccctagtaattagaaataccattttgtgttaattgagagcaactctaagaaaattatcaaaactctaaacgtgatttgttccgtctaaaatattgataaatataggttgcattgtaatagattctctaattattttttgagttgtaattttttttttaaaaacaaatttgtaattttacggtctataatgactaaatgagtttatgctcagaacttaaccggtatggttaatgtgtcaactatttcagtagatattatctggaaagatcgtgaggtctagttttcttttggggttaatactattttggaccatgtattttgtaaaattactgattgaactttctgttttgtaaaattacaaattaaaccttatatttttcaaaatgatacaaaataataacttgagctcaaatattgatatatatatatatattttaatataaccaacttaaaaacaatttcta

SEQ ID NO: 175159 - DNA, 573 bp, Cannabis sativa
tttgatatttggccaacacttcaaaaattatccatcttggccataaataaaaaacaatagcatcaaaaaatagttgttctggtcttgacattcttagcatgtgagaatgcttagttgtttgaacttagcttgtggaacatacgtagttaaaatgtatgtaggattctctttagttccaatcttcttgacttgaatttctttccttgtaatgactcctgtaataaagtgtagcttgatatctatgtgttttgatctttcatggtacattggattcttcattaagtgtatgacactttgattatcacaatgcactgtgatatcctttgcttcgaatccaagttcttctgagaaaccttttaaccagattgcctccttaagggcttcagttgcaaccatgtattctgcctctgtggtagataaagttaccaccttttgcaaattcaacttccaacttatgcatccaccaaaagctgtgaatgcataccttgtaatggaccttctagtgtctatactcccactataatctgaatcaacaaaccctgcaatttcagtgtcaaacattgcattgttctt

SEQ ID NO: 175160 - DNA, 511 bp, Cannabis sativa
atccttaagagaaatgttccttaggagttgagtgtacgattgaatccacttctttccaaagtgatcaatcaacagcggagtcgtatagatctgatgcttactacgtatttgcaaaataaaaataaaaaacaatagatacacagatttgttatagaggtttgatccttttgtgatggcgggtaatgatttatttcttttttaattatattaagtgggatttgctataacacccttaggaatacaaggtatgaattaataatgataaaactcaagtgttgagatgatgctagtgtaggtgtgtgagggagaaagtgaggaagagagaatttgtcagacttagagcttggaggcaagtttcaggcttagatgcaactttgatttttaggctaaggttaaggtatttatataggaggcttaaaaccctagattacaatttaaatccctagatatttgcatagtttgtttgataattacaaaagactaaaatgcccttgaatctagatattattca

SEQ ID NO: 175161 - DNA, 586 bp, Cannabis sativa
tatgagatgagatgacaatacattggttaccttatcatgacaaaaatctgacaagctagagcagatttgcatgtggccactcgaaatcgattattccacaacttttgcccaatctcatacattaatattttagtctataaagtccataattgcgtctacattcactactacatatctaacccttttatatgtggttctcattttcactgtcttacacaaaaaaaaaaatggaggattttcttcatttataaaaaaattgtctatcctaaaggtgtatagagatatttagaaaatctacacaataaaattttgaaaaattttacaatacactcccttaaaataggtgtattgatgcacccttatctatttcggtatctaaaaaattacttagtccaatttttttttatgatcgtatacattatagttatttaagacatctgacaaaatttttgagaaattcggaaaaatttaacacttcaaaaataatgttcaaaaagtttgttgcatgcgtgacttttttatttgatacgcgtgtgaaatagacaatttaaacattgatttcgatattgtaaattattttaaattt

SEQ ID NO: 175162 - DNA, 593 bp, Cannabis sativa
tatttgtaatctttaaacaaatatataaattatatacaaaattgtattgtgtatttataaagttcaaaaaagcataaaaagaagggatgacacactcatatttattacttttcaaaattagattgtatttaatcactcatacctcttattcaaaaatatgaaaacaaaaaattagatactaaattaatttaatattatgttgactagtctataaaaaaatgttgcttagttcttaactaataacacgcggggtcttccaaaagtctcttatttttaacatgattttgaaaactaacaactgaaaataccatgttgagaattatggggttccatctcaaaaacaatgagcaatgaatagagtaacccatgttcttatgactaaattctctatcatttattctacgtgggacaatgtccacattaccttacaaatgttaaaatttaaaaataattagccttgatttgaattatgatattaaactttgaatttgaatggtttcaaatgtcagaacttagaaataagtaatgtaatttttgaatagctggctggaaataagtaatgtaaacaaagaagatatatgagaaaagtattt

SEQ ID NO: 175163 - DNA, 504 bp, Cannabis sativa
acattcagtgatgggcatatgaagcgtgtgagcaaaaaaattttgagcagccattgtagtgttaggagagaaagacattactgatttgttgttgttgagaacctgacccgaggccttatgatatgtatctagaattctgtgaatagcaacagccgattgatcatttgctcgacaaaacaacaagctatcatcagcaaaaaggaggtgtgatacagcaggggagtttcttgttaagcgtaacccatccaaatttcctacaccctcttcataacgcaaaagcctagagagtccttcagagcaaatgaggaacaaatatggagatagaggatcaccttgacgtaaaccacgataaggttgaacatgccctactacttccccattgagtgaaaatgagaaagtgcttgtagtaatgcaattcatgataagagcaacccattgggaagcaaaacccattttcaacattacagcttccagatatttccattccaccctatcaaaagcttt

SEQ ID NO: 175164 - DNA, 502 bp, Cannabis sativa
  modified_base (301)..(301): a, c, t, g, unknown or other
tttttttttttttattttacttaattttttctctgactaataaattccaaaaatgactaatctaagctgaactaaatgtggccagctgtctaaagaaaaaccagccacctaatccccatagcaaaactaccaaaataccctctttacttatacttaagccattttaaacctaggagtaaaatggtccaaaaccaaaaccccgcttaaacccgacactctatctttctcaaatatttatcccactaaaaaaaggttctagacttactcatgtgactcaaatagccatccatcgcattttccnttgtcgccgagcaaaaatcataaaaattgcatagttcatatttaacataaataatactcctagagtttaataaaatctttggaattgagaaattataactctagtgcccatttctaaaattgggaccaacaacataataaaatcataaataattatgacaatgtcaataattaatcctaattgtcttcactaatccatatt

SEQ ID NO: 175165 - DNA, 681 bp, Cannabis sativa
tttctcggcagatgaggctgcgattcctcctgtccgcgcgggtaatgggcgacaggcttcacgtgcagccttgctaacaacaagccccaaaagagcgaaaattgtgggattttttcccaatttcggatctttgcatttttcaaagcctaaaattaaaataaaatattattttaatatatttaaacttaaatatcaatatatcaattttaaattaataatattgatttttttatagattattattaattttatgatattttgaggtttagatttcaaaattgattattttattttttaaattatggtcagatttaaaaaaaaaattgttaattctttaatatttatatactatttaattataagattagatattttaatattgagaatatttgaaattaaaagataactttatcttttttaatttgaaatatgatattaaaattatcttatatgataaatcaaataattaataaatttgaaattaacttagatattttgatagatattctaaccataatattttcaaattcaaaatttttttattttgataaatatttaattgtttataaattataagtttggaaaatgatattttactatttttatattattttaattattagaaattgtattttaaatatttaaataatctatatatttttgtagaaatttgaataatgc

SEQ ID NO: 175166 - DNA, 561 bp, Cannabis sativa
tgatggggtttgatacctcccgaaaatgctttgctatagctttgccctctaggagtacatggatccctcataccttcttcaggaggtatgtttcttgctgatcatcttgattaaaaaaggcttacttgaattatctcaaaaccttactcctcaaatccacgtgtcgcagtcgcgttggtccacgtattttagacaaaattaagggcaacatttaccccccaagccttgtttggtgggaactaaacgaggcttgcttaagtgcctccggctgtcttattaacttcctgatacgtgctttaggcgcgtgggggtgcatttatgaccatcatcattgcagtttttactttttgcaggcaacgatttgtttcctatccatttaatgatccggtgcattaaatgggtgtcagtcgagtactcaagcatttccaaccgccttgatgaacgcttgtcccaactgttaaatctgtagaatgcgaatcgattgctattctcaccgtatgatgacgcctgatcacagctgcttcacacccgttttgtcctataaaagccagccttctcatt

SEQ ID NO: 175167 - DNA, 572 bp, Cannabis sativa
  modified_base (293)..(293): a, c, t, g, unknown or other
agtatttatgccgcaaattactcttaagttaaaaatttgtttattttagatcaacttaaattgggatattttttttttcaaattaaggtgattagtttaagatacttaatttattatttaattaaattttgaaaaattatttcagttgaaaatttagttattttagaataacataaattagatatttttcaggtttttatttgattatattttaaataatttcaaaattatatttatgtataaattttcaaaattaaattaaagttgaaaattattttttttaattaattttngaccaacttaaattaagtaatttcattattaaaatatatagattaaaataaatgattaactaaaaatatattatttttaaataatgagctttaatcaaaaggatatttgatctccattgggttctacatagttcttgttttagtgagattcatccctaataaatatttgttcattagtaatttaatgccgtggaatctcaaaggataagtattattgtaagtcttttattcttagtaacgaccaccccaatagtggttgctaagagtagggcttacaaa

SEQ ID NO: 175168 - DNA, 529 bp, Cannabis sativa
tatatgttacgatcttgatactatttgtaacatcctcactttgagcctctattgggccttccctcacggactaatgactcttatacacaggtatgccactctggccgcttcctagattgacgattgacccttcaggctaactcgagtgttcccaatatgctttgttctgacttacacacttcttgggaaaacttcctaaaataaaatcaccctaggtcaaggacacttaaccgtggagttcttttgtgatgggctaccaaaaaataagatgcaccttgttaatataggtagtcccaatcaattcgttcaagtcctctacagctatgtagtctcatacctatatagtctcagaatcatcacatacgaccttcccccagatgatgtggaattgtatagctcccagtctttttttttaaaagtcagcccataaaaaattaaaacataaaatacttattctaaagaatgactaaattaccctccaagaaacttaaattttaaaataacttaggggcattatggtaattttact

SEQ ID NO: 175169 - DNA, 630 bp, Cannabis sativa
  modified_base (177)..(177): a, c, t, g, unknown or other
tcgaatcaatattgagtgagttatggttgtgtttactaaaggatgttctgggcgcaacacccaggttgacatcctagcgcccaggttgacatccagtgcctaggttgacatatgacgtcaacctggatgctgggtgagtgtgagaacatcctggagatgtattttttgatgcctaantgatattttgacatcacttagtccatttctgtgttctggcaaagttggtcactagttttcggaggtgttgctgttctgtagaaatgagagactcaaaactctttattttcgactggtcatcccatgctggaattgagaaatgcaaagttataaatttgacttttttgacttcatgaccctaatttattgcaaaaaactagatggatgatcgagacggaatcataatcggataagcagaacccaacgcactaggtcgtttgtcaacctgggcgttgggtacttattttggagcttctaagatgttgttttgatacttccaaggttctagaacttgacgatgaggtttcttaccccatttttaccattttggagagaataatcggatcaaatttggcatttgaatgatcgaaactagagcaccaagttgattgtcaacctgagcattgggcccaa

SEQ ID NO: 175170 - DNA, 535 bp, Cannabis sativa
taggtcattgcaaaatggcatttttaatattgcttctcatgagagtttgcaatatgatgatgcttcattgtctttaaggcacttggttgtatttgatcaaaagaagacatagctgtccctcatgaaaatttctgtataaaataacgtttattgcctattacctttgttcaaagaattacattattagttagtcgcactctgtataaaagagtcgcacttgtagggaaaaaattttgtggggttttttttttcaaaaaaaaattactaactattcaaacaatcatggtacacatgtaatttcatcaaataattgataataagtgggtagtttctgaatttgaagctagaatagtctttttttttaaaaaaaaaaagaaaaaagaaagaaagaggccacatatcttagactgactcctccccgttatatattgaagctagaatagtcttgcctccaatagaatacatgaaagtaaatatcatgtcactggtggaaggattcattgacgcatacattgtaaacagaaacagaaccatt

SEQ ID NO: 175171 - DNA, 679 bp, Cannabis sativa
  modified_base (335)..(337): a, c, t, g, unknown or other
agttataatatataacaatcttaaacttattagtggaagaaaaataagatatatagttctttagatactaatataatagtgcacaaacttatccaatctaattacaaccaaccgattcaatagaatcgaatatccagatcagatcggatgtaaaatttaaaaattcaatcggattggacatctgatccaatagataatcgatcaaaccaatctaattatcatccaatagtcatcaaattatatttatatatttttaaaatacacttataattttatatatttaatgaattttatttaaaaatatatattaattgatttaatatacatttaatacnnnagattaaagaaaaaaaatcttaaatttaaaataataattctcatcttcctaaacgctaataaaattgtaaatacatattgaataaattttattttttaacagttttattatgagatcatgagaattatgttggactaaactaatgtttattatatatgttggattattatatttttaaattatagttatatatatttctttttaatgaaattaacttaaatggtaactaaaataaattggatggatccaatccaatttaataaaaaattaatcaatgcatgttgaaaccgatccaatccaatacatctattggatcggatcggataacacaattcgattaga

SEQ ID NO: 175172 - DNA, 707 bp, Cannabis sativa
  modified_base (479)..(506): a, c, t, g, unknown or other
taatcttttacctttgaattcgctatcagtttttttttcttttcaatttactctgaattatatgtatatgtaactgtcgggggctgaattgggatcttgctttgtgctttgaaagccgcggtggataaataaatactaaaaagcatcttaaagtgtcaattataaaaggccatacctatgcaggattgaattagattggactaaaaagaattggattggactggacaagattggattatgctaaaagtaatcttgtgtttagtttaagaatagactagactatttttatttattttcttttagaaaaaaacttaaactaaaataaaaaatatatataataataaattacaataaaaatataataaataaatatgaataatttacagttaaaaaataaaaataatcaataaaaataattaaattataaaataatatattctatataattaagtatatattataaatatataataaaatannnnnnnnnnnnnnnnnnnnnnnnnnnnattaaaataaaaaaataaaaaaatatttaacagagtaaaataataatacttaaataatgtaaaattgtttacgttaaacactaatttaatataaatattaattcttttataaattttttataatttaaaattaatatataattttattgtcgtattatttctcttataatcaatttaattaactattgtttaattaataat

SEQ ID NO: 175173 - DNA, 504 bp, Cannabis sativa
  modified_base (56)..(59): a, c, t, g, unknown or other
ttcattttttttataacaaattagtggttaatggttattcttgaatagagtattcnnnnatagaggttctactgtaataacaatatatctgttttttattctttatgaatgaagcttaatccatttataaaaatctttcataaaaaaataaaccaacagtcataaaaataattataataaaataaatataataaaaaagaaatattatggtacattttagatttgttttatatataaaatttcttattaaaataatcattaattattatggtggtgtttacactttttaattagttttctgtttttaaaattagaaaagtaaaaatatttttcaaaaacatattttataaaactgttttcactttttaattttttaattaaaaattaaaattaaaaaaatcactttcaataattattaatttttttttcttaattaatattttggactccgactagaccgggacccaaatccccccacaaccctagcgctgaacccgacttctg

SEQ ID NO: 175174 - DNA, 540 bp, Cannabis sativa
ggcacaaaacccaacacgaacatcctcttagcaatttcctttttgaattttatgatgcttcgatgtatgggcgttgcctttgcgaaggtatgacttattattttaatttggtgttaatattgttcattttgcattttgctgatgttttatgttgttcacttgataaaaatttaacattcatccatatactatatcccatagtctaagtcttagtgagtgacactgaaacttagactttggagcggcttgactgagtacgtcaagtttggtttcagcgtaacattgttgaataaatgttatatttagttatgattgaacataattttgaaaacttgagtttataaatgattagatgggttaggcgtagcccttatcacttaatttgtaagtgaatatttgggttgagtgtaattcatatcacttactttataagtgaatagttgggctgagcgaaactaatatcacttatttcataagtgaatagttggattgagcgtagctcctatcacttatttcataagtgaatagttaggttgagcg

SEQ ID NO: 175175 - DNA, 614 bp, Cannabis sativa
catgctcgtcaaatctaggaaggcgggggggcatatagatgactggacgaattcttcaaagtcctcaggaaatacaacatgaaactcaatcccctaaagtgctcctttggagtcagctcgggtaagtttctaggctttatcgttaatgcccgaggaattgaagccaatctagaaaaaattcaaaaccacctggatatgaaatcgcctacaaaaacaaaggaagttcaaagcgtaactggttagattgctgcactcagtagatttgtttcaaaaataacagacaaatgtgttccattcttcaaaatcctgcgaggaaataagcaatttgaatggacaaaggaatgcaaaaaagcctttcaagagctaaaaatgcaacttgcaaaacctcttatactctcaaaacctctggacggagaagaattaggaatatacctggctgtcacggaacatgcagtaagtgccgtactgatcagagaagagaacaatatcaaacatctagtctactacatcagcaaacgcctcattaaggctaaaggccgatatccattgatagaaaagctcacctattgcctaatcttagcaacaaggaagctaaggccttactttcaggctca

SEQ ID NO: 175176 - DNA, 531 bp, Cannabis sativa
acctcgacccaggacctagctcgggtccagggtttgagcccgaggtacaagattcaggtttaggttcgagttcgggtttgggtccagagttcaataggttcatgttatggtatggtgtaaaatattattttttaaaaaaatctgaaaaatagttttaaaaaactcaacccaaacaccattaaatttttaaaataataaaaaataattttttattctcacttttgaaaacacaattctgaaaactaaaaactaaaaaacacaaccaaacagcctcttaaaatgtcgaaaacagatttaaacttttttaatatagtgtgataaattagaatatcaagaactttgttttcattactttaaactatttagaatttttgaaaaatttagaggaatgatataaaaaaaaaacaattgaaaagatatattttaccatgtattttttgacacaaaaattaattaaaaaattgtaataaaacatttaacagttctaacaatagaaccatatttaccacaatattttaccatatataaatg

SEQ ID NO: 175177 - DNA, 596 bp, Cannabis sativa
ggtggataggaagtgctgaaaaggacagatttatggcttttaaagcatgggataagatttgtacgccgaaaacaatgggaggcctggggttgagaagatgcgaagacatgaacagggcgttactcactaagctggcgtggtgtcttgcaaccaacatgaagagaccatgggtcacctgtttattgaaaaaatattgcaaacatgaaagtttttggtgtgtgaaccaaaggtcaagtgattcttttttttggaagagtattttgggtacgagagaggtgatacttcaaggatctatggcagtcgctgcttcagggaattctataaatttttggaagcagccttggattccttggttggaatatagggaattccatgagctgatgcaacagcttcagaatcaaagatttaccataagaagtctggcagatatctcggagggaaacgaatggaatgcggagatggtttttcagatttttggtcaagaatttggggagcggatcctccagattccaagaattccatggccgttccctgaccaagtttattggaagaataaccagaatggtaagttttcagtcaagtctgcctatgtggtg

SEQ ID NO: 175178 - DNA, 545 bp, Cannabis sativa
tagagaaagggagcgacgaaaaaattatttgaattggaacatgtgtgcgaattaatgttccacttcgagacatatcgtggcctagagtgagtcagaacattaaaaactaattatgggatgacataaaggtaaaattaattttattatttgagttatttaatattgattataatttgtacttataactacgattgtcaatttgccaggccgcgttcaatataccagagacagataggaaattaaccatttctaaaggtggaaagaggtggaaagattggaaaaataccctaacagatggtatttttaaattcaaaaatgtggctccccaacttctcgacaagccacccaaactatatgaaagcataattgatttgcaacaatggagagagtttgtggctatgagattgagtccagagtttgaggttaggaggaaaaaggccaaacagagcaatgcaaaaaatatttacaaccatcgcagacgaggtggtgtaaggatggttcaagaacaaatggagaaagaggcaggccaccaaattactgaattt

SEQ ID NO: 175179 - DNA, 563 bp, Cannabis sativa
aaaactcggttcgacctgaaataccctattgcgactataccgcgccgacttgtcagaaaacacctacagaaggacaaaataagtatactatctaataatatagtccatgagcacactataactttaaaattgcagttttacccttctcgggtcaaaattacgaaaaatacccctggctcaccaacaaggtcttaacatgtcatttattagtataattaacacatattaaattatataataatataatttcacattaattcacatttaactagttagggttcgctaatctattttctcaatcttagggttatcccctccttatagaaattgtctcgaaatttacttgaacaacttcagatatttctgctgcatatccgtctcaagttcccaggttgcttcttctactttactgttcctccacaatacttttatcagtgaaatggtcacgtgttaacttgaactcacactttttgaactttgcgtacaacttgtgatctcataaccgttgcaatactaatttgagatgtagttcatgttcctcctctaactcagaataaaccaaa

SEQ ID NO: 175180 - DNA, 529 bp, Cannabis sativa
tctaaaagtaaaatgccacaggccataaagaacgtgaaaatattttctataatatacaaacatgatgttaaatactaataagtgaaaaatactgtctatgtgtggtagggctaggtggagccgagtttgaagtcgcaagatcaggatcactagagtttaggctggccccagcatcaacaagctggccaacctggtggtcaatgtaacgccctaacaattaggcatgttacccaaggtgattaagaaaccctaatcccctaaacgggattactagaaagataaacacgggtaatttaaactttaatcgaaaacaaattgaaaataaaacttgtaataaacttaactttacaatcaaaagttacatgtttcgagatcccagaaaacattttacaaaatattacaagtcttttcactagccgacctaggcggcaaaatcaaagtttcaaaagtacataactggtagaccccaacccggttggactagtgtggcccgaacatgtacatacatcgcttagctctcgcactcatg

SEQ ID NO: 175181 - DNA, 504 bp, Cannabis sativa
  modified_base (337)..(343): a, c, t, g, unknown or other
agggttaataccatttcagtacccgtattttataaaaaattatcgactagaccatctattttataaaatgacaaattagaccttatattttctaaaatagtataaaatagtactatacgttcaattttcgataatttctttttataaccaactagaagataatttgtagcacaaacagatgcagataatgtactcagttttgttattaattattattaacttttattttaataaaaaatcagttcagagtactattgtacactatttttttatgggtaaatatcattttggaccctatgctttgtaaaagttaccaattggaccttctattttgttnnnnnnnaaaatagaccctgtatttttcaaaattgtacaaataggacactgagctcaattttcaataattttatttttttaattagccaactttaatataatttttaacacgaacagatacaaaaaatgcaactagttttgtcataacatctctatatcggattatta

SEQ ID NO: 175182 - DNA, 705 bp, Cannabis sativa
tgtcgccggtgtaccattaaaaatggattccaacaataaagattttcgttctacgccttaaagcttccattctttacatccaaacgtcctctaggagtcccttaagtttaaacataatcttattttaacccagaaacgacccatacacgttcaaatccgagatggctcaagaacgtgcatgagaatggtggatttcgaaagctgctgtcttcgcccgttttgccatgaccattagcttccttagattgtgtagaagctattcaaagcgatcaaacaagcccagaaactctctaagtgtttcaaaatcaaaatctttttttctctctctaaggtccacatgaaactttatcgggctctctctctgcggaccgcctcctcccttcaacttctttatgcatttttaaacctaaatatatttcataaacatcctatatatactccaaaactttaatcttaacccttgatcaacaacttaaaatttaaaaaataataaaatacatatataaaatagttaccatattccgcaataataataataataataataataaactaaataatatactacaacatatttacccatattattattattattaatatacttataatattattcacttataattaaatattaaattatctcgaaaaatttaattatttatctaacattatacacaccctcaaaataaaaaaaaaaaaaaa

SEQ ID NO: 175183 - DNA, 834 bp, Cannabis sativa
catcaacaatcagtctacaggcaccctttcgtaaaataacattagctcggaccacatttttccaaaaccaagaatctgagctcttgaatttatgattaaggaactccttccctttaagatatttagcctcaagtatacgacagcaaagagagttgctcccattcaaaaagttccaaccccatttggctagaaacgccagattcatctctctcgtcttcctgaatccaaggccaccatgggatttcgggagacaaagcttgtcccaagctcttaagtgcataccatggttagctttatcaaacccccaccagaaatccctaaccagcccatcaattttagtaactacccggttagataatttggtggtttgcatagcatacatcggcattgaaaggcccactgatttgatcagggtagcactcccagccttagatagggttttcgccttccacccttgtaacttagaagtgaggttctcaataatgaaattaaagtcaacatccttttgcctcgatcgaaacaacgggagacccaaatattttatatagcctaccggataaccaataccatactttttcttaatcccacgtttcatactctgggggtgtttttgctgaagaatattgttgttttaagcctattaacttgttgacccgaccaatcacaaaattgttcaaggcatttccaaacaccttcggcctccctcacattagctctccccacaaggattaagtcatccgcaaaaaagatgtgagaaaggaccgggccgcccctgctaagccttataccaggaatctctcccttggccagcgcattcccaagcagcctagagag

SEQ ID NO: 175184 - DNA, 528 bp, Cannabis sativa
  modified_base (402)..(418): a, c, t, g, unknown or other
aaaataattttttttaaaagatatgtacttataattatattattaaaatagtaattaaaaaaacttaccttttttgttcatttccaagcaagaaagcaagttttttttttaaaaaaaaaagattaaattaaaacacacgtccagcatagcaccttggacgaaaaattagacccaaaattaaaaataataattatttaattatatctttaaacatattacatccatctattcttttagtccaacattaaaggacatcatacaatttttttttctagtccattattactagatttgaaatcttcctaaagcgttttcatgtccaacactatttttgttggactagaaaaagggtcataaaaaaagctatttgtagtagtgtcaatatcacctagttgatcttannnnnnnnnnnnnnnnncctgagatggttaggttctagttttgttgtattatttatgttcttcaatctgttcgttaaagtcgaccaatggatcttttcatgacatatagattaaggacatagtagtt

SEQ ID NO: 175185 - DNA, 541 bp, Cannabis sativa
ccctactcctcgttgaaccaagaacccacgaacctaaaccccaacgatgtaagcagctccaatcgcaatcctctcttggcagctctagtcacacgactccagtgtgaagtagaggtttaggaaggagaggtttagaaatgtggtgaggaatcagagctactcggtttgtcttgtggtcgaaggtctcactgattttggaaacgttttggctacgtttagatccgcagatgctcttgggtttcagtccgttcatgtcgtcgcgtgcgatagctccaaaaggttcatgtcagcgtcaaaatcaacgaaatggtctgagagagagagagagagatagaagagaggagagggtctgaaagcgagagagaagagaggagagggggggaggcgactgatggaggcaggtagggtttttttggtttagttaaagaagaagaaggaaagaaaaatgaaaaggaaaaaataaaagaaaaaggaaaaagataaagaaaataaaaaaaataaaagaaaataatttttgttttataatttttaaattaatttt

SEQ ID NO: 175186 - DNA, 694 bp, Cannabis sativa
aattacattggtttctatattttgcatttgacttttatattaatctatttatttttggaaggaaagttgtttagtttttctatttatagaagataaggtaaaaatgttaagtttggttactcaattcttttccatatatccagctgtgatattctaatcttgtgtgagtttcctattttgtttgatcagatttcttgaggagaaaactagagcaaaactttcattttttatgaaaagaaagttgcacttactgctcacgattctgtaggtacagaaatggaaattcctaagttgattgaaaatctattttaaggatttttctagtggactgtggtcttgttcaaaccgtgtgtgagctgtcaataagttgtatattgattataaataccccttatagcagctaggtcatgtacctcttttgtatctttgtatttcactcatatctttagaaaagagagtctttattttatagagaaaagtgtgtttgactcttctctgtttatttgtatttttgtattgtcttgagtctgtattcaagcctacaaagaagaagaacaccattgctaccttcgggagaaggttttactaagatttcgagagattgcttttcaagtcttgcctcagcaggaagcaagcactcttcaaggagatcaaagggagtttgagcacttgaagtttcaacaagattcgatta

SEQ ID NO: 175187 - DNA, 966 bp, Cannabis sativa
taattaaaaaccaatttctctcttgtctctctttagaaaggccccaatcaccacacccacacacagtcaccctccagaacactctcgtcagtgctcccctcgttatccatacacaaagaccttgcactaaggaaattattgaaattgccatttaagaatcaaatccttacaaaaaaaataatgagtatgtaatttctttattaattgttgttagatttagctgtatttagtttgatatgtatagtctacacatctatttttttggtaattatgtatctgcaatgtattctgtgtttcttggtttttttttgtgttttaatgatgtttagcgatgcctttagcaatatcaagcgatactagttctagtcagaggttagggatgatatttcagaatatttatcgatgtgtcgcgatatagccttggatatttgtgttagataataaacaatgttttgcaatgttgtttgcgatatgttacgatgatagtgtcattcaccgttactgttgatgtttaacgatagggctgttcatataaactgggaaaccgcggtttaaatccggaccactacaatacgaactattgtaaaccgtaaccggggaaaccgtttttagtggtttggtcaatgcggtccgtttacgtcgtaatggttcgattgcggttcgtaataaatagttaacggttaaaccggaccggactgtttataataaataattaatttatatattttttataaatgactatatgtataattcagaacttttttgtgtgtcaagttttttattgcatgatgaattttagatttttatgttatgtttgacttttgagaatatttttatatcattatttatatcttatagatttattattaaatgtgtattttgaaaaataaaattaaaaacttagtaaaaatagtacaattactaaaaaaatatgaataattatcaattccacataaaccgtggttt

SEQ ID NO: 175188 - DNA, 561 bp, Cannabis sativa
  modified_base (523)..(535): a, c, t, g, unknown or other
gatgacctgtctgccggaggagaaaattgggccagcttggttggtcctgttgggcctttgttttgtgcttcaaaaggccatatttcaagtgttcggccacacttttaccatattttcaacacaaaaatatatcatattaattcaataaaaatatttatttaaaatttaattaatttataatcctttcaaaaaaaaaattataatttgattaataaaaaaaagacattttcttatctttattttttttatttcttttttttttcaattgtaccataaataataatttttatttaaaattaaatttaaataaaatattttagcataagaataaattgcattaatttcatcaaaatattatttaaaatttaattaactttttatttttacactaataaatatgtaatattttaacatttaacaccggactcgaacttggccctcgaccctgaaccccaaattcgaccactgacccgatccccgaatcttgattcggaccgtggatgtgacagtcagtagtcccgtnnnnnnnnnnnnnaaataccgggtaagctgtgcaatccc

SEQ ID NO: 175189 - DNA, 668 bp, Cannabis sativa
tttctgaattaaatatctctttttgctctttccttttataattttgttttgattcctattaaagaagaactcaaaaattgaggataagaatccgtccaaacacaatcttctaaacaagtaacagagtttatcagtgtataggtaacaccattctttaatcgcgaaatgacactgcaagaatcaccaccaacatcaactaataaagaatatatatctaataaaatagactgaaaactaaaattaataaaaagcttattaatccaaccaattatcacgatagaatcactattaataatagagatattgaaaccaaattgatgtgcaagagtaaagtccagacgaatgacaagcagctctgccacattagcagagaaatcacctaacacacatgataaccacgccaaccaaaccacaccttttgcatcccgtataactccccccaatccaacaaagcccctccccgaaattaccgaagcatccgtcgctagagcaaaggatttagtaggaggtggcatccatcgagtagttcggtttacaactgggttcacaaggcccaaacccaaatgaaggcatcgccgatcatactccttaaactctgctagatggttattggccaagtctggaataatatccaatcttgactgcttgttgtcaaataatactgagtt

SEQ ID NO: 175190 - DNA, 525 bp, Cannabis sativa
cgaccataataatcatttatagtcgcacactataattcatatcatttatgctaccgtacaatacaaatttagtagaaccatctcatttttattcctctttttacctataccaccaatcttaatattattatcattattattatactaggtaatataaccgcgctttgcgcagtttgttgaaagaaaatataatttaatttatagattttaaatattttaaacactttttttttcttttttacatatatgcaggatcgtcttaaacattttagaggtcctgttctaatttaaaatttgggcccctaaaaaaatacaatttataaataatattattattcagttatatattttacaaaacaccaaaaaattccaactatttgtaaaaattattattgattccaatagaacaaaaaaaaaatgataaaaaaaaaaagaagattaaagatttgaaaaaaataataaatagcactaataaatttttattttttagcttaaaagcattaatagaattgaaaatggactttg

SEQ ID NO: 175191 - DNA, 524 bp, Cannabis sativa
atagatcatctttagatgtgtgtacattacaccaaaacataaaatataagtttagaatatatacctcttaaagacttgatttcaatgaatgcatatgatggatgccaaggtatcatgccaatgatagaggaagaggtagtggccaaaaaggatctacataaacataatcttctatgaccgtgagctctttaacttgaggaatgcaaaaatgctcttgttgaattttttcaaaaacttggcagtttttctataaaaatgttatagcattatgagcagacacaatatttgacaaacctgaaatgcttgcttcctcatcctttttttttcactactttggattgaagtggactcttgtaattgctcaaaaattttcccaagcatctccaactcatcaccacttctcaaaataacattttcactttcttcttcctcctttgaattttctatatcaatgcccaaagtttcatgggatttatcatgcaactcattaaccaaaagctcaaattggttctccaatttcctca

SEQ ID NO: 175192 - DNA, 509 bp, Cannabis sativa
attttttgagagttgaagtcactcagagtaaatagtgtatttttctatctcgaaggaagtatgtacttcatttgttaactgagacaagaaaattgggaacaaaaccttgtagtactccaatgaatccagttgtgcaccctacaagagatggggaaccatttgaagatcttgagaaatattgcagattggttattaagttgaattatctaactgtgactcacccagacattgcgttcttagttagtgttgttagtcagtttatgtcatctccaacaattcatcattaaacagcattacagcaaattttgtgttatttgaaaggagcacaggatgaggtattatttacaaggatcatgggcacccccagattgagtgtttctcagatgcagattaggaaagttacaaggtaaacaaaagatccacttcgggttattttctctttgttgggggcaatctgatctcttagaggagtaagaagcaaaatattgtgtctagatccaatgctgaat

SEQ ID NO: 175193 - DNA, 527 bp, Cannabis sativa
caatcaacaaaatgattcattctcgaattaaatattaaaggagtgtcaattataatttttatgtgtacaattacatgttaaaatttcttttttttcttttttttttttaattttaaatagtttatatattaaaataaaattcttgatatttgtatgtttaaaaaattttaaattaatttttgacaatataaattatttaatttttaaaaaaagaatttactgatgttgtaagttgaaaaagaatattacaatatttataggtacaaaaaaaaattgtaattggatgttcactttgtcacagtcacttttctttgtattatttatcattttgtttttaatacttttctcgtatttaattttttaatttttattatatatattttaaaattttataaatcaaaagaaattttttttttttaaattaaaaaaatataaatttgagaatattaaaattaaaaatacttctaatattaaaataataatattataaataatatattaatatttatatatttaaattaatttaa

SEQ ID NO: 175194 - DNA, 506 bp, Cannabis sativa
  modified_base (449)..(469): a, c, t, g, unknown or other
tattaaacaattaaattttaattctaataaaagagaattcggcaactcatagtttaacaaaacatgttcttcgattagacgataagctattctagttcgaggaggttccactatcaatcgttatatgctacattgttaatcatttgtgattctgttcaccacgtaaaaaaaattactacttaattaaaaaatatattaaaaaatatttatttttatagtatatcaaaaatatatttatatataaaataaatcagtaaaatttatttttttttaattttttttgttgttgaaatttttttttataatttttttttcaaccgatagaacgattcataataccatatatatatatatataactatatctatatagttgttgctattatatctttatatattaaaagtgcctatctaacggcaagtttaacattcttggtttaacagaatatnnnnnnnnnnnnnnnnnnnnnctgttaaatttaacgattaggtttgatctcccgttaa

SEQ ID NO: 175195 - DNA, 518 bp, Cannabis sativa
ctaatttatgagaacgaacatgaattaggaaaatgccttaggaaaattggaaaataaactagcaaaaatatctaataaaaaacctaacacattacaaaaagaagagcatttaaaaaaaataagaaccgagaatatagaggagagtgtgtgagacctatccacaactactaataatgttactaattctgtttgaatgactttaatgtaacaacttcaacgtgaataattaacaatctagagatatcatcaattccattgtatccacttgaatgactgatgcgtgttataaatttactaattatttttatttttatattatcaattacttgtggggtgttcatcaaaccgctcaaactgctcgcaccacaccgcactgcaaaaaaaatacgatttgaaatttttcgcggtcgcggtttgaatttttctttaacccagcggtgcggtgcagtttgcagttttgaattgttaatatgaagttcaaactgcactgcactgcacattataaaaataccaatttt

SEQ ID NO: 175196 - DNA, 795 bp, Cannabis sativa
  modified_base (648)..(658): a, c, t, g, unknown or other
aagtctcgttcaaacaaacacgacaatagtttctttttacaacaataatgagtctataaatactccattgatgtatatataaggagatcggtcgaaaaattctctataataaatactctcataaatacagtgactagtagaaaaaaactcattcattacttcacacaactctaattattggttaccgaaaatcttagtcaacatatatgctatttggcaccagtagtgcctaacacctctaaacatgtcaccttacaattggctagcgatacaccttaaaagttattatattatactacgtgggatctgaaacttagttggacaaatagcaatattaacaaatagaaaggtgctaggcactactggtgtcttatagcatttctcaacatttatacattaaggaacgaattgttggaatatcttttaccagaatctagatttactaacaagtatattttttaacatcttaaatatgaatatctaaaacgatgaaaataaacacataagaggtatgagaaaccttacagttgttgcagcagaattaaatgactccttccgcccagatctctaacccttatatcatttttgtcgcaaagtatcaccatgatctgagcccgaaactccttctgttgtttggattcttcacannnnnnnnnnntatgattgaggactaactttctatgggtaggcatgtgttgggttttgtgccttaaataaaacccatttcaatataattaggtttactaattaataaatatcagaaatcgcattttatgttccatggttcacatgatt

SEQ ID NO: 175197 - DNA, 581 bp, Cannabis sativa
taggtggcactttacgattggttaacgacatttcctaaatctttttttttttaaaaaaaaagttatatgcgacatgctacttaattatactaataatgataccaagaaggttgccttttcgcatttctcataattaaaatatcacatttttttttatttttttaattaagatatttaaaaaataataatcacttttaaaaatatattaattaataataatagaataaaataatgaattttctaaaaatgttaaaaaaatatataaaattcgagataaaatataagattaagatatagatttggaaaatacaatagtgacaactacaagtgaactacggtaatgacaagggatgagatacagtgatgacaacaggtgagatacggtgatgaaaataagtgagatacaataagacaacaagtgagatacaataataacaataattttgatcaatgatcgagatatgaaaataatacattatggggaacaccgtaattttattttacactaccctatttatttatttttattaaaataatttattttaacaaagcaatttaaatactacatataataaatttta

SEQ ID NO: 175198 - DNA, 549 bp, Cannabis sativa
  modified_base (163)..(166): a, c, t, g, unknown or other
  modified_base (193)..(194): a, c, t, g, unknown or other
acaacagtagaaactgttacagcaggtttattcaatctcatagcttatttagcactcaactattttgtaaggtacataactacactactaatactacaaaaaatagctacatttagtgacaattttttagtcacaacataagttttttgtgactaaatgtgannnntagtcacaacaaaaagttacttgtgannaaaacatagtatttagatacaagctatcactaatttagttttggtcacaacaagtattgtgactaattaaaatacatttaaatcacaataaactgtaatttttgtgactaataattttagccacggatcttttagtcacaacataggaatgatggtttacaattactcacaacttttttacttttagtcatcacaactttttaacttttagtcacaacttttttacttttagtcacacgttttgttgtgactaaaagtaaaaaaacttgtagtgtcattcagtcgtagagaacttgttattcccaaccactaataatgatttgatggcgagccatcgaataacaaagaagaacca

SEQ ID NO: 175199 - DNA, 525 bp, Cannabis sativa
aaaacaagagcaacatttctctatgagcgtagcttggtcaaaaaaaaaattcaaaatataccaaagaaaattttgctacggtaattatttattgtggatattgcccttaaaaaaaatatatatatcatataaagagcaatatcttagttttaatcatttagcaaaataaaatatatatatatcgataaaaatataaatgcatatataatacatataaaaaattattaatcaaaagaaactttgccatagtttatttttcataaatattagtcaccaaataaaaaaaaaattcgttctttatttctttattttggctctaggtactgtaatgaaatttcgaaagttaacttgtcatttgaatttcaaaatatttttggttagcctatctattggtcaataattgtttacattgtcgtcataaatgtttttatccattcgagcgtcaattaatatacatttccaactccaagagtgacaacccttcctcttttcaaatatttcaatacctgtgaggatttggagttg

SEQ ID NO: 175200 - DNA, 555 bp, Cannabis sativa
ttctatttttttacacaggcatcatgcccaccattgaacccatcaggccatataaaattctattttttttacacaggcatcgggcctaccatcggatccatcgggccatatcaaattctatttttttacacaggcatcgggcccaccatcggatccatcaagccatatcaaattctattttttttacacaagcatcgggcccatcgggccatatcaaattctatttttttacataggaatcgggccccatcgggcccatcgggcctttgtcttcctcaattttcctatgataccatcgaaccagtgtcaggcctgcaccaggctgcatcaggcccgacgaaatcaaacctaaaacccagatttttttcaaattacatctgacaaaaataaaaaaaaaaagatccgaacctttgacatctctcttcgaagctcggtggtagagggttggagttgcatctcacgatggtcgatggtctgggtaagcgtgatttggtgctcggtggtggtgatttggtgctcggtgagggtgagatgatgagagaacaatgagagaga

SEQ ID NO: 175201 - DNA, 528 bp, Cannabis sativa
tgtatggttgccgcagatgccaccatgcactttgcggagtagtggttggctgaaacttctgtgatagagcttatcgtcgtaaatgacatatcaagcagctcgatatcgcaattttctagcctctactttattttcaggaagaactcttgttttcaagtagtctattattggggtcatccaggtgacctctttgactatatcaacctccattacctcatcccgatggatcgtcgaatgtgttattacgtcaataaaaattacattgaataattctacttctcttgtcgaggccaatcaggccaaagcatctgcatgagaattgtgagcacgaggtattctagagataattattttttaaaattttttgtaataactcacaagtgagggtgagatatttagccaaacgacctcctctggcaagatattcaacattcacttgacaaacaacgatttgggaatcgctgaaagcttgtaaatactcgattttcatctcaagagcgagtcttaatcctacgattagagcctcat

SEQ ID NO: 175202 - DNA, 515 bp, Cannabis sativa
  modified_base (224)..(234): a, c, t, g, unknown or other
aacatacaaaggtaatttttttaaaaatagaggaaaaaaaaatgcttgacagcacagatcctcttgaatatgatcaatattaaagggaaatttacaaaatactagaatttagggtaacttttacaaaaatattgtcacacgaaaaagtttacaaaaatactgtgtttttagaaaacactacaccagtagaacaactaaaaaacactagtgaaaacttaacacannnnnnnnnnntatgaaacttataaaaaaaacacagtaaaaaagtaaaaaaataccgtctggcagtatttttgtaaaaaaatgataaaagttagtataccatgtaagtttcccatattaaactgtcaatcacaaaaaaaaaaaaaaaaaaatctgttaaaagaaaattacaaaaaattggattttaagtcaaagtttataattttactgttacacggatttttttataaaaatactattttttttataaaacaaccgtaaaataacaaaatagaataattaaaaataacagt

SEQ ID NO: 175203 - DNA, 505 bp, Cannabis sativa
ttgttcacttttggatgctgacacgtctcttgaatgccttccagaatcaagacgttaatatccatttattatgtcttatgtgcaggcctatcgctaactctcgatttgccacatgtttttggtcaaaaaatacaaatgacagaatatatcttaataaaaaaaaatattaattttatgaggtaaaaataaaatattcataattaatatattgaaaatctagtttataaaaaattgtccggaagaaattgaaaagaattttcaaaaaaatactttttttatattttatttataattttacagcttaaaatttttattataaaaatacgcttacaaaattttaagttacaaaaatacattttgctcaaaaagtataaaaaaaacaacttaaaatcaataaaaaaaaaataataataacttcatgacaactacaatacaactataaataaactataaaaaaataatttattattttttaacaaagaaatatttttgtaaataaaaacat

SEQ ID NO: 175204 - DNA, 597 bp, Cannabis sativa
gtaaaataaattccaacaattttgagtttagaactcaaacatagagctctaatggtggtttgtgtttctgagcatgttagttggttttgttgcttggaatatgttctttgaggcctttatagcaggtctggaagttattgtggtgtttggggttgatttggttgaaatatggaatttttggtcattcctgcactgaaccggaattccagtttagaggggcctataggaatcgagattccggttggtccccaggaaaccccacagaaccagaattccggttggggaaccagtctaccggttggggcagttttgggaaccctagtttttcccatttttgagatatttaaggtattgtcatgttatttatcgatagggaaactttttgtttcaagtttaagtccctagaaagtgatttagcgtgtcacttaccagtgctgtgattgatgtgatttaggagcctgtaattcgcggagcagttgttccactcaagtttcccgccacacctaaattcggaatcaaggtaagattagtataatattttgcatatgtttatacatttttagcgtgcatgtaagttgccgtcagtataggcaaatc

SEQ ID NO: 175205 - DNA, 521 bp, Cannabis sativa
actattttaagtgtatgagaggatagaattgcgggctagaaaatgatacattgattagttaaataaagtgttgataaaatgtaccaaatcatgtcccttgaacttttcaggctgttaaaaaatccgccgaactattgaaattgttaaatttaagaatttttgtcaaatttcattcaattttactaatatgacgattgtccatatactaaatcatcttcttcaaactttgatatctactaaattatgtccctacaaaattgtgccccttaaattttcatccacatcagactttgtttagtaaaattggacaaaatttcttaaatctaacattctcaatagttcgagagaaatttttaacgatttaaaaattcaaaaagcatgatttgatttcgtgtaaaaatctaaattagcctcatatttattttgttttgaaaatatttttgcataatttttctgaagaaaagagagacacctgtcttttacagttctggatagaaaaggaacaatcaatcccattaatt

SEQ ID NO: 175206 - DNA, 506 bp, Cannabis sativa
gagtgaggtggctttgagttattggtggcatagagtgggaataaggtattggggatagtagatttgttcttgtctatctatgccaagggtcgagtctgggaccaactaattatttgtaacatgagtgtgagagagttatatcttaagtacatttttcatacaattataaaatgaaattttaatacaaaattatgttagataattaaacgaaaaaaatacttacaaatttaataccataaacacaatgaatgataataataaatcgtaataaaaaaatttttgattgagtacataataaaaatatcttaaaatcttaattcttgagtaccaaagccacaaactctaatatacatagtaacatagatgaagataataagatatttttttttcttttcaaatgaaggaatatatatgtcagattcttggaatattttttaagttgaaagtttgttaactttggatcaacttaaaatggaatatttttcaaattaagtggttagtaactt

SEQ ID NO: 175207 - DNA, 502 bp, Cannabis sativa
catcgttggattcttattttatttaaaattaccctttattagtttcctcttagcatttacatttagaattcgcttagatagtatatcattggatgaatagtttattaagcatttgcttatgatgtcattctattctcttctatgaaattaaatggtgcagatgactatactcccaacattctatcccaaaattatataaatcctcgatcttagaatctccttattgtatatgcttactatagggaacttagagttagattagtagtggtggtccaagacagaataatcactcgttgtatatttggtataaatttaagtctttgaatttaaattttagattctaaatagaaattttaaatttcaatttcctagaatacattggacattacagtaggttcaaactgtatgtttatgtatggattatgagttttatattctgtgaccaggatccacttggactattctaagcactcttaactataactagacctaagtcatcaaa

SEQ ID NO: 175208 - DNA, 631 bp, Cannabis sativa
ccactctgattctttccaacaagtgtgagtgaagtatcagattaaataatctctcagtcaccaactcaatgtttgccctagtcatctccgaggctaacttaggagaaatcatgaccatgttggatatttgatcaggtccctttctgcttaaggcatctgccaccacatttacctttccaggatgatacaggatttcacagtcatagtcttttacaaactctaaccaccttctctgtctcatattcagatccttctgagtgaaaaattacttgagacttttatggtcagtatatatctcacacctttcaccatataagtaatgtcgccaaatttttaatgcgaacaccactgctgcaagttccaggtcgtgagttgggtaacgctgctcataatctttcaattgtcgagaagcgtaggctatgactttatctgcttgcatcaacacacagcctaaaccctgccttgatgcatcacaatacaccacaaacttctcttgatcagatggcagggcaagaacaagagctgtaattaaccgttgcttcaactcttggaaactcttttcacacttatctgaccaaataaatcgctggttcttcctagttaactcggataacggcatcgcaattttgga

SEQ ID NO: 175209 - DNA, 578 bp, Cannabis sativa
ttataaattttacaaaattattaaaattagtggaatatattaatacgtgccatattaagttggaaataatcaaaacaaaaataagaaaatttggattcactccaaaaaaaaaaatacattcgatttacaccaaacatataaatcctataccaaattatatatcttgtatatggctttatttataaaagtacagctaattgtgtaatttatattatcgagtgtataactaaaatttaatatttgctagaaatgtggaagatttgaatatataaaatatataaagatgaatactatttttattgaaatgagatctttcaagaaaatgtctgaaaataaaattgtgaagacttaaacttaaaacggacaatattatacaaaataaaaagtattcgacggcatataaacccatatacaattatgaagatatatcattttgtgtacaatttatatatttgatataaagcaaatgtatttttggagtgaaaatacttaaaagctgtacgtttaaattaaaaattttctaaaacctaaagagaaaaagaacttgaaatttttattatccatttctttttttcatt

SEQ ID NO: 175210 - DNA, 675 bp, Cannabis sativa
  modified_base (87)..(92): a, c, t, g, unknown or other
  modified_base (372)..(392): a, c, t, g, unknown or other
  modified_base (470)..(471): a, c, t, g, unknown or other
  modified_base (590)..(592): a, c, t, g, unknown or other
taaataaataaataatatttttttcagaataaaataagtaaataaataaaaatttaaaattaaacctataaatttgaaaaattaggnnnnnnctaacctaagtatctttttcaaaacaaaattgctaacaacttttcaaatatcatgttattttttttaaaaaaaattaaatattcaataaaataaaatgataattttatataatttttcttattttaaaatttaatttatataaaaaataacaaaatttaaaagttagcaaaatatcctatttctatttaaaattttatgattaaaataatcttattttaaatttcgaataaggtcaattaattaaaaaatttaaaatattaaatatctgaccttaaattnnnnnnnnnnnnnnnnnnnnnaaatttaaaaataagataattaattaagcaaaatattagatttttacctattttcaagcttcaaatttcactaatatnntaaattaattttaaaaaatactaattaatttaattctaataattagatttgaaatatgaaaaaaaactctaaatacaaaattactcaaaaaaaactgaaattaattccatgaaaaagcnnnaaaaaatgaagaaaattgaaaaaattgtaagtggtacggatggtatgcgttgcataccaaccgcgcgatgcctgggatgcacg

SEQ ID NO: 175211 - DNA, 564 bp, Cannabis sativa
atttttttttttttaatattgtttgatgggtaaatactattttgaaactaaaatttttaattcgactttctattttcttaaatgacaaaatcgacttgtattttttaaaattgtacaaataggactcggtcaaaataaaacttaataataatctgacctagaaatgttatgacaaaactcattacattttctgtatatgttcatgttagaaattgtcttaaagttggttacattaaaaaataaaattgttaaaaattgtgttcagggtcctatttttactctttgaaaaatatagggtccattttgtcatttaacaaaacagatgatccaattggtaacttttacaaaacacaaagtccaaatagtatttacccttgttttatttttatgggtaaataccattttgaatcctatgttttgcaaaagttatcaattagatcctttgtttgttaaataataatatagacaatatattttctaaaatagtacaaataggatcctaaattatttttttgtcaaaataaaatttaataataatctaatttaaaagtgttatgacaaaac

SEQ ID NO: 175212 - DNA, 641 bp, Cannabis sativa
ttacacatatggcgtcggttattagggaaataaccaacgccataggtggacacgtgttactaaaccgtgctcctatggtgttataccgacaccataggtggtatatatacactatcaaggcttcatcttccccacttcaaccttcttcctcatacacgataaccaacatccttaacagcacccatacccacggaaaaacccttgccaaccacccataaaaaaccctcattctccctcatttcttcaccattttaccccatttttgtcttaaaatcttctattttcaatacctaaacctatactgtaaaaaaatttagtttttttccctttatcactataactgaacctattaagaaaaaggtggtggtactccgactaccaattttggtggagaaaacattgaatctcaacatccattaaggtatacatatgatttctattcattttataaatgtacattactttattttcgtttttgtaatttgttttttttttttggatttttctattttattaatattatattgttgtgtgtgcatggtggccagatttttgttgcaatttgtcgccggattgcgtttataaggtacatatttattaacttgatatataatatttatgtatatattttgtattttatt

SEQ ID NO: 175213 - DNA, 512 bp, Cannabis sativa
aacaaaccgtataccaaatcacatttttttcaattcgattgcaccattgtatttgtagatccaaataaatggcgaataccaagtcccgtcccgttccggacaatattgaggatatttacaaaaatgcccactgcatacaaactaagcatcagaatgccaccaacatgcacaccaacatgcgtcactacttcaccaccacatggccagcttgtgggcatcacctagcttgtgatgtgccatcttggcatgcacgttacattctcccccactttaacatgtcgatgccctcatcgacggactgtaggcaaatcttcctgatcttgactcctaagcttactccaagcttctcttgaatcttaagtctgcccttgtccctctacctctgtagaaccaccctcttggtgacgatatctctcgcccatacttagacttgatcaaagaacttgtgccactgtcgctatttgatatctcccatggagtagtgcctccgcactagaatacttcccccaaca

SEQ ID NO: 175214 - DNA, 580 bp, Cannabis sativa
aggactactatgtccaaaggactaatttctgctcccaagaattgaccagcttgcaaatgccacaactgatcatgaaatctcagaggcaacaaaacctgacaagatgcattgctgcactaagtagatttatgtccaagtctacagataagtatctacccttcttcaacattctcagaggcaacaaaaaattcgagtggacagaagaatgtgaaaaagcattccaagagcggaaaaattgtgttgtcaaaacccttagacaatgaagagctaggcatgtacttggaaatcacaaagcatgctgtaagtgttgtcctaataagaaaagaagactgtttacaacacctcgtatactacattagtaaaagactaatcgacgctgaaagtcagtacgcactcatggagaagatgacctgcaacttgctcctagcctttagaaagctgaggccatactcttaggcacacctgcacatagcaatctgattagtggttaaaaatacacttttatttattttaaatgataaaataaattgagttttaattgatattttcatgaaattattgtaatatattttataaatga

SEQ ID NO: 175215 - DNA, 511 bp, Cannabis sativa
ttttctttggaaaagtatcttatgggatcgtgatctctggaaggatggttgtcgttggcgtgttggctccggtgagtcaatcagaattcgtgaagacgtttggatcccaaaggatcatgtgggtcagacgtactccttctcgggtgggccacacctacaaagggttagtgacctcaaaattgattttggaagatagaattctgatcttgtggatgagtgttttgatgtaggggaggctactgccattttgtccatcctgtgctccttgtttgatagtctggataggttatttggtatttctctgataatggttctttctcggtaaagagtggatattggagcactgtgtccaggttagggtggggccaagcttcaggctcctctggttcttctcggtgatagaaaattctttggaagatgaatctcccgcctaagataaaaaattttgtgtggaaggcatgtctgaatttcatcccggcttatgccaacttatctcgccatggtatgaagg

SEQ ID NO: 175216 - DNA, 905 bp, Cannabis sativa
gatctaacggataggaacactgcagattggaagacacagatcatttaatgctaaagatgtgcctcgaaatcctaaaacgccaaaacccaaagcatgcaatttttcaaaattgggttaagacaaaaatacccttataatcatttaaaaagttctttttcattaaaaaaatactttttaaggggaaattgttatacccgaaatttagctacacttcagaggttgacctgtgtccaatagaaggaatacgaaacaattttgaatgatataacaataccgttaaatgcatattaaataactcgtttattaattaaaggttaaatagataatattcaaaactcatttggctttatagtcaatagcgagacaagaataaataactattaatcttagattatcgagacatatgcatgcctcgaaatatactgacaaaaaaaggaacattcaaccatctgagcaaagtgagtgtatcaacataagatgcctcgcattttaaacagcgagaagatcacctcacattacaaatatagtgagacagaaacattcataacacttagcgtattttcttatcaagatggacatggacgataactcaaatcagagaagatgtaaccttccacgtcagcaataaccatctaaaggataaaactaaagaacggttgggtagttatttagtattacctcacatgtgatttaaatgaaacgcgggaattgtccatgtttcatgaacagatacatttaaattaatcccaataagaataattgccaacctatactcctataaataggggcaaattccatgggaaaatatcccaataagagtgaattattattatataaattctgaagttgtactctgtattcagaaatatccctaataataaggacttgtagagtatgtagatttt

SEQ ID NO: 175217 - DNA, 683 bp, Cannabis sativa
aaaaaaaaaaaatagaaaaaaatccgtataatttctttttatagttacgtacgttattgtagttatttaggatcatttgtaaattttaaaaaaaaaagaatctaaataatttacagtaccgaaaataaggttcaaacagttaattaccacacgcataagaaagaacagtcgcacgtacaacaaaatatacaaatcttattttcggcattgtaaactactcaaaactttctgaacttttttacaagtatttctaaataactataatgtacacgattatgaaaaaatagattaaaaaaatctcttgaatactgaaatagatatagaatttaccgaaacactcatttatctcaaaatcaattggcaatgtaaggagtagcattcctcttatatattctattatcattccacatattagcaatgtgagactctctaacatccctttcaagatggtagctatttttatttgctcaccatcttagacaactcaatcataagcggctctttttttggctcactatccctgatcacaagtggctcttttgctctactttttggatcagtattttggatttgtggtggctctctttttttttttcgctcactatccccgaatcacaagtagcattttttgactttttggctcttggatcagttttttctttttggattttcggtggctcttt

SEQ ID NO: 175218 - DNA, 512 bp, Cannabis sativa
tcggtgcacatgtttatgaattgaaaaggattcaagctggggaaataattgaatttgcaagcaatgtgaaatgaatagaatcttgagaataagacatagaggagtagacaacccacaaccttcataattcgactggactccatgtctttgcctcttatatatgctaattgagcttgttgattgattagtgtgaaaaaatcaaacatgaacacgacacgatataatatgtcacccaaactcattttgaaaattaccttgggatatagacttttgaaaatttgctcccctttattaaattgataataatatcgaatatttttttaattattttgtataaaatgtatatcaagatgaatatctgtatataatttttataaaaataacagcataagtatctagttactcttacttaattttcttatatttttcaattttttcataaaataatatttttgaaaaaagaattcatatttttgcaatatatatttatatacatatatatatttatataa

SEQ ID NO: 175219 - DNA, 547 bp, Cannabis sativa
accaaagcaccttatgtctttccatgactctactattccaaaccttgttctaaagagaaagggccacctcacaaagaggggttctattaaaagcttagataaggtaggccgacttgcacgagaaccgcccattgaattctttggtccagatccattcatctactccttgtccagacgggttttcccctttcaaaatagcagagatggttttaagatcaaatattctcgtcaacttttgagtatcccacttcccattaacggtcaacatgtcagccaccttgcttaagccatgggcaggctgcccattagatttggggtagaaggatttatcatgagtcacccatggatcctcctagatcctcatgttcctgccatcagaatattaggagtgtgcataaatctatccaatctaataacaaccaatcgatttataattacaattgacaaccaattattagatatccaattgtgacagtattggattggatgttatttttgaatatccaattagatcagatcgaatgttagatgtgttgggttttatgcc

SEQ ID NO: 175220 - DNA, 566 bp, Cannabis sativa
cctaaacccaaaacctaaacccgaaaccccaaacctcaaaactcaaatcctacacaattcccattccccggtccattcccattcccatttgcattcacattcctattctcattcccattccccagccaattgccattcctattcccattcccattcccattcccatcaccattcccatccccattcccattccctggcccgttcccattcgcattccaattcccaatcccttatccatttccattctcattcccattctcattctctcgaacctttcccattcctattcccactgcaattcacatactcattcccattcccaatctcattcccatttcctggcacattcccattccccggctcattgccattcccattccctggcccattcccattccaattccctgacccatgcccattcctattctcatccctttcctagtccgttcccaatcccattccccaaaccttaaaaccccaaacgccaaaatcacaaaaccctaatggcatgtaaactaataagtaatgggaatcaatggtatggtaatgattcccttacatttgtt

SEQ ID NO: 175221 - DNA, 882 bp, Cannabis sativa
  modified_base (742)..(743): a, c, t, g, unknown or other
tcatattatgaatattagagaggtggaaaaaattattgatgttgttagaaaatctcgtgtgcgaaggaacaccataaaagaatttgcgacaacatcatttttagagagacgggaaaggtaggatgagcaactccaacagaatcatttattaagttatatagtaatggagagtatcatcaagctacattcaatgtaaaatggttcggccaaccccaacagtgtgacaagggtcttttgtgtacccctgccccaaccgctcgacactgtggtggttgaggtctaggatacagtgaattgctctattgacaaagtggtggtgcaatttggaattataagtgaggataaaggtaaagttgttatccaagatgaggttgttgtaggtaaattgcttcaacagatcttttacacttttattaaagttcaaaataagaagaattggaaacgtattcaaaaagagcctctgatggcgagtgcttctaatcgaaaatccccacctactattaacattaaatgaaagaataatcagtttgtggtcaagggtgagaagagagtgaagtcaagtttgggtgtagaagcatccattgtagtggttgatgaagaaatggcgtaagcgacatacaatataataaatacaccaaaataattaatagcctaacttatatgagaaaagcatgactaaaattatataaaagatactattaaatttggaagaaaaattagaagatgaagaataatttaatanntgagatatggagatgaagcacaaaaatatcaatatcaatattaagcataaaaagtacaatagctacactttaacctcaccaatattactactctagttcactcatttttgtcacataaaataagtaaactaaaataata

SEQ ID NO: 175222 - DNA, 632 bp, Cannabis sativa
agatattaataatttgttgcaattagaaatccatataacacccaacaattaataaagtaggatagtacattcagacctgtaggattttgacccttttaccctacacgaacaaaactatataatatcagtatcaaggtcaaaaacaacctttacttgtctaatttaacccttagaccaaaacgacaccgttcaaactccactacaccaaacttagtgtcgtattgaacttttggtttaaagactctgatcgaagagtctagaaaccctagccacacaaaacacaacactcagcctcccaaactcgaaaccctagcagagcaagttctcttcaagaacttgctcgattctaagcctgaaacccagaatcacacccacacacacacaaagttagttttagcaaaatgaaaaacaaggtaagggagagaaaacaccaagaaatttgtttcagagttcacccaaaaattgggctacgtctctgtcaagctcgtctcagagattagcttgatatccactatcatcaatgtttgtttacaagattttggagcttcctgtcacagaaatcgatcaggtaagctcgatttctctcttttacactttatgctttgttctttcacttgatttgttctcgatct

SEQ ID NO: 175223 - DNA, 524 bp, Cannabis sativa
  modified_base (155)..(174): a, c, t, g, unknown or other
  modified_base (241)..(249): a, c, t, g, unknown or other
aacatttttaattttttttaattacggggtcatattaacaaattttgacgcgaaaccaatcttcatatcaacgtcttagtagtacaaatttattgtaactagtggcaaaaaatattctaagatgggtccaggctacatttcacaaaggggtaccnnnnnnnnnnnnnnnnnnnnttcactatttcgattaaaatgattgttagtgcatgaaaaatattttttctctcaacgtgtccaatannnnnnnnntgcacaacggtcttggctttgtccccgtgaaatttcatgatttttcgagatgtgtagggttagattttaagagaacactaacgagtataagagtaagaaaaaagcttgttcaaatttaccctaaaaagaataatattttcaatttttgaattaggggccattttaacaaattttttttacgcaaaactaatcttcatattcacgtcttaatagtaagaattcattgtgactagtggcgaaaaatattacgagatgggtccggaccacatttcaca

SEQ ID NO: 175224 - DNA, 503 bp, Cannabis sativa
gggaggaaaggtgaatgtaggccaccttcaggaaacattattagaaatgagcatcttatggagggctacctaaaaggttgtgccgctaaacgtagaatagggttaggagctctgtacgaagtatacgcgtccacaatctactggaccctcccttgttaattaagaggctgactccacctacgatctcatgtttgctttgttagtacttattccgaaaaccttaagcactcaaattatcaatgaatatcctgcatccagtggcagtgtctacacatacatgtttctttaggtagaatgataggaaacggatggaaagcacttcccaaaacagttacaagcatggttcctagaataaaatttgagaaactcttaaaaaccaagagatagggaaacgtcaagattgttaactcaaacttttagatctccttgttttgatgattaacaaatatttgattattatttgttactaatggtttattgattttgtagcaaatttaaaagag

SEQ ID NO: 175225 - DNA, 522 bp, Cannabis sativa
gtttttcttttgattttggtgaaactactcattataaaagagaaatttcactttttgcccttaataaaatctcgaatattaaaatttaggcccttcactaatttgtacaaattaattccattgattacatgaacttcccattttaccctttttttaaaaaaatacaaaaaaatttaaaaactaaaaaaacctccctctttcttcctctctctcttccctctcgtgcacctctctctagaaaaaattgaaaaaaacttccctctctcttttccttgtcgaatgtttatttctcggtgggcggtggtggaaaatcggagcacagcccaatcactcaagaatcttacaccattataatggataagttgtgttttaagtattttgttagactttatgtactttgctttcgttatatgtgtcgtatttgtaaaaactaatgttttttggtttgaaatggtagagatcttgtagatctagttttctgtcaaaatctgggttttccaaatgttatcgacagtttatcga

SEQ ID NO: 175226 - DNA, 500 bp, Cannabis sativa
caaatcatcatttatttataattagggaacaaaatcgcacttcgcgcgcggattcgatcctaattttacaaattttattttacaggaaatataatatattaaatatatacttatatataaactaggtaggagttacgtgcctcggcacgtaaagattagttttaggtaaagtttagtttttttttttaattatttcttcttatttagattgtatgtaaaggtatgatcatacgaataatttgtttcatcaaattaatatttgtgctattataattggttggtaaaatataattaggtatatataaatcataataaaataatacttattatttacttttagaaaattgggtatatgaaatacttgcatacactactccatgtaaatccataaataacaagtcaagagaaagaaaaacaagctcagcagcaagaaaagtctcaacactaaataaaataaaattactgtaaaaaaaaaaaaggtaacttcttcctaatcttcc

SEQ ID NO: 175227 - DNA, 556 bp, Cannabis sativa
taatacattaataattaatttaatataatttttgaagttaaaaatttaaataacataaaaaaaaatatattttaaattaaaaattaaacaaaaaaaatactaaaatttaaaagaaaaaaattcataattatagaactacattaaaattttaacatatatttttatatcatttaaatttataaattctatattatatagtaaaagaaaaatatatttttatagggtaaaaaaagattacttgatttataatgaatattaaactcatttgtagttgtactaattataaaatatataaattcatcactgagattatattgtaaaaattataattaaccaagtataaatatattttttttattattaatttgctactttgttttcttaaataatatatttcttttataaattaggagaaggatttaaattgtttcttttggttaaaaatagaatataaatagtgttttaaagaaacctacatcgatgtaagcataatttattaaattctaaaactgttactttttttcttttattttcttataaaaacatatgtaatttt

SEQ ID NO: 175228 - DNA, 530 bp, Cannabis sativa
actaaatattatataactacaaccctctcctatttttttttttttgagaaaaagcgttgatattatagattcaaatcagttagacctctcggtcgttacacaaaatattgttaggtaaggccgaatccgggatagacccataaatctgatgagcaaacgcctatctagccacattataagcggcaaagttacaagttctactaatataagcaaaattacaacatataaaagaaggagaagacttaaaacaaaatgagatgtaattatcaagcgcccagcaagaagcctttccgttgagagcattgatcaccacactcgagtcattctccacgatcacaaacttggctccaatgtctaaggctaccgataccgccaggctaccctctcctatttaccaaaatgctattaaacactagtatacccaaaacttcttttcagatttttcagaaaagaaaaagaaaacctcaaagaatacttccaccattatctcaggtcgagtttcagtcgtcttcttcagaaaaatatcggta

SEQ ID NO: 175229 - DNA, 536 bp, Cannabis sativa
  modified_base (60)..(64): a, c, t, g, unknown or other
cattttagcatacttatatatatatgtagatttcagtatactagatgagagttacgtggnnnnncacgtaaatattagttttatataagttatagtagtttttgtttaagaattcagtaactaagcaacgacaacaacaatggtagatagatctatttaagtttttcatatttgtaaaaattataaatctaaacttttaattttcttgatttgagattttgaattgttatgatttatttgtttatgaatttattgaaacacttgaatatttatttgttctgattttgaattgttttgatttcgtcggtctttcaaatataaatattaaacatcccaataattaaatacgttttatcaaaaaaaaaaatatatattaaaaatgaagaatatatttggacctctgaacaataaatatttttttaaataaataattgtaacgagatcatctgttatttttggtattaaaaaaaaaagaagaaaaaaaaaagaaaggtgttctcggtatcttttctagacattttatctatatttttctt

SEQ ID NO: 175230 - DNA, 658 bp, Cannabis sativa
attattgtgagacctcgggagatatggcagagggtcaagatattacctgcctaattccagattatggtggaagtgataggagctccacgattgagcggaagaggaaacccacatcatcagtggtgggtttaagacagaacaagcggttccgaaggtttcatggcaaaagaggacgtcagggttattcttaccctgagtgctcacgttacatgaaacaccatcccggagaacgtaaccgaaaagtatgttttgaatgtggtatggttgggcattttaagaaaaattgcccacaggtggagaaagtagagcaatagcaggaagcgatatttgttcctactccggtgtatgctaatgttcaagttgatgatgcagcgagcccttctcttgtggcaggtcagatccctgttaacgacttcttttattttgtgttgtttgatttgggagctatatgttcatacatagttatgtgaataattaatcttttaagtaaggctttgtgatattttagaaatggggtttggaaccctaatgcctagtggggcgttggttagttctaatgggcgctttaggtctatgctggttaggattgaagataggaagttgagcgttgaccttataaaattggaattaattaaatttgacattatactgggaatgg

SEQ ID NO: 175231 - DNA, 564 bp, Cannabis sativa
caatcagcttggtaacaagtgtgtataagataatatcaaaggtgttttctcttagattaaggggagtgctggaggagatgatcatggaatcacaatcaacttttgtggaagagcgagaaatcttggactcggtgctgatagcaaactagattgtggaggattatagaagcaaaggcaagagtggtatggtattcaaaattgatttttaaaagcctatgatagggtggagtgggtttttttagatatggttctgtgcaataaagggtttggacgaagagcctatggaaaagttgtgttccatcaaaagttaaagtatttggttggcttgtcgctttagacaaagtgaatgtccatgacaaggtgcaaaaaaggaagccttgcctttatatttccctcggctggtgtgtctgctgcaaaggaagcggagaagacgttggacatttgtttctggaatgtaattttattcagtgcttatggagacatgcgctagaggagtttgaattggcttgggttatgccaaggttcgtaccacaaatgatagcttccaagttaactggcagtaaa

SEQ ID NO: 175232 - DNA, 556 bp, Cannabis sativa
aaattaaagttgagggagtttttcaacctaaaaagatcaggggctaagtgtataaaattataacataagggggtttcaccactaattatcaaagaacacctggtaaaactggccaccacactcttgtcatatccaaagacaaggcaagtttagaaagattgttagctaaaaagttctcataaggattataaagagaaacttaaaaatattaatacgattgcaaatctatcaatatatatatatttatatatctatctaaatctatatatctatataaagctaaatgttagagtgatgatgtagaattttatagtattcctaatctatttttttaattttgagagaatttcatctttaataaaaaaaatatatattatatatgtacatcacttattttcttcacatgtaatggttaacaaaagtctcacattgtttaaaatttactttataatacttaacgtagtatataaataaagtttatattttttttaaagattagtctcttattttatttatatattatatacataaattgaaaagttattttaaaatttta

SEQ ID NO: 175233 - DNA, 1230 bp, Cannabis sativa
  modified_base (1168)..(1173): a, c, t, g, unknown or other
ccccccccccatggccacgagaacgggccactaaaccacaaggcacgggcacagtgacactcccaaaagatgtggactgtggtttcgagattcgcttcacaaactggacatagtttgtcctcaacgaaacccaatcgatcccgagttggaaggcaccccatactagctctccaaatcatgaaagaaagtctaaattgaagaccctgcttccaaatatttttccacaaatttgaatcctcaacagatctcggtagttgagtagcttcatatccttttctcacagtatacaccccatcagttgctcctttccaaactagtacatcagtatcagattgtgggagtctcggtatcccacaaattctatcacccatactctccccaaaaatttgagaaataatgtccgaattccaacttccatccgaatttgaaatatcaacaaccgtacgaagttgagggaatttccttctaacttggtccatggtagctatgaattcgtgatactcaagccatggtatccacggttgtctccagatatctattgaatctcctcttcccaccattgtcattacattgttgcataaaatttctcttgacctcaagactcctttccaaaaagcagagtcacttcccttcgtatcagtactctagaatgactggtttttgcaatacttttcagaaaaacatttaatccatggtctctctaaattactagccaactgccacgccaattttgttagtagggccttgttcatatcttctaactttctgaatcccaaccccctgcaagcataggcgcgcacaattgatcccacccgatcaaagccaaaaatcgatttttatccgacccccccgtccaccagaacttgcgaataacactatcaatttctcgacaggtggagagagaaatcttatttgttgacaaggagtacaatggtagtgacaaagccaccgattttactaaagttgtacgccccgcaaaggagagtagtttcgtcttccatccttcaattctctttagcaccttctcttttaagaagtggtattgttccctctttcttcttttgaacacaaaggggttacctaagtgccgctcatggccttcgcactccttaacacttaggatcttgagaatgtcacacttgtgagttgtaaagaccgcttagtttannnnnnaaattagcagttaatcatgtttatttatgaaaatgatttatagctatttaaataatt

SEQ ID NO: 175234 - DNA, 717 bp, Cannabis sativa
atagaaaatcaaatttcccgttttttaatttatttttataagattcctatatttttgtaaatttttgaaaattttaaaattaataatgtgcggcataaatatttaagtttaatttcagatgtaaataaatacttaagtttaatttttagcagtaataatatttaagttataattctaaaatttttgtaagtacctagctcttaagtgttaagtaaattgtcacgtgtcaatttttaattggtactaataaaaaaaaaatgacatgtggataatgacttttgtggttaagtgttaaaaattttaaaattcgggtgtttagcagccaatatcccaaaaagaaaatatttttaaaattattttttatgattttttatatatttataattattttttaaaattaatattacgtgggccactaaaaatttgtcacgtgtacgagtgtgtacacgtggacagtccactgtgacacttaactgtaatttttggacgaaatggtacagcgcaaaacgaaataggagtttaggtagttttgtccccaaaaaatcgatttttgcagttaatgttaaaaaatttaaagttcagatggtttagccgccaataccccttaatataaacatgtaatgcaatttcgctactcctcccattgccaattgattttgagatggaacctcattcaccttatcccaaattctaacatggtatcagagcaaaaacaaa

SEQ ID NO: 175235 - DNA, 504 bp, Cannabis sativa
cccttaatatctaatttttcaaagggtggtagtttaatattgctacctataaatggataaacatatgttttttagagtaatttgcggtaaaactccatcaactatcaatttacttgcaaaaaaccatcaaacctcatattttggtgggaaaatcctccaaaattctgttccgtttacatttttaaggtgtcgtctgtccagcttcgttaagtcctaattttgcccacgtggcaatgacaggtccactaaaaaattatcctacgtggtaatattttacaaaattaaaataaaaataaaaataaaaaatttaagaataatttgcggcaaaactcctccaactattaatttacttacaaaaaaccatccaaccttaaagttttttagattgtcttttgcaagtaaattgatagttggggggggagggggtttgccgcaaattactcttaaagtttttattttattttgtaaaatatggccacataggataattttttagtgacctgt

SEQ ID NO: 175236 - DNA, 631 bp, Cannabis sativa
tatgattccgagaggcaaggggaaataaaacaggaagtctgtctaaatagatcattaggcaaggatattactggccaacgattaataaggacacacatgagtttgtcaagaaatgtgataagggtcaaaggatttcacatatacctcacatactgccaacagaacttagaatgatgaccttgccctacccatttgctatatgggggatcgacctaactggggcgttacccgctgggcaaggaggggaaaagtatgtggtggtagcagttgacttctaatggacggaggctgagcccctcgtcttcgtaacctgtaagaaagtccttgactttgtcgtcaagaatattatctgtaggtttggaactcacgtgaagatagtatccgataatggaacccaatttgatggcgacctgctcactaaattctacgagaggaataaaattatcaaaagcttctcgtcagtatccaggcctcgggaaaatggacaagtggaagccattaattgaacgctaaaggatactatcaaaatgaagttagatgctgccaaaggcaaatgggtttacaagctacctcaggtgctctgggcccacaaaactacagagaaaacaaccacgggacacactcctttctc

SEQ ID NO: 175237 - DNA, 823 bp, Cannabis sativa
gggcataaaacccaacagacggttcatggcgaattggaggaagttcacgggatggattttccagaggccgaggaggcgggccttatcatgccccccaaccccccaagttaatcctatcatggaattgccgggggcttggaaagcctcgggcgttaagctcactgcgtagcttgattcgtagtgagaacccagatttagttttcttgatggaaactaaaaaatcaagcaatgagatgggtcttttgagtcggagattgggtttctcgagggtgtttgctgtatcggcggaaggggcttcaggtggtcttgaaatcatgtggagaagaggttgggatattcaagtgctcaattctaatctcagtatgataaaaattcgcatagggggagagcgtaacgtctcggattgggtggggatgtttgtctatgctcctcctgtgagatcgcagagggttgaattctggatgaaagtcactgaagacactaaacaaatcatagaaccctgggtggtggttggagacctaaacttagtccttactcaacatgaaaaagttgggggtcttcctattactgaagttgagggtcaaggcctacgggacttcatttttgagaccggggctactgatatcgaaggggcaggggcgtttttcacttggagcaatggtcaccaatggcagagtttgatccgtgagaggcttgatcgcgctctgggatcttcggagtgggtggttcaattcaacaaaacgggagttagcactctccctaatgtacaatcttcactggctcgctcacggtccatcaactctagccttgcctttacctacac

SEQ ID NO: 175238 - DNA, 642 bp, Cannabis sativa
cagaaaactaactatccctaacatgcagacataccttctgcacttcctttccttcaaatacaataaataatttatatataaatataaatatataccatggttctttccaaaaattagctaagaaaaacaattctgaccaactgttttcactaaaagcaaccctctgcaattgcctttttcaatttaccgaaattcaaattcaactaattaacttgggcttaaccccatcaacttttaataatcttaattacttcattttaatatgtaacttttcaaagttataaaaatatgattatctttctttgcatagagaatagtctctctttcaatcattcaatttcactacctccaaaatgccaccttatagttctaacaatttttatataaaattaaaattctaatgatagttaatacaactctgtaccattgtgctaacttctaatattaattaacaaaaactataatgtaacatttaagtcacaaaattaagccttaattatttataagtgttacttcgatcttgtaatattatagaattatataattgtaataattacatttctattataaaataatataaaataaatgaaaagaaagaagaagatgaagagagaaagagaaagtgaatgagaatttctgagt

SEQ ID NO: 175239 - DNA, 600 bp, Cannabis sativa
atcctccttattctctatacttcctaacaaacatagcctaaaataatattttagcatcaatccaattagaaataatgtcagtgcattttgtaacgataaattaaaatattaaagaaatataacaaaaaaattatatggaatggatgagtgttgactctatttttgttacaggtgggtggcagctaattggagtgttaaaatttacacgtgttcagcttttgaaataagataggccacaccacaacacttaattaatttcacttgaattaatgaaactcagagaaagagttgaatttacacacaaatatgccactgtcagtgggttcatggttttatatcaaaaacgtgagatgttattctttttctaacaattaaaataataatatatctttcttttctaaaggttacaaccgtacaaaccgcctttaggcatggtacgaatttgatttaataaatagtgtagaaaattattaattaattttttaatgatgaaagagaggttgtaaacaccccaaagcaaatcgattaaaaaaataatcaaggtttaaacaagtacaaactgcagaaaataggaactacaagaaaaaaaaaaaaaaaaaa

SEQ ID NO: 175240 - DNA, 538 bp, Cannabis sativa
cttgttccttgtgacattgaaagcgtttctcacttgttggtacaaggacatatgtacaactcgacgatagtactgggttgctagatgctgtgatgttcggagatgttgtagaaaacatattcttatgtactgcagttcaattaaagtcatattgggacgagataaatatataaaatttatacattttcatcaatagaggaataataaattttattgctaattatttttacagaaacataggttgtttgtctaaaaaattacggagaaattattgaccaaaaaatggagaattcagttgtatgtagatccaaaacaaacgatgagtccaaagtacaattaattcaccattcaagcagctgaactaatagaagattaggaagaagtttcactatacttttttttagtctttctaataatattcgccatattaagactttttttattaattttttcttctattttaagattgtacattttgtttaatttttgttacataatgtttgttttaaattttgcaaaacctatatcttgttcctct

SEQ ID NO: 175241 - DNA, 524 bp, Cannabis sativa
  modified_base (58)..(60): a, c, t, g, unknown or other
aagccataggttcagataatcataaacctttaatatactaggatcaggaagttttgtnnngtccattgaatagacttattatcataattttctttcttgtctttgtaataaaaaacttttggttactccatatagatggttttaaccatagttctcttggctttgcttcttagttcctcattctgactatccattacttgtttaaactaacaatagatttttatcacgagtgtcttccaagtcataatagggtgggttccttaaaatcctcccactacgacaaggtaccgtgactttctgtctaggaacattaatggtattgtcctcatcagttgtgtcaatacaatagaggcagtgggaccatcttttatagaataagatgatagaacactttagaataaaaaaaaatatctcctctactttacttctttatttttagaagtaaagtagaggagatataatcataattatattccactgtagacaatactataatcgtgaataactatatgttcgggatttaa

SEQ ID NO: 175242 - DNA, 951 bp, Cannabis sativa
tttttttttttttgttattttcatttggtttttttgtatttttataaaatacagtaaaaacattaaaaaaaaaaaaaacttgtaaggtaaagatataaaaattttacaaaaattgatggtttatgtaattatccctatatagtatagtaatggaacaatcccctattttgtgaattgggactaaaacctaactatatccaaattaaatgtcagatgtcacaattatggaatatgaacttacccacttagggtggctcaaaagggtaaagagccagcaatcaatatttcggtttcaaacttttttggaacttaaggtaaactcgcaaactaaagctcaataataacgttacattagagtctatacaaacaaacaattactggggagttacaagatatcatttgtttcagtgctattacaaacgtgacaatgcataatactttcaattcacaaaaagataatatgaaatgaaactaatcaaacaacttcatatgtttaattctttcacgtaacaaatcagaatcttggctagtttgggtgcgatatcttcaaatacctactttcaatacatgccatttggttagaaagcaatgatcaattttttaaagttcaatggtgtgtctcaccaatgataatagctatagcacaaaatgtcatgccaatcgtgatggtgtgaatattttaggtgggtggggatcaacgcgtggcaccaattttgggctcaatgtctgttcatgtatgggaatgggagaagcacctttcaactatgggattttgtgtgaatttctttcttcccgcatcaaacatcaatcataagcacttgtatggatatttttcaatcaaccattgcccaccaccattttttatcttattctagttgatattatatggattatatctataacaatactttcgaaatatatattaattaatagagagagagagagagagag

SEQ ID NO: 175243 - DNA, 730 bp, Cannabis sativa
tattgagattagaacgatggttaacttttcatatcgtgcctatattgtggaacatatagagtgttctatataattgagagtggaattccaaatctatattggtgcaaggaggaattaataagttacgaaatttacttaataaattctagatcagcttattagaagctcggttatataggctcatggtccccatacaggttgaaataatactgcttgtaagagtcagttaattgattttaattaatcaaatataattctaaatttagactatgccttatttatgaattttcactaagctagggcttaagtgtgaagaaaatagtttttagggtttgtttgttagttaagaaactttattaagtctaattaataattatattaaataaaaattttatttgataattaatttcaattattaaataaatagttttgatatttaagtggttaaattggaaaatatggcatttgtgaaagaataggataaatagttgaaaaatagcaaaattgcaagtggtggccccacatcctatggccggccacttaagcttctttttattatttatttatcaattttttaataccaaataaattaaacctaaacctagaaggattcctgtaaatagacagtgatggactcaaaattgacagcttaagttctctctagtctttcagtcaaatttgagccctctctcttctctctatttcaaatctttctctctctctttctctt

SEQ ID NO: 175244 - DNA, 503 bp, Cannabis sativa
gggatttgaaaactattgtaatctaattttcaaatttattgaattacatcgtttaaagacttgtcacattcaataggatttttgtcttttgaactagatatttagaaagtcttagaaactatcataataccgctattttgtatttttctagatttatcacaggcttgggtgcaaaattgagtactatttatatagtacgatgggtacttgagtacatcacacaaaggatcttgtgatatggaaagtagtgtgttggatacattgtctggtgattcacacatttccacatatacctatgaacatacaagttgattagtgagccaaggtaaatcaatatatgatgcataacaaaacattaatgttaatagtatctttttttttaaccatggactgaaattttgataatattcatcttgtacccatttttgattccgtgccttagtcgaattagtagtcttgatccaatttaaatgttcccttcaagtattcaattgattaatttt

SEQ ID NO: 175245 - DNA, 639 bp, Cannabis sativa
cttttgagtttccttatttctggactttgattttgattgagaatgatggtgtttacccttcgaacttcctttcttgggagatcttcctcttgccaagtacacttcttctttcttggattttttttccaattgcaattcgaaatctttcaacttaagtacggcaagaacatcttccaatgcaatcacatctctgatatacttgatggctgccttaacttcttgatatgcgattgggagtggtctcaataaaatgatggcctgactttcttcatcaatcttgtgatttatgttagccaaacctacaacaatctcattaaatctatctatattatcatctaaagaaagtgaagaaatcattataaaatcgtataacctttttagcaaattgatcttgctagctattgatggttttaagtatagttcttccaatttgttccaaactcctttcgctgtcttctctgcgatgagttttctttgaacagtgtttgatagatacatgatgatcgtgtagtacgtcatctcctccatttatgctttttcttctgatttcttttttgctaataacttctcatttccaagaaccttggataccttttggtgcactagtattcctttcaaactttctctctatagcgcaaa

SEQ ID NO: 175246 - DNA, 520 bp, Cannabis sativa
ttgtaacaccctactagattaagcatgttatggtgttttctacacgcctttgctaatcaaaggatttattagaaaaagtgaataattaaaacttcattagataacttcattttaataataaaacataataatttagataatttgggatcccgttttaaaggttaaaaaatatctaaacttcaaaagttgtcaactagcgactagcaaagtaagccaaaattgtcccaaagaccctgaacactccaggtctaaccgccttgatatgtacaatattcatccttagctttagactctcactggtctggttctagcttttacctgcacatacatgtaataactatgagagtcgacaaactccaataagaaaagtataataataaacataaacatatatctagaccgtaactaggggcccatacacctaatcacaatctgataacttggttaggaacgttctcaacaaagtatgactaactacgaatccagcctatactcagtactctagtcatactgatgtggt

SEQ ID NO: 175247 - DNA, 576 bp, Cannabis sativa
gatgaaaaacttaaggaagaatgtttgtcactcgaagaaatttgactagaacgaagacgaggatgaccctcgttcaagagttgaagtagatcctggtcaatttggtgttcgcttccccaaaactcacatgggttcatctacaaatgacaacacacaagatgagtgtttggtcggaatatcgaacgttaaaacaagcaaatatgccgacgaggagtactcaatagattgaagaatgagaatattcaacgaaaagtcaaaactcaggaagtttgaaattttcgtgagttagggcaagaaaatctcatgaagcttagaataagcaggatgaaagacaggcattatgcagttcaaaaaataagcattacggacgatgaaatcgcatgaaccgtgacaaaggaaaatcgctgagtttctaatcttaaggttttctacatctcatctacagcgaaattgaaagtgcattcagaaagtaaatgtgcatagcaaacataaaagaaatcgagaacttactcaagaaatcaagcgtctgggtccaagttgcgtcaagccaaacgagcagttttgatgaaagcactt

SEQ ID NO: 175248 - DNA, 677 bp, Cannabis sativa
  modified_base (443)..(444): a, c, t, g, unknown or other
aattgttatgagatgatttattgatttgttaaaattccgttaatgtacgtacaacacacggttggttgtagtacataccaatccctttttttacacatcttcattgcagtgcaacaacaatacatattttaatatcttatattttttacgctatacatatatctatatagtacttgttgatttgatgtgtggcgttttcgatatggtaaaattaatattaaatatttacatttaaaacctgatttgactagactatacaacctatcaatgaagatgattttgtcaatgcattggaaaaaggcatttggatacacccaaccaaatgggcggattattcaaatttcaaatgaaaaattaaaagactaaacatgttcatttccatgatattactaattacttgaaatttatatgtaattattttaataatattttaccatcaatcnntataaggtcacatcagtagggtgtacgatctactttcaaaactctagctcataccatatcaaatattaaaacaacagcagaacacgcaaaaatatcccaataagatatttaaaatgaaaatattttttcctttgttctcatcaaacccaaatatgctccgcaggtcacgtattattgaaatttgattgtgacgtactgtgtacagactttgacatacgtattttaaaaacttt

SEQ ID NO: 175249 - DNA, 602 bp, Cannabis sativa
aaaaaaaaaactgctttttgtatgagactaaatttaaaaaaagaaaataaagagatcttttattttttattttttaaggaagaatatttaagtgaaaataatataaggaaattctataatgcacctacaccgatacatttttatctgttttagtatccgaaataattttttagtaaaataaattatacttatttaagacatcctgcaaaattttaaaaaattcagaaaagtttaacacgccgaaaattatgttcaagcagtactattttttttatacgcgtgtaaaatagattgtttgaacattgttttctatattataaattttttcgaatttctcaaaattttatagtatatcttaaataaatataacgtacatgaatatgaaaaaaaaaatagactaaaagtttttctggatgccgaaacaagtagagaggtgcattgtagaatcacccaataatatatatttaatctcataaaagtcgtcgtagttaccgtcagcaccgaaaaaatcgtcggaattagcattgtcgctggtaaaatcaccggaaaaatcatcaagaaaccgtttcttcatcaatgaactagtttcatcacacaacaat

SEQ ID NO: 175250 - DNA, 512 bp, Cannabis sativa
tttgcccccgccgcggttggttgtggctgcttcgatcttagcagcgatttctttcgttgtgtgtttcttcggcatcgcctttctagtcatgaaaatgctttggttctgatctttgatcgtgccgccgatcactattgtccatagttgattcactagttagtattactgctaccatctgatggcttcctcaatcgatattattatcattaataatttatttttcagtgagaaagaaattagtactggtatgtattcccttaaacatttaatatttgtttgattttatattttaattgtttgatgcttctttggcttcctcaatctatattattactggttttggaattggataagtgttaatgtgcataaaaacaacccattcctgtggatgagtttgttctccgagttggagatattctctgttagaattcggggataagatgaatggggttccatctcaaaactaattggctatgggagaagtagcgcattcatcttatatatcacaattt

SEQ ID NO: 175251 - DNA, 703 bp, Cannabis sativa
  modified_base (107)..(117): a, c, t, g, unknown or other
atgttagatgataggggtgtatactagaattttcacatctacaccaactcagaacttaatatcagagatggtggttactttcggggtggaggaattattctagaagnnnnnnnnnnnccatctataataatttagttccatcagtgaagctaaataacttagttgttttcgaaaagtactagaaagttattcaaactgaagaaaatttttaactggttttatctctattccattttggatagaattagagatgggtcttctgttcattcagatgcacttaataagcagtaaagaattcagtattcctagaggagtaatgcatatagaaaaatgatgttgcataatgttttatgaacacaaaggaagtaatggtggataaagtagttgcttaccacagccttgcagttcctgtaatttgggtttagtagaatacactacacttgatctggatatcaagacaatagattgattgaaatgtacttttagttttatattagtgcaagtgggagtttgttgtgattttatgccctatataaaacttattttaatgtaatcttatttgttatcaatagaatattagaagtcatttatgtttacatgtttaaggtttaatatacaacttttgttaaatccagaatatataattattcacaattatagtgatgtcaacacaatggaaggtaattatgattatgctttaaaa

SEQ ID NO: 175252 - DNA, 502 bp, Cannabis sativa
  modified_base (266)..(281): a, c, t, g, unknown or other
tccacgtattttgggcaaagttaaagggcatcaacaaccagtacttagcgaattcagctttcgtattgtgagtcatcaacgaaatccctataacttggggattagactatagggatatggcatacacatgatcccacgatcagtgtattcaacatcgatcccacgatcagtgtattcatcatcaatcccacgatctttgtactcagcattgatcacacgatctttctattgatacacattgtaacgagaggggatactcttcctcnnnnnnnnnnnnnnnnctataaatagtgatgcatgttcattgggcaaggagagagaacagtttggtcgcaaacagattagttgagactacaccctagagatattatctaagaattatatattcagagatacttttgtaagagctataagaaaaggaatctttcaccttgttcttaagtcaatacaagtaacgaggattaggctattaccgaagtgctcggggctgaacctctataaa

SEQ ID NO: 175253 - DNA, 639 bp, Cannabis sativa
gggatggtagatagcgaaataataccaaatctcttgtgggtaaacgcccatttagccacattatgggcaacaaaattacaggtcatggcgtcctgctaatattagaaaaaatattagtacatgtcaaagttcgaggggcatgatttggtagaaatcaaaatatgaagagcatgatttagtacataaacaatcactgaagtagtaaaattgaatgaaattagataaaagtccttaaatccaacaatctcaatagttcaagggacatttttaacgatcttaaaagtttaggggcatgatttggtacatgtcaaaattcagtggacaaaaatcctaattagcctaaattttattttgacaaaaaatcaatttagggtcatatttatactattttaaaaaatacagggtctattttattatttaacaaaatagaaagtccaattaataatttttacaaaatacagggtctaaaataatatttacccaattataaaatatatttttaatttatttgatggataattatataattttatttttgtcttatcttcaatctcctactttttggagagatatttgaagggagatcaaattcatctccttatcttttcctttcaacgaaatttgattttctatacttaa

SEQ ID NO: 175254 - DNA, 579 bp, Cannabis sativa
gaacttattctcttttttttttttaatgataaccgatttaagttattctatgttatttgtttgtattcattatgttatagaactggttctattttaattataatcggtttgaattattgcgtgttacttgtttttattcataatgttatagaactggttctattttaatttataatctatttgagttattttgtgttatttatttctatttattatgttatagaaccggttatatttttatttatatctgagacatctacttctattgacttttccagtgacttttccagcgacgatgaatttttcggtgacttttctggcgagaataacttttctgacaccagtaacttttctagtaccgatgacttttccggcaaaatttatcaaatctatttattgtttttttccctatattttaaactttgattaatattttttaatatcatatctttgtatattatttatttatgtcacataaaaataaattctattaaattttttcatattaattagaaaaaaacccttttaatgtatgaaaaaaaaccctattatttaatatattagagttagtcccacatt

SEQ ID NO: 175255 - DNA, 504 bp, Cannabis sativa
gccaaggacttcaattcccccaattatcgaaaacaacttttcgtcttcggttacccgtgcaaccttagttgcctctgtcatgaatctgctgatgtaggctcagagaggctctcctggtctttgctttacttcgactaaatctcctaggtgcaacggaagttggcgagaggaggagaattgtgcatagaactccgaggagaaagccttccatgagttgaactttccgggcgctaacttgaaatacctttgttgggcggcttttgagagggtggcagaaactctgcaacatacatctcgaaatacttaaggtgggataagggatcttccttaccagtatacatcttccaggttggcatcttaaacttgtggggcaattccaggatattaatctcgggggagaaaggggttccacgtgctatgtctaactcaagatcgttgttcctttgaccggccaagccttggaaaatactttctagttcgtcaaactgtgcctgcacggctgga

SEQ ID NO: 175256 - DNA, 507 bp, Cannabis sativa
ttcctttttccttattttatactctcgatattggcttcgtcagattagaaaaaggtttaatcctacggacataattcatagcagaagtggaaaagatggtcatttaatactgatgtacctcgaaaccgcacaaccgccaaaatcagaggacatgcatcttttcaaaaagaggatcatgacgaaaataccctttataaaaagctctttttaaggggcaatgagcacatcagaggaagacacgtgtcaaaattaaagtaaaagcaatatcaacctcgagaagatatatgacgagctttggctcgccatcaaagttaactcagcgaggcatcctcatgagataaggcttactgtatatctttaatgtgcgttcatcttggcccaataaaagcgggatattcatagctgtgtgaatttaaaataaaaaccgcatttacttagcgtgatttgtgatcaaatcccatgattctaggggataatcattgcaaaaagattacagtcaactttgta

SEQ ID NO: 175257 - DNA, 609 bp, Cannabis sativa
gtgtacaacaaatcgaactccattaactattcatgttggatatgaatacccaacaagatcagagccgtatgctaaagctagcaattcatcactatgttctaatgacctgagcttatagaaattaaaaatctagaaaaacacgcataacaatcaagatttgagagatttgataatttagattaagtaaagagtatggaaatgaatacttgcacaccttcttatgaaaccacgaaggaattttttttttttgtgtgtaaaagattatggttagcatttgggtccctctgtgcgattacttctaggtgctctctattaaaagaaaaaaatattacaaatttagctaaatagaataatacaatgttattcgttaaacattatgtaataatttgattaacttacgtcatataagggtcgatcttgatacaattttgtaatatgtaccactcagctcttttgcgagtcttcttatcgagagttgtgattatttgcttacaaagtggacgacactgagatttaaaaaatgttaaatatcgagatagactaggagcatattcattgcgctcaggacagttgaattttgtatgcacacctttgaagtacatggaacaa

SEQ ID NO: 175258 - DNA, 531 bp, Cannabis sativa
  modified_base (335)..(338): a, c, t, g, unknown or other
  modified_base (390)..(394): a, c, t, g, unknown or other
aatttgtctgaaaatcctgaagaagggaaacctgtgttcatttctaccgatttgcctatagccatactagctgaattgatagaattactgcataggtatcgaaatgtgtttgcttggacatatgaagatatgcctgggttagaccctaggttggttacttacaaattaagcgtattgtctgaggcaaaacctgtaaagcaaacttcaaggaattataggccaaaagtacaacttcagatcaaggcagaaattgaaaagttattaagagcaggatttattcgtacgtgcaagcatccaatgtggctagctaacattgttccagtgaagaagaagannnnaaaataagaatttgcgttgattatcgtgatcttaataaagcctgtccaaaannnnnctttcctttgccaaatcttgatacgttagtcgatgcaacagaaaattgtgaaatgttttcttttatggatgggtttagcgggtacaaccaaatcagatggccaaggaagatgcagagaaaacggcatttcgaacccc

SEQ ID NO: 175259 - DNA, 679 bp, Cannabis sativa
ctcccactccattctgtcatatgctttatgcatgtccagctttaccgccattaaaccacccttccctttcttccttcttatcttatgaacaatttcttgagtcaaaattgaggattccgctatccacctacccggaatgaaagccgattggactggactgatcagagtctccatcaaagggcgcaatctattggagagtatcttcgcaattaccttgtaaatgaaattgcaaaggctaatgggtctgaattgatccattctaatagagtgctccatctttggaattaggcatatgaaactgtaattaagtttcggatttaaaacaccagtgtgaaagaaatccacaattgctgaattgacgccatctgcaactacatcccaatttcttctgaagaaacatccagagaatccatcgggcccaggagctttaagaggatgcaattcgaaaactgctttggtaatttcttctgctgatggaatatccgctatcattgcattagagctgtgatcaatcttcttatcaaaaaggctctctaaatcatctgaaataattgggttctgcgatttgaagatgtctagaaaatagttgtttatgatcctttacaatcccaccttgtttggctcaataaacagatgacaagaatagatgtaggggagaaacaagggtaaataccatttt

SEQ ID NO: 175260 - DNA, 504 bp, Cannabis sativa
aaatattttagatcaaaaatcaatagtttaaaaattaattttggatcgatctatatgtagtatattttcctagtattaaattagaattaataattaagttttcatctatacttaattatttatttcttgtatttaatacatttaattaaattgaaaattgaatatccaagttgattttcagcatgatacttaaatattattattttcatgacatttaattaaatcgaaaattattttaagtttgaaatttttatttcataacaacttaaatttgaataattttcaaattatttttaatcatttttgaaattatatttaatatgtagttttttcttgaaaaatagattaaagttgcaaaattaattttattaattttggacaaacttatattaatgtttttttatttaatgattaattaaaatataatataattagaaaatgaattaattagtcaataaaaatctagatagatattatttcttgcttgaagtacttttctagtaa

SEQ ID NO: 175261 - DNA, 621 bp, Cannabis sativa
gtcttgtataagaccacccgctgttgatgctaataccttcaaaataaagcctgacatactccaaatggtgcagtcttcaatccagtttggtggactcccctctgaagaccccaatctacacttgtcaaactttatggagttatgtcagactttcaaagtcaatggagttagtaatgatgccatccgcttgagactttttccattctcgttgagagagcgagccaagagttggttgatctttttgccaccgaattttatagcaacatggactgatttggcaacgaagtttctgtctaagttctttcctccaacaaagtctactaagctgcaaggagaaattaataatttctgtcagctggataatgaatctctccatgaggtttgtgagaggttcaaggatctcatcaggaagtgtcctcatcatggtattgataagtggatgatggtccaccacttctacaacgggctgattggtaatactaaaacacttgtagatgtcgcaggtggtggggcatttatgaggaaaagtaaaaacgaggcctatgaactgctataagagatggccctgaataatcagcagtggccaactaaaagaagtcagacaaagaaggtggctggtat

SEQ ID NO: 175262 - DNA, 519 bp, Cannabis sativa
gagtcatctctttctttatatagattttcatatcgggttaggatttaaattatatgaactaaaaaagatgaaataatagcttaaattaaccttaagttgttgaccatatatgtgggccccataagttttaattttgtcatttatttaataacttatcttttctttcacaaataccatattttaattataatcctataaatgtcaaatctatctatttaataatgataattaattatcaaataaaattgtcatttaacttatttattaattagaccttgtaaaatctattaattaataaataaatcttaaatcctcttttcttctcaaataagtcattgcttagtgaaaaatttacaaacaagacatagtcttatttagaattctaattaattaattaaaattaattaattaagactacaaaataatattattataattagtgtggggaccataatcttatgtaatcaagctctcaataagtagatttagaattgaactcctaattacatagaacgctct

SEQ ID NO: 175263 - DNA, 502 bp, Cannabis sativa
  modified_base (308)..(309): a, c, t, g, unknown or other
  modified_base (452)..(460): a, c, t, g, unknown or other
aaatttaaactacaaatatgaggtatttttcacatatctcagtatgttgtttggttgaataaccgacagagtaagccaccaatcatacttggacataccaatttgtatatatgacaaggactataaccaaatatcaatggattatttacaaaaatatagaaaaataaagataagttttgatatatatggcataaaaatttaattatactaaatatgatatttttttaaaaaaacttacaaatatgggaaaaagtcataaggaatgccataaaaaactttatatttgtgtttctttttatttatttatnnttttttaaaaaaaataaaacactaaaattaataaaaaataatctcaactatagatattatctttttattacagaaattaaacttgtttttttttttttttatttaagctactatatttttctttatttttttgttaaaaactnnnnnnnnnattaaaagcagcagaaaaaaaaccagtttcatcaacatactc

SEQ ID NO: 175264 - DNA, 595 bp, Cannabis sativa
atttatcaagcctaaaatatttctaacaagatggtgtctatagaatactaagtggtacaaaatgaaccccatacacaaatccatttatagtgttttgaaaattaaccacaatcatttcaagcccaacactcacatcactcaatgattgtattatcaatacataagtgagtgttttagagattatggactgctgatttcatttttagctagccaacgacaatgaattaaattaaaatgattaaaaataattaaataatacatatataaataagattaagtgaaaaaaaatgccagaattgttatagatgttcggttccgtgttggtggtaatagcctactctcatttcgtttgtattaaatcgtaagtaaagaagcaagaaggctctgatctccatcgaaagctcttataatgatctctagtattttgctcttaaatctatgtatatatttctttgctaagatttctctcttgtgttttatgtgagtactctcgtgtattcaaggccggccctgaaaatatatgggctcaagacaaattaaattttggggccctcaaaaatatataaaaaaaaattaaaagaagagtgttatggga

SEQ ID NO: 175265 - DNA, 508 bp, Cannabis sativa
tcatacttctccttcatatatatactagggaactgagccgggtttgacccaacttttgtaatcttttgattttttaatttttttctttgtactaattgagtgatataatttgtaaaataacgtgtaatatattaacacttttgaaattagaaacataatttgttagttttaaaatatataaaaaataataattttgtggcaaatattaaaaatagtagaattagaaactataagtatttttttataataaataaatgaaaataataatattttttaagtttaataaattgaatttgtaattaattaatgacgtaagttttattttatgtaagaaactatttgcattttttttcttcagcaaaaataaataattcaaaaacaatttaagtgttatctatgaaaggttttatattttgttttgtatagttgttggaatgcatgttttcttttttacaaaaatgtgtgtaggatgacaaatataaaaaagattccacaacattatctattt

SEQ ID NO: 175266 - DNA, 578 bp, Cannabis sativa
cagggtttgctggtagttgtattttttctttaggctcatccggatattccacgtcaaaccatcctccaagatgtctcttgaaattggctcttaatcaaaaaattttgcatcctagtaaatgccaactgttgtctctaggatgttggcaatgtagtagtcatgatattctgcccccaatttatggttgagcaaggttctcacaccttgttcattcatttgcacatccaggacagagaaagtgttgaggaatctctcaatcgactctttatacttgttatgttctgaaatgtaaccaattccattcacttgtctccatatttgatctaggtgagcttttgtttcctcagaccttagtgagtatggcataactatatatttctcgtgtgccattaacaacacacgctctctcctcataattaccccatgcattgattaattttatccatatcctctattattctcttaagtttacttctctcgttagatgtcggcaaacgtctcaagcccttaattgccttaacaacgtttggattcattattaactctgcacaacttaaaataaatactagattgaaatt

SEQ ID NO: 175267 - DNA, 502 bp, Cannabis sativa
aggtgtctttatcgaacatcatgttgtgagtaatagcagttttacaaataacatatggtgttataagagagtttaataatatcttgatatacttacgattttatataattcactaatcatgtttgggaggaaaaatcaatgggataagttgaagaatacctatttttttttatcaattaaccaaaaatacttacatattaaaatccattcaaatttacctacttttataagtttactatccaatttatccttacatatgttaccactacaaatttttttacttttgttgtgactaaaagtcaaaaagatgtgactaattataaattatcactcttatgttgtgactaaaaggtccgtggctaaatgtatattagtcacaaaattacaatttaatgtaaataaatgtattttaagtagggaaatttacatggtatactaatttttgccatttttttttacaaaaatactgtcaggcggcatttttttacttttttactgtatt

SEQ ID NO: 175268 - DNA, 531 bp, Cannabis sativa
ttgcaagatgggaggcttgtcctcaagccttagagccttctcgtggtgcgccattagggagccttcttatggtgcaagatgggagactcttccccgagccttggagcctcctcgacaaattagattacatctctggccatgtttctcccgttcttcctcaatttgaaggatctagtttcctatgttttaacaatgtcattgtgttcacttttacaaaccctacacagcttatcaaaatagtattatcacatccaaagcctattttgcaattaaatttaaataaagcttctcgacagttcaattggaaagacaattacaggatttatagacacttcagttctcaaattacaacataatttacagggttctcaatgaaacagtttacaccctatccgttcatcagatcagaacttcaaaatctcataaccaatttctccctttccaattgtaacagtcgagaaattagttgtttatccaatttgaatcctgccagctctgcttccttgaagatatccttacacttagccaacc

SEQ ID NO: 175269 - DNA, 628 bp, Cannabis indica
taatatttttggcaacattttaacattgttacgattaaataattttttttttttttgtatatttttatattttttttattataattttaaggtattttataaaaataacgtgaaaacaacaagaaaataatatacaaattattacaaaaaataaaaaatgaaaccataaatagtaaaatatttaaaatttgatgtaactgtatttttataaaaaaattaactttttttttttggatatttatgaaaatatcccaagttaaagttattgattttggttacctaactagtagcaaaattacttttagagcttcaaatgtagttttcaaaaacccaaccaacaagatcttattattcttcttaattcaatgaaataccacttgatcagaaaactgaattcgaaaatgggtccttgggtccccttgatttcatgatctcactgatgatctttgtttcattctggccttacctataaccatattgggcaagttttatgggtattctagacttcagcataggcccagttggtgatatggtccaaattttaggcctaagttgcttgatgattttggaccttggttcagttgttccccttcaacttcttcggccactaatttacaaaacaaaatcc

SEQ ID NO: 175270 - DNA, 678 bp, Cannabis indica
aaacgatacaattaatcaaacactagaaaaaacacaattaattttaaacagattcaacaaatataatttaagaaactttttacagccaagagattatgtttatgatctatacaaatcttttttctttttttttttttttaaatgttaaattactaaattatatctatgaccactatataaacctcttttactatttaactttttcccaattttaatacaaatcaagtttttccttaactcaaagctcaaaaaactaaccaaatgaataagcacacttgatgttatacaccaattgagattaatctcaaaagctaaagctttctgaatatttcctttgtctcaactgtgacagaaaaaatacactcatttatagctgaccaagttaaattaattatgagagttatcatacaaaaaaaaaacacttaattaataattagttatttttcagttttatatctctttattatactaagtaatgtaaaaccacttacttacaaataataaaatcctattttgattttttttataaataaaattgaacattgcaaatctaaaatatgtgaactaacatggaattttacagttaaagtggccaattttacagctttaagttgtacctaatggactagtaagaggtaaaaaaaaaaaaggtgtgatagggttttgtacgaataggtc

SEQ ID NO: 175271 - DNA, 763 bp, Cannabis indica
ttcaaaaagatgaaatgccatgtaaccatgcagtcgccgtcatgaaggacttgaacataaacacatacaactactgtgcacaatactacacatcaaaagcatggctgcaaacatatgaagaaacagtatacccagttggaaacgtaagagaatgggaacttccagatttttttgaagaaatcatagtgttgcctccaaaggagagaatcaagtctggaaggccgaggaaaagaagaatggcagcagcttgggaaacaaagaaacaaaacaagtgtggcaagtgtggacaaaagggacataacaaaaagacctgcagaagaattacagcatagaagtggaaacaactacacatcaaccaaaaaacaactatattaaaacatttagaaaacacatactgcatattacgattggttgttacatacatttttttattgtgattttttatgtggagagatattgataatagggaattggtattattatcattaatatacaaaagaacatcaaatattatagttaaataattaaatgagtggaagaaggttgaaattaataagaaggaaaaataaactacataaagtgattacaaatgcaatttagttgtttgtcagatggttgtaataaggttgttaatagtatgctgtcatgagtaagagtaaatataaagattaaaaatccaaaaatatgaacaaattaaaaaccaattccaattaagaaaaaaccatgatagaaacaacaacttgtctatgattatgaacataat

SEQ ID NO: 175272 - DNA, 867 bp, Cannabis indica
gatgagtagttgttgatttagtataagaatgagtttggcttagaagagaggttgtttgagaagtagtaagtttattgatagtttagaactttggttttttggtgttggttgttttgttacactagctcctcaacccaagcttggtatttatagggagctaaggatgatactacaactttctagatttttcttattttgaattacaatttaactttctaagatattctagaattttctaagtttcttagcttacaaatatagtttctaggtaattctagttttctctaattttcttagttttgtgtagttaatactagaattttctagagaagaaaagtgtagaaatgtgtagcacttttcatcaaataagcgctgatggaaaaacttcataaatattttctcgacattggaaaacggtcggcaatacaaaatattaaaaccagattaaaaaaagaacttataaaaataaccagattacaaaatattaaaaaataaattacaagttaagcaaaaaaaaattataaaagttatgtaaaaatattacaaaaaaaaattatacattattattattatttattaaaaaaaaattaaaaaggagatatgtatcatagctccgacaaagagagagagatctgagccgccaactctggcgaagagagagatacagtatggggaggtccggtgggacactaaaaccaacaaccccaacagcgttatctttgtgagttgttaatgacaccaaaacccacaactccaagcacaccagagccccaaagagttaagagctccattaaccatcgtcggtaacttcgaagctctatttttcgccatcgagatgatctttggtgctctctctctctctctctc

SEQ ID NO: 175273 - DNA, 968 bp, Cannabis indica
gacctcttcgtggatgatcaggaactggtgggcttcttctccgtcatcaatggcggagccacctcttgtggatctgcggcggctgtgggtcccatgtctgtggtttgagattttttaaattttattttgtaagaatatttttctgacgaatgaatggaataaaatataataatggagattttgttaccaaatggaatgaagtatttgtttttagcatgtatttcggtctctctttttcttagaaaatgtcatttaattactatttacgtagccaagttatgtttaaaatagaagttaattaaaattaatctgtctacttttacattaaaaaagtgctaatctttttttataaaaaagtgctacttgctttcaaaaaaataagacttccaaattactaaattcgacagatacgcaatacggtttttttttttttttgaaacaaaacagaaacataacttaaatgaaagcaaagataccaccaaccccttgttttttacaaaaaaaaaaaaaaaacaacaattagaagaagatattaccaaaaatattttgacagaacgattattcaaggtttttttaatgggacactaaaattttaaaaaagtagaagcttagacacaaaattactctaatagaactctaatatgtgggagtctatagtgtcactctaaaaatagtaggacactatagactacacaaaattaccctgcagtctgatttgttagaaagaataagaacgacccagcaaagtgattttgagctacagaggtacaaagagaagttagaaacaagattggcaaaagatttttcactttcacctgatgggtattacgatacaaaagcagaatttgtgtaccgaccgacagaaatatcagacaggagattcttgatgagtctcataccacaccgtactccttacacccggggacaactaaaatgtatcgtgatgtgaaggccctgtggccaggtat

SEQ ID NO: 175274 - DNA, 775 bp, Cannabis indica
tttttcatcaagcaagaggcatccctgtttgggataaagctatggacaaagaaattgcagcccttgaatctaatggtacttggatcattgttagtctccatgctggtcaccatgctataggatgtaaatgggtgtataagattaaatataatgcaaatggatccattgaaaggttcaaggcaagacttgttgccaaagggttcagtcaacaagagggtgttgattacaatgagacatttgctcctgtgaccaagcttgttatcgtcaaactcatccttgccatggctgcttttcaagggtagtttcttcaccaactggatgttaataatgcttttgtccatggagatttgcatgaggaggtatttatgactatacctcgagggcatagtcctaagggggagatgcctcctaatgttgtttgtaagctgcaaaaatcaatttatggcctgaagcaagcttctaggcagtggtttgagaagttttcaacaacattgattgcagaaggctttcaacactcagcatcttaccattcgttgtttattcaacacaaaggatccatcattattgttcttcttatttatgtggatgatgtgatcatagcaagtaattacatgacagttgttcaagaattgaacgtcattttgaatgataggttcaagctgaaagaccttggtgatctaaaaatattttcttggccttgaagttgctagactgatgctgccattttcttctcaaagacattatgccctttaagcttttagaagatttaggtcac

SEQ ID NO: 175275 - DNA, 749 bp, Cannabis indica
ttgtgcttgtttgttgagtcagtgcttctgggtcgcgaggctaacgcgctgattacgcctgacatacttagatatgtcgaagatctcgagttcttcttccggattccttgggggaagcactcattcgccagactcatgcactcgcttcaaaaagacatgttgaaacagaaggccaactacgagaagaagctgagttcggatgttcagcatgagtgcaaatacacagcatatggcttcgcacctgcagtacaatattgggcgtatgaggccattttggaggtagggaagaggtatggcacgaatcatgggattcggtttcccaggatgcttagctggacgagcaagggtgatattgggaagaaagaagtcagtgcattattttctagacgggtatgaatttcacttatgttcagagtaattatttaacataaatgcttgtaataaatgctaaatggttttactctgatattttttgaaccataaacagaatcttgaagtggtgaaggggctacttccacggacagaagaggaggcatttgtgaggaccatctcttacgatggtgtggaaaacctggttgatgatggtgtggatgacacagaggctgaggcagatactcaggtaccagacactcaggtaccaattttttggaaacttttttttatgattgtatacttgattgttttattgtttttgttctgtgatatttgtttacattgtggtattaccgtacgcttaccgtatttttttg

SEQ ID NO: 175276 - DNA, 549 bp, Cannabis indica
gctcggctgaggtacttgtactagctctgggttgttttctgaaacgctctcttctttacccgtacattcaactacaaaatctgctaaggcttgacctttaattgctgttcatgattgaaagataatttaatactggcccaactccaccgcccatttgagcaaccttccagaggcgtccgatttttgcaatacttggcgtaatggtttgtcagtgtatacctaaacaggatgagcctgaaagtagggtcgtagctttctcgttcctaggattaggcaataagtgagcttttctatcaatgggtaccggccttcagcttcaatgaatcttttgctgatgtagtataccaggtgtttgatattgttctctttctctggtcagtacggcacttatagtgtaaaccgtggctgccaggtatattcctaattcttctccgtccaaaggttttgagagcactagaggttttgcgagttgcggttttagctcttgaaaggctttttcacattcctccgtccattcaaattgcttatttcctcggaggatgttgaaga

SEQ ID NO: 175277 - DNA, 811 bp, Cannabis indica
tattacaaaaaagactaagtatcataagctcaaatttctacaaagataagctatgaccttgtggggtagtttagtgaaagtgaaaaacgagctaagggagctctctttctataggtgaaagaggcccataaaaataagaaaaaatacaaattgaatgtttttcattattaatgatgatctaacggtgaaaattaactcttagtggtaatagccatattttggagctcggaggtcccgcagtgggtaacccgaagcttatttttgtaactcccttaggtgaattttacatttacaattacatcacttatttgcatgtccattgaagatgttctcgttggcttacaactaggtccgaccatgagaatatatgggcttaaggtaaattagattttgggaccttcaaaactatatacaaaaaaaattaaagaaaaagtgttatgtgatttgaatcatgaccttgtataatatatcataaacctcaaccaactaagctatgaatatttattgtttataatacaataaatttttttatttttttattttggaacttccaaagagtatagactttaaatacgatcttaacctgcctatacctaaagtcagccctacttacaaccctctaccattaatattaaacagttaaatcacgagagtcttttaacattttacagaaaaaaaaaaaacaaacacacaccacaaagcatatcactttatctatccaactgagtagatgtcacataatgatatgtacatgtacatgtataccatccaccaaaattgttgagcatatccaaagtgctcactccaccaa

SEQ ID NO: 175278 - DNA, 574 bp, Cannabis indica
cttacatgatcaacaattctaactcctccgacatggacaagctcgaagcagaattacgagcccatgaacggaacttgattgcaatgggtcccccctgggtttggtcaatccaataatcgaaggaaaaagggaacgtaggtatgaaggatctagcaaaactgcttcttcaagtacaattatcagacataatcttctatgttcgaattgtaatgaaaagggaacgatcatgaagaacgatgtcccacggcttctaaacaaattcaaacgaaggtaatgcttttgtctttgaatcatgtgttttagagaacgacaaatccatctggattgttgattctgggtctactaaccatgtatgttcttcactgcagttgcttgaaacttgggaaaatctgcttccaggagagttaaagcttaaagttggcaatggcgaattagtatcggtcaaagctagaggaaaagcccgcatcaagtttcaacaaagatttttaattttagaaaatgttttatttattccaaactttagtagaaacttgattagtgtctcatgtttgcaaacacaatcttatatattgta

SEQ ID NO: 175279 - DNA, 581 bp, Cannabis indica
gctagaggatcggggtacaccccagtaaacctcttcctcatcattttttttattttttaaacacacatatacccgagccacccctttgtgagtcgaagggggggggggtaccccaagacacccttatacctcgagattggggtgtttcctcctaattaccccttcgaaggtcagggtggtaccccaactatacctctaagaggggtcggggtgggtacccgacgacaacttacatgttttttacttttggagctatgtggctctattaatatatgctactatgtgttaacttgtctggcatgtaccacactatgcgtaagcatttttttttttattagttaaccatgtgccacatataggttgctcgagacattgagcaatgcacaaacactttagaaatttgtaaaggaaaattttcaaaaaattgtaaaaatatatttaagtgagtgtgttttatgcttactagtccatgtatgagcgttgttgccccccaacgtgactaggtaggttcacctcttgatcacttgtaagttaatcagggctttcacatagaaaactgttatgtcacaggtttgccacta

SEQ ID NO: 175280 - DNA, 1386 bp, Cannabis indica
gtatacttgtagctctcggtagcgttctagcccaacaaaggatggagtggaagaagtcttagtctacttgattccgaaaactttctctactcttatctctttctttgtttgccaaccttaatctttttgaatgtgttaaacatgtggccaacagaaactacggggtactaatgttgattaatttgatttctcagttgtcgtaacctgtgagctaggcctgattaggttatggcattggtttttgtttggccttaagtaactgatactgttgttctgctcccttcctataaaatatatgggttttgttgtgccttgctgagacatgatctaattgttgttttatgttctattatgatttcacttcccagattttaattattaaaaatatgaagaaatcagatttcctatgtcgcttcattaatgatgaatgctagtttctgcttttgtccagaacatacgcaagcaagtacattccaattattgctagtgttagtgagcatcaaccaccaacttggccttcttactttatggatattaatgttttagcattcttggttcctgctgggattgttgtaagttattttttcaacacaaaatatatatatatatatatatatatataaatatatatatttctgaatttttttctttaaaaatttgtatctgtcccaatgacatctatctgttggtaggcatgcttctcacctctatctgatgcaagctcttttgtgatcctctatatagtaacatcagtttacttttctggagtcatggtaagacaacgttttgacagccaattcaccttctggacaccgttttgtcaaagcatgattatctgtttgtgtaatgtacaggtgcgccttatgctagtatttgccccagcagcttgcatcttgtctggcattgctctctctgaagcttttgaagtttttacacgatcaataaagttccagttgcctggatcatcaatgaaaccccaaattgatgtaatatattttctatgtgctgctggtttaaattatcccaatgtaatacttgggagctaaaatttctatttgtttggtctgtttgtttccttcacaattaaggcagcggagacgagctctgttagtgtcataccagagaacgatgtggcaaaaactgataaaactgaagatacattaaaggaacgaccatcaagaaagaacaggaagaaagataaagaatctgtagctgctgtggaaaagccatctatcaagtctaaaattgagaagaggcttctggttttaccttttgaggcatctatcatagcaattttcttgcttgttttgcttggtgccttctatgtggtaaaatttcttctaattctaatttcttgattgaatcacatgcaatcatgggatataa

SEQ ID NO: 175281 - DNA, 586 bp, Cannabis indica
aaccatattaaatcaactataatcacaaacatgtattgtcactccatttttttttttttgaagggggcatgtgggtacacctgtggtattaaattttgagagaaatatactgtgaataaaacgtaactcaaaagactgaggctgttgcatatcaattcatttatagtatgcatgggagaaatacagggaagaaaagagaggcctacaaaaggcttacatgcagcaaaactaacaaggaaatattcccaaaagttatacaaggaggcaaaaagaaataacagaaaagaccttctcaggattgcctcattcatctgtactgctgtccttgttatcaatgatgccaccattatcatcaataggaattaatccattttctttaactccacccccaaatgaaatggggaggcagcaacattgagtttgttgatcagggaagggattggaaactggttggtgtgagtcactttgttaaacatttaacacttgatcatgggaaggtacatattgaatttcgagcttcttctcaacaccttgtcttgacaagtgaacatcaagttctatgtgtctggtccttgcgtggtataca

SEQ ID NO: 175282 - DNA, 655 bp, Cannabis indica
gttttgtattgtcttgagtctgtattcaagtctacaaagaaaatgaacaacagtgctaccttcgggagaaggttttacaaagctttcgggagattgcttttcaagtcttgcatcgggatgaagcaagcactcttcaaggagatcgaagggagtttgagctcttgaagtttcaacaaggttcgattagaaggtggaatacatcaagcttgcagcatataataagtgggagtctatttatgcataagtcaattactttgtatttttgagacctatgtaatgaatcttatctctgggcgtggccccatggactagtaacaattttaaaggatgattgaaaccacatacaaaaaccttgtgtgtttttacttttttacactgtttatttttctagtttcttctagagttacaagttgtcttctttagctacacaaaaattgtttcagtaccagtttcattattcaacatttaattaagtatttaattaaataataaaattggaaatattaaaatacggaatttcaattgatatcagagcgggtcactaatctcttagtgagatcttgagattattccgtttaattggttttgtgtgagatgtctttgtttgcagaaggaagccccatcactcgaccacctatgtgttggaaattatttt

SEQ ID NO: 175283 - DNA, 755 bp, Cannabis indica
gaaggaaaaaagaagttaaaggtctttattttattttgtctgcgaaatatgaaatattaaatagtgtagatttagggaagttgttgagattcaaaatttgagctgcactttagaaaaaaaaaaattaaaatgcaagttgttaagatatttttcaaaaattataaatgttgtgaagttgttaagataatttgagtaaaaaagataaagaacaattataaatttaaatttaaatttgattggattttaattatgataattaattaattaaataattattataataataaatattttttaaattatttatacttttaatttttagtcgtaactatcttataataaaatcaaaagaatttatttttaaaaatgggtttggtatagtatatatttttatataattaaattttaattctataatatatattaaaattatatatgatacgtatatattgttaataaaattattcatatattaaaagaaattatataaaaaatacattaaactaaaatattaatttatttatgtatgatttaaaaaatgtatacaaactctataatcttttttctctattcttattttttagtctattataaatactaaattgttattattttttttttttgtgttgttattatttctaatttaagttactttgattcattttttttttgtgttatgtatttcctaatttgagtctattttgatcaatttcggaatgtttaattggattaattttgtaaaaagttattatata

SEQ ID NO: 175284 - DNA, 602 bp, Cannabis indica
acaaaaaacaaaacaacccacatatttagaaggagaaagaattaagaattatcaatatagccactaattttattcagtgtggatcggtatatacacaaattattttgccaaaaataattttgtaaatattttaaagaaatttttacactatatattgaaatttctaatttttttttaatttttttactgtggggtattgtataagttttatactgtgtggtgtcaaattttcacggttatttcttagttgttctactgttgtttcaattattctgtttattgtttaaccgcaatttaataaaaaaataaaaaataaaaaaaataaaaaaaacaagtattttaataaaaaaaaatacgacagtaaattataaattttacctaaattcagtattttataaaatccatatttaaatccaacgtactgaattatgaaaggcccatcgaataaagccttcaattgggtccatgggccatttgaattaatgggttaagttgcatcatttattgggcttatttacactgcacaccaaagagttaagatgtaattgtggttgagtcacataataaaagctaaacaaaattaaattgttttttttttcttt

SEQ ID NO: 175285 - DNA, 745 bp, Cannabis indica
gctctattttatttttttaactcagttcctgaatttctttcctaatttgattttatgtttagggctgaatagaagtgaccctaactaagaattttgatttgataactctacacgtcattataatttttgtttatttaattttcgtaaataaatttttgtttattaattataaaatatctatctaaatttcataaactacaaaaccctaaacttctaaccctataacaatacatgttcattaataatctttctatataattatcatatttcgtcaaaattttcagccacctttcttcctaattttatatttttttgctaattttttttagttatcctcttagtttgatatgtttatttattgctagccattgctaatttgtttcttttttttttttttgtaaaaatatccatactgctaattttgattgataatatgatcatgaaaaggtttgtattatgttattattttccttatattttaattttttctattgtcattttaacaaattatggtcctgttcggtaacaattttaaaagtggttttctgtttttaaaattaaaattttggaaataagttttgaaaacaagttcggtaacaacattttgttttttgtttttttaatctaaaatcaaaattaaataaattttaaaaacagatttatgttgattttaaaaatttttaaaaacacattttcttttttgccttctctctttcttgctcgtttcctcttcagaagctcaaac

SEQ ID NO: 175286 - DNA, 577 bp, Cannabis indica
tttgaatttctggtgatacactgacaattgcatttgtatttatttacttttattataagcagttagcgtatcctatgaggtcagttgacagccctctttcgaccacttctttaaaaaattcttctgtgaaaggaacattagattctcaaccaccttcggctcttagaattgatgagagcttgtctccaacatctcttgattctgttgtaatagcagagaaggagaccaagaatgaaaaatactctagtaccagcccaataaattcagctgaatgcttagaggctgatcaggtaatgttcactttttatattcattatgcatagtatagtatgagtagtatgacgatgcaagatactagcagtttagtttcacaaacaaaattaatttgtgcaccataagctagtaaagctgccatagccctgtattgaatctttcctttaagcttgcaatgatgtctcagttgctttcttttgattgtggaccactattattgaaacaaattatgttacaaatgtctagaatggaatgagagattaggggcaaaagtttttacgacttttttttacactcttcctaa

SEQ ID NO: 175287 - DNA, 521 bp, Cannabis indica
actcctctctcccccttttttagtccaaccccttttttccaccttgaattagtcaaagccaaaaatctgagaaatagaaggaaaggagatcagaaagatacgcggacgacttgactatagtataggtcggatgttttcgtgagcagtaagcagcagatctcccctgattttgggaaagctggtggccgcgtgtgaattctttcaaggcaaggggcggcctgattcgacattgttttttactctgatccggtcgaggtggttttcgtttaccagcgcgtaggtggtctaagttcctatgaccgagtctttctggcccctgtgaacatcttttcttaatgtattaaagagggcctctctaaccggtgaaaagtggtgggtgtccactaacggccattcctggctcggctccgataacgcaattccgggaggagtcggtagttgggtactggatcccttcggacctggagaacgtgtaacgctgggtcggggtttggtgaaccaactggtcgctcctctagttg

SEQ ID NO: 175288 - DNA, 552 bp, Cannabis indica
ttaaattctatttcctatattggaggaagttagtggaggtaaaaaaacgtatacatttaaactttttttctctaaatctgagtttctagcagtggactataaaattgttgaggttattaacaagaaaataaatgcattggaaaggctatagaccaaagaaaggctatttcgatttggtgttttacgagataataatagacattattttagttttctaattaaacaattaatcctaaaaaaaatattgaaccgatcaattttttttaatctccctattacaattaatcaaggtggagcggtgttagtatagatatcacttaacgacttttttgttaaatctgttttcaaagttgttattctgtttgttgtagtttcttgcttttgtacaataactgggatataaataaagccttttctcagttagttcagttggttctttaacgcctctgttctagcttgagattgatttcagatactctctgtttcatctcctttctctttgttacatggtatcagattgcctctgacttgcgtcaatggagtcctcctcag

SEQ ID NO: 175289 - DNA, 804 bp, Cannabis indica
acactcacttgtagtgtcgcgacccgtgtcctaattccgagcttttaaaatatttttttttctgatgctacaggggtcatggcactacattgtagtgttgcggtccgtgccccctttttcgcagaccctccttctctgcctaaaatggccaatctagcacctcaacatggaactcgtagtgccatggcactccgaaaattatacttttgactagttttcacgatttttacgggttacatatttttttcttctttttttcaaaataaaaataactaaataaaacatagaaattatcatgagtgtctcgatagaattcttaaacaaagattaaaaatttgggttgcctctcaagagcgatgtcgttaacgtcatttagtcagaccaaaattcctcttttaaagcggcgccaagaggatagcgaatttggcttgatcatattaaccacccaagtagagttttaaccgctgaccattgactttgaaagtctctcatttctcgccttaaatgtccagtactccatagggaacacttttataaaatataagtaattgaagaaaatagtatgaagtagtttgagtgtgagtagtaagaaaatgtaaaagagagaaaaaatatagaataagtgtttgtattttttttttaaaaaaaaaaattgtgagggtgaaaaaaatgttgaaaatgatataaaattgtacacttattatatatatatatatataattagtgtgagaaaaaaaaaatagaaaaagagagaagaggaaaaaaaatgaaaaagagaaaaaaagaaaaaaaaacaatatatgg

SEQ ID NO: 175290 - DNA, 910 bp, Cannabis indica
aaaaaaaaaaaaatacataaatataaaatgaacatatcagtaattataatataatatttagagattcggccctcccaaaatttagagaatattttttaatcataaatttttattttatcttttgctcttcctaattcttggtactttttttaattttgaaattaaggtttttttttttttttattaaagaaaaatggacttttaacctaaagagtttttggcaaacttttggagtcttgagcctacacccggactctcttactctccatggccatctttaaggtagggcggttagggccgtttttcaagatctctcagtctaagatgtcttctagtttcttcgttaaaaacaatttaaaatcttgtttggatctttttttatttctcaaataaaaagtttatttttaaaattttgtgctaggtcttataaaagctaaagacggcctaccattctcaaacagacactgaaaaaacataaataaaaatagagacataagggcatacactcaactcaagtacttaacaatgttttaattagtttggacacaaaattatacaccaccacatgatacaaatggttcaaatgttgtattatatcacataagttcaaaccaatatattttacacattaaaatcatcacacttattacaaggcaccataaaacaaataccaaaacccatatgaccaaaccataataccaaatcacaaataaaagaaatcccctataatggatttaaaagtgaaaaaaagaaaaacttttttacttttttcttttttgtaatactaatccttaaagtatagaattagagagacaacttaacttaaaagtgagagtgatcaaattagttcactctcttttcctcttactcttttaagataaggatctatattatatatagtatagactat

SEQ ID NO: 175291 - DNA, 818 bp, Cannabis indica
atcctgctgcaatttcaaaataggaattttccaaaatgattgtaccgttagaatgtaatcattatttaatcattgtatgggaatattccctttttctgttatgatctctgccagctgtactcttgagcatcttttgctctgttattgtattctctaccctattgggctctgccaatataaatgcaatattctcactcagccgaatttgagctgagatctataaaaatctttttctctattttttaagttgatatcagagctaaatagccatgtcgaccgactcctaaaatcctggaaacaatattccagcccaacctactgctgctgctgcagcatccaccattcttggtgcaagctctaccagttctcagctccacaaaccaattcctcaccattttagcaccctaaatcaacccttctccttgaagcttgatagacacaactacagcttatggaaaaccatggtttccaccatagtcagaggccatcgttggatggatacctcaatggaactaacaaatgtccacctgagtttgttgatgcaggtaccatcatggaaagcatagatggtgaagtatctcaattcgtcaaccctgcatcgaaaactggatcacaaatgatcagttctaatgggctagctttacagctcgatgactgaaaccatagccatagaggttttgggagttgccactgttgcagctctagggcaagcccttgaacaactctatggtgctcactcaaaattaaaaatggatgagacaggactctaattcaggtgacaaggaaaggaactacacctatgactgagtaccttcgac

SEQ ID NO: 175292 - DNA, 959 bp, Cannabis indica
tgaattgatttttaaagtttaattataatccgatctaaaagtgctatgacaaaactgtttacattttttgtatctgttcttattaggaattatcttcaagttggttatattaaaaaaaaaagttgttaaaaattaagcttagggtcctatttttactattttagaaaatacagggtctattttgtcatttaacaaaacagagggtccaatctgtaacttttgcaaaacacagggtccaaaatggtatttacccttgtttattttacctaaaatatatatataggacaaatttttttttaaaaaaaataaattaaaatataggaaagttattttattttttttttttttacttgttttgttatcatatattttatttaaattgattgaaatcacaccccaaccacaaaaattaaaaaaatataaaagaattttataaaaaaataaataaaatggaaacgtcacataagctaactatatatatttttgtagaaattacatgaattttttttttattttttttacaatttaaataagttttttatgctgaagttttgtaaaaaaataaaaaatttatatttgtaaaacaataataagttttgccgaaaaagttactaacgccagaaaagtcgtcaaactagtcactgaaaaagttattattgccagaatagtcaccgaaaaaattattatcgccagaaaagtcaccaaaaaaatcatcatcactagaaaaatcattgttgtcgaaaaagtcattaaaaaattcagatttaaataaaagggtaaatagcggcataaatacttaaagttttatgtttgtaagcggcataaacccggctaatgtttatttttagcggcatgagtacccaatgtttgtaagactgtaatttttctctaattttgtcagtacagactctgcaattgtcttaaacagggcacatgtaaggcttaaattcttgatcatt

SEQ ID NO: 175293 - DNA, 715 bp, Cannabis indica
caggtaactaaattagatcccaattcatcgaagtgtgtagttcttggttattcttgttttcagaaagaatataggtattattgtctcgatattaacaaatatcttgtttcttttgtttcttataatcttctctcctctccttgctcttttattgcttctcttgattctatcactattcctgaaactgttcgtgaagcaatgtctcatcctggttggcttgctgcaatgatagaagagatgaatgctttagttgcaaatagttattgggacttggttaatttaccttcaggaaaacgagccatagggtgcaaatgggtgtttatggttaaattcaatcaagatgaaataattcttaaaggctcgtcttgttgccaagggttatgctcaaacctatggcgtagactattgtgatactttttctcctgttgctaaactcatatttgttcgattgttcgtttctacaacagctactcatcatttgcctttgcattagcttgatattaaaaatacttttcttcatgaagatcttgaggaagaagtgtatatggagcaacctcttgggttttttgctcagggggagttagagcgtgtttgtcatcttcgcaaatccttatatggattgaaacaaagtcctcgtgcttagtttggtaaatttagtcaggctattgagaaagttggtttgttgaaaagtaagtcacatcattccatgttctat

SEQ ID NO: 175294 - DNA, 320 bp, Cannabis indica
acgggactctaactgtgacaatcactccctcttcatggggtctaacgtactcgtcgaccatactttcgactgaaagctctcatgataccatttgtaacgccttcatttatttaaataaaataccacatgcaaattatatatatatgtttttttagctcagttgtgtatttaattttatcaaatttcatattcgtaatttataataattttgtaacagtactttgttatagttttctatttaccttgtatttatacaaaattgtaacatatatatgattatacatttataataagtgtagttataaatttgtaaaaacttt

SEQ ID NO: 175295 - DNA, 736 bp, Cannabis indica
cacactgacccacgatcacggtgcccccccaattccgcctttcccgtcgaacccgactcccaccagcagctgcctctccctgaaagtcagtcaaaaaaagtcctacaccaatccaccatatcccccagtcccgggtgacttcccaccatgaataacatgattccttacattccaaatgttccaagtaatcactaaaaagaactcaaacctggttctatcccacagccgagccatcctcatcagaaaagacagcaagtcctctcccttaattttcttcatgtcatccttcaacccgctcacagcccagaattccttactgcgtttgcattccaacaacgcatgagcagccgtttctaccacatgtccagaacaacgttgacaaatattatccaaagccacacccctttttgccaaattagcacttgttgggatccaattatatgcaagttttcatacaaaatgcttgatttttggcggaattttaaggcgccataatgctttccaccagtccacataaatgtgatcatcggattggtattttttgttttaattacacattgcaatgaatatatatatatacagtagaacctctatttaagaatactctattcaagaataacctctaatttgttataaaaaaatgaagtcccaatttgggccaattataaataaaaataacctctatattgtaattagttatacatttttttaagtcccgtattaataaaatatacct

SEQ ID NO: 175296 - DNA, 535 bp, Cannabis indica
cctcttaaaaggaagaagaaacttgaatgaataggaggtatggtatgctatgctcattttaagtatgaagatctttctacattttgtttcatatgtggtgttcttggccactctaaaaaaatttgtgaaagattatttgataccccatttgatcaattggaaaaatcatatagtctggatatgaaagttgtcccatgacggaaaagtcattcaattggtgcaagatggttgcgatcgggttcaataaacaaacctggaagtgttgctggcatgggtggttcgatgactactgctgcccatacgacaaacggtgaaggaattcaaacgggaagattctagtcaagaggttcaagcactaaaaatcagggattttcattgattcagccgattataaggggcaaaaatgaggctgtgattaagagtgcaaatgctgagaatatgggagagttgttgagaaaattcgaaatgtagaagaggcaaatcacctattgatgacacaactgatgaattaaatgggtcaactgtggaggaatcc

SEQ ID NO: 175297 - DNA, 921 bp, Cannabis indica
ccagtccaactagggttatgtagctaattagtctccccctaactctataaatacatattgtctcatcacaattgtatacttttgataattagataaataaattgcttttgatttagaaatcaagggaggaagacttagttgatagtattgtactatcaaattatagtaattactatggattaatcaggtacgcatacctaattcttatatattattattgtgtactatattacataaaaaatgatcttggatttaccattaatttttcttaacacatttttaaacgttgcttctaatatatcccattattaacctctaaatcatctaattaagtccatttaccaaaaccaaagtaagagatggtaaccactatggggtatatatatagagtgcttgtatttcaaagtgtagtagtctaacattataaatataggtcttggttcactctttgacatacacttgttttctatttgttgagcactagctagaacaacatcgagacttgtccattcccaaaaggattttcactttgttccctaagtgtttggtagaaagagaaaataagttttttggacaaaatcggcaccaatagaacttggtgtagctatatgttcttccatcacatgaagagtatttttattggcataaggctggcatggttggggtaatctaattaagagtatcactaattagggaaataataataataattagttagacaaaacaaataataagagaaaatttcctcaaatgggattaaaagtcttttttaaaaattaaaaaattaagatttagtatatccatgcacatgcatgaatgtattggatcaaagagccaaagtaaaaattaaattaaataattaaagaaaagacaataatccttattgttataaaaactcaatgacgcagtcattataatatt

SEQ ID NO: 175298 - DNA, 549 bp, Cannabis indica
aatggtctgttgaggctttgtaaatagatctaatttattttccttgtaactttatttatgggacaatagtatgggaatttatccaacaaaaatgttatgttagttttagattaacaaattatttaaataaatgaccattatacaactagagggagacatttgcaacgatttttatagtttatggaacaaaactctataagagtcatagttcgaaaggataaatcctatttattcgaaaagattattacaaacctaagttagaatatagagcaaccctacacttttctattcaaaaaaaaaactttttttttacccttttaattaatcataagaataataaagaaacataatttacttttcatgaacgtgtataaatatgggtcataacagtgctcaaatattactatccatagtcatcaaacaccaaatcaaagtttagacttttgagctaatttttacttatatttgtaagtttatttattgcccagaatgtccaaaccagagaaccaggaaaaccaacctccaccaggtctcaaacataactccaca

SEQ ID NO: 175299 - DNA, 589 bp, Cannabis indica
ctcgtaatggatttcactatatgttgctcacaacaagggctttatgttttaagaccggatatacaaatcgcactaaacagtgaacttttcaatgttgctagacctagaaaccttaaaagaaaagagattgataatgatgaacaaacttatctatggcatttacgtttaggtcacataggctatgatagactcaataggctaaccaaagacggtccattgaaaaatgtcgtcttaggtgaattacctgtatgcgagtcttgcctagaaggaaagatgaccaaacgttctttctctgcaaagggagagcgtgccaaacaacccctagggttagtacattcagatgtctgcggacccctgaatgtcaaagcccgaggtggttatgagtatttcgtcactttcattgacgatttctctagatacagtttcctttacctaatgcaaaagaaatctgaaacatttgaaaagtttactaggaagtttactatgctttggtctcaaaactaaacttaaggttaaaaacgaattaaagaatcttgcgtaactgataggggtgggaggaatatatggatatgcagttcaaagaatcatt

SEQ ID NO: 175300 - DNA, 585 bp, Cannabis indica
ccttagccgaatctcgaattcgaacagcattgccgtcatggagaacgaggacatatgttgtaaatggctagagacaatgaaacctccttttttgccgccggacatatcgaaacggagtttttcctgagcaggcagagcgaaaaaatcggtggcgaggcgagtcatctgggagatgagtgtagcgtcgacgccatgatcgaccacctgaaacagtccccaatcttcgcacgcctcaacgattttcttccgaatctcgcttcttctattgccttcgttatcatcgattccagccagggaaattaccggaatctcattgctgaattggttgtacgccaccttcggacgctcgtcttcgtcccggacgctcgtcttcgtcccggacgaacttcgctcgtcagtgttttctcttcgcttgaagtgtgcctctaactgttataattatgttccataatagttatacttattaattagttgttattagcaaataatataataatataagacttatgcatgttggccaatacaatatgtgaaaaatataattattttaattattaaaaaataattatactaagatttaaatac

SEQ ID NO: 175301 - DNA, 907 bp, Cannabis indica
ttttttcggttggcctgctaatttagttgccagaagttctcattgtttaagaaggtggttagtgaggctgaatggttagagcaagaggtagttttgtaaatttttgttgctgggctatataaatatttatagggcctgcccaatgtatttttgtaatatttttttaccattttagtatatacacgaaaaaagctcttttttacttttttttattgaatttattttgtacaagtttttttacttgttatttgtttcaaagaaaaaaaaggaatactatttttaggttaaaagaaaaaataaattaaaattcaaaaaatgtaaaaaaaaaatataaatccataaaaatatgtaaactttttgtcatttttttgaatttatgaaataatttcttttttctttttcctttcaaatattaatcttgtagaattttatttttgaatttttattttttcttaaaaagttgtaacttcattaaaatgcagcaataaatacaaattacatcataaagaaatttggaatcaattatttcaactgatctcttcatctagtcctaaacctctcctagaaagattgtgagccataaaattcaagcccatgagtcaatggcgaacctaggattcaaattgtgggggggcgggatacttttttttgataagtgaaagggcggtcttttttttttctttacattgtataaaatgttaaaaattaaatgcaaatttatatttattattaaatagtagtgtaaagtaaaaataaaagtaaagaataaaaataaattgggttcgtaataattaagtaaactacgtgacctctattatgtgtcatgatatagatttaactttctaactactaaacttgtttattgttctatagatatcactttaatttaattaaaaaataaataatg

SEQ ID NO: 175302 - DNA, 555 bp, Cannabis indica
ctctctctctctctctctctctctctctctctctctctctctctctctctctcaaaaatgcagtcttaaagtcttagaaacgaaccatgaagtcctatttatatcctataaaaatccatttgatttaaattaaaaataaaattttgaatttcaaaaatcacgctctcaccgcgacgaaggcttaggcactacagcaagagtgtctaaaaaatctgttaggctatttttagcctaagttctgggtcgatttcataggtgttttctctgttcatgttaccttttagaatggttttacgcttgattttctttgtttcaggtcctcgaggcattagagttcaaacttgtgacagtcagtagtcccgtgatccgtaaggggaaacaccgggtaagctgtgcaatcccacaccgcctggggaaggtcaagtgggatgattctgagactgtgtaggtatgggactacacagttgaagagagcttaaatggattgattggtactacctatgtcaacaaggtgcatcttgtttttcggtagcccatctcgaaagaactccacag

SEQ ID NO: 175303 - DNA, 1353 bp, Cannabis indica
  modified_base (76)..(76): a, c, t, g, unknown or other
aaaggatcgccttgacctcagccccctgcctaggcgtaaacatcgtttgtagccaccattaccaggacctggaacncacagagaatgcatcctgattacgcacggacaactgtcaaaaccgaagccttgagaacaccgtccacaaaaccccattccatcttatcgtaggccttagacatgtcgcatttgataccaacaaaagcctcactccctttcttcctgcccatatcatggacaatctcgtgggcgattattgagttttcaacaatccatcgatttttgacaaaagcagattgatagggagagacgattttgtctagcactcctcttaacctgttcaccagaatcttagccacaattttgtagcagacattgcactaactaatcggcctgtagtcatcaaatttacatgcatcttgtttctttggaatcagtacaatgaaagttctattgacagccttagtgaacttaccagtggaaatgaattccttcacaaagtctatcgtttgttggccaaccgtgtcccagtgagttttgtagaactttgcaggaaagccatcggggcctggggacttaagtggaggcatctcccacaccacagccttaatttcctctgcagacggaatgccccgcatgtactcgttctcctccgtggtaatacatggcgaaatcagttcgaaaatttcctccctaaactttggattagtggaggagaaagattcaataaaccttcccctgaaataatccaccaccatgtctctattgtctatccaatgaatgccatcttgggagacaccccaaatgaaatttctcttgattctaaccaccagggaagcgtgaaagaatcgggagttccgatctccttctttaagccaaagctccctagccttttgcctccaaatctcatcttggcgagcttccacttcagcaatttctagcatcaacgcactctccagttgcaagttttcctgagagggttcacggctttgaacatcaatgaggagtttctccaggagcgccaatttagttttacatattccaaagctttctttgttccatttgctcagagcattggccgtaattcggagtttggtgcacagaatgaagctttggtaacccgtgacaacgttctgccaagcctcacgaataaccttgctgcacccctcatctctattccaagcatcaatatacagaaaaggagctttgaacggagcagagtcaagaaccgtgttcaataccacaacagcatggtctaagtgtcaaatagacagagtgcgagtgccaaccttaggaaatatagagatccaagaggttgaacaaaccacccggtccagtttctctctcaccagatgg

SEQ ID NO: 175304 - DNA, 793 bp, Cannabis indica
ctcaaaaatcgatataataccgtttaagtggtgctgagtactagttgtgtgtgtttcatcatttcattatatttatacaaaatagaattgttaaagatattattggtgttagtattatttttagtatcataccgatattaatataattaaacatcgcatcttatattaaaaaaaaaaaaaaaattgaatggtaaagtgtgtccaataggctagtataaatgtatgtagacttgtttataagagagggtatagcctcgaagactacaaattgttatactaagtaatgaggaaagctagttgaaacttgaatagtgtagtggaatcccatttttgggtgtgggattttatacatacatacatatacatatgtatgtatgtgaattaattaagagagttggcttcattttcctagtagattggtcaaacgtacctatttagattctcttttcactttttttaacttttcgatacttgttacaacatgaaacattaaagcttaaatgaaacaaatgtttgtgtgtttttttatgtataattatatttttatatttttatatatattatcacctggacttggactggaccagaaagaggagtgtgttgattgaatagtactgaggtgtgtgttcaagtgtacgtgtgtgctcaaagttcaaagcaaacccatatttgagaattaatggaggggccccttcttttttaaaaaaagaaaataataattgggtgagaatttaacatggctaaagaaactttggagaatcttaatttttgtgtaatatgttatttgtgtgta

SEQ ID NO: 175305 - DNA, 574 bp, Cannabis indica
agcctgaaatataatgcagcgagatagagatcgtctcctacgaggggatctttaatgtcattattgttgtagtagtaatcggaagatgatattttgtcaagaactttcttgacttcgtcttcgaaatgatatgtcaagcttagttttctgatggtgttaatcagctctagcataccctttaagtctttagtttcaacaataatatgcctcacatcctcgataagcttctcagacagctttttgtactcttcactctgtatatgaatcaatgcataatatgatatcattatcagtcaaaagaatcatgtgatataaaaatacataacaaataaaaaacaaaaaaaatcaattaaatcaagatataattaaataactagttaaaaaaaacgtccactactaatattaattatatctgcaaatgaaaatatatatatatatataatggagcttggtagtgaaaaaaaattcttacatcatattgttgtaagtagactccaggaaatcatattccaaatggttgcgtataattggccgaacgtcttgatgatcagatttatgatcaaatattagttca

SEQ ID NO: 175306 - DNA, 697 bp, Cannabis indica
aataactccaagtccactaaatcacaatcggcaactgcttgttgaaaaccttcaagaagcgaattaggatacagatttccaccacgcttatcaacttgactcagaacattattcagatcaccaataatacaccaaggaagagtcgattctgctttcaaagttcgcataagattccaagtgttccttctaagagctcgtttggttccccatagatacccgtaagccgccaatcaaacaaatcattatgatgaacaatcaaatcaatatggttctgagaaaaacctctaacctcagcttcagattgctctttccacaacatagctaaaccaccactcctaccttgcgcatccaccgagaacataccttcatacccaagttgagaagcaagtaactccaactgaggtttcaaacttaaagtttcacaaaaaaaaaaaaaagtgggttcttttgataaatcatatctttaaggaattgaaacgtccctgggttcccaagcccatggcaattccagctcaatatactcatgatgattggcgaacccgatcgaacgagtccgccattaaatcgttttttgagtgagttcccttctcttggcccaaatttacactacccttctccaacagcccattcggcccaccattaatttcttggcccaatctttttcttttagtttcaagaaaaaccattccctcctcat

SEQ ID NO: 175307 - DNA, 1689 bp, Cannabis indica
gattgttcaagagtattgcttatgattttggagccgatttatgaagcaagattttcgcagaagtcgtttgcttttaggcctggtagaaatgcccataccgtgttaagggtgattaggaagagttttgcaggatatttgtggtatatgaagggtgatttgagcacaatcttagatgggatgaaggtggggttggtgataaatgctttaatgagggatgtaagggataagaaggtgattgatttggtgaaattagcattggtcactcctgtgattactaccaaggatgatggtgaagagaagaaaaaaaaagtgaagagaaagtaccagaagaagagggtattggctgaggatgagccaaaaccagacccttattggttagagacattctttgggttttcccccgaggaagcagaaaagcttccgtcttggggccattgtgggatactcagtcctctcttggctaacgtttgtttggatgaactggatcggtggatggaaggaagaattaaagacttttatcaaccttcaaagagtgatgtcatatggaatagccctgaaggagaagtagaacagggaaacacatcttggccagagtttgttcccacaagtggaccagacaagactcggaagatggactacatacgatatggtggtcacatattggttggtattaggggaccaagggcggatgctgcaacattgagaaaggaattgattgagttttgcgatcagaaatatatgctgaagcttgacaatgaaagcctcccaatagaacacataacaaagggtatactgtttcttgaccatgttttgtgtcggagagttgtttacccaactcttcgttatacagctactggtggtaagattatcagtgagaagggtgtgggaacccttttatcggttacagctagcttgaaacaatgcatcaagcagtttaggaaactaaactttgtgaagggcgatagggatccagatccacagccatgttttcgaatgtttcatgccactcaggctcacaccaatgcacaaatgaacaaatttttgtccacaatggttgagtggtatagatacgctgataacaggaaaaaagtggtgaacttttgctcttacatcttaaggggttcacttgcaaagctttatgctgccaaatacaaacttcgttcccgagctaaggtgtacacaattggtgcacggaatctaagtcgtcctttgaaggagaagaaaggtcaatctcctgagtaccacaatcttttgagaatgggtcttgttgagtcaattgatggccttcagtataccagaatgtctctggtaccagaaactgattacacccctttcccaagtaactggagacctgatcatgagaaggccttattggaatatataaagcttgatgatccgaaaaccctggaagagcaacgtaattgcatcaaggaattgggtcttcttttgccacaagattacgtttcaatgcttgtttggaactacaaaaggaatgctatagtattggatcacctttccttggttggtagcaatagcaataggcaaattgatcaacaattgcttttgggttctaatgaagattatagcgagcaacaaattgaaaaagaggaatactgaaataatgtttgtgtcgttggttgtactgctttttccccttgtagactcaattcttattctatataaaaaaaa

SEQ ID NO: 175308 - DNA, 631 bp, Cannabis indica
cttttcatatactaacctcagcagaatcttcaaatcttgtcagccttactattactttataacagaatacacaatgatcataaagctattttcatcactagtaatcttcttgaatctattgcatgtatcaaattggctttatagtttatttttattataattatgttgccaccttaattaatgatatatagactgaaaatttaccaatgaccagtcactataacaacctctgatattattataattgtgcctctatttattagccatgagaccctagataattcatacactttactaatcaaatcccttcaatttaattttaatcccttttcttttagcaatattgccaccacacttgatgtttttgagaataattattgatagttttgtgaataattattaaattaaaatatgtgatgagagaataatatactataattaacttttagttcatttaatttgtccaaatgatttgatttttcttcatatataatttaaagagtgtagagtgcaactatagtttgtccatatagatatcataagtttttttcttctatattgcatgttgtatataaaatatccacacccgaacaaatagtttattatataaacaatgaatctggtggggctg

SEQ ID NO: 175309 - DNA, 673 bp, Cannabis indica
acatctttgtactattgtttttaagttcggtcaatagtcatgatactaaatctgatatcatgacatttctcactcaaattctcactttccaggaaggtgaagttgtctgaccaagtcagtcttttaattcttctcaaatcagttactacacttcttttagctatgaccaattagaggacaccatgtggatatgccatattgttctaaactttaaaatgtcacttaaaagaaaatggtaacagtggaaatatacaagaagaacacttggacattgtagaaatcaaataatgtaaaaaatgacatattgtcctattagcttattttcacctttgattattaagttcgttaataccaaaacaaaaagcaagatttgcgattgtgactcactaatgagtccgcaggccccaagcaacaaacactataatttgtttgtttattatttcattgaacttatcaaatggctgctaattaactatgatccactcatatgaaagtaataaataaatataatcttggcttacaaaaatctgagaaagagacgaaacgaccgaaatgtgcgtttttactgtcgtcttttcaagcattgaaaccaccactttcaatattatgtactgctacgaaaaaaaaaaattaagattggctagcattagcttaaaaaatatatatatatata

SEQ ID NO: 175310 - DNA, 564 bp, Cannabis indica
gtaaaagaagttgcaggggatgctcaatgtagacagtcatcatgaaaatagagagaaacagagctagaaaagtaaaatcaattatcacacaccaaaaattaaaattattcaccagttatggcctcaaaatcctataatctaatctttatacctatcagggtgtttttctctgaaaacatacaaagaaagcgcctccattgtccactaacatggatcgaaaccatcttctgaatctacaaggttttaatatctgaacattagcctcttccataaaattgtgaataaaataaccgtgcaccactacacagttaaaaacttaatcatgatcacatcagacaccactccatagaatttgtgcagcagcttactcattgttttcaaaatctggtcctgcttcacagcgatctaaagaagtgggtgcaatgtttagatcaccaacaacaattattctccttccctcacacagcaaagactcccatcttttctaacataaaaggaaaatatttcataaatatcattaaaccaactacataaaactagaactacattacgttaaagatagat

SEQ ID NO: 175311 - DNA, 1431 bp, Cannabis indica
cctaattaaccttatattattgtacccaaaatacttcacatacttttatttatttatttaaagtattcttataattttcttatatgttgtgtaattttcacatacttaatagccgtatacatgtatgccttttaaaatatgagtaaatacctattttggatcctgtgttttgcaaaagttacagattggacccctgtgttttgttaaatgacaaaatggaccctgtattttctaaaatagtaaaaataggaccctgagcttaattcttgacaactttttttttaatacaactaatttgaagacaatgcttaatacgaacagatacaaaaaatgtaaacagttttgtcatagcacttttagatcgaattataattaaactttattttgacaaaaaatcaattcagggtcctatttgtactattttaaaaaatacaggatccattttttcatttacaaaacacagagtccaattaactaatttttgtaaaacagagggtctaaaatagtatttaccctttaaatatctcaaaaaaaaaaaaacgtatagcctattaacatttggggttgaacaaataaatactaaaggcttaacgtaacgaaagaggctgctgaaaattaattcaaatgtgccaccgcagtaatcaaattaataaatcaccaaaaacacgcatttgaagtcttccactgcgttgccacaaaaaaaaacgactcccactgcgtgacctgtttaatttattaaaaaaaaaaattagtatatatatatatatcatctccatttcatctttcaaaaaatatatagcagttgtctaaacaaattgtattggtttttccgttctacttctattgaaaaaactgctcctaatattcatcattatatctcctctctcaatttcaaccctcaaaaaaaggaaaaaaaaaattaagttttttatcaaacatagaatatagattatttagtagtgaaaaattgagatatgactacagctactaaacaacaccaaggaaagattacagttcagcttattatcacatccattattgcctcaattggagcttttctatttggttatattggactttcaggtacccttttccttacttttgtcaatggtaaaaatacatgcatagatacatattatatgtctaactaaatattggttgttacaggtggagctaccttgaacgaaggcatagcagacacaaacgaggaactagtgtacagaaatgaacactatttagaccagtattgcagggatggtgcagggtctgatacaatgtatctcccttctgtatacgtacctggtataatagccacattaatagcttctcgtgtgactagaaaaaatggacgtagaaagagtatgattgttggtggaataagttattttattggggcaactctcattgccattgttccacgattagtccaat

SEQ ID NO: 175312 - DNA, 744 bp, Cannabis indica
aattattgaatataccgttagttttaccgtttttcattttatgccatttctttatgttttggcttcttgagcacgcttagtggatgaggaggtcatgtcaaagtgggcgcgcaggcacgtttttcagtttttgaatttttttaaacttttacccaaaaagtgggttgtaaacctcccaaactgcctctatttctatcaatataagtgttattttattttttttcctaatttcatttcttctctctaaatgtttagtaatggtgaaaacatgttcgtctacttctccatccgcgtcctccaaggcgatgaatccgaagaacaaatcaaaagaaacaatgtctgagggtagtgatagtggagagtctgatctttcttcgaagaggaagaggaacaatgctgggtctaagaagggaaaatctgcagatcgtctgttgaaaaagatgaagcaggtggttgaagaagacgatgttgaatatgatagtgacgatttggagattgtaattccagatagtattaaagtatatataatttatattttattgtaatttgtttggtttattttctgatttttggtttgatggatttatggtttacaaatttgtttttggctttttttgttttttttttttttttttttctagtttctaacttaagtttttgtcattgtgtttttttttctttttgtttgtatttttggtttgttcttttaggtttgttggattttttatttgtttttttattttt

SEQ ID NO: 175313 - DNA, 880 bp, Cannabis indica
ctttggctcttctgcataatttgcaatggctttagaacttcaactacctgtgcattttattgagactgataccctcttaattgttaaaggattaccttcttccacaagagctagtttccagtttctattgtttgttaaataatattactcttttagtattcaatttctcgtgagcttagatgtctcatgtgtttatatctactaataatggcgcttggctaaatttactctttcgattgatgctaaatgttcatagttagaaaaatacctcctccccttgtacctattcttttatctattcttttattattttaacataattaataacattttatcttaaaaaaaaataaataaatatagattgtccatctcaaaaaaaataaaaagtaaatatatattgtcccagttcaaaataaataaataaatataattgtcggctttaactgccttcctagttcctaatattattttaggttaacgacaaagtcctcggacgaatagaatttgaatcattagcgaccatgcacggctaccaaaaaatttatatcaattagaaataaaaatcatatatagatccctaaaaaaaaattaaataaatcataaagggttatccacaaggaacgaaatgatatcaagacaaaagtacgaaacttattggtataatatcattgatttttgtaagaaaaaaaaattaaattttactttgaaaaaagaatattaaactttaaactttaaattaatgtaatgccgtgatggcctgcaaatctttaataattaaatagtaataataaaattaaattaaggcacgtacttcatggacaatggaatttggctccgtaagttaagcagcgatgagtaggacacagccaaagaaaaagtc

SEQ ID NO: 175314 - DNA, 676 bp, Cannabis indica
gtctgggagttcggagcttacccccttctcgcccaaacccacgacttctgtcagcctctgcatgggttgttctgtctccgacgacaccgttattgtttcagtgagcaaagagtttgtccccaacattcctcagtctcccttagctcgtccatccctttaccgttgatactcatcgtcaaacgacacacacctcactacaacactaaaaagtttgataaaagacactaggtcaatattggacgagccaacttctcatacagagaaaagattcattatatttatttatatatgtatatatatgagtaggtgggatatgtgtttgattgaccaactaccagagtacattcaaccatgttacaaagaaagttctggccaaaactaaaacttgaaaaagacgctattatttatattttttttaaacaggtagaaaatcccttaattcaaaatacaaatagtcatgtgctcacactattttaaaaatataatcacgacacttaaaagtattacttgttttgaaacttcttattacacaaacataattactaaaataaacaacttttataggagagatatttcaaaatattatctttcccaaaggtcgatccagatgcacgtcttcacgactagacataacaggttaagcttacacgaatttgcttaatatgtcaatcagaaa

SEQ ID NO: 175315 - DNA, 787 bp, Cannabis indica
agggtagttttggaatttcgttttcagttctcttttatttataaagactggccttccaagctcgcagggaaataagaaaccaagtgaacgaaaaaacataatacaattcttctattttcttgcctaagttaagagaaagttttctttttttaattatttaaattttgttttcgttttcaaaatttttgaaaaacagagaagaaagttataaaaatatgggagaagtactactgtttatggaggatttgaaatcaagttatgtaatttcacactgtagaatctgccacgaagaagaatttgaaaattcttccaccttggaagctccttgtgcttgctcgggaactgttaaggtaaaaaaagaaaggccaaagctcaaaacctctgttttctccgtttcttatttttatttatttttttcaatttgaattttgattctgattctcattttttttttctgtttgtctttcttgttcaaaaaaatttcagtttgctcatagagattgtatacagagatggtgtaacgagaaagggaatacaacctgtgaaatatgtcttcatgtaagaattcaaacgatttgggtttctctgttttggtttggggttctccttgttctgtatttcatctcagaaaactgaactgggtctctcttcttttctggttttagagttgatcaaaccaagttttcatcgttttaactttgttccctattttgtgactaaaattgtcttttcttccaacttttcttttatgtttacaagtactactctgttttcagttattgagttc

SEQ ID NO: 175316 - DNA, 792 bp, Cannabis indica
aaatgggacctaaaaaaatgacaggcattagtggttgaaagatgttatgggcatcagtgttggaatatattgaagcccaggtaacatggtgtgggacgcacacattaaacctttaacagtggggtctatatagggaaacatcaatatgcagtaatgcacattcaaccaaaaaaagaagcaatttcattaggcctttgttctttctttccttttttttttccaaatggatttcaaatcagtgatgagaattttgttaaatgttatctatctaatgtcgttttttttttttttttttggattaagtggaatttttgaattttaatttgagtagatagatgcttaataataatgttgatcatcatttatatgaaggggtgtggtgtgggacatgtgaatttgctaaagattgcaatttgcttttttattttgtaactttgctagaaacttctctcaaggatattatgtgaaacacctaaaaactttgtaagttgactgattaatagctgatttgactgaactacttaactaagtacaaccaatttgttctaaaaaaaaaatataataattccatttatttgttacttaaacatatgtacttgagatgattaacaagaccctccatattatcttttgtcatttgttttaaaatttcttttatgttttgttgccttttagaattttgattttgcaaatcttagaaagtgcacaagactcctctttagaactgcacaatcctagtaaccttttttcatttcttttattttctttactttctaaactatatgtatagat

SEQ ID NO: 175317 - DNA, 643 bp, Cannabis indica
tttctttgttccgtactttttctattctagtcaatcgaatcccttgcattcttggtcatagtctattgaaatgaattaaaattgataaggagttggtcaatgatgctcgaacatgtacttgttttgagtgcctacttattttctatcggtatctatggattgatcaccagccgaaatatggttagagctcttatgtgtcttgaacttatactgaatgcggttaatatgaatttcgtaacattttcggatttttttgatagtcgccaattaaaaggaaatattttctccatttttgttatagccattgcagcggctgaagcagctattggaccagctattgtttcgtcaatttatcgtaacagaaaatcaactcgtatcaaccaatcgaatttgttgaataagtagtatcactgatccgtagtattaaccatagaaattagaatattcctaaattctaattagtgtgtattatacataatgtatgatcattgtttgacgaaaatataagaaatacaaaggatcttagctctatcacatgactcggtctggaagtagattgattagaataattcgtaggtaatagtaaatctattgtattcatcgtggtatactaaatatatgtattctatttaacaaaaaaagt

SEQ ID NO: 175318 - DNA, 800 bp, Cannabis indica
agtaggagtgatatttctattaaatttatatctatgataataaacaagttgtcttttaatacagttctattcttaaaaaaaataaacaaaaagtgtgccacaaaaatataagttgttaaccaaaattaaaacttaaaatatgaaaagcctctaacttatacaaatcaaaatattataaacaaacttattcatgtttaaaatgttgttacttcgaaattattattttgatttacaagcaattatccaattttcgtcacttgaatattaaaagaaaaataaaatttttagggaccttacaattaaaagaatgtgttgtattttttaaaaatcacttaaaaatattatgtgtttttaaaaacagaaaatttggaccctggctgggttctaggtgcacgtcttgctcgtcttaaccaagagtcagtcttatttaaggacatagagtaataaacttgaccagatattgaaaataggtcatgcgcttagtagtactctctattttttaaaatacataattagtacttgtattttcaataatatttatctaataaaccttggaatattagaaggaatgccttgcactttaatgactctaaggaggtggtgaactagatcttagtctagagttcttgactgatagagcgaagagcgacaaggttaagttcactcaatttgctagcatttttatgctccactttttggatggctcgtaataaagcctaccacgaaaggtaccaaatgggcttgttattctatttctaacttgaagggtgtatgaatttaataatgcaaatgttgcatcg

SEQ ID NO: 175319 - DNA, 872 bp, Cannabis indica
attggaagactgtgaaggatcaaacttgaagaagaaggacattcgggctcagatcttgattatactctgctacagaaaggattcaagggttagagatctgagtggaaggagacattaattccgctgcatcaatgtaaggttttcttaactttatatgtgtttattttatcgttttagaaagttcatatttaggatgtttaaacaacatacttgtgagtagatctaagatcctggtaaaataatttccaacagttttggtgaaagttggtaaatttatttttcctactgatttcttaattcttgacatggaggaagatgaaaacatttctatcattttgggaagaccattcttaaccatggggagagagttaatagatgtacaaaagggagaattaacattgcaagttcaagatgaagaaatgagtttcaatgtatttgttccaattgacattcctacctattgtaagattgaattagtgaaggcttgttaagaattaactgtcaagaagaagaaaggaaagtacaaagaacgattttgaactattcgatgtcgtatgaaaagattgatgtgtataagttgtgaaggtgaatcgagtcttgtggatagtttcaacattaatagcattggaggacagttttattcatttggtacgagggccttacaggatgcaataggtggacttgatccaagttgaagtttttcaaaggaaatcagtgtccggctaaatgacgttaacaaaatcgctcttaggaggcacccccaggtaaagttctcttctctcatttctttgtttcgcattgggaacaatgtgatatttaagttgggggtgaactgaatttttctttttagtttttttatctttagtagtttt

SEQ ID NO: 175320 - DNA, 619 bp, Cannabis indica
aacttcatacatagattcctgatagaagttactgctccaaaatctaccaagactagcgtcctagtattgacattgtatgccgtggggatagtcaactaccacaaaagtgcaatgtttgaaggcaaaaatattattttctccttttagggtgatagggagctatatctttaccattggcatcagagcatccccattaaagccttgcagctgaataggacaaggttataggtctgcctccgagagcccgattgcctagaatgcaaatttgatcagaatgttcactgaccttccattatccaccgaaactctaaaaactcttttgttggcagtttgagcttcaatgaccaaggggtaattatggggaaggttcacatgtttggcgccctcctctgtgaatgtaattggcaggttcattattcgaggacgctgagctggtgattgcataatgcacacctgtctaaccccctaaaatgtctcttatgggagtttctggtgcttcttgcaggtgtggtcccccagagatcgtggccacatgtccatcacaggtggcaaaactggcttagaggatatgggtatcctgatcccagagccaatgtggctattacagtcagagatggtg

SEQ ID NO: 175321 - DNA, 1347 bp, Cannabis indica
gattactttgaaaaatagattgttatagtgtaatttttgagtctaaataataaatggtgtgactaaaaaaaactttttgaaaaaaaataaagaaagataaaaaaagactataatacaatttgaaagcttgaataatgaccgaaaaagaatttttcaaattataaaaagagagattgataataaatagcaaaactaataaaaaaaagtttagaattttttttttaaaaataataataacaataccaacaccaacaagcaacacatgctaaaagagaggacagagacaacaattaaaaaaaaaaacatattgttatatatgtgaatgtatagagtataccgtttatgaatttaggatagatagtattcggtatatgcctaaatttaataagtggtcatatatctctaaataaaatacaatttacgtctttccgtgcaattaatcctttattaattaagatatcaaatttagaattattttgcatctgagtcccaaattacataaaatatgagatatactaaagatttattttttttattgacatttttaattcactagtttatggggtttaataatctttacatttttttgaattaacttatgccatatttttgtaaaaatattttaaattaccatatttttaagtttccccttttttcgtttacaaaatttatttttaaaagtttctgttgatttcaacttcttgctcgataggtcacttgcaaccaccattgccactcttctcctgaccacgaaattgtccacccaagacaacattgaccaccatcaccaaccaacattcctttcatctctctccctctcttttaccatcgcctgtgatcctaacccagaaaccacgagctaattaacctttacatctctctcactctcgttcccaattgttggaaccacacctcagccaccttggcccctaaccgagacgtcgaatggaggggagaagcttggtgatttgttgcggagggagtggattagacctaagttagagtgagtgagggtttatggccttgtagaacctcatttgtattccaccacctgagtcaatgatggatgcagtcaaaaattggctgggcaggtttgtgctagactattgacttaggttcaaatattgcttcctgtacgcattttagttcaaattttaaggaactcctactaaagcgtaaacatttattgaaggagttacagttgtgaatgaagatcatatggtgccaattgttttcaaatagctaatataattcaattttattggagttgtgtagcattctagaggcatatttttctcttcttacatattgtaaaactagaagttgcatgctttttcattcttagtg

SEQ ID NO: 175322 - DNA, 809 bp, Cannabis indica
aacagaaatttgatacattaaccataacatgaaaactacatagtaacataatgacttctaatcttcattgatacaaatcacattgtattgtaatgagtttatttaggcaaaaatcccaacaaatcctaacttgtatttactgtttctcttgaaaaagaagaaagcttagactaatattaacaaaacttcgactatctaggttatgatccctcctttgaatataaataaaagagtattcataggctaaagggcgagtatggacatgcccatgacccgcctaggaattctgtaaaaagtccactaatggggtaaaatacatgcacatgtacacgtaatattaattattaaaatattatacaaataattaaaaatataaaataaataaattataaaaaatatttatttttaattttattatttttattatttcttttttctctttcttttccttttttcccctttccttgtcctttttctgtttttcttgtgatgaactaaacaaaaaacccaaatatctccactctttctcctttgatatgcctctcttgcccttgctactctcggctcgacgctaatgagccacctcttgtggcgattggccgaaatgaaggatacctcctaatttcccctaatcgtctaaaactagaaccgacatcattgtgttcatcctcaacttgtcagatctccctctattcttcaaagactcaaatccatcagatttcccacctgtaccaagagagagaaacaacgagaaaatgggagaggtgctagagagaaagtgtgagctagagagggggtcgttcgcctgc

SEQ ID NO: 175323 - DNA, 704 bp, Cannabis indica
gtaaaaaagtaagtaaaaagtaaaaaacaaaaaagtaaaaaaaaaaacaaaaaaaaaaaaaaataaaaaaaataaaaaataaaaaagtaaaaaataaaagtaaaaataaaaataaaaattaaatacttactttattatttgtttttttctttttttatttttttttttttgaaaaaaaaattgacaaattatattaaatcaagagttgataatacaacaagcattataagaggtggaggaacaacttccaaccaaaaataaatagtgtccaccgaaagagcatactttgcaagcaagtgagcagcagtattagcagatttaaatacatgaaaaatctgcactctaggaaagttggacactaaaagagaaatattagctaacagacaatgaaattcagaggtggaagcatgggaggattgtaatcctttgaccactaaaagagaatcagtctctataaaatgagttggtaaacgaagatctttaagccattgcaaaccatacataagagccatagcttccatgatttctggtttaaagctgcctgggaaaggtaccgacatagtagcgataatattaccactgctgttacgaagaatcgtaccaaaaccaaaaaaattgttcttgttgttaactgcagtgtcgtgttcaatttcaatctactcgatggtggattcatccacagtgtctctttgttaacaacatga

SEQ ID NO: 175324 - DNA, 735 bp, Cannabis indica
agcttctaataagcagaactagattttacaaagtaaatcatctttgttattaatttctccttgcaccactaaaaatttcaaattacactcttaattatatagaacactcaatatgtaccaagatatagatacgctatgaattatccgtcgctctaatccaaatagtcaaaaatcctctatagatgatctacatcgaataaggacaaatttacggttcctcccgtcaatgtattttctccttaaaatatttagctacctataatcactgaaatgagatctcaatcatttatctctattaagccaagctcgaaggaaatcactgtttcacttctaaatacttatatgtaacacccaataaacgaaaaatttgtatttaaaccttaatcgtataggtcgaacatacatatataaaaatatataaataattttaacaaaagtcgtgatctcgatttcgaaagtagttttcgtaaacatattatatatttgtttttttacaatgtcacatagtgactacatgagttgactcaaaatgttccaaaatcgaaaccctccaagttgtattgccgcgatactgccaagctccaaactcactgctctttcgctttagctttttctttacctacacatggtagcacactggtgagtcaacagactcagtaagatatgcataaatataccatgaattattgtcttgtactgtagccctcatgagtcaacatacaggactcactgaat

SEQ ID NO: 175325 - DNA, 689 bp, Cannabis indica
tatatatatatataagaaataatactgtatgggaaatatatttatttagaaattaataaaaaaaaaaaaaaagcatttttcattgcagatttggaggtgtcaatgcccattttaatgatgcaagtgacatattggaacttggagtagacccagttgaagagaaaactagattttaatttggactttatatttattaattaaatcgtgcttatttttctatagaaagagcgatatgtcacctacattttaaaattaaatcttatcaaataaattgtttaactaacaaccgagtcttgatttgttgtttttgttattgccttattgggttgtgattttttggcaaaaaaataaaagtaaaaataaagagtcaagtgagatcgatatatcgattctttttttttttcttctttttgagaaatttttgaatcggtcttattatatatgaagtgaaaggattgtgtaatatattggagtatgaaataattaataagtaactaattagttaaaccaggttagtggtagacaatatatatatatatatatatatactagatgagagttacgtggcgagccacgtaaatattagttttatataagttctagtgatttttgtttaagaattcagtaattaagcaacgacaacaacaacagtagatagatctatttaagtttttcatattagtaaagta

SEQ ID NO: 175326 - DNA, 515 bp, Cannabis indica
gtacaacccattattggggataggttttaatgttttatggattcgcacaattttaaaatttaaaaaaaaaaaacaattattgtgcaaagatggatcagacaaattggcttgatctctcgaaagagataaataatgcgctcagtataatcagcttcgatcatctggggaaatagtcatcacctccatctcattttttttccaaaaaaaagaaataaataaaaaagcaatcttagaaatataatttaggctaaacttaataataaaagaaacaaaaatatgtatatatatatatatgaatgtatggatcagaaaattggcttgattctctcaaggagaataatagtgcgctcagtataatcagcttcgatcatctggggaaaaagtcatcacttccaactaaacaatatgcatatatataaatgtaataaaaaaaaaagaaatttagcccgaaacgacgaaaaggagagaggcgatgagttccttgcggccaccaaaggcctctacgattcgcagaa

SEQ ID NO: 175327 - DNA, 720 bp, Cannabis indica
gttctttatttgtttatatggttttaattattctgttctagttcatcattttgttaatattgtcattactaattaatttttgatttatctttaagtttgacttgattatatgcacattagcattagttgtaaattttctataaattcaatttaatgtaatataatatgtgtactaagcacataatgtattaatatgaaattttatgcccataaaattatcaactaacattttttttccatatttataaattcccctttctcgaataagtgtacaaccatgaccacaaatgtgtaagttcttctgtctagtcacagaagtatgatatacgctatacacattagaagctaagaaaatgaattgttactatagaattgagattaatagacatttgatggttaaattcctactaattaagataaactgaaaaacaaaatatttaattaattaattaattaatgtgcattttttttttattaattaatgcttggttacaatattcagcaatatttgatagctaattaacacttgcttatactgtctgtcccccagtgataaatataagagaagctgtttattatttagaatgttattatcaacttaattcaataatttatgcctttaaagttgtaacacagctacgtagctaggttgatgttacgcctcaacatcctttcattaattactttggttcaggtttgaggctgaatcaaatttaaaga

SEQ ID NO: 175328 - DNA, 825 bp, Cannabis indica
atttaaaaataagataagatataatcaaattttaaaaaataaagtaagtaagtaagtaatttaaaagttacgaaaaacgaaaaagtaagtaagtaacttaaaccttaaactttttacttttaaacttaaacttaaacttaaaacttaacctaaacttaaattactttcgttaagttaaaaatttttaaaaaaaaattttaaaaaatttaaaattttaaaaattttaacttacaaaataaagtagtaaatttaaagttaaagttaagttaagttaaaggttaaaggtaaagttaaagttaaagttaagttaaaattaaaactaaaaacctaaaaactaaacaaaaaaaactaaaaaacgtaaacggttaaaagttttaaccttacctagaaaaaaggaaaaacgactagtaaaaagtaaaaaagtaaaggaaaaaaacggaaaaaaaaaaacgttaaaaaagtttggtaacgtaacgttaccggtaacccgaacgaagtttagtttcggacgtacgtccgacgaaaaaaacgtaaaaaattactacgacgaccaacgaccccggaccccgttttttacttttttaaactaaagtttcgttaaaaaactaaaaaactactaaactttaaacttttacttaaactaaaaaattaaacctaacttaaaagtttacgttcgtagtaaaaggctaaactttgctttaatttttttccatactatccaataaaaataattccagagataaaatcgcaattagttttcacgaaaattatacaaacatcaatcaatcatcaaataacactcaatacaacatgataccatccaaa

SEQ ID NO: 175329 - DNA, 564 bp, Cannabis indica
gatttggactttttttttgctctgacatttccccaaaaaaagaaataaaataaaatgaaatcttttattctttttttataatatgatttgtttacagccgttggatcacgtgggggtgtagtgtatagatagtcaaaacttgaagccaacccaccgactcagctcatttcgcaaattccaaattccataatgccaattttccatttttcacttttctcatcaaactcaatcttatttactcttcccaaacaaaaatataaagagaaatttacaaaagtatttaaaattgtatatttttttttacagatttttacgtatatatattttataaaaaatagggttatttccatattgattttatgtaataataatgtttaaataatattattttaaaaacaacgaaaaaataaattttctatatttttacaaaaaaaaaaaaaaaaactttaaagaattagaaaaaaaaaaaaaaagaaatcactcctatacttttttaatttttatggtttgagttgctttagtgattgctgtgtgggttgaaattgaagagctcgaaaactagaa

SEQ ID NO: 175330 - DNA, 599 bp, Cannabis indica
aaaaccgatcgttcgactctccaaaacaagtatatatagcttacgtactcaacccacaaaattttaaaccagaaaagttactaattaatttgaaactaatatatattatatataaagagatcaaacaagtccgcattaaaatcaacagatcatcctaattaattaatttgtggggattggttttctgcagaaattcaaagaatctgacagtacgtaatcaatcaaattctaatggtactcttactacatattggtatcttatatatatatacatgagttaaataaattaatgaatcaacaaattctaattaaataattaattaatggtattggtctaaaagaatatataagcttaattttaattatctgaatctttaccttgatcagctagatatatatgaagtgatgatcagctcgcttagaatttactttagaaaccatatatatattcaaaataaataaaccaaaccaatgcttttttagaaatcaatgaaaaaaatcaagaatcggaagtatctggactggaataataaaataaagatagatatttatgatatttaaatttaaatatcccaaataacatattaccttttctttaa

SEQ ID NO: 175331 - DNA, 646 bp, Cannabis indica
agcaagtttttggtaagattagggagaaggttgaagcaaaactacaagggtggaaaatgggcctcttctctcaagccggaaaggaagttttgattaaagcggtaatacaagctattccttgctatataatgagttgctttagaatttccaaaggtattctcaaggatattgaaagcatgattgctagattttggtggggatctacaacaaaaaatcacaaaatccattggggaagttggacaaaactttgtagacttaaggagcaaggtggtattggatttcgtgatttagaagattttaaccaagctatgttggctaaacaagggtggaagttattgactatgccggattgcctaatggctagaatattaaaagccctttactttcctcatggcacctttctggaagcaaatataggccattttggttcatcggtttggagaagcattctttgggggaggttttaatgaaaggatcgcggtagtgtgctggtgatggctcttctattagaattaatgcagacccttggttccctagaggtactcccttctctctccaatctaaagcctctcttcccgaaggagtcaccatagacaagctactcactgaagatggaacttggaaaactgctgaagtttgcagctgg

SEQ ID NO: 175332 - DNA, 928 bp, Cannabis indica
ttttaaatatacatcgacactttttactcatatttgtgattaattaatgtttcacttgattttttattttatactcctttttatgattaatattttattttatacatctttttcttgagagaatagtggagaaaaatagtgaaaattaggttcaacaccatttgatttttttttcttattttctattaattaattttggaaaatcaggtggaacaccatttttaatttccttaaatttggtgataatttaatgtggaccatagatataatttgatcaaatggattaaaattagtgtaaataataatgtagaaaatagtgttaagagaacgggacttatacatatagtaattacttatacatttatgacaaacaaactgcgttagacttaaatcttatatgttgtcatctcgtgatagaagtgaaagtgacgtgcaaagttttgaaaaaacagaatcgagtacttagcctcgtcaatgaaaataaaaacttgataaaatatcataaaattcataacaaacaacatataacaaagtcctaaaatgtataaaattactagctcaagtggtcatagtggatactaggagtgtgtgtgtgtgttgaggggcttatgggatcgaatctcaagcgtgtaactcaaaaaatatatttataaagacacttctataaaataaaaaaatcataattaaattgtacgaaaaatcttaaatttaattatactttcttagaatccgtgtgattagtttttcctcattggtgagttacttcgagtctcttttaataataaattctttgtgatttcttcatccgagctctcttgccattcatttaatttacacttatataagttaaaataaaaatggtgtcttattcgaaaaaaattatcatttgatttaaagtacggtgtagtccaattcaacggtgtggctc

SEQ ID NO: 175333 - DNA, 602 bp, Cannabis indica
cgcgcctcctgcgcgagtgggcgttgctgctgggacggtcttcttcaacctccagcgggtcggatgcgggtcacgcgacccggtcggccccagtcgggtctgtcccgttttccggccaaaaaaacgacgaaaacacacgattttcgatgggttttgttcgggacacgatttctcatcaatctatggtattaatttcgggtattaaagatgataagagtgtcgatcggattgtgttcaatccgaaaactaagaacaaaaaaaattacccgattttacaatgtgtgttatccaattcgaaaaattaaacgggtagaaacattgtaaattagttggtaatgagatttgcaccaccaattttagtgtataaactatagaatcaaaaatcccaaattgaatttcataaagaaaaatacataaaccctaaaaaattaatcttaaaattctcctaatttactcaatgattttatgcaagtaatatatcaaaagaaagagaatttaatgaggaataaaacccctaaacttttaagatcgaaaaataaaaaattcaacataaaataataacgaaattaatatgtaattggaaaaaaataaacatatacata

SEQ ID NO: 175334 - DNA, 563 bp, Cannabis indica
tatatatatatatatatatctaaaaaatatctttctattattattttttactcaatctacacatctaaaaaattacatttctattattactttctttttaaacaataaaataaaaaaatatatatatttatgtttcttaaagaagatgtcgatacttttgcaattaaaaaatatatatttatgttattttttaaaaaataaaattaaaatagtgaatgatattaaaaataaaaagtaaaattttacggttaaactaaaattataattaataacaaattttaaatattattatataatctttccataaataacatttaaattaaatatttttaaataaaaatgatattatttattgaataacatccacacataaaaaaactaattatataactaaaaatatacattaataaaataaaattaaaaatcaaactaagtatatgtacatttcacatgcaatattaacataagcatatctcaatatacacattagagctcttagttcttttccatatatcgctctaagcatatctaaaatttcctatccatatgtgatcattatgcat

SEQ ID NO: 175335 - DNA, 983 bp, Cannabis indica
taaagtcaaaaataagatttaaagagttgcttatcacacgtataagaaaaaacagtcgtttctgtaacaaaatatgtaaattttattttcggtattgcaaactattcaaaaaaaattaaaaatttacagctagtattaaacaattataacatacatgatcataaaaataaaaatcaattgaaagaacgctaagtgttagagcatcgtctaatggtgctctttttttttaccctaattttaaggtaaagtagctaaaaaagttaaagtagagagtcatatttattatttttgctccaattatgttcgaaaagagtaatttgacggcataaatacttaaagtacatgactgttaagtaaattgccacgattggccaattcattaaatttttattttttttaaaaaaaaaaattagcttaaatatttcaataaaaaaaataatgcatagataatagcttcatatttatttacaattaaaaattaaatttaagtatttataatttataccacaaattacaaaatataattagagatgttataacaatcctctaaaaaataaattaaaaaaacaaaaagaatgccaaacatcctgttttacctgcccgtgatagagtcctaagttttagacgcaataaatgccaaaaaaaaattaaaaaaaataaaataattaagaaatataaaaaattaattaaaaaataaaaagtgagtaattgtacctgccaagtacgcctacctgtacctcccaacctttctctcatcatcacctttccatgtcttttacattacaaattacacactcacacattccctttcttacccctttaaatacctctctctccctttctctctttcccaaacccaaacccatttcattcctctacttctctctctctcctttctccatctcaattcaacctcaaccgtccgatctaatctcatctcatcaaacactccatgaagcacttgatcagacgcctctcgcgag

SEQ ID NO: 175336 - DNA, 645 bp, Cannabis indica
tttttttttgcttttttagattaaatgtcgtttttatttttaattagttacttataatttaaaattagtatttaagtacaagtttaatattagctctaacacaacaattttctatgactaattaagaatgcattaaatcacaataaattaattgtgattttactttactaaaatactaaaggacaagtttttgatgataactttttagtgacagccaaattgttaatttttctttcattagttttgttttctagataccaactgttaagtcttacatttgaaaaaaaaaattgtggtttaataaattatattttgcatttatttacagttaatattttatatttattttacatttttttttacagtttaatattttatattttgcatttattgtggtttaatatttctatctttagggtagaagtaccaaaacattcaaattatttttaaatttttttctttgttgccatttttctaatcctatagtaatttcaacactaaaaataattacaacatatatattttaaaatataataaatgattgaaaatatgtattttaacttataaaaatttagcctttcaaaaaaaaaaaaaaacttataaaaatttagaaatattttaattaaaattaaatcctaaaactag

SEQ ID NO: 175337 - DNA, 969 bp, Cannabis indica
aggcgaaattatgatatattaatgttacccttttgtgtaggctatacaagttggacaagggtttcctattgtggtttcttcaacaccaaaggagactgtcgcttcatactccctcagagaaccaactgaggtcatggcttttttgatacggctagtgaagtggagaaaaagtgtttcatagagccaatgttcattgcctatgaaaagagcttagctattaatatgtttatataattatggttattattagtagctagtgtgagatgatagtaggtgattattaaatttgcctgtgttttttgacttggcaaatttaggtagctgtgtgtttcactcctcaccacttatgtaaaagtgatgatgctgacatggctttgatataatggtgagtacttttgcagagtagtaatcccaaaaaagaatagtattaggtaatattatttattataggggagaactatagaaagcatatgatttatgttacatattgagtttgaagaggcaacctcttcaactttagtgttgtcttttcaaatataatagattaaagtagtggttaatggtttccttttcttttttgctatgttctattacaattattaaatggcgaaaaatgcataactttttcttttgaacatgatgaggattataacaaggtaaattatcacaatcacattcacataatcaaatgaccatacatcaatatcaactggagcaagttaaataattgttaacgattatgtaaagtcctcgctttaagtttttattgggcacttacactcttggaatgatggcttttatatacgagtatgtcactttggccgcttcaaggactgacgactgaccctacagacctttagagtgtttctagcatgctttgtcctcactcacacactttctgggaaaacttcctaggaggtcacttatcctaaaatatcccaggtcaagcacctcaggacaatgcacctt

SEQ ID NO: 175338 - DNA, 611 bp, Cannabis indica
aaaaataatgtttttagtcatatttttgtgtgtacatatcatcgatagactgatatgatgcttacccacaatctcggagttctgggatcagactttgagtgtaatttggagagctctgactgaaaggttatgactattgaagctttgaactcaactgagaatggactgcagaagtgattcaatccgaaattagccaatacttattatgttaaacatgaaaacagagatcacatgagatggttaaataagatgcattgcaaatttgcaagttatgttattgaagcaaagtttgagaaaaatacgcgagcctaacttacatgaacaaaaggcgtgttgcatgttgcgattgataaagtgaaatttgtaagaaaaagaaacaaattaagaacaataggcatatttggcaacttattagttattagtaacttaccctgctaagattgttggacatgttaaaaggcggggaagtaaaacgtaaatgggcaaagtcagattccggcatacatctccgtctgctatctaaaaagaaacaaaaacatatattcagttatatgtgatttcagaatatatgtgatttcagtttaagttcctttgaagaaagtgttgcatac

SEQ ID NO: 175339 - DNA, 1292 bp, Cannabis indica
gattccgcgtcggttggctaaaaatccagttaacacctaccaagccaaatgttaaaaataagtaatctaatgctttaaaaaaataaaacaaaactaattgccctttaaatattacatttagatatatgattatgtaaattataattaaatattattatagtaataaaataatataattaaatattaattttaataataatgatcaaaatatttatttagtgtaatcttttttagacgattagaaatttattcttctaattattgtatgttgcaattgatttaaaaatttgtaccattttaaaaacgaaaaaaaattataatcttgattaatgtaatataattaaaaaaaatcgattaaaaaaatataattatcaaaaaaagtttaaaactgtaaatatgacttaaaaaaaaaatgaaatatgataattttaaaaataaatatataattatttatgaccaatttagttccggtaaactaaaaaaatattgaattgattagttaaaatagtataagtgtaataaaatgttaaaaaagttttataattaattttttttagaaaaaaaaacaaaaatgagtattttaatttattgtgcaatttttcataaaaaaaaaaagaacaacgagtgtttttttacatcaatcaaacataacattgatggcatgttaactaataagttatgggaatcaatggtaaggtaatcattcacttatatttgtttacttacattattaaaattaagaaatggagaacctcattaaataagggagaaaagaaagggagaacttctcccaccaattttataaggaatgccactaacggtaatggactttaattgtaaagaccgcttagtttaatttggaaattagcagttaatcatgtttaattatgaaattatttatagctatttaaataattatttatactgttattattgaattctgagatgcattttatgtcatttagtagttttcataattttgcatttctggtgcccggtaacatggaactcggtgtttggctcagtaaaatcacaacttagtatgttagtagtttgggacggtttattagacattgggaatggccgggaatttagaatttcccaaaataccccctttagtgttatttatgtgattttagtgtgaaggggcaaaatggtcattttgccccattgttagtttgtctttttgtgggctttgtaattggaattatgtgaattatatgtgttttataatgctttatgttggctgaaagtaagtattagttgggttattttttcatttatacaaaaaa

SEQ ID NO: 175340 - DNA, 712 bp, Cannabis indica
tacaaaagtgaaaacagccctaaaatatttaagttacttatttttttttgttataaaagtttttttctaaattttttttcaaccgatagaacaatctcagcccatacgatgtaaaaatgagagatttttttaattcgataaaaaaagtaagcataaaaacttaaatttttctaattttacccatttatgggtcttacccattaagagtgcacccgtatatatttttagactatatttatttataacaagtgcaattgtattaatgtaaatttaaaattaattaattatataatatttaaaaaaatgaaataccatttcaataatatataccgtataaaaatcagcaaaattttttaattatatatataaataatttaataatattggtataaaatttagtaatatagtgtattaataattttaaaatgtcactataattatttaaaaattaaaaatgatgatttaataaaaatgtgagtaatataatttagtaacaatttttaaaatgtgactaaaatcatttaaatataaaaaataaacatataaaatattttttagtaacattttcaaatgttactaaagtgtactatttaatgacattttagtttacatcacatgggcatatcctacattttctacaaatattacaaaagctatgaatgtgaatataagtgtataatagtgacatttctatgtgttactaaatatcatt

SEQ ID NO: 175341 - DNA, 605 bp, Cannabis indica
gaatgatatgatgtaacatgtaccggccagccaactactccaacaacattaattattgattattggatcactacaaatatgtatagatttcatagataacatttaaaacaaaggaggagctgcattagtttcatagataatagatttcatagcatgtaaaaataactatattaatattaattcaacgtactgatcagaagtaaaatcaatgtaacaattctacaaagataagaataattcttaacaaaaaaaaaaaagataagaataattgatttataaattgcatgtcgatccatagcaagcaactttaagtttcctcaagctatatgtacaataaatgaggtagtcttcacatgcatgttttcattgatatatcttattttattcacctattttttaaaaaaagaaaaatagtggtagtactcatcatatcatttatattgtttaatatagtacttgaggtatgttgatagactactacaaaaaaaaaaaaaaaaaactattcttgtcggttgttaaattggtttcttttcgaaaatcatcgctaataaaattaagtgattagagtttaaaaccaacgcctacacttaagaatacccatctgt

SEQ ID NO: 175342 - DNA, 605 bp, Cannabis indica
atggaacaaaaatttaatgcctcggtaataatgtatccttgagcaatacaaccttcaggtcgagctttgttctttacatatttctttaaatgacctaattccctgaaatttattatgttttcaatgtataattttaaaatattgtactcaacaattatcgaataatacaaatttaactaaaatacaatttatgatacctttcgattgaatacatccatcgcatttgtactggacctcccaacttagcttctaatggcaaatgcaccgcaagatgaatcatcacatcaaagaaagcaggaggaaaaatactttccaatttacataaggtaagtacaatgccctcttccaattcatctaagtctttcacatttaatgtcctcgcacatagttttctaaagaacaatgataactcagcaattgcatccatcaccttttattcaaatatggccttaaaccaataggtaacaacctttgcagtaagatatgacaatcatggcttttcaacccaaataattttccatctttcatgttaacatttcgagaaatattcctgcatatccatcaggaaattttacagattttatgaacgtacaaaattcttgtcg

SEQ ID NO: 175343 - DNA, 680 bp, Cannabis indica
aattgtgctcaaccttttttcctagttctacataactcaacttttgtatgacaattgacaaatatcatcaatcatttattattttttttttttaaaaaaaaagaaaaaaactaatagttggtcagaggaaaacgtcgacagcagggttcgaacctgcgcgggcgaagcccaacagatttcaagtctgtctccttaaccactcggacatatcgacattttgatagggttgataatcatattatacttaatctaaacaaaaatatgcattttttattttttattttataaaatagaacgattttgaattaaatcaaatatgagagagaagagtgtacaccactgaaatgatgtgacatatcacaatacattttatcttttataggttttttagtaagacttatctgaaaacaatttgtgctttgatatgataaaaactgaaatagagaataaattataggaggagatttataataagaacctacttttttgatactcacatgtacttatcaattatcatccacacctttcaatttgattattataacgccaacattagtattcttgtatccatcaaaaaataaataaataaaactaaaagtattcttgtatattttaaaagaaaatcttaaagaatttattgcaatgaaaatcttatgtattattactattttattttagga

SEQ ID NO: 175344 - DNA, 580 bp, Cannabis indica
taagaacattattattatgtctattaaattcctttggtgttatctttaaacttaggtactttataattttattgtaagtaacatctttctagtaactagttactattcttctaataatctttcttattttgtaggtaaaagttttggagtagagactttgcaggtaacaaaaatagttcaaactatttagctttattactatgatcattatcttaattaattatgttatgaacttttcttcttagacatggtgtattgcaaagccttcaacgccagaattaacacttaaaaataaccaattttacgcttgtgatcatctcgacgaacacgattgcgacgccatcgagcaagatcatccttgcttcaacacaaattcactcatgcttcatgcttcatttgctatgaatctttattaccaaagaaaaggaaggcacccttggaattgtgactttgacaaaactggtcttgtctctctaaacaatccaagtaattataattaactcaagttattactatataattctctttcatctcctaaattaagctatagtaacatgaaggaaggcaccccaattttttt

SEQ ID NO: 175345 - DNA, 1065 bp, Cannabis indica
tttttttttctcttttactttggtctaaaatgtgctttgtatttgtattgtgatgaagtagtggcttttggataggtttctgctgtgatttctgaagtgggtttgctgtgaattgttgtttggtgattttgacttgattacattcttctttcttttgcttaaaccgtttgtaaaatagtttatatagctctgtagcaagaaagtttttgtttttgctctttaatcatttaatttagtgtgaatcaaaatcatgtcttgattgtgcatgagagaaaattataatttggtaatggtgacaatttttttaaagtttggttaaagtttacactgaattctggcccaaatttagtcattgatgtgtttactggtagaatcaacatacctttcatgttttgaggatcattgagctataatcagggattccttacctggaaatgtttcttttcaaggtttaacatattctcatattggcatatcttaattttggttgttacaatcccattttacatgctgaagcaacttagtgaggtttcctgggtcggtttattaattaattatgtgaacaagtgaataatgtactgactagttgttctgttaatagatcattgaaatggataaagtatcttcaagtcagcagagaaagattgacgcgctcgaggcccaactgcaggaagctgaggatatagtgagagatctcagagtagagttgagtgaagtgcaagcagaattggagaagacaaagcaaaaccaagcaccaccagctatggatgagcataatttagacggcaatacttcacatgaaaatggaatttcttcaagaaatgaccaagcactgtctttgttagagcaaaatctggagaatactactacacatgaaaaaggtctctacagccctgattttattgtttctgagccaaattcacaagtagaaccagagacgaattctggcacaagcaaaatgttgaatggaatgtttgaaggcttatgttacaggacagatgattctcacatggatcattgctacaatgataaccccaatttttcttccttagtgaagagaaggaa

SEQ ID NO: 175346 - DNA, 876 bp, Cannabis indica
accagcactccctgatgttaaaagcaaaaatggctaaaaccagatgcagattttcgtgcaacgataagacaagcaacgagatcacaccaattgaacctgaaattagaagaacaaagtaaagtgtctgatgagaaaactttgttgaaaccaaattcccacaattcactctttaatctcccaaaatgaagtctgatcaagttttcttccaaaatagtaatgtctcaaatataccccataatttactacttaaaaaatagtaaataccaaaaacaaaagcatactaaagtgttgtccactacttttgatatagcctaaattaattttaagagttttaacattagataaatattaattaaacaaacatccatccaaaaatagaaagaaaaacaaaataatacaatgtaaattctaaatttcaacattaatattcaaatacaatcaaaatccttaactataatacacagcagaagggtttgttttattaacaaacttcaccttgttaaagcctagatttttgtctaaataaaactccaaactttaaaaaataccaaaacaacaacaaaaagaaaaagcatcctaaagtgtcatccactaactaataaagagcactaaattttcctttataataaaaatggaagttagttagttagttaccagctatgatgaaatagggtcttcttctgtagccaaaaattgggataacatcagtaagaagaccccaaagaggtttaacaatccaaggaatagaagtgattccaccataaatctgagcttgagaaggttgaactttctgaatatctttcatataatacttagttccaacacgcccaagtgctccactcaatccctggcttattccatagattaaaatcaccc

SEQ ID NO: 175347 - DNA, 864 bp, Cannabis indica
attattttaggaataaaataataaataaataataattaccataattatatgtcaaaatatctcaaattaagcaatattcaaatttctacaaaaatatctaagttatttaaatatttaagatatgatttataaatttccaataagaaaaaaaatgatatatatagaaaaatatcatttttaaacttataatttataaataattaaatatttaacaaaataacaaatttttgaatttgaaaatattatggtaagtatatctataaaaatatctatgttaatttcaaatttattaattatttaatttgtcatataagataattttaatataatattttaaataaaaagacaaagttatcttttaatttaaaatatgttaaatatcaaaatatctaatcttataattaaataatatataaatattaaagaagttaacaaatttttaaatctgaccataataggaaatatttaaaattggaaaatcgaattttgggaaacaatcccataaaaatttggatttttggggaaaaaacccacaaaaatcgcaatttgggtgggctgccactagggctgcacgtgcagcccagttaggctacaaacgcagccaaaagaggctacaaacgggctcaaacgcgcgcggaaggagagcacccagccgaggattctcggaatcagtagggtgctcgtgggcagatctagagggttctgggcgaggctgacgcgcgagcatcatgcttgtccgaagcacctggtgcatacgagcacctagcttcaacagccatgaatcctgatttttcgaaattcataactttttcaatttttatcggcatcgagttccgtaaaaaacataatttcttaatttttcac

SEQ ID NO: 175348 - DNA, 972 bp, Cannabis indica
tttttctattttttccttttttaaactttttacctatcatccaaatcacaaaacacaacatacatcatagaccaagtaaaaaaaaaaaacacacccacacaaacatagaaccggaggaattttccaccaataagtcaacaacttagactaaaaaaagaaagtatacaaagttagagattgagccgctacaagtaatacgatttgctaagatcgagttacctcaaaaaaatttgataaaacaatttgagacaaaattaaactttactactagctaaacaaacaacttaaacaaccttaataaaaacaccacctacacaatagatagatataaaaaaaaaggatagcatacttatatgataatattatatactatgaaaaaataattattttgactgcagatctcaattaatttgtatgggaaatttaatttttttttatgcatgatttcaaggttaatttgtttagaagacttaaactataggtaattgttagaatagccttattttacctaaatcccaaaattacccctctcaaaatctcacacctattctctctacttccctctattctctctattcgtcccaacccaaccatcccaaccccagccaaaaccccaaacgccagccacacacgcacagaggagacccactggcccacggcgctccccaccgacccacgacgcaccaccgaagcaccaccaccttttttttactttttttatttaattttgtattgtgattttagtgtttaaagattagattttgttagtatttaaggattatatttaggttttagaattctctaagatctgtaattttgggctaaggtccgatgtaggtctgatgggtccgatagggtcgaatgaaactgtgagtttgtgaggtggaatgtaggtccaatggggggtccgagtgggtccgatataggggtctgatgggggggtctggatgggtccgagttgtgtaaatgagg

SEQ ID NO: 175349 - DNA, 800 bp, Cannabis indica
agaggatgaacaagcaaaagaatgataagaacttcaaaaggttaatagtaaaagagaaaaacacattcgtatttatctttttcaggtatatatcattcttttacaatagtaatttttttcttatttgaatttttgggtatgtgattttttctttcattttctcagttgtggacacatttgggctccctccttagagatctcctctcaattcccccttgtagcttactttctaaaaatataatttttttcaaaataataaataatttaattttgaggtctatatgcgactcaacaatacaatttgagattaatctctttgtcagacaagcaaccgcggaggatgatgcataagtcatttatacttgtgtttgtatagccatggtggccatagttttttttcaaaaacataatgaattgttgtattcacccttaagaattgtggatgaagttcaaaggtttcgactttaacgacaccatttgtgacatatcttttcaaggaacctccattaaaattgcaaattatggacatagtctagctcaattgcgtataaactatggaattgttgattaggctaattcttatgacgtgattgaggtatgatatggggcatagtccaaactcaattgcatataaactatagaattgttgatgcatgctttagtatgttaaatcgtagtgtctaatgcagttcttgttgttattttataatccttgtcaatatgattccaccttagctcacaattacatatttcagcttccccgatgaagcttaaagctaatggtaagatgaagttcaagc

SEQ ID NO: 175350 - DNA, 768 bp, Cannabis indica
aatgtgttttttagggttttgttctcatttttcctgtaggaaggttttgtttttcttaagatttttttcttatttttaaatcgttttttgattgttctttcagtgttctattggcttttttaaacagtttttttaatgtaattttttagttgttttagtgttgtttaattttattttacagttaacactttttctaataatttcatgttttgcagattgttgtttacatgttttttttttcagttgttcaacttttatgctgtttctgtctgggtgtttataaaatgttgttttgtggttggtttttggatttttcaggaagatcagataatgttgttgtttcatatttttttttaaaattatatatttagttgtttgatttttttgcttctgattttttctattataactattttcaggttcctcctaagagttcggacaagtttgaagacttcgatattcccaaaaaaatcctcctaaggtgtgtatttttgtttctgttttttttttctagtacatttctctttttgttacttctgtagtatattgtattttagctttatagtttttttttattgtttttgtgatatttttgttggaactgttgcaggaatgagattacatatatgaccaaaagattatgtttcttgcaaaattcgtctccactgcttcatacaaggttataaataatattaagacttgtctttcttctaagcagcttgaaatattttcaaaaaatatgttttggccatttcattaagattcttg

SEQ ID NO: 175351 - DNA, 1145 bp, Cannabis indica
gagagagagagaaaagaaggggaaaaaagaaaaaagaaagcagatctgttttcaaaaacacttcgtttaagaagccatttgttaatctcattgtttgtttccaacatgttagataaaataaatgcaaagtatatctaagcacttataacccccataaaaggataatgtaaagtgcggcagttagcatagctttaacaagttttaatttactatgacttacaggaagtgtctcccatactgcttcatcactcatgctttcatcatctcctggcattaaagcccgacacattctgcaaaggaaaataacacggtgaaggcaagaactagagcataattaatcaaataaagccatgaaaaaacgtaaggcatgcagaaaaataatgaggttaggcaagggatggagaaagaataacattatcattatgaaagaaagttacctgaaattatcaattagaataattatctcaaatgccagtaagggtagaaaaacaatcttcaaattaacagctgctgaatcattaactgtaagagtatgaaacagataaatgtgagaaaaaggatgcatggtattactcgcaattttttcaatgtacacaaatacatcatcagtctggacttgtaaaatacaaagttatcactgtgatgaataatagcaagcaattagtgagctagatccatttcaaaagttcagtgtagtctacatatttcatgcaaattactcatgaataacaagagaccaacaattggctctgaaaaattgcgtagcattagttcttaccatgaatgctctcaaggtatatacaaaggagcaattcaaatgcaactagcaatggtgttgcaacaacagcatgacaaggtgcccactgtcaagaaaagtaaaataaagctgatattcacatcctcatctccaaaaacttaattaaacaatcattcttatgaaatgtgcagtagaactcaaatagaatctgggaaagcatacatgacgattatgtggaactgatggagcaggcaatgagaaccttccccgtgcaacaactgcatggaatatccaaattggaaagaaaatcatcctgcatcttaaagacatcgaatctataaatcaaatccattcaaggaaatatgaaataaaagagagagagagagag

SEQ ID NO: 175352 - DNA, 701 bp, Cannabis indica
gctcaaattttttagatgatatacttgatgaaaacaataataattagtttatgttaattttagttatgtgtggatttatttaaatttttaattatgtttgtgcattgtcctgagcccgccagtatcccaggctcaggacaatgcacaaaatcctgatcttaacttgaataccaccggctcaaattttttagatgatatacttgatgagaacaataataattagtttatgttaattttagttatgtgtggatttatttaagtttttaattatgtttggatttatttaagttttaaattatgtttggattttaaagttttaaattatgtatggatgttaattatttaattgggttattattaattttaattttatttataatattaataaataaataaattaatataaatataaccatttatatttatctgaaaaaaataaataaattataaatataaatataaatatatttatcatttttattttttaattaaaaatactaataccggcgagaatccaccgctattactgtgtcagaaattaattctgacgcattaattaccggcagggcccgccggtattagtcattaatagcagtagacgtgtcagtccgccgctattaatgactaatatcgacggggtattaccggagaggcaataccttaattgaaaaagctagttcttatcatatcatattatatca

SEQ ID NO: 175353 - DNA, 828 bp, Cannabis indica
ggtgtccataaaagttaataccacatatagttttacataaaaaatattgcataaaatgcaattcaatataatacaatacaatacgacctaatacgacgttccaaacgagctcttaatcttctcttcccctctcccacagccgcccattgcccacctatatttgctgtgtacatttacattggaaacatcatcttaaagtcattagtgtaggaaaactttttactttcattttgggtacaaaatttagggtgaaatattagggtttatgctcattagttatatggtattataatttgttgctcttagttaaatataattgaggaaaatgtactgagtagcttaaaatatataatatattatgagccacattgataattttgatggagaaattttgagggtgatggtgagtttgattgagtagagattattatttttttccttttttaagatttaatttttaagaatacaaatgctaagtgccacctaattaagtctatcaaaaaaatagctctctatctgcaatgtagaacaagataatagcaaatggagaaggaattaacaagaaaaacacaagtcttgttgtggtagatgatcatgatgactaaagtaacactgagtgattgttatttttttctttagatgatatgagtggatttcaaattctatctgtacagtagagtatccatactaattttctatttcttttgctgacccttatgtggtcttagggttttttggtgaccctgtatcttttgtatatggcatttgtttattttgcttgctttgagtgtttgtggttctgcttctttctctctgccaagtttgcta

SEQ ID NO: 175354 - DNA, 593 bp, Cannabis indica
actaaaaactttataagatcagaattaaaaatcttaatgatctccaaaattttttattttctgatttctgataaagtgaacatatagtattttattctccttaaattccttgtagcttatttggctgcataccgaaagttccttatatggttacttaaatatctatccaacattattaatatgtatattaagtacaaatacatacatgcttgagcatatattagattccaatataaattaagaatcttataatttttatattctaaggttgctttaaagacaatgacttagacaatttattttctttagctacaagcctttcgcctggtatagtatctttcatgccaaaagttttaaaaactttattgatatacctcttttgttataattcaagaacatatcttgaattccgaatacaaaatgggcatatcatcagtggcaagtaattttttttacctaatataataccaggatcatattcttactcccactgaacctatgatatatacacaatcatcaaaagattttatctcaaaaagccaaatgagaatatttaatgaaaaattgtgtaatcattgacgagaagcgtactt

SEQ ID NO: 175355 - DNA, 578 bp, Cannabis indica
atatatattggcccccataaatttctgagttggattcgtcattgtaatttacttcaaacaaagttacaaattatatcaccatggaagactatgatcaaacacacatagttcttcattacaacccctccaaacactctttctttctttctaatctcattttgtttcactagcttccaccccaaaaatagttggaatagacttctatttataggaacattgtcttctgtaatgtcacattattagtaagcatatcaacaacattgtcttgtgtgctgactttcttggcttgtatttctccttatgttgctatgtcattgatgaaatagtatttcatgtctatgtgtttagcccttttatgaagcatagaattttttattaggtgcaaggcagttatcacaaaatattgagtcaaacccttgagctagagtatttctttgtaaagcttctactgctatatatttagcttcagtggttgaaaaaagcaacaattttttgccatattagtattctaactcactcacatacacaaaacaccaaaccacgtaagagactttcttgtgtgtatatttgtctgtcat

SEQ ID NO: 175356 - DNA, 715 bp, Cannabis indica
gtttttatcataatggagaatatgaagtagtagaatatcaattgttctctaataaagttttttagaagaaggtatagggaaatgatataaaaaacaaagaacttttataaagtggaagaaagtttaagttctgcattgtgcttttgtgaaaggcaagaattgaaccaagtctttaaatgcatgtcttgggatccaaagtagaatataatcacatttcctttctttgattattattgatttattatggtacatcttgcttaagatggaggtagtctagctgttctctttaacatattacatcacatcacacaccaaatgggctagaaaccaagtccacaatgactctattctgaatccattttgtcaagtcaatatatgcaaaagcctaaacttaataaatttaagtacatgaataagatttattttttaccacattcaattaattgaatgtccaagaatatattttctctgtgatcacacaacctgcaccaatcaagaacagaaaacagaaaaataaataaaaatataaatgaaaattacatgtaaaatataaatataaataaaaataaataatatatatattggcccccataaatttctgagttggattcgtcattgtaatttacttcacaataatggtttgtgagctttttttaatttgagaaaagcaatacaatcagttgtctaagtgttgagatcaaacaaagttacaaat

SEQ ID NO: 175357 - DNA, 1524 bp, Cannabis indica
  modified_base (672)..(672): a, c, t, g, unknown or other
ttttctctgtgatcacacaacctgcaccaatcaagaacagaaaacagaaaaataaataaaaatataaatgaaaattacatgtaaaatataaatataaataaaaataaataatatatatattggcccccataaatttctgagttggattcgtcattgtaatttacttcacaataatggtttgtgagcttttttttaatttgagaaaagcaatacaatcagttgtctaagtgttgagatcaaacaaagttacaaattatatcaccatggaagactatgatcaaacacacatagttcttcattacaacccctccaaacactctttctttctttctaatctcattttgtttcactagcttccaccccaaaaatagttggaatagacttctatttataggaacattgtcttctgtaatgtcacattattagtaagcatatcaacaacattgtcttgtgtgctgactttcttggcttgtatttctccttatgttgctatgtcattgataaaatagcatttcatgtttatgtgtttagcccttttatgaagcatagaatttttgattaggtgcaaggcagttgtcacaaaatatgtctacattttttggtattgaaatcaagttcatgagtcaaacccttgagctagagtgtttctttgaaagcttctactgctatatntttagcttcagtggttgaaaaagctaactatttttttgcatattatattttcttactctactgtactaccacatacacaaaacaccaaaccagtaagagactttcttgtgtctatatttgctgcataatcattgtcaacatagtcatactacacttctgtttgttgatcagactctttaccaaatacaagtcctagatgtgttttagggcactaagtttgagataacttgaagtgtggagctagactagacacttttgtagccttatccatcttaaacttctccatgaatttcttcacatgcttcttctggtgcagcttaattgtccctggatatggtccctctatttcaataccaagtacactattgtctttgccaagacctttcatgtcaaacccgtatttacgccttttaacttgtcgatttccctttttgcatttaccaacaattaaaatatcatcaacatataacaacaagtatatgttgttgtttaggtaaacacagaggtcaaaattgcttttgacaaaactaattttagtaatgaatttgtcaaactttttgttctattgtctaggtgcatgtttaaggccatacagaaacttcttaagtagacaaacttgtcctgaattgccactttcaaacccttcaggttggctcataaaaatatattcttcaagtgagccgtgtaaaaatgtagttcttacatccatttgttctacatcaagcctattcttagcagccttggccaatattactcttattgaggtttactttaccaatggaataaatagacatgtataatttatgcccttttttgagtgaatctctttgctacaagcctatccttgtatct

SEQ ID NO: 175358 - DNA, 534 bp, Cannabis indica
actcggtggatgccacgaccctaagcacacattagcacctacagaccatgccggaatttttttcgacctaagtttggctttgttttgttttattttcttttttctttgagtttaacttttggtatgcatccaaaaaatcctatgtggcaatgcaagccttgatttttcgttgcttgtggactcggtggatgtcacgaccctatgcacacatggagcgcctacagaccatgggggagtattttttttttaccaagttctactttgttttgttatgttttttttgtttcttgagtttaactttggttttcatccataaaaatcaaatgtgcccatgcaagccacaattttccgttgcctgtggactcgatggatgccacgaccctatgcacacatgggcgcctacaaaccatacagaagattttttttttttgacaaagttaggctttgttttattctttttcttcttttcttgagtttaattttaggttttcatccaaataaatcctatgtggccatgcaacgcacggttttttc

SEQ ID NO: 175359 - DNA, 709 bp, Cannabis indica
attctttgactaaaattgtttttactccctatttttgattgtcttttgttttacttttattttaactttttttggtatttgttgtgtttaatatcttcttcaagtaattgttaatatattgtatatcaataacttttccttttttttcttttttcctttcactttttatttttaccaaagttttttatttttatttttcgaggaattcttttttcaccaagatttatggtgctatgatgtagatgaggaatagtaggtaagaaactttggcatatgaaaaataactaaatacattacagtttcataatgaatgaacactgcaaaataattgaaatgttatacacaacttaatttatagaataagtaataaattatagataaagtaatatcatcatcattagaaagagtcgtatatataatttgtaatcataatattctatcaaaaaaaaaaatgtaaatcttaatagatataattcaatgtttttaagtgtgttttccatatatattagaaaaaagtgctttacatataatttcttaatgttaatttcgtattttctttaagatgtgacaaagttttttcttttcttcaactatatagtaaactagtaaataatttggattttgccgttgttgttttagaaaaatgtaaattattcatataagataaattatttcttttattaaatgatattttctatgtgagacatta

SEQ ID NO: 175360 - DNA, 543 bp, Cannabis indica
tattttttaattgtcgaaaatattcataaatgtaaataatatggatcattaagtgaaaaataatgtgattacaaattttgttaaatctggtttgaagataaaaggaagtgattgaatgaattgcccaaaaaaaaaatccgtacgtactttttttttcttttttttttaaaaaaaaaatatggattgcccctacaaacaaacttttgaaccaaaatcttaacttagaacctattctgtattcttgaatgtacccttttgtttggtacttattcttttatctatatttttttaaagggaaattcgacactaaaatgtattcacctattgtaacacctaattattgtcccccattagtagccaaccaaccccaactaaaccaactcccccataaaaaagaaaaattttaaaaaacacaatatggagccagtactacattctgtgcacaaattcacgattttccatatttcctagtatgggaggacacaaagcttagatagtcatcatatctgattttaaggaggtttgctggtaagaggcaaaaaa

SEQ ID NO: 175361 - DNA, 611 bp, Cannabis indica
ttattttgttatccctattatctcctttaaaaaggttgtggttttatatattgaattggtcttggcttggcctaatcatgcaagatattttctcaccttcaaatttcatgccggataaaatgcgcaaaaagagggatgggagaaaaaaaaattaatactttacaaaatttattttgaatttcaatcaatatgcaaatgaatctcatgttctgcattgcaaaatgcaagattattaagaatatgcagataaattgataaaaacattaatcttgatggagatgcggggtatcgatccccgtacctctcgcatgctaagcgagcgctctaccatctgagctacatccccgttattgactaatgaagtctaactttaattcctataataaagtgaaacagaaaaactgtaatagattgataaaatgaagtctaacttttgttactatattgttacaaaaaagaaaaaaaaaaaaactttagttactataataaagtgaaacagaaaaactgtacttgtttatagggaagggagcaccaaattataaaagtatttgtttattaaaatggtaaaggatattcccttgtacatgtcaaattttgcaaatacgatttta

SEQ ID NO: 175362 - DNA, 537 bp, Cannabis indica
ttattattattattattaatttgctaaataacatttttttaagacgacaaagataataatattaacattaaaattatataaacaccgaatcaattcacttatctcagtctcaggtcgtctcttaacgttttttttttagggattttgtcgccctgaactttgatatgtaccgaattatatacctgaacttttaaggtcattgaaaatgcctctaaactattgagattgttggatttaaggacttttttctaattttagtaaaaaagtctaacatagatgaaagttcagggggcataatttcgtgcatgtcaaagttcgaaaggtatgatttagtagatatcaaagtctggggaacatggtttagtacataaacaatcattgaaatagtaaaattgaataaaattaaacaaaagtccttaaatctaacaatctcaatagttcaaggggcattttcaatggccttaaaagttcaaggggcatgatttagtacatgtaaaagttcaaagggcaaaaatcctaattagcttttttttttta

SEQ ID NO: 175363 - DNA, 639 bp, Cannabis indica
attttttttctttatattaattttgatgatgcttagccaatatcttcgatactcgtaatgacaacaattttgaatacagtgtctattaaaagtgagataaagtgacaacaaatttgaaggactataagtgagatatgatgataataatgaatttgaatgtagtagcgctacaagtgagatatgatgattaaaacaacctttaatatagtagcaattacaagttagatacagtgataacaacggcttaaacttctttttttttttcaatttacataactaaaatgtagtttttgcctcaaatatattgtaatttatcacattaagataaaaatttgtgatttacagtgtttaacatttttaataaacacattcaagaattatagttctttctatttctgttagtaataaagatttttaatttcaattatttacacaaacatagaaattagatatttatttatgtttattgaatcaatcaactaaataaataacgtgttttgatttttttaatgagtttttttttatataaatttacataaaaaataaaaaattatttaaattaacaagatttaacagattattcaaaatagttataatttataatttaaatttcataataaatatcaactaaaaatatct

SEQ ID NO: 175364 - DNA, 803 bp, Cannabis indica
gtcgataccccacatcatcgactgatgccattgagatgcaaagaaacgaaatgagaaaaaacaagaatgaaacgaaaaaaaatagatcgatctcaaatcacaaatccatttcccacgcaaaaaacttgcaaaaattgaaatactaataacaaaatagagagaaatagaaaagaatgatgtgtgtgtgagagaatttgttgcatcatcgtttggagcgagaacgagagaaagagagagagatagtgagagaaagggagaccatatctgctggcaacattgcttggggtggtgcggtcttagccgaagctcctccaacatggtggagtaggagtggggcacaactagaacgaaatagagacagagaaagagggagggagatgagctagagagagaagaaggggttggctgacaatgtttagggttagagtatagtttatgtgtttatgtattagggtttatgtgtgtaaataagcttttaaattgggtttttttgtcagctcattagtgccagtttagaagtaatactaataagcatataaatatcgattctaaactgacacttaagagccaagtaatttttcagcgtcgattttataaattttgtcaatctaaggaccgatgcctcaaaataaggatggtcaattactcaaaggtacttttagtgcaactatttgaaaaagaaaactcccaaattcatgagattctctctttacaaaaaaaaaaaattcatgagattcttatagatctattagtgtatcacattcacacaaatataaatttcacattccaaattgctaataaaa

SEQ ID NO: 175365 - DNA, 667 bp, Cannabis indica
cttgaagaataagaaagctaataagaattttgatagaggttctataagcataaaattcgttcaccccccttacacatgaaaataaagggtagtttatagatatgtatgtggatgagggcatatcccttacccacctagggtttcatattcaacacgttacactggccagtactataacattaccatctgaccgttgcctggtaggaggccttctcatcgtgtggtgtacgactgctgtaaaggcaactcatgggactaaggacacgtctcgcctaaaggtttcactttgtaaagttggtgtctagataagtcgtttgacaaaaaaggagctacagaggtacgtgcgcgcattaccaaggtctgatgcagggaacaagatctgatctggttaaagaagatatgtaactatccccctaagctctaggtaagacatacacgaataggttccaagaacatctggctagagctttcctgaatcaaactaacctggagcactcatagcttttgatccttcttaatagtaaatttaataatgggaaatcccagactcatttccatcctcgctgacagggagagcctctgggtaacttttggtaaatagcacatttcgtgacatcgaaaggcgaaaggtatacactaaccatgccttatctgatgtttcatcctc

SEQ ID NO: 175366 - DNA, 734 bp, Cannabis indica
gtttaactaaaataaaaaaaaataaaaaaaaaaaaaataaaaaaaaaaaaaaaccttgatgacttttgatgatagctagtagttactttttttctttaaactcaatgatagtagtattactagtatttataaaattatttttttagtgactcataaaattgattggtactgtatattatattttgtttgagtttaaaaatttaatttatttcattaataaaaaaactaaaagttatatatactatttttttttatagaaacctacctaaatggttcaacaaaattaacttgtttaaaatattatatgtttttttttttaaatatgaacaataaaatactttttagtaactcttgaaagtgaatggcataacatatttaattttgttgattttaaaatttagttaattaaaaaagaagaaactaatactttttattatttttttattttggtcatgcggaaaatatatacgcttatcaaaatagttatcttaaaaagtatattctaattatataatatttttaagttaaataattaagtttgaaaacatttatttaattttcttgataaaaaaaataaaagaaagtgaaacagtaaatgtcatttaattaagaggaaaagacaaaaaattaaaaaataaaaaattaaataagaaagtcaagttattgttaggaagaaaaaaaaaaaagcagactacagttgaaaaaacgaagaagaaaagaaaagagttgaaagg

SEQ ID NO: 175367 - DNA, 547 bp, Cannabis indica
tttggatcatgcttggtattgtgagatccatccattctctatctcagttgatggtgaagtacaacacaagtaccatttttttactgtttaatgtttatggtcataggataggattcacaagttgatgtttaattcttttctttgtcttctttttcaggataaggtgctcttttctctgagcaaatacgaacttgttatgaagttgtgcaaattttctgtgtaggcctttgaaaatgtttttagtgcggttggcccctagtactgagtctggacagatctaattggtatttcaggtttattttctttcaacaatcgaaatgctactactgactgtttgatccaagaaacgataaattaaaaattcatcaaaatttgctgcttctggggcagccgacctttttcccttttctttctaaattatttcttgtgtaaataatgtaaattgaaaattcatagtagaaaaatgttgtgtggacgatggattcacggattcttcttctatgttgtgtaacattattattcattcttcaaagtaaagaaaaaaaaa

SEQ ID NO: 175368 - DNA, 803 bp, Cannabis indica
aaaaaaaaaaaacttaggttgtggatagggaacccatgatatgaaaattttaggtagtgtgggaagggcttcagaaacaagtgaccattaaacttacatacttttttcaagttagtactttaacttaaggttatgtttagaagttcaaattctgcggggaatgaaaaaagtgtgccaaaaaaaaacatgtttggtaaaaaagaaaaattgtatgaaaaaataaattgataattaagcttacttataattttatttttcttgtttggtttttttgataattttgaaaggggagaaaataaattcaatataaaataaataattacattctagatatttttatttttcaatttaatatcaatattaattcatttctaaagtaataattaaaattaacatattattaatatagggtaagtctataatacaactcctttcggtagaccttctatatgttttcgacaatttaagaaagatttttagtctaatttttttcataaccgtatacgttatagttatttatgatcacttgtaaatttttaaaaaattctgaatatacctaaaataatgtttagatattttgttgcacacgctactgttttttcttatatacgtgataaataactgtttaaactttatttttggtactgtaaaatattcagaattttaaaaaaaattacaagtgactctaaataattacaacttacgcgattcaaaaaaaaaattaactaaattttttttgttgaataccaaaacaaacaagagttctaccaaataatctttttaagtagtagagatgaacttac

SEQ ID NO: 175369 - DNA, 722 bp, Cannabis indica
tttatattttttttatgtaataattacaaattattataataaataaactttcatcaattaattataatataacttaaaagaattatatgatcttttgccttcctataatgttgagtaacaactatcaactaaaggataatttatgaaataattatatgtctcatatgaaaaacgttttcatgcaacagctaaaggatagcattaaattccaattcacaaaaataaaaaaaaaaaaaaaaaaaaaaaaaaaaaagcattgaatcagttcataataattcataattattatataaaatagtaacagttgaagttttcgaatacactattattgtatgaaaaaataacagctaagtaatttattaaataatgtcataataatacctcattattgtatattttcattttttttccctttccgtaaagattattttatttctcttttgttgacattcgctggcacaccattaaaataattgtgaaagactactttgattaaatagctttaactctattttaaaatttcttgtatttctgcttttatggactttttttctctccaatctctcatatttatgattttatttacttttctcctataataataatatagctttaaggaattatatgattctttatttgtttatagtattgagtaacaactatcagtttcttataaatcacattaaatactattcaatataatgagtgataattcatgtaaa

SEQ ID NO: 175370 - DNA, 632 bp, Cannabis indica
ttgtggtttggggcaccgtagctcacctttcactaaaaagaaggtggtgcagccaggttaagaagttgctaacatcggctacccctgaccttcagcgtcccattttccgcaaatacattgatttattcattgcgcacaatcggacgctaaccttgaactgacccttcaactgactaggcgcttgggaattcttaaaccgcctcctttttcttttgagacctacttcctccttgctttcgacttagtccttgcttgaacctttgcgacgactatggcaccttttggcttgtactcctctttgacctttggaacggaggggcacggactccactaaagagccagattggataagtgctttgacaacgatgaatttggccttttgcgatcgagctacctaggaacagttgttgcctacataaactaccccccagaccagggaagaaagtctcagatctatgtagttctcggccccttttcgttaaatcagttcctgtactgttttttctatgaatgaaagtaagtaaagtaatctggtggaagaggcccacctcaccactcccctactcatttcatcgggcgtgatagggataggggacgtactctattagatggcccacgcttcctccccccga

SEQ ID NO: 175371 - DNA, 1155 bp, Cannabis indica
ccattattccgtgggtgtaaggacccaatggaggcttgaagcggggacgttacaaataatattcatataaatatatatatatatgagtattatttctcaatgtaagcaagtcggttctgagttgaaatgacctataagtaaattttcttttaggtctttattataaaaacaaatgatatttttaaaaattattaaaaaaatatgtatatttttttattttttttatttagacctctaaaataagtgggccctaggtgcaagtttagcccgcctatatctaggacagaccctaaatgtaagtattacccatgatttttttaaaaaaataattataattaaatattaattttaaaaatattaatatgtataacattaatatcaatgtaagaattgatgttaagaattttttttcccataagttgtttttgttttcttatgaatgattttttctttatgcataatttttttgtctaatatagttttggggctttttttatttttacattttaaaataattttgtttttttttttttttttctagaattctacatagaaacacctattgcaactagcggagcaacttaaatcgcaaccaaaaatcgtatagtaacccatatagaaactactggagaaattactttagaaactcaaaccataaatttaaaaaaaaagttaaaaaatagtatatggagtaatttccttatatttttttgggtgaattatttcttgggaaattactctacatatcataattttttaatgggtaaataccattttggaccctgtgttttgcaaaagttacagattggaccttgtattttgttaaatgacaaaatagaccctgtattttctaaaatagtaaaataggaccctgagcttaatttttgataatttttttttaattgcaaccaacttgaagacaatgcttaatacgaacagatacaaaaaatgtaaacagttttgtcatagcacttttagatcatattataattaaactttattttgaaaaaaatcaattcagggtcctatttgtactattttagaaaatacagggtccattttgtcatttaacaaaacacagggtccaattggtaacttttgtgtaaacagagggtccaaaatagtaatttacccttttttaaatttttttttttc

SEQ ID NO: 175372 - DNA, 630 bp, Cannabis indica
aaatcttctgccctttcttcactaatttcattgccctttccaaatctgagatttttttgtagttttttactattacaaagttgctctcagttttttctttcttttttttttttttttggactgttgagttaagttgattgaaatggttttagcttgagctatatttatagaccaaacaaaaaagtaaattttgtattttgcaaaaattattaattgaaacttttataataaaataaattttatattttttaaaatgaaaaaatatgactcttaacttaatttttaaaaaatttattattttaatgtaatctttaacacgaatatataaaatgtaactagttttgtcttaacattttcagattaaattattattaagtgttttatttgtacaattttagaaaatatagtattcattttgttatttaacaaaataaaaaatccaattaataatttttacaaaatacaaaattcaaaataatattataaaaaaaacctcaaaactaacgctactaacccttagcatttccttttattcctctttccctttcgttgtataggtttcaattagcataaccacaaaagtaatcgataagccaaattaaacgaaacgttggaaattatgttaatgac

SEQ ID NO: 175373 - DNA, 742 bp, Cannabis indica
aacaaattcctctaggcttgtgagaattttccaacactcacaactttaattctaccattgagctcaatatattcctatatcaaaccagcaagcagaacaccattcaaacattaatttggtaagttatgcaaggtaaatgaaatattcctattccacttacaaagaaaagcctaaatctaggttttcacttgcttcattcaagttgaactactagatctagcccttccggtacaagatctagcttagcaaattgttattcatggccaagaaacaacaatcaattaaaatgaaactcacttgaatgaacaaaggcaaacaaatgctaaagtaagcttaaaatttaatcatacccaacttagaagttcatagtcattcaagcctcaaaagtttagctcatattcaagtaagaagataaaatccaagctaaaaacaaatcatccatggctgctgcccaaatttacaatctcaagaagtttttgatactaagtacaaacaacaataaaagagagtaaagaaagaaaactaaagagaaggggtaaaagaaaagtcaaacactaaggcttggtcccctcttctttcttctttttagtactccctgctgtgaattaaaatttctccagaaaaatggcagctgccccgtactggataatgaatatgatgatcatgtacttccctctctttctctttttgttgttgggtttttagggtacaaacttcataccccaaaatagaaccccaaact

SEQ ID NO: 175374 - DNA, 797 bp, Cannabis indica
tcggccctgagttgaaataggccataagcgaaaaaaaaataaaatttgagcccttactataaagataaatagtatttttaaaaattattaaaacaatatgtatatatttaaaaagtattttttttattttagacccttaaaatgagtgggccctaggcgcgggcctagtccgcctatgcctaaggtcggcattgtggactaagtgggacggtcaccccacatgaaattaagacaggttataagctatttgagtttcaaatttaaatgatttttttgggaggcctttatgcaaatacttttctagtcaaataaagttatttggtgtaatggtaaagatttttttttttcaatttaagaaggtgataagttctactctccataattttattttaatttttgaaaaaaaactaaaagtattattattgaaatttgaacaatgaaaatatcattgcataaaagtcacttcacttatatgttattaaaaaaagttaatttttaagtatgattatgtattaatttacattttattatatctaattcaatacatttttctaaataaaaatttagaagtatctaggaaaaattaatgtaggccccacttcaatttttgtttccaccttggcacttgctcataattaaaggattcatccattaaaagaaattaaaaacaaatcactgatcaaaaatagataacatgtcttgctctaaaacttaaaaaaaactaaataaataaacattttaaagaaaaaaaagtttacttaatgctaatagtaattttactgtaactattgagattg

SEQ ID NO: 175375 - DNA, 913 bp, Cannabis indica
ataatcttcgtgacttgctccaccgttgttttcaggtggctttggctttgtagttgttccgggcgatgcggccgctaccggtttaatgatgaagactcatgtatttttgttgtcagagatcagacgcttatgacaatgaaagaaaaaaaatcaaagatttaattttgtttattatttcaggaaaataatttttgaatcatttgttaatcaacaaagatccatggttggtgttgtgtctttgtgttagatttgagcttcattaaagtttaagaggtgatacttctaatgtcatatacatataagaagtgatactacgcaaaagattgtcttatttccaatatatttgtatttctaattcttgctttggtttgtcccttctgcaatttcatagagaaattcatttctgtattcactttacagatctagttttttcattcaataaatatcttttatttagaaaaaaaaaataatttaaaatatacaaaaatttttatttttctctaaatttataaattagaattaattacaaaaatagtagaaaaaaagaaaataaaaaaactctaaaaaagaaaacaataagaaaagaaaaagaagaagggtgaaaagtacttgtgaaatagatctaaactagtaaacatcccgcgcttcgcgacagagatatataaaatatttttaaattatatatacaaaataaattgtgtattttaattaaaaataattacttagtaaaattatattaaaattttaactttactattaaaaaatttgtgacgtaaatatttaaaatattaaatttcttactaataaatatcggaattcaaaaaatagtagcataaatcttcattcatggtttaatttttattctgatgttatgttaatttgaagttgtgatgatatttttttaaatatgatt

SEQ ID NO: 175376 - DNA, 646 bp, Cannabis indica
gagagagagagagtaataaaacttggaaaaataggcaataggtgctagtgctgtatcttatttcctaagcttttactcaaaattctatgtcgattaattatttaaatatatgtgtgttatagagtgaagatcaaggggaagtgtgtagaacatactaggttattttgtctcttcttatattaattgtactccaataaaaagttacgtaattttcaaaaatatatatacgtttatacttgtggttggttatgatgcatgatcgtatatatatatatatatatatatatatgttttaattattatattattattagtataattaagtaagtttatataattttaaaataattttaaagtattactaattaattgagacagcagttaacatggtagggacgctctttatatatacaatgatgagattcatccaaaaggacattaacatgtgttagcaagttactaggttgtgggtatttttcacgtggagattatatgcgaccttcgcagcactaacatttttaaaagcagttctctaaacacggttacttaaaataattttgttttgttttgttttgtttattgttgttattatattttctagataatattatatatttatacaatgcacttttcgtcgatttggtac

SEQ ID NO: 175377 - DNA, 628 bp, Cannabis indica
tgacatgcctggctgttggacttctgagccgtaggatatgtttgtacttttagaaaaacgatttagatcgttcatattttcttcacgcgaataactattttgagtataaatactcttaaaagctactatttaccacttttttcccatttcacattttcattcacttgagtttaagctttcttgagagtaaagttcagtgagagattctagtagtgaatgaactcaaactttgacgatctcctccaaatcgtcttctactaaaccatccacccttagtgatcgattgttttcaaatgagtgacttggtgaatctcaattttaactttgaaatcgatttgttgattgccttagccaaccgtcttcgtgaaagccgtgctcgcttgcgcttcccaaaactgacaaagatcagttgggagcctttcgtcttctctgccaggtatgggattgtttggtttctcgcctttaattgtgtttatgaattcattataaaagttagggtttgcgtatttttctttgagttgaaattaggatttcttaggcctagtgaccaatacttctggtagttttaaatgtgatgaaccttattgccttcgatttttagtcttaggaattttactggtaaaaatag

SEQ ID NO: 175378 - DNA, 607 bp, Cannabis indica
tttcaaattgatttttgtgtgagagagaaaacaatctcttctttgttccattcttctttttctttgttttggtgcagattcactattgttatagaggtgaaactgagttgcagatcatgttcatgttctgaacaaatttaaagagaatttagttatctgctaataaaagaatcttgagtgaagagtcaagaaatttgatttgtatgttttaagggattaaaaaccgatttacttgagtgagtaccttgacaatgtattttgttgatttgatttgaaaattgaaaaattgtaaaaataacattgaattcagcctagaatttgtttctaggataggagaaccttgtaatttatttgtgtgattttacctttgttaatgaattgttcttaaagattcaagaaaatgaattagatttaagtatagtactttcagagagaaagagagaacaacattctaatcctgtcgacttgttcgattagaaggaagcaaaaacaacactctcataagatgatctcacagatgaaaggggcttcccattctaatgttgttggaagcataataaaagatttctatattagtttcttatggcatagaatttctgaggagaat

SEQ ID NO: 175379 - DNA, 551 bp, Cannabis indica
caagtccacctctgccttcaaggggttggatagagccacgcttttggaagcaacaatttagcccgggagtaagtgtaggccaacttgagaccgccctgcacaaggaaaaacttcagcatatggagctaagtgtggaaagttaaagggaagtatcaaaaaaaagaagtaccctggcgaactcctttaggactccgcccacctacacatccagagatgagtcactatcagcaccagccagttgctcactgacctcgggaacgagccggttcatataatgggccaccatctccttgccctttttggcctctagaagcacgggcaaaggtggagttggtgcctgcacccgctcaggattactcttgaccagtttagacccagccgttggtggtccagactccttggacttggtagacttgggggtagaggggtttgcagcagtcagctcctcagaaagatcaatgacctctctagaaggtctcttttccgtaaaagaggacccctcaccgcccttggacttcttggtcggaggagaggcgctagagcttccgccc

SEQ ID NO: 175380 - DNA, 691 bp, Cannabis indica
agagatcataaagagtcaatgatcttcagctctctgagtagtagtagtagtatatatatatataagaccatattctaaaggtcaaagcttcttaagtcatctctaagaatcctgtaactgaaagcaggaggtccattcaagttgaaccgatttctttcatcaacttctgaagcagaacataaactaggaatgaaactccgagaagggcttctctgttttcttctcttccaactcataatcatcaagaacttgaaacttggccaagagttgttaccgcgcttagaattagtagtagaagccatatctagaatctggggtcctctgggcttgcgtgaatttccatggcggtctacctcaagcttggtgaaatactcaatttccttcctcacaagtgatcctacagtgcctctagtacctattgctattggagctgttgaacccatttctaatttctcctccttattttttttttggttctagagaacttggtggttgagatttttggctttatatattgcaattttttttttaagtttttaattttattattgaagatgacgtatgaggcttcaaggagaagaaagtggtggtccaaggtctttttcttgagggtgatttcaagttcaatgtgtgctttggacataaagcatctcctttagttatttccttctttttttttttttagttacgt

SEQ ID NO: 175381 - DNA, 540 bp, Cannabis indica
aattagagtgacattgaaagctatatataaaatttgcttacctctaactgtggctgaaaataagcaaatcaaaatgagagtaactagaaggcggttgtggcagagagcaagaagagccatatttctttatataatatatggttggttaagtgtagacaattaatataataagcttatgatataagaaccgtagtttgtttttctctatagctggttaatttggttatctagttgtgagaataacatcttgtatttatagtagatggattagtatgttttggtagagtgagaagaagatatagttagacatgtggtgcaatagacagagcccatgtagtaattttacgtgagcaatgatctaacacattcaacatcaatgtcttgctcttgtctagcttgaaaatgatggcaatgtgcttcgacatgatctccaacgaactccattcaaccactagatgatcaaaacacatttcttctttatttatttgataatttatatatatatattattataatatatagtcacttcctttcatctat

SEQ ID NO: 175382 - DNA, 625 bp, Cannabis indica
aataattttttctatttgggagttgacgaacaatcaaaattactattagtctttattagtgtcaaatagaaatggggcgtggccaagtggtaaggcaacgggttttggtcccgctattcggaggttcgaatccttccgtcccagagcatattcgtctgcacacccaacccattatgtgatgatattattacatacttaaaccatacttcactcatattatatcttatatttagtattatatactatttttttttttatcagaataaaggttactttttgaacaaccttctgtttaagagtagattattttcagagtctaatattgaaaaaatggaattcttagtcttaattagtcctctctgaaaatgaaaattgagttcaaataacacgcaaatgcaaatggaatacaattcaattcattttggatctctaaatattttaaaatagtaaatattataggtataatagaatttcgttcagtaacaattgtttagtctatctgatacattcaggatcccatattatttcgattctgcttttttcaattagtataaaaaaaacctaaaaagaaatttggattttttttaattctatattaaagttacttgacgatgccaaaaataac

SEQ ID NO: 175383 - DNA, 684 bp, Cannabis indica
ctgtaggcaggggtgcttgacactaagtacaatgcagatgagagctttttaagaatttcttaagtgtgatcatgccttgcatctatttcatcatttgaaatgcttccagaaaccataaaggcagatatgatctttaaatctatacacacacacacacaaatatttttactgtcaatctaatctagaatttgatatcttttgaccttagggggaaatagtgaaagatctcctaccttgaaaagccatcgacaccaacaaactcaaagtcataagcatatgttgcataagaatcacaacaaataatatgttgaacattctcatactgcggatctggaaagaaatgaccatactgcagaaaattgagatatttaataagaaacagtacaacgttaaatataaatgcaaatgacgttgcaatactcacagaatgactgggcttaaattcagtagatgtcctcattcgcaatatacaattaaacgcatatggtcgacttagcattcgatacctgagaggacacataaaggcttgattgaattattcactttaaaataaagatctaaagatgttaagcttaagggcttcatccaaaggcaaaataattctgcttcgataccatacttacatgtcctgaggaagggttgaatcatcagtgcttgaatagaaaaacaacgatcctccacttt

SEQ ID NO: 175384 - DNA, 575 bp, Cannabis indica
gactttgaaactaactaaggcatcaaagatagtcagtttaactgagattatgcttatcaaaacaaaagaaacccaaagtctaattggaataaacaaatcatcatgtagatagaaaaacaattatattttcatttgaacattattacaaacacttggtggccacttaatgatcaatacacagcaaatatgtttaaaatcactactaatgaagtgggtggaggaacgacgacagacagggacacccttaacccaattaccacaaaaattctcctcagtactcgaattgggtagataacatttacagaaagagagagaatgtaccctttgatggactgagattctaagaagagatggagtcgagaaggaaagggatgcgctatagaaggagagaggagagaattgagagttttgttaggttgttttttttatttttatttttagggtaaagactttttaggtattgtcaaatagggtagtgttcgtaacttcgtagtttgcggtttaggttattttttaaaccaaattgtatatagttattgtaatttctaaaactgtaaccacactcaaatcgtgaa

SEQ ID NO: 175385 - DNA, 850 bp, Cannabis indica
gtctcacaattataaatgtacattgtatatgtatattgtgaaaaatataaatgtaagtacttttatttttctttctataaaatttacaaacaatttgaaacgaaaaaaaaaaaaaaatcattttagacttgaactctctattttgttaaataataaaataaatcttgtatttttcaaaatagtaaaaataggaactgagcttaatttttggtaattttttttaatataacaacttgaagacaattcctaacacttttagattagattattattaaattttattttgacaaaaaatcagttcagagttttatttataccatttttaaaaatacaggatcaattttgttatataacaaaacagaggatccaattaataatttttgtaaaatacaaaattcaaaatggtatttaccaaaaaaaaaattgattgataatttcattaataatttttattaactcaagcctcaatgggatgtgccgtttagtggaataaggttttcaaacaattaaatggatgatgcgttaatgccaacattttaagtttattacaataacatgtatcgatgtaattattaatgaaattagaacaaaaggtgtgacaattagtatatttatttatgaatgatatgatgttgttaataagcttacttggattgtaatgaccaaaaatcacatcagcaatggcagccaccacccagccctcaccaggataaccccacccaaagaatgctagtaatcttatcatcatttttggcaaaagaaatgtcaaaacctcctccagacattataacaagaataactggccctttggcagcccttgctctgtgttattggagttgctgctgtcccg

SEQ ID NO: 175386 - DNA, 966 bp, Cannabis indica
gagttttccattgttacgatgcatactttaaagcatcttcaacacatatattaaatttagtgtcacactattattatatttagcgtcaaaaaactatttctgcttcaactataacactaaatattacactaaaattgtatccagatcgtatttttagtgaggatgatgttcctcctgattttctttctattgtaatggttgaatcttcttattaataaagttaccattttccttacaaaaaaaaaatattacacttaaaaaatattatttattattttattaattttttagaaagtacttctacaatgtattttttcaaataaaaaaattacacgtgcaactgcaatagacagtttaaaccttatttttaacgtgttaagtccctacaacaaacacaaaacagtgtttcagccagtgaaatatccttttctactagatatagtgcacaaaggctaatctggatgaatgaatactactagtactaatagacatgtttttatgaactcactttcgtttttcctcaaaagattttacagatttttatgctaatttaaaaaaaaaaaaccaatgcatgatagggacatatttatcatttgaaggaaagaaaaaaatactatttgatttttttgggttttgccttttctttttttaagaaaaaatatacatatatattatatcaagtaataagcaattaaagactgcagaattaaagccacaattttttttttagagaaacaggtgatgacgaccagtggcgtgtggtgaataacaaataataggaaaatgaagtaaagggtaaagacaaattagtaactgaggttgacccaaaatggaaatagctatagctattgcctctatccctaaaccacaaataatgatgtaactgatttgaatcctcatttattacctatccaaaattccatgcatttattgttcaaggaatattgaaacaagagcattataatc

SEQ ID NO: 175387 - DNA, 908 bp, Cannabis indica
  modified_base (834)..(834): a, c, t, g, unknown or other
gaagattttctaccccgcctgactatgaagagcttcgagtctatcgggagaggtctctcgagcctccgcagcttcgtctagagccgggcgtccagccgtgtaggaagactcaccctagccactatagcgaccccacccccaaccctagcggagaagccccctcccatccacttccccttttcccgttgtgcccaaaacgacccggtttactgagcccttttcttgattccctcacccaatctcatgagaagcaagcccagcaggccctgccttaacctgtccccagacagccagccctcaccaggctgctggcattgctaaatgctccgccacgaagcccgaatacgacagatgcggaagtggctaagtcggaggaagaaagtagttgggcaattgtatgcacgagggtacattattagtattctgagaattggcaacatttacagaaaggggaagaaaaggggtaggaatacacttttttaggtgtagctatacttaagtagtcggcctaaccttcggttcccgtaaccaagtttttctttctcactccttaccttatgtactttttcttacttaatccatacttttttactttttctgaagtgtggggcaaagggcgccctctacctctacttctaactaaaggcgaactgccggcattgcaagctaatagagagccccccgcccgtttgagtcgttgcgagccggaaagcgtaccggcagtttgagtcgcgaaagggccgcttgcttaattatttatataatttttattataaatatatatagtatagatataaacaaagaaaatctttttttttgttcattcctgggaanaggaagaagcagatagagcaaaggcctcctctttcgtccgctcttcccgaagtgagcgaattgcatgtagagat

SEQ ID NO: 175388 - DNA, 691 bp, Cannabis indica
atccaaattaataaccttcttatgtttaataatattattagtactattgtccaaatacctaaccctatcatgagtaacattattgcccttcaaattattttccttcacaaaaaaattccaaccccttatgaagacgaaatttcgactactcttctgacaacaatactgaaattttcatgacctcattaacttgtcataaaaaaatagctcaatattttcaactccacttttggtaatagtctctacattattattaccgttagtggagttattacaactttttatagttggtaatattcaaattaagattttaatttgtgttatgattgtcttgtaattcactaatctaactttttagggatgacaagtctactgagcttacaaaacttgttaaaaatgtacacaaaaagcccaagtatatatagccatggagaataattatttgggcttgagctttatcataagcccaatatcagtacatgaggcagcccagcccaatatcataagcccaaacttattttattaggctttcatatctttttttatttttaactaaaccatctcttggatctgtttaattttaccatctcaaagttttcttgtatgataatcagtttccttaattatatgcgaaaaatacatcttttttgtatctattaatcaaaaatactttcatattatttttttattt

SEQ ID NO: 175389 - DNA, 514 bp, Cannabis indica
tttattttgtattatttgttactgatggaagatattctctaaagaaatctatacatctatttcatttttttgccttttgtatgaaatgagaaattgtaatcaaacattcttgatcttatattgtttatcggttcaaattcaactttgtacatttttaactttgaaatattactttcttgacattgaaaatacattttttttatttgttacatgtgttgttgctatcaatatctttccctctaaaagatatagaaaagaaaaatatagtacattgaatcaatcatggagatgtactctaagaaaaaaaaagaaattgatcacggagtgttttacaaactaacttcttcttaaatatattttacacataataagttaataacaatcaatgtttaattattaatttttttgttacaaaaaaaatgtttaatcattaatttttgggttaatgttattttagttggtattttacaaaatatattgactaaattttctgttttgtttaatgataaaaata

SEQ ID NO: 175390 - DNA, 799 bp, Cannabis indica
agcagtggagagagaaggtcatacccttttaacacgtaaaaatcgttaggaaggttgaattgatcatgtcatgctagagaatatatgttgatgtaggtttctctgatgagtcttggagcatgccacacgagaaaagggatgaagatgcttagagtgcaactatttattttgtcttaaactgtgacggaacaagtgacttctcttacaaaataacatagaatattcagggagaatatatgtgctcttagaccaagatgatagagaagttacctatgctaggattgttttggagaagaatggggaatcaacaggttgttgacactcaatgttgtgttcttaactggtgtacttgtttccctttgttgtactaacctctggtctttactttttgtagataatatgagtttcttggctgccatggcttcatgtttgaacttgaagaggaggattctgacactagaggagactaagcctccggtaagggaagtagtgcaaggcattcttgctgcctctactgcttcaaagaagaaggtcaaaaagaggagtaaaactgctaattttgctcttcctactcatgattctggtacggagaagttaaacactgttggtaccaatgagaggactccgattgacctctctctagatgattctaaacatgctgctccaaactcgagtttggacttagtggagcaatttcttgagcaaggctcctagcttcttgcaaatagtaaaggccctaattggtgctagggctaagaatattccatttcaccggttggttaacacaaaggctccacac

SEQ ID NO: 175391 - DNA, 518 bp, Cannabis indica
tacgcacgaagcgtagatctattttcttaatatatatatatatatatagtatatatatatataaaggaaaaacacaaagaaaatgaggtgacatctcctgtgaattttgattttttttttcctcatttttcactattttttttaatattttttatgcttttagtaatatgagagctattttcaaaaagtccaaaaaatcccacatggtttaaaaattattgtaggtgatatacttttacattatatatatcacttatttttttgttttgatttgttccaaaattagtatttacaaccaagtatataaaatcctatagtaaaaccatacaaccaagtaaaatcctgtagtaaattaaaacagtcaaatggcaagtgtttaaagaaaacttattcaactgcttcctgaaacaccatcagcattttttcaaattcagcttcttccaagttctccaattcctctctttattaaatgaattcggctataatagaaaaaagtagttagtataatatagattaac

SEQ ID NO: 175392 - DNA, 843 bp, Cannabis indica
catgtattgttctttgagggttccttgctaaatgtatctttttatttatttatagatagatatgatattttgcaaagattatccaaattaagccaaaagtgacaaaataatttcaaatagccaattttgaattttgttttacattaaagccttattttgataaatcttgtaaaaatgacatctttatttgtaaaaaaggacctatgtttagactttttgaatgaagtctagaaagagttgtaattggggtttgagagagagttgcatttgtgattaggggtgttaattggattacatttaatggatttgaactcaactgatccaatctaattatttattggatattaaattttatcatccgatctaatctaattgaattaagtcatctaatctaataaatgtattagattggatcgatattaaatattgaatgcattaattgattttctattagattggattatatccatcctatctattttagctacaatttaaattgatttcatttaaatatatatatatactactaaaaagctacgtgccagacacgtatactaaattttatgctagttttttttctatgttattttaaagtgatataattaaaaattaaagaaaaaatattattagttattatgtgaaattattattatgtatataggaagaaatcacaaattaattaatcttataatcttaactttaatcaaatagggtttataaaagacataaatatttaaatagggttagaaatacggtaattaaagaaaatctagaaccctattttttttttttttgatttaatgagatttattttattatatataaataaaaagtgacccatga

SEQ ID NO: 175393 - DNA, 569 bp, Cannabis indica
ggtatttataccgcaaattactcttaataaaaatataaaaaataaaaactaattaaatatttatagattaggtcgtttaataattcattatattattttggcatgctatgctagactaggcatgttaatttgttgagatacgtggctagctatatatatagttagttggctgactcatatagaaagcgaggtgggacagtcgcttttttacaaaaaagtagattaagcaaaaaatgtatatgcattttagtaattagttataacatgtatttataataaaaaataatatttatatgcataatattaattttggtgtaatgattaaactagataacatataagataaatattaagggttcaattttttttgttttgagtttacttttattcatgtgccttaccaaataaaaattatattttttcttttaaatttacttttattaacctgcttactaaataaaaattgcgtcccctccttcactttaaatcttgtgtctgcattaatttaatactaattattagttactattagaataatatatatactaattaattatatatttttttaa

SEQ ID NO: 175394 - DNA, 891 bp, Cannabis indica
tgccgaaacaagttaagaatgcatcagtatatctattttaatgggatgtcatttttagaatcagccttaaataataataatgaaaaaattaatttgtaatgatgattgactgtttgatttgacggttattgggacaaacaaaatactataacctccctctctttctcctgaccctctttctcactcttatttttcatttctctgcatttgaaatggtagttctctctcaatttatctcttcttcatcaacaaaaaaaaataaaaaaaaacattttgtgtcatttttacaattatgttccactgactcatattcattaaggttgttcatacttcagaatgagttgaaattcggcacgtaaagttagttcttgaaagacttggttgtgatggggaaactcttgaatgttgatatatgttatttttttttttttttttttttgctgatgagttactttaaatgagattgagtagctgatgatgagtttaatctgtttcaaatgtgaataaatttagagagtataatattttgttattgaatatttggttggttgcttatcatatatcttactataagtgttgtaagtgaggctatagactttgtttatttttggacatccaagctagatttatcgtatgatacttatagtactagtttgtacttcaaatctgatcataaacttgctttttcttattatgttgaagtagatgaatgagaatttaataatactattgctcgtaaatgatcttttgtaagtcacgttctctaataattgattaaataccaaacttatttagttttgtcaaatgatttatttttacagatatagttgtacaatctggtgtaattgatttggtggttgttagaagagagtgttagttatatttttgtat

SEQ ID NO: 175395 - DNA, 572 bp, Cannabis indica
gtaataaaatagtaatataatatatagggtgattctacaatgcacccccttaaaagggatgtactgatgcacccttaacttgtttcggcatccagaagaattttttagtctaattttttttcatattcatgtacgttatagctatttaagatatcctacaaaattttaaaaaattcggaataatttacaatatagaaaataatgttcaaacagtctattttacacgcgtataaaataaaatagtcacgcgtgcaacacactgtttgaacatagttttcggcgtgttaaacttttctaaatttcttaaaattttgcaggatgtcttaaataactataacgtacatgaccatgagaaaaaatttgactaaaaaattatttcggatgctaaaacagataggggtgcatcaatatatccattttaaggggtgcattgtagaattttcctataataatttactacattaatatctttatatattaaaaatgtctaatttttggtttaacgatttttttttttttatttagcattaacttaacaaactaacaaactgtgcttaaggactattatattc

SEQ ID NO: 175396 - DNA, 1254 bp, Cannabis indica
gggcagtacaaagtaatgaaattgggcttgggcagtacaaagttgttttgccgtgtcccagtaaaatgtaaagtttggtcaaaaagcagtatttttgtaaaattcccaagggttatgctctatatatgtgattaaggtagaatatgggtgtggccatagtgatgagagaataaaagagaagtgtttattatatcctttctttgttttttttttttttgtgtgtacatcaagaggcttatgaaatcaacaataattcatacttcatagcttttaaagattcaacaataaaaattaaagtaggtatgtttactaatttaaaaattaatgcaagttctaaaataaaatgtttgatcttaaatgatatgagcatgtgtttgtattaataatgattggtaatagcatgctgatgtagtaacttttaacattatattcatcaataagttgtcgttttacctaaatggttgaagttttctcctcagcaataaaaatggttgatgttccataacacaaaggtcagttcccttctgtctctattgaagttccaaaagcatttaatgcactcacacggtcacaccaaatctatttcaatttcataaattaacaaattcccagacctaaaagaataataataataataataataataataataataataataataaatatggttgatcgtttatagccatatttgtgtttaaactgtacatattaattaaatatccaagtttcttcaatggataatacaaagtaaattatggtcatggtgagagaattacagccaaattcgtggctggccattgtatcttaaatggtcttcacggttttatttgttgatgcattaaatgcaacgtcatctccttggattcttttgtcggtgttatattctttggttattaattagttacttccacaataattaattaataagccctaaattaattttgaagatttacggggtaatgtgtatttctagacttaatccgtaggttgctttttcgtttacggtactccaaatggtatttctactctattttacaaattttacatcaccaataaatagaattttgcttagtttattattattgtatatattttttgaagagtaatttaagttgcattagttttaaggaacctaagaaaaaggtacctcgaattcagaattcactgtgggattagtttagtgatatataagttttatgtaacactactagtttaggtatgctaattttaatttaattgtgcaactctttc

SEQ ID NO: 175397 - DNA, 638 bp, Cannabis indica
atataattgtacaaacataatattaataagcacatatatacttcaatccatatgcaagaagtcactgtaaacattgcaaacagacattaatattaaatatttatctaataagacaatcatatattattataaaataatcatttcaaggttgatccttaataaataaccatttttaatattgtttgtccaataagacaatcatttccaatattaattgtttgtctaataagacaacaattgcatgtaaacctttcgacgattttaagtagagttataactcttttttttacatacacatccacacagggtcggtcctggacatagacgggctaggcccgtacctaaagcccaccccatcgcagggccgaaaaacaaccatataaactcttcatcatcttcaaaaaaaaaataataaataagcccagtcagtttttactctcagcctaagccagcccaactaaacattaaatggagtggtctaactctaacttacactccaaaaggtgtaagtccaagcaaagaagaaaaaagaattacataaaaaaaaattacatatacaaaaaaacttattttttaattattaaaattgtcttaggctcactttttttcaagtccgagctgcattcacatacacatac

SEQ ID NO: 175398 - DNA, 674 bp, Cannabis indica
ggaggctcatcaccaagcccacctgctttccattggccaccacactttccatttccaagtccaccttctggagacacatcaccaagcccccctgctgctggaggttcaccttccttccattggccacgctttccattcccaagcccaccttccggagggtcatcaccaagtcctcccggaggatcaccttctttccaatggcccccacattttccatttacctagtccaccttcaggaggatcatcaccaagcactccagcattccagtttccaattccgagaattccagggttcccgggcacaccaccaagggctaattcagctcctccaactaaggcttaattattaattggtttaagtttatatttcgtttcttatttatttatgtttattttcgtttgtcagatgcttttagttgtcgttagtctgttaatgttatcattagttcacatactgtgaactattatcaataaagttatttttagtaatatctataaatgtctgcgcatacgtacttatattataatatatatatatatatatatatatatatagatattaatcatcaatacataccttaaacccaagaaaagaaaaggttacgtaccataatgaaacctataaatactacaatcttaagagtaatacagaaactcaaacaagtatcgattac

SEQ ID NO: 175399 - DNA, 530 bp, Cannabis indica
taaaaaatgctaaaaaataatatgaaagatagataaataaaaattatatactgtttttttttgaaggaaataaaaattatatttttaaataatgtaaaagttgttgacactcttaaaaaatatcactattaaagatgcgagagcggaacagacttaattttcttgcttacaaaaatggctctagttttaaagatatttaaagatatagtaagagggaggaccggtcctaaggtattaggcgaaattaaattttggggccactatatatatagtttaactattatgaaaataatagttttagtgcttaatgtaatggtaaaatttaaaaactttaccattgaatattttttaaaaattaaaagtagatgttgggaattgatcccaagatctcttacactatgtttggtagagggggagatgggtcaatggagaggggtgtagtgagagtgatggaaggagagactaaatcacttgtttggcaagaggggtagaaggaggaagaggagagatagagggagacgattctccct

SEQ ID NO: 175400 - DNA, 916 bp, Cannabis indica
catttgttggtatgttcatgagacatacattaataaaattgctgtgagtgttgtcctaatggatttcttaacttggtaaataaatcaattcaattcacttcaattttgggtctagtacatgagaataattaattgcacaaacaaatagctcaaattaatgaaaaagcaacaaacaagtctaaagttttagacaaagcaaaagcacaaatggaaatcacttaaactatgaagaaagatgttaatacaatatttaagaatagtattattattagtataattaaatatgaaatcttatacatttttatttaatagttaatataaaaattattaattatcatctacatatcaagcattgttggacaatattgatatcaggaccgaccatgagttgaaatgggtcatagaaaaaaaattggactcttactataaagataaatagtaattttaaaaagtatttttttaattaggcccctaaaatgagtgggccctaggcacgggcttagcccgcctatgcctagggtcgaccctgttgataagtcggctatgagattgggttgaccttaggaaaaaaattattaggtcatttatttaaaaattatgtgaaattatgaaaagctactaaaatgtatgtataattgtaaatagaaaacatttttttacctctgagttgggtgggtcttaggcacaggcctagcccaccttagcttaaacccagctctaataaaaaatattaagtggtatcagtaatgtgcaatattattttaaatgcgatattactattaatacaatttaatatcaaaatttctacatattttaattctagagaagagtatgtaagacttatattcaattacaaacctaatagtttcaaaattaatagttgatgtagcaattaagcattctttttcgttattta

SEQ ID NO: 175401 - DNA, 625 bp, Cannabis indica
aaaaaaaaaaaaaaaaaagaccaaaaccttcaaatttagacataaaaatatgacttaacagagataaaaaaaaaaggaatcgtataggatttttttcaaaaataaaatatattaactcatattatattaaaattaatattaaaaagaggggtaatctactcatacttgaaaattaggtccaccaaagtcaaagatagggtactaagtgtgtagaatttgtaaataaagggcaccaagtagttaattttagaaacataaggtactaaacttgtatcttgataaaacacaaggtactaaatatatgtttattgtttgtaaataaataaattaaaaatattaaaataaggtcctccaccgttccatctagcgaccggcgagaacaccctgatctgtcacgccaccatatcgacatggtcggtttcgcagcgacgttttcagtcaaagaatagcgagtggaaattaacaaggtcctcttcctgttgcataacttgtgttttggatccttgattcggagtctgaggttggtcctacgctcaatcctaattagagtccagatcttttacgggcttctcgacgaagtcaaaaaaaaacgaatcactcaaggtctctctttcctttcccaagg

SEQ ID NO: 175402 - DNA, 543 bp, Cannabis indica
gctgccatcgcagtatctatgtccgagaaactttacatcatgcaggaaaggcagggaaagtagttttcggaagacagatccagccctcctatcggcactataaccggagtctccagctggatagagtcgttgcatctaacgaccttgtctaaggtagtcgtcgtaactgtgttgggtcatcgctccttcgtctagcccctgtacctctcgccctgctctgtttgtgcatggcaagacggtgggggatctgagcctggggatatcgacgattaaccttgcccttagagggtgggctcgccaaatctgagcttttaaggatgaacattggtgcaacatgcatcttagggcttcacagacccatttttgccacccatcttgagtaaattgaggcatcaagtctctttctgggcaacaccatggatctgcacatttgtggcctttggccagacctcgactaacaatcaggaggcctttcttcttttcttccacgaaccttctttcagatggccttgcattggtaaccgccgtgcatatctctttctt

SEQ ID NO: 175403 - DNA, 550 bp, Cannabis indica
gcccccatgagaattgaatgtaattatactgtgtaattactaaaaacttttcatattaaacattagctattaaaaaatattatttttccatgtaattactaactattttgccaaacaagatattatgaattcatatgtaatttctacctcatatccaaacacaccttgcattttaaaatatatgtaattactaaactctgtaattaccaccctagtaattaccctacctagtatttacacgattacttccaaacacacccttagtatttttgtcctttgaattttaacatgtacaaattatgttcctaaacttgtaaagtcgttaaaatcttccttgaattattgagattgttaaatttaaagattttttttttaattataataaagaaagtctaacatggatgaaagtttagtggcttgatttagtacatgtcaaagatcgagagacatgatttgctagatagtaaagtccaaatagcatgatttagtacacaatcacaaaattagtaaaaatttaataaaatgttcttaaaatctaataatctcaata

SEQ ID NO: 175404 - DNA, 512 bp, Cannabis indica
tcaagatttcacatcaatttagtgagaactaggatatagtttcaagaaaattcttcaaaaaataaaattaaaaccgcttattattaacttccaaagtttgatgacgaataacaatattcattttattgttgcccattattttgcaattcagataaaccaatttaccaaaactcttcccttaatatagaaataaaaatgaagggaataagaataagaattgaatggaatcaaatttaaaatataaataaaaaaatattaatgttttcctcatctttcatttcaaaatgtccacaaaagcggtgaaaaagtcatttaattgaaattacatttcaatacttcgaaatgcaaccaaacaaaaaaataaaataaaaattaattccaatactttgaaatgcaaccaaataaaaaaaattaattccaaatactttaaaaatgcaaccaaataaaaaaaaacttaattactattctatttcattacttacaatcaaatgcaatcttagtttaaatccgtg

SEQ ID NO: 175405 - DNA, 564 bp, Cannabis indica
cccctcatcaccgccggtccatcaaaatcgaaatggcgaaggtaagttcgacccttttgtttttgttattattgtttgagtgattatgacttagagtattgattttagaatttgatttgaacgaatttgttagatttagggctcgatttaggctaagatctccgatttggggaaatcggttttgggaagacaatggtccgatgggaccccgatgcattggctttgaattttaaaaaaaattaatctgggtcccgaccccccgatgggttcgatggtctttactgtaaagggttcgatttggggtaattttttttttaattttttggctatgggtccgatgttccgattgtaggcccgatgggtcgccatcggacccgttagtttttttttttttggttttattaattattaattatttagttattgttttaggtattattttatttttaatgatttattaagtattttttaattaattattgttttattaccaattaataattatttatttattattaattattaattattcttttagtattaattattaattattgttttaat

SEQ ID NO: 175406 - DNA, 555 bp, Cannabis indica
tgaaaatagactattgtttaatataactgttgaataaacttttaacaaaataaaagaggaacgatattaccgaatgaaaaattttgggttgagttgcggattaagtcattctctttaagacgttcgcagcactgcccaagagtgtgcaagcagtcggaatttgtcggtcgtccctaggataaaataacccagtcgtcgcactgtattagaactccaatgcactgtagagccccgtcgaatacactcaaataaatttgataccgtatggaattttagtatttatgaaaactgtattttttttataagaaaagatgtattcttcccatcagtttaatcacattatatagacgaatggattggaaaatcataacggaaagaagaacgttttacttgaatacgtggggtggagttagtcttgtaacgtagttccacttaattgatcgactagtaatcagtttaataccctaacccaaccggcccggatcagcctagtgatatgtataccaaagattcaattcgcttcacctagatctttcatgtcaaaaatttttcaca

SEQ ID NO: 175407 - DNA, 601 bp, Cannabis indica
atttcattcattgtcgtcgccattttaattagttttatttttgttaaaattaaaagttagagcaataaatacacaccattgtgtagcaaaaaaatattataaatttctaacactcgttttagtattttgttatgtaattaattaagtgatcatattttatataattcaagaaaatagttttaaaaattatcattaattaatcgtaacgccatttataaaatgtattaaacactatcagggctggccttgaggtaattgagttaggcgtgagcctcgggtcctcgaacgctcagggctccaaaattatgaaaaaaaaatatatattaatatataaataaaatattaaataagaaataaatataacaaaaattatctcgtgtagaggtaaaaagttttgggtgattctacaatgcaccccccttaaaagggatgtattgatgcattcttaacttatttcggcattcagaaaaaaatttaaatataattttttttctatattcatgtacgttatagctatttaagatatcctacaaaattttagtagaaattacggtaataatttactaatatagaaaacaaatagttctaaacaagtcgattt

SEQ ID NO: 175408 - DNA, 652 bp, Cannabis indica
ctcatacctaattgtagtatttaataatctagtgtcattcatcatagtatttttaaattgcatttcgtttttccttctttcaagtacttttttttttttttcattttctttcttcatctacgagtagcttgtttcatttgatcatggtttggtgtaaccggttaccataataagaaaatggtatttctcaaataccatttgctttagtgatgcactggtaaccgatgcctctatatattagtttttatacttgtagtaatatggtggtaattggttgccactatatatatcgagatattctttagtaatatggagataactagttactactataaaaataacaaaacctaaaaaaatttataacctaaaccgattgggatagtaactatagttacttaatcaaatttgcgaaaatatcaatcgtggtggcaactggttacttagtgatgagttgcatgtcttttaagatataaattattgtattctccttaagtttaattatggatttaatgtgttctttgtagttttacatgattgagcttaatggatacaaagtattaatttcatggaagtgtttgaagttgggaagcttacttttgcaagtctgaatattgtacctcacttctagacctatagaaaacaacgtgaaata
